United States Patent Application Publication US 2011/0183924 A1 - sequence listing, part 170

SEQ ID NO: 429631 - DNA, 2430 bp, Homo sapiens
  misc_feature (1419)..(1419): n is a, c, g, or t
tgcaacgactctcttaatcttccaccgctacagccagatagcagcaatgaagaaaatgatgctagatgggagacaaaattagatgaagtcgttacatcggagggaaagactaagcccctcataccagagatgtgttttatttatagtgaagaaaatatagaatattctccacccaatgccttccttgaagaggatggaacaagtctccttatttcctgtgcaaagtgctgcgtacgggttcatgcaagttgttatggtattccttctcatgagatctgtgatggatggctgtgtgcccggtgcaaaagaaatgcgtggacagcagaatgctgtctctgcaatttgagaggaggtgctcttaagcaaacgaagaacaataggtgggcccatgtcatgtgcgccgttgcggtcccagaagttcgattcactaatgtcccagaaaggacacaaatagatgtaggcagaatacctttacagaggttaaaattgaaatgcatcttctgcagacaccgggttaagagggtctctggagcctgcatccagtgttcctacggtcgctgcccggcctccttccatgtcacttgtgcccatgctgctggggtactgatggagcctgatgattggccttatgtggtgaacattacatgctttcgacataaggtcaaccccaacgtgttcacagcacagagtaagcactcaaaaaatgaaagttgtattgctactactacttctgctgctgctgctggtgctacaatcttatgtgaactgggccacaagtccaaggcttgcgagaaggtcatttccgtgggtcaaacggtcatcacgaagcatcggaacacccggtattacagttgcagagtgatggctgtgacatcgcagaccttctatgaggtcatgtttgatgatggctcctttagcagagacacatttcctgaggatatcgtgagccgagactgtctgaagctgggcccacctgctgagggagaagtcgtccaagtcaagtggcccgatggcaaactctatggagcaaaatattttggatcaaatattgcccacatgtaccaggttgagtttgaagatggatcccagatagcaatgaagagagaggacatctacactttagatgaagagttacccaagagagtgaaagctcgattttccacagcctctgacatgcgatttgaagacacgttttatggagcagacattatccaaggggagagaaagagacaaagagtgctgagctccaggtttaagaatgaatatgtggccgaccctgtataccgcacttttttgaagagctctttccagaagaagtgccagaagagacagtagtctgcatacatcgctgcaggccacagagcagcttgggttggaagagagaagatgaagggacatccttggggctgtgccgtgagntttgctggcataggtgacagggtgtgtctctgacagtggtaaatcgggtttccagagtttggtcaccaaaaatacaaaatacacccaatgaattggacgcagcaatctgaaatcatctctagtcttgctttcacttgtgagcagttgtcttctatgatcccaaagaagttttctaagtgaaaggaaatactagtgaatcacccacaaggaaaagccactgccacagaggaggcgggtccccttgtgcggcttagggccctgtcaggaaacacacggggacctctctctctagctccagcaggtggcacctcggtacccagcgggtagggcgataatttatatattttccacagtcagggaaggactctcacttatttgtttcaaattgcagtttttataaaacatttttaaaacacaaatggcatgtatgctaatgagatttacccgtgtgctatctgtatttcccttgtacagaacttttacatttttgaatattcctattacttttgattgtgtctgatgggaactgagttgttggcctttgtgaaatgaaatttttggctcttgagaaagaattcttatgaattgttatgcgaattttatatatttaaagagggagatctggggctgttatttttaaacactttttttcataatacatattccgagtagatatttataaaatatatgtttctttcattatgtgtttgtaaaattagagtttaaataaatatgctttgatgcatagttttgaactaatgtaacatgatttttcttttttaaaacagcctgaaaatgtactagtgtttaaaaataaagatttccattttctccaaaaaaaaagaaaaaaaagaaaaaaaaaatttgtgggcgcgccgcgccaaaagttcaagaactcgggggggggccccgtggtatcacattgcctcgctggccaagaaccggcgcaggtgggtcccaaaaaagcgggccgggctcacccagggtggccggaaaagcagaaccccgccg

SEQ ID NO: 429632 - DNA, 1117 bp, Homo sapiens
  misc_feature (1079)..(1079): n is a, c, g, or t
  misc_feature (1089)..(1089): n is a, c, g, or t
  misc_feature (1092)..(1093): n is a, c, g, or t
  misc_feature (1097)..(1097): n is a, c, g, or t
tgcaacgactctcttaatcttccaccgctacagccagatagcagcaatgaagaaaatgatgctagatgggagacaaaattagatgaagtcgttacatcggagggaaagactaagcccctcataccagagatgtgttttatttatagtgaagaaaatatagaatattctccacccaatgccttccttgaagaggatggaacaagtctccttatttcctgtgcaaagtgctgcgtacgggttcatgcaagttgttatggtattccttctcatgagatctgtgatggatggctgtgtgcccggtgcaaaagaaatgcgtggacagcagaatgctgtctctgcaatttgagaggaggtgctcttaagcaaacgaagaacaataggtgggcccatgtcatgtgcgccgttgcggtcccagaagttcgattcactaatgtcccagaaaggacacaaatagatgtaggcagaatacctttacagaggttaaaattgaaatgcatcttctgcagacaccgggttaagagggtctctggagcctgcatccagtgttcctacggtcgctgcccggcctccttccatgtcacttgtgcccatgctgctggggtactgatggagcctgatgattggccttatgtggtgaacattacatgctttcgacataaggtcaaccccaacgtgttcacagcacagagtaagcactcaaaaaatgaaagttgtattgctactactacttctgctgctgctgctggtgctacaatcttatgtgaactgggccacaagtccaaggcttgcgagaaggtcatttccgtgggtcaaacggtcatcacgaagcatcggaacacccggtattacagttgcagagtgatggctgtgacatcgcagaccttctatgaggtcatgtttgatgatggctcctttagcagagacacatttcctgaggatatcgtgagccgagactgtctgaagctgggcccacctgctgagggagaagtcgtccaagtcaagtggcccgatggcaaactctatggagcaaaatattttggatcaaatattgcccacatgtaccaggttgagtttgaagntggtccccanagnnctanccctcagataaacgagagac

SEQ ID NO: 429633 - DNA, 823 bp, Homo sapiens
tgcaacgactctcttaatcttccaccgctacagccagatagcagcaatgaagaaaatgatgctagatgggagacaaaattagatgaagtcgttacatcggagggaaagactaagcccctcataccagagatgtgttttatttatagtgaagaaaatatagaatattctccacccaatgccttccttgaagaggatggaacaagtctccttatttcctgtgcaaagtgctgcgtacgggttcatgcaagttgttatggtattccttctcatgagatctgtgatggatggctgtgtgcccggtgcaaaagaaatgcgtggacagcagaatgctgtctctgcaatttgagaggaggtgctcttaagcaaacgaagaacaataggtgggcccatgtcatgtgcgccgttgcggtcccagaagttcgattcactaatgtcccagaaaggacacaaatagatgtaggcagaatacctttacagaggttaaaattgaaatgcatcttctgcagacaccgggttaagagggtctctggagcctgcatccagtgttcctacggtcgctgcccggcctccttccatgtcacttgtgcccatgctgctggggtactgatggagcctgatgattggccttatgtggtgaacattacatgctttcgacataaggtcaaccccaacgtgggtaagatgtgccctcccttcctcagtgctaagaccgtgtctggattttctcctgttttagactacctcccagacataatgtgctttattctgtaatatgactcattgttgacatgtctagaccgtgagttccttgagggcagggatt

SEQ ID NO: 429634 - DNA, 1481 bp, Homo sapiens
gggtcctgtgcgcgtgcgcagcgaacagctgtcacctagtgcggaacaagtctcccaaatttcccaaatctccctgggccggaggccactgtcttctcttcctcctccaccgagtcgtgctctcgccccaacccgcgcgccagacactgccctaaccatcatggaggtggccgaggtggaaagtcctctgaaccccagctgtaagataatgaccttcagaccctccatggaggagttccgggagttcaacaaataccttgcatacatggagtctaaaggagcccatcgtgcgggtcttgcaaaggtgattcctcctaaggagtggaagccaagacagtgctatgatgacattgataatttgctcattccagcaccaattcagcagatggtcacagggcagtcaggactgttcactcagtacaacatccagaaaaaagcgatgactgtgaaggagttcaggcagctggccaacagtggcaaatattgtactccaagatacttggattacgaagatttggagcgcaagtactggaagaacttaacttttgtggcacctatctatggtgcagatattaatgggagcatatatgatgagggtgtggatgaatggaacatagctcgcctcaatacagtcttggatgtggttgaagaagagtgtggcatttctattgagggtgtaaataccccatatctctattttggcatgtggaagaccacgtttgcatggcacaccgaagacatggacctctatagcattaattatctccactttggagagcccaagtcttggtatgctatacctccggagcatggaaaacgacttgaaagactagctcaaggttttttcccaagcagctcccaagggtgtgatgcatttcttcgccacaagatgacattgatttctccatcagtattgaagaaatatggtattccctttgacaagataacccaggaggctggagaattcatgatcactttcccatatggctaccatgctggttttaatcatggtttcaactgtgcagaatctacaaattttgctactgtcagatggattgactatggaaaagttgccaaattggtaagctatgcctcaaaaataaagcaaaaattaaatgtgtattctggttattttagtaggaaccctacgatcctgtgcagcatttatttattcttcctcactggcgccatgtgcctctcaccacagcaattcacttcaggctcgatacatttattttacatagccaatattaccaattttagctgaatttgtctgttttgagattaatgtggagcaatttaccctgataggtaatttgatgcgacgtgtgtttgctttttatcttgaggcctccagttggtgttttgcaagattttccagtggcatcatgtggctccatgttaggtagactcagatctctccctgtttgcgatcagtttgtggcttagaaaacagcactttacagaagggagtgtctgat

SEQ ID NO: 429635 - DNA, 1427 bp, Homo sapiens
gggtcctgtgcgcgtgcgcagcgaacagctgtcacctagtgcggaacaagtctcccaaatttcccaaatctccctgggccggaggccactgtcttctcttcctcctccaccgagtcgtgctctcgccccaacccgcgcgccagacactgccctaaccatcatggaggtggccgaggtggaaagtcctctgaaccccagctgtaagataatgaccttcagaccctccatggaggagttccgggagttcaacaaataccttgcatacatggagtctaaaggagcccatcgtgcgggtcttgcaaaggtgattcctcctaaggagtggaagccaagacagtgctatgatgacattgataatttgctcattccagcaccaattcagcagatggtcacagggcagtcaggactgttcactcagtacaacatccagaaaaaagcgatgactgtgaaggagttcaggcagctggccaacagtggcaaatattgtactccaagatacttggattacgaagatttggagcgcaagtactggaagaacttaacttttgtggcacctatctatggtgcagatattaatgggagcatatatgatgagggtgtggatgaatggaacatagctcgcctcaatacagtcttggatgtggttgaagaagagtgtggcatttctattgagggtgtaaataccccatatctctattttggcatgtggaagaccacgtttgcatggcacaccgaagacatggacctctatagcattaattatctccactttggagagcccaagtcttggtatgctatacctccggagcatggaaaacgacttgaaagactagctcaaggttttttcccaagcagctcccaagggtgtgatgcatttcttcgccacaagatgacattgatttctccatcagtattgaagaaatatggtattccctttgacaagataacccaggaggctggagaattcatgatcactttcccatatggctaccatgctggttttaatcatggtttcaactgtgcagaatctacaaattttgctactgtcagatggattgactatggaaaagttgccaaattggtaagctatgcctcaaaaataaagcacatttatttattcttcctcactggcgccatgtgcctctcaccacagcaattcacttcaggctcgatacatttattttacatagccaatattaccaattttagctgaatttgtctgttttgagattaatgtggagcaatttaccctgataggtaatttgatgcgacgtgtgtttgctttttatcttgaggcctccagttggtgttttgcaagattttccagtggcatcatgtggctccatgttaggtagactcagatctctccctgtttgcgatcagtttgtggcttagaaaacagcactttacagaagggagtgtctgat

SEQ ID NO: 429636 - DNA, 729 bp, Homo sapiens
gggtcctgtgcgcgtgcgcagcgaacagctgtcacctagtgcggaacaagtctcccaaatttcccaaatctccctgggccggaggccactgtcttctcttcctcctccaccgagtcgtgctctcgccccaacccgcgcgccagacactgccctaaccatcatggaggtggccgaggtggaaagtcctctgaaccccagctgtaagataatgaccttcagaccctccatggaggagttccgggagttcaacaaataccttgcatacatggagtctaaaggagcccatcgtgcgggtcttgcaaaggtgattcctcctaaggagtggaagccaagacagtgctatgatgacattgataatttgctcattccagcaccaattcagcagatggtcacagggcagtcaggactgttcactcagtacaacatccagaaaaaagcgatgactgtgaaggagttcaggcagctggccaacagtggcaaatattgtactccaagatacttggattacgaagatttggagcgcaagtactggaagaacttaacttttgtggcacctatctatggtgcagatattaatgggagcatatatgatgaggtttcttcctgtgcgttgtaacctggcaaatgttcaggcttctgagaagaaggttgagctgatgggtcatccagatcctggcctgaaagttgcatgtctgagtgcttgaaaataaaataaaactcaatcttaag

SEQ ID NO: 429637 - DNA, 853 bp, Homo sapiens
aaaaggatgactttggagctgtaggattgaatgactggcctactgggttttggacgttcatgtatcctagcaggacaaacaggcccggtggtgtcaggagcccaggtctccagctggagggaacgtcaaccctgcagtgggagcaggggcccatcgcacatcctaggcacagatgctaatgcaggcactgcagaccataaaggagaacagcaagaagcccccagcaaacatccacagatggccctggacatcagccacattctgaggaacatgtcatgttctgggagggctaaggcatcaaccttaccctgtaggaattctagtgactatgttgccaccatcttggagctccatgccctcatagtgtaatggcaccagcagatctgcctgtgcacagacttcctgtactacctcactcctgaggggagatgcttctgcgggcctgcgacctggtgctcaactttagacaccatcatcctggagcggcactgcaccctcactagccagggtgttgacgtcctcaaggccaaggccacattcaagactttggacttcattgatgcacttgtgccgagcaagatcctggttggagtaaaacattccatgggaactcgggctgtgagaaatgtcctaaccacctgactgcagaaacatccttatcacatcctgctgggcaaaggcccaacagcctgacttcaggaacatccttatcatcttctactgagcagcaagctatactgtccagagccctccctcccagcgctatgattaccccagcctgtgagcggcagtgggcactgacactaagctggtttccccctccgcagggttttgctagtaataaacctgtgtt

SEQ ID NO: 429638 - DNA, 461 bp, Homo sapiens
gtaagctgggcttggtatccttccctggcttcagaaagaagccaacaaggagcgttttgcagaatgaaacctttgtttccagaagcactgctgactgtaagtggttgccgtttgtggcagtgagcattttgtccattctgaggttggattggtttctccttttggccttgccctgccctacagaccataaaggagaacagcaagaagcccccagcaaacatccacagatggccctggacatcagccacattctgagaaacatccttatcacatcctgctgggcaaaggcccaacagcctgacttcaggaacatccttatcatcttctactgagcagcaagctatactgtccagagccctccctcccagcgctatgattaccccagcctgtgagcggcagtgggcactgacactaagctggtttccccctccgcagggttttgctagtaataaacctgtgtt

SEQ ID NO: 429639 - DNA, 1308 bp, Homo sapiens
gtaagctgggcttggtatccttccctggcttcagaaagaagccaacaaggagcgttttgcagaatgaaacctttgtttccagaagcactgctgactgtaagtggttgccgtttgtggcagtgagcattttgtccattctgaggttggattggtttctccttttggccttgccctgccctacagaccataaaggagaacagcaagaagcccccagcaaacatccacagatggccctggacatcagccacattctgaggaacatgtcatgttctgggagggctaaggcatcaagtaaggcctgtggggctggaggatcccaggcaaggtggggcaatccagagccatgggggcttcccatgggaattgggaggtcccaaggcagagtcagaggttccacaggaggagtcagagagtcaccaagggctctcctggcccagggagcagtcaacaccatggactgaacacttgctgggctccaacccttgggccaggctgcccatgtggggccaggaggcagctcagagtgggaggcagagagagaagtgtgctcagagggcacctgtatctggatgtaatgtggtcctgagactctggctgggaagtgcttccagggtatcatatgtgttatgcagctacttcctctccccagccttaccctgtaggaattctagtgactatgttgccaccatcttggagctccatgccctcatagtgtaatggcaccagcagatctgcctgtgcacagacttcctgtactacctcactcctgaggggagatgcttctgcgggcctgcgacctggtgctcaactttagacaccatcatcctggagcggcactgcaccctcactagccagggtgttgacgtcctcaaggccaaggccacattcaagactttggacttcattgatgcacttgtgccgagcaagcttatctgatcttctgggatctctactaggatgctggcagcccagccagctggtctggccctggacgtgccttcaggggctgggtatgcttcatgacctgtgttttgatcctggttggagtaaaacattccatgggaactcgggctgtgagaaatgtcctaaccacctgactgcagaaacatccttatcacatcctgctgggcaaaggcccaacagcctgacttcaggaacatccttatcatcttctactgagcagcaagctatactgtccagagccctccctcccagcgctatgattaccccagcctgtgagcggcagtgggcactgacactaagctggtttccccctccgcagggttttgctagtaataaacctgtgtt

SEQ ID NO: 429640 - DNA, 1914 bp, Homo sapiens
gtaagctgggcttggtatccttccctggcttcagaaagaagccaacaaggagcgttttgcagaatgaaacctttgtttccagaagcactgctgactgtaagtggttgccgtttgtggcagtgagcattttgtccattctgaggttggattggtttctccttttggccttgccctgccctacagaccataaaggagaacagcaagaagcccccagcaaacatccacagatggccctggacatcagccacattctgaggaacatgtcatgttctgggagggctaaggcatcaagtaaggcctgtggggctggaggatcccaggcaaggtggggcaatccagagccatgggggcttcccatgggaattgggaggtcccaaggcagagtcagaggttccacaggaggagtcagagagtcaccaagggctctcctggcccagggagcagtcaacaccatggactgaacacttgctgggctccaacccttgggccaggctgcccatgtggggccaggaggcagctcagagtgggaggcagagagagaagtgtgctcagagggcacctgtatctggatgtaatgtggtcctgagactctggctgggaagtgcttccagggtatcatatgtgttatgcagctacttcctctccccagccttaccctgtaggaattctagtgactatgttgccaccatcttggagctccatgccctcatagtgtaatggcaccagcagatctgcctgtgcacagacttcctgtactacctcactcctgaggggagatgcttctgcgggcctgcgacctggtgctcaactttagacaccatcatcctggagcggcactgcaccctcactagccagggtgttgacgtcctcaaggccaaggccacattcaagactttggacttcattgatgcacttgtgccgagcaagcttatctgatcttctgggatctctactaggatgctggcagcccagccagctggtctggccctggacgtgccttcaggggctgggtatgcttcatgacctgtgttttggtgagtggtaagcagcacctgcttctagcttcactgttgggccagatttcatccccaccgtggctcttcattgcggctgctttctgctccctccatggaccctgcgtggaattgccccatgtttctgtttgggcaccactgaggaaggaagcatgaaggacgcacaggtcaggccattctgttgcccacctcgtgctgggtctttactcctgggatggcttcaggggcagctccttttccatgcctccccccacccaacatctctcaggttgctgctcaaaggtcacctcttggaggggtctctccctgtcactgtgtttggaacagctccctcagtttctttctagctcatctcactctggtaatgtctttcattaccaccaccatctgacctggtcttacgacctgttagcttccttcatcagacaagagcaccaggatggcaggggcctcatctgtcctgttcctcctgtggcctgggtcctagcaccatgtctggtacagtgtaggtgctcaagggaagtttactttatagaactgtctacctgggagaggttactgttagtctaagctgcactatttggtaaaccccttgctgttttgcagatcctggttggagtaaaacattccatgggaactcgggctgtgagaaatgtcctaaccacctgactgcagaaacatccttatcacatcctgctgggcaaaggcccaacagcctgacttcaggaacatccttatcatcttctactgagcagcaagctatactgtccagagccctccctcccagcgctatgattaccccagcctgtgagcggcagtgggcactgacactaagctggtttccccctccgcagggttttgctagtaataaacctgtgtt

SEQ ID NO: 429641 - DNA, 1475 bp, Homo sapiens
gtaagctgggcttggtatccttccctggcttcagaaagaagccaacaaggagcgttttgcagaatgaaacctttgtttccagaagcactgctgactgtaagtggttgccgtttgtggcagtgagcattttgtccattctgaggttggattggtttctccttttggccttgccctgccctacagaccataaaggagaacagcaagaagcccccagcaaacatccacagatggccctggacatcagccacattctgaggaacatgtcatgttctgggagggctaaggcatcaagtaaggcctgtggggctggaggatcccaggcaaggtggggcaatccagagccatgggggcttcccatgggaattgggaggtcccaaggcagagtcagaggttccacaggaggagtcagagagtcaccaagggctctcctggcccagggagcagtcaacaccatggactgaacacttgctgggctccaacccttgggccaggctgcccatgtggggccaggaggcagctcagagtgggaggcagagagagaagtgtgctcagagggcacctgtatctggatgtaatgtggtcctgagactctggctgggaagtgcttccagggtatcatatgtgttatgcagctacttcctctccccagccttaccctgtaggaattctagtgactatgttgccaccatcttggagctccatgccctcatagtgtaatggcaccagcagatctgcctgtgcacagacttcctgtactacctcactcctgaggggagatgcttctgcgggcctgcgacctggtgctcaactttagacaccatcatcctggagcggcactgcaccctcactagccagggtgttgacgtcctcaaggccaaggccacattcaagactttggacttcattgatgcacttgtgccgagcaagcttatctgatcttctgggatctctactaggatgctggcagcccagccagctggtctggccctggacgtgccttcaggggctgggtatgcttcatgacctgtgttttggtgagtggtaagcagcacctgcttctagcttcactgttgggccagatttcatccccaccgtggctcttcattgcggctgctttctgctccctccatggaccctgcgtggaattgccccatgtttctgtttgggcaccactgaggaaggaagcatgaaggacgcacagatcctggttggagtaaaacattccatgggaactcgggctgtgagaaatgtcctaaccacctgactgcagaaacatccttatcacatcctgctgggcaaaggcccaacagcctgacttcaggaacatccttatcatcttctactgagcagcaagctatactgtccagagccctccctcccagcgctatgattaccccagcctgtgagcggcagtgggcactgacactaagctggtttccccctccgcagggttttgctagtaataaacctgtgtt

SEQ ID NO: 429642 - DNA, 1201 bp, Homo sapiens
gtaagctgggcttggtatccttccctggcttcagaaagaagccaacaaggagcgttttgcagaatgaaacctttgtttccagaagcactgctgactgtaagtggttgccgtttgtggcagtgagcattttgtccattctgaggttggattggtttctccttttggccttgccctgccctacagaccataaaggagaacagcaagaagcccccagcaaacatccacagatggccctggacatcagccacattctgaggaacatgtcatgttctgggagggctaaggcatcaagtaaggcctgtggggctggaggatcccaggcaaggtggggcaatccagagccatgggggcttcccatgggaattgggaggtcccaaggcagagtcagaggttccacaggaggagtcagagagtcaccaagggctctcctggcccagggagcagtcaacaccatggactgaacacttgctgggctccaacccttgggccaggctgcccatgtggggccaggaggcagctcagagtgggaggcagagagagaagtgtgctcagagggcacctgtatctggatgtaatgtggtcctgagactctggctgggaagtgcttccagggtatcatatgtgttatgcagctacttcctctccccagccttaccctgtaggaattctagtgactatgttgccaccatcttggagctccatgccctcatagtgtaatggcaccagcagatctgcctgtgcacagacttcctgtactacctcactcctgaggggagatgcttctgcgggcctgcgacctggtgctcaactttagacaccatcatcctggagcggcactgcaccctcactagccagggtgttgacgtcctcaaggccaaggccacattcaagactttggacttcattgatgcacttgtgccgagcaagatcctggttggagtaaaacattccatgggaactcgggctgtgagaaatgtcctaaccacctgactgcagaaacatccttatcacatcctgctgggcaaaggcccaacagcctgacttcaggaacatccttatcatcttctactgagcagcaagctatactgtccagagccctccctcccagcgctatgattaccccagcctgtgagcggcagtgggcactgacactaagctggtttccccctccgcagggttttgctagtaataaacctgtgtt

SEQ ID NO: 429643 - DNA, 469 bp, Homo sapiens
aaacctaacctctttgaggaaccacagagcccaagactggaagccttcagaatcttctggcccccaaccctccctggggacccctgtggcctgtctcaccagagcactcttctgtctgtagatgtctcagctgctctacaagggagtcccatttcaggtgtggggctgggcatggtcactcctgctggatgtctagaaggtggaaactaaggacctaggaaaatgccagatacagcctttccaccctcatccagagcaggacaaacaggcccggtggtgtcaggagcccaggtctccagctggagggaacgtcaaccctgcagtgggagcaggggcccatcgcacatcctaggcacagatgctaatgcaggcactgcaggtaagctgggcttggtatccttccctggcttcagaaagaagccaacaaggagcgttttgcagaatgaaacctttgtttccagaagcactg

SEQ ID NO: 429644 - DNA, 851 bp, Homo sapiens
ggtggcaggtgagcggcgggcggggatggcggagcaatgggagctggacgaggaaggcattcgccgcctgggggcgctgacgctggagcagccggagacaggttcttgctatgttgcccaggctggacttgaacttctggactcaagcaatcctgtctcagcctccccagtaactgagactacagaactggtggagtctctttcattgcagggatcttatgctggcaaaatccattccattggtgatgccttcagaaattttaaaaatctccgatccttagatttatcaaggaatttgatcactagccttaagggaatccagtatttatgttcactccaagacctgaatttatattataacaacattccttcattagtggaagtgtcccgtctacaaccgttacccttcctcaaagaactggatttgagacttaatcctgttgtaaggaaagatacagattataggctctttgctgtatatacactacaaactctggagaaattagatgaccgaactgtacgtgaaggtgagagaaaagctgccaagctgcattttagtcagttgggcaacagtgaaaattttcttttagaggtggaaaaaagctctagggagaagacaatgaaaaactgtgtaacaggtgagagctctgcatcaaaagtcagtgctaatgttgacagcaggattgaaatggactcaaacaaaggactttttattcccttccccaaccgggaaataaaggattccctaagtacttctgcaactcagggcaatggtacacgtgatcagaaattagacaccttcccactggggacacagggtaatgtattcactctcctgctgatctgttgac

SEQ ID NO: 429645 - DNA, 2405 bp, Homo sapiens
ggtggcaggtgagcggcgggcggggatggcggagcaatgggagctggacgaggaaggcattcgccgcctgggggcgctgacgctggagcagccggaactggtggagtctctttcattgcagggatcttatgctggcaaaatccattccattggtgatgccttcagaaattttaaaaatctccgatccttagatttatcaaggaatttgatcactagccttaagggaatccagtatttatgttcactccaagacctgaatttatattataacaacattccttcattagtggaagtgtcccgtctacaaccgttacccttcctcaaagaactggatttgagacttaatcctgttgtaaggaaagatacagattataggctctttgctgtatatacactacaaactctggagaaattagatgaccgaactgtacgtgaaggtgagagaaaagctgccaagctgcattttagtcagttgggcaacagtgaaaattttcttttagaggtggaaaaaagctctagggagaagacaatgaaaaactgtgtaacaggtgagagctctgcatcaaaagtcagtgctaatgttgacagcaggattgaaatggactcaaacaaaggactttttattcccttccccaaccgggaaataaaggattccctaagtacttctgcaactcagggcaatggtacacgtgatcagaaattagacaccttcccactggggacacagacacaggaagtagcaagaagggagatgccaagtgacaatcaccaggaagatgagttcagacactactcgcctcgtcagtccacagtccgatccccagagaagatgactagagaagggtaccaagtatcttttttggacaataagtcttcaggttcttctccagaaaaggaattgataccaaaacctgatacttttcatcttacccatgatgcctcattgagtaaatgcctggatgtgggtgattctagccagatccatccctatcagttaccttcagatgttggtctggaaaattatgacagttgttattctcaaactctatccctgcatggaagtcttggtaaaaggcctcagagaagcaagaactatcaagagtatagcataaagccttcaaatgacataaagaccaccgcttcacattcctgtggagacttattaacttctctgtcaaaccctgactccagcactggaaggcttttgaagcttagttcagatctgtatgccacaacccatttcaacagtgaccctgctgtacttgtcaatgtagagcaacaattatctaccagcctggatgatttaacaccagcacatggttctgtcccaaacaacgctgtcctgggaaacaggacaactcctctgcggacactgctgttgtctcctgggacttcagaacacagaaagatttttaccaagaggtcactaagcccatcgaagagaggattcaaatggaaggacaatatccttgccaacctgaatctaaagcatggtttccaagatgctacaggcagcgagcctctctctagtgacctgggtagtttgcacggtttggctggaaaccacagtccccccatctctgccagaaccccccatgtggccactgtcctcagacagctcctggagcttgtggataagcactggaatggctccggctccctcctcctcaacaagaagtttctcggtcctgcccgagatttgcttctgtctttggtagtcccggctccttctcagccgaggtgttgctcacatcctgaagacacgatgaaagcattctgcaggagggagcttgaactgaaggaggctgcgcagctggtccctaatgacatggaaagtttgaagcaaaaactggtcagagtgctggaggaaaacctcattttgtcagaaaaaattcaacagttggaggaaggtgctgccatctcaattgtgagtgggcaacagtcacatacttatgatgatcttctgcacaaaaaccaacagctgaccatgcaggtggcttgcctgaaccaggagcttgcccagctgaaaaagctggagaagacagttgccattctccatgaaagtcagagatccctggtggtaactaatgagtatctgctgcagcagctgaataaggagccaaaaggttattccgggaaagcgctcctgcctcctgagaagggtcatcatctggggagatcatcgccctttgggaaaagcacgttgtcttcctcctcaccagtggcacatgagactggtcagtatctaatacagagcgtcttggatgctgccccagagcctggcttatagagctagcatggaactcacaccacagcttccctggtccacagaggctctcaccgccattgccaccagtatggtggtatgtactcacaaagattaagaaagaaatgtattctgatta

SEQ ID NO: 429646 - DNA, 1299 bp, Homo sapiens
aataagctcacatttgaacgcgcatggacttccttctacctaaactttcgaactttttttagacacaggaagtagcaagaagggagatgccaagtgacaatcaccaggaagatgatctgtatgccacaacccatttcaacagtgaccctgctgtacttgtcaatgtagagcaacaattatctaccagcctggatgatttaacaccagcacatggttctgtcccaaacaacgctgtcctgggaaacaggacaactcctctgcggacactgctgttgtctcctgggacttcagaacacagaaagatttttaccaagaggtcactaagcccatcgaagagaggattcaaatggaaggacaatatccttgccaacctgaatctaaagcatggtttccaagatgctacaggcagcgagcctctctctagtgacctgggtagtttgcacggtttggctggaaaccacagtccccccatctctgccagaaccccccatgtggccactgtcctcagacagctcctggagcttgtggataagcactggaatggctccggctccctcctcctcaacaagaagtttctcggtcctgcccgagatttgcttctgtctttggtagtcccggctccttctcagccgaggtgttgctcacatcctgaagacacgatgaaagcattctgcaggagggagcttgaactgaaggaggctgcgcagctggtccctaatgacatggaaagtttgaagcaaaaactggtcagagtgctggaggaaaacctcattttgtcagaaaaaattcaacagttggaggaaggtgctgccatctcaattgtgagtgggcaacagtcacatacttatgatgatcttctgcacaaaaaccaacagctgaccatgcaggtggcttgcctgaaccaggagcttgcccagctgaaaaagctggagaagacagttgccattctccatgaaagtcagagatccctggtggtaactaatgagtatctgctgcagcagctgaataaggagccaaaaggttattccgggaaagcgctcctgcctcctgagaagggtcatcatctggggagatcatcgccctttgggaaaagcacgttgtcttcctcctcaccagtggcacatgagactggtcagtatctaatacagagcgtcttggatgctgccccagagcctggcttatagagctagcatggaactcacaccacagcttccctggtccacagaggctctcaccgccattgccaccagtatggtggtatgtactcacaaagattaagaaagaaatgtattctgatta

SEQ ID NO: 429647 - DNA, 2222 bp, Homo sapiens
ggtggcaggtgagcggcgggcggggatggcggagcaatgggagctggacgaggaaggcattcgccgcctgggggcgctgacgctggagcagccggaactggtggagtctctttcattgcagggatcttatgctggcaaaatccattccattggtgatgccttcagaaattttaaaaatctccgatccttagatttatcaaggaatttgatcactagccttaagggaatccagtatttatgttcactccaagacctgaatttatattataacaacattccttcattagtggaagtgtcccgtctacaaccgttacccttcctcaaagaactggatttgagacttaatcctgttgtaaggaaagatacagattataggctctttgctgtatatacactacaaactctggagaaattagatgaccgaactgtacgtgaaggtgagagaaaagctgccaagctgcattttagtcagttgggcaacagtgaaaattttcttttagaggtggaaaaaagctctagggagaagacaatgaaaaactgtgtaacaggtgagagctctgcatcaaaagtcagtgctaatgttgacagcaggattgaaatggactcaaacaaaggactttttattcccttccccaaccgggaaataaaggattccctaagtacttctgcaactcagggcaatggtacacgtgatcagaaattagacaccttcccactggggacacagacacaggaagtagcaagaagggagatgccaagtgacaatcaccaggaagatgagttcagacactactcgcctcgtcagtccacagtccgatccccagagaagatgactagagaagggtaccaagtatcttttttggacaataagtcttcaggttcttctccagaaaaggaattgataccaaaacctgatacttttcatcttacccatgatgcctcattgagtaaatgcctggatgtgggtgattctagccagatccatccctatcagttaccttcagatgttggtctggaaaattatgacagttgttattctcaaactctatccctgcatggaagtcttggtaaaaggcctcagagaagcaagaactatcaagagtatagcataaagccttcaaatgacataaagaccaccgcttcacattcctgtggagacttattaacttctctgtcaaaccctgactccagcactggaaggcttttgaagcttagttcagatctgtatgccacaacccatttcaacagtgaccctgctgtacttgtcaatgtagagcaacaattatctaccagcctggatgatttaacaccagcacatggttctgtcccaaacaacgctgtcctgggaaacaggacaactcctctgcggacactgctgttgtctcctgggacttcagaacacagaaagatttttaccaagaggtcactaagcccatcgaagagaggattcaaatggaaggacaatatccttgccaacctgaatctaaagcatggtttccaagatgctacaggcagcgagcctctctctagtgacctgggtagtttgcacggtttggctggaaaccacagtccccccatctctgccagaaccccccatgtggccactgtcctcagacagctcctggagcttgtggataagcactggaatggctccggctccctcctcctcaacaagaagtttctcggaaagtttgaagcaaaaactggtcagagtgctggaggaaaacctcattttgtcagaaaaaattcaacagttggaggaaggtgctgccatctcaattgtgagtgggcaacagtcacatacttatgatgatcttctgcacaaaaaccaacagctgaccatgcaggtggcttgcctgaaccaggagcttgcccagctgaaaaagctggagaagacagttgccattctccatgaaagtcagagctgaataaggagccaaaaggttattccgggaaagcgctcctgcctcctgagaagggtcatcatctggggagatcatcgccctttgggaaaagcacgttgtcttcctcctcaccagtggcacatgagactggtcagtatctaatacagagcgtcttggatgctgccccagagcctggcttatagagctagcatggaactcacaccacagcttccctggtccacagaggctctcaccgccattgccaccagtatggtggtatgtactcacaaagattaagaaagaaatgtattctgatta

SEQ ID NO: 429648 - DNA, 258 bp, Homo sapiens
tgatttcatgactgcctttttcccttgggcctcagatccctggtggtaactaatgagtatctgctgcagcagctgaataaggagccaaaaggttattccgggaaagcgctcctgcctcctgagaagggtcatcatctggggagatcatcgccctttgggaaaagcacgttgtcttcctcctcaccagtggcacatgagactggtcagtatctaatacagagcgtcttggatgctgccccagagcctggcttatagagc

SEQ ID NO: 429649 - DNA, 214 bp, Homo sapiens
tttgggaaaagcacgttgtcttcctcctcaccagtggcacatgagactggtcagtatctaatacagagcgtcttggatgctgccccagagcctggcttatagagctagcatggaactcacaccacagcttccctggtccacagaggctctcaccgccattgccaccagtatggtggtatgtactcacaaagattaagaaagaaatgtattctga

SEQ ID NO: 429650 - DNA, 2032 bp, Homo sapiens
aacacaccaagatgagactggtcctaatttttcctctgcgaatatggttttctgattaactactagttatgtctatgccaaaaaaagaaacatgctcagaccacggtttttgcctccagatgaccgaactgtacgtgaaggtgagagaaaagctgccaagctgcattttagtcagttgggcaacagtgaaaattttcttttagaggtggaaaaaagctctagggagaagacaatgaaaaactgtgtaacaggtgagagctctgcatcaaaagtcagtgctaatgttgacagcaggattgaaatggaaagagtcttgctctgtcgcccagactggagtgctgtggcgcgatctcggctcactgcaacctctacctcctgggttcaagcagttctcctgcctcagcctagcgagcagctgggattacagactcaaacaaaggactttttattcccttccccaaccgggaaataaaggattccctaagtacttctgcaactcagggcaatggtacacgtgatcagaaattagacaccttcccactggggacacagagttcagacactactcgcctcgtcagtccacagtccgatccccagagaagatgactagagaagggtaccaagtatcttttttggacaataagtcttcaggttcttctccagaaaaggaattgataccaaaacctgatacttttcatcttacccatgatgcctcattgagtaaatgcctggatgtgggtgattctagccagatccatccctatcagttaccttcagatgttggtctggaaaattatgacagttgttattctcaaactctatccctgcatggaagtcttggtaaaaggcctcagagaagcaagaactatcaagagtatagcataaagccttcaaatgacataaagaccaccgcttcacattcctgtggagacttattaacttctctgtcaaaccctgactccagcactggaaggcttttgaagcttagttcagatctgtatgccacaacccatttcaacagtgaccctgctgtacttgtcaatgtagagcaacaattatctaccagcctggatgatttaacaccagcacatggttctgtcccaaacaacgctgtcctgggaaacaggacaactcctctgcggacactgctgttgtctcctgggacttcagaacacagaaagatttttaccaagaggtcactaagcccatcgaagagaggattcaaatggaaggacaatatccttgccaacctgaatctaaagcatggtttccaagatgctacaggcagcgagcctctctctagtgacctgggtagtttgcacggtttggctggaaaccacagtccccccatctctgccagaaccccccatgtggccactgtcctcagacagctcctggagcttgtggataagcactggaatggctccggctccctcctcctcaacaagaagtttctcggaaagtttgaagcaaaaactggtcagagtgctggaggaaaacctcattttgtcagaaaaaattcaacagttggaggaaggtgctgccatctcaattgtgagtgggcaacagtcacatacttatgatgatcttctgcacaaaaaccaacagctgaccatgcaggtggcttgcctgaaccaggagcttgcccagctgaaaaagctggagaagacagttgccattctccatgaaagtcagagatccctggtggtaactaatgagtatctgctgcagcagctgaataaggagccaaaaggttattccgggaaagcgctcctgcctcctgagaagggtcatcatctggggagatcatcgccctttgggaaaagcacgttgtcttcctcctcaccagtggcacatgagactggtcagtatctaatacagagcgtcttggatgctgccccagagcctggcttatagagctagcatggaactcacaccacagcttccctggtccacagaggctctcaccgccattgccaccagtatggtggtatgtactcacaaagattaagaaagaaatgtattctgatta

SEQ ID NO: 429651 - DNA, 1667 bp, Homo sapiens
aacacaccaagatgagactggtcctaatttttcctctgcgaatatggttttctgattaactactagttatgtctatgccaaaaaaagaaacatgctcagaccacggtttttgcctccagatgaccgaactgtacgtgaaggtgagagaaaagctgccaagctgcattttagtcagttgggcaacagtgaaaattttcttttagaggtggaaaaaagctctagggagaagacaatgaaaaactgtgtaacaggtgagagctctgcatcaaaagtcagtgctaatgttgacagcaggattgaaatggactcaaacaaaggactttttattcccttccccaaccgggaaataaaggattccctaagtacttctgcaactcagggcaatggtacacgtgatcagaaattagacaccttcccactggggacacagacacaggaagtagcaagaagggagatgccaagtgacaatcaccaggaagatgatctgtatgccacaacccatttcaacagtgaccctgctgtacttgtcaatgtagagcaacaattatctaccagcctggatgatttaacaccagcacatggttctgtcccaaacaacgctgtcctgggaaacaggacaactcctctgcggacactgctgttgtctcctgggacttcagaacacagaaagatttttaccaagaggtcactaagcccatcgaagagaggattcaaatggaaggacaatatccttgccaacctgaatctaaagcatggtttccaagatgctacaggcagcgagcctctctctagtgacctgggtagtttgcacggtttggctggaaaccacagtccccccatctctgccagaaccccccatgtggccactgtcctcagacagctcctggagcttgtggataagcactggaatggctccggctccctcctcctcaacaagaagtttctcggtcctgcccgagatttgcttctgtctttggtagtcccggctccttctcagccgaggtgttgctcacatcctgaagacacgatgaaagcattctgcaggagggagcttgaactgaaggaggctgcgcagctggtccctaatgacatggaaagtttgaagcaaaaactggtcagagtgctggaggaaaacctcattttgtcagaaaaaattcaacagttggaggaaggtgctgccatctcaattgtgagtgggcaacagtcacatacttatgatgatcttctgcacaaaaaccaacagctgaccatgcaggtggcttgcctgaaccaggagcttgcccagctgaaaaagctggagaagacagttgccattctccatgaaagtcagagatccctggtggtaactaatgagtatctgctgcagcagctgaataaggagccaaaaggttattccgggaaagcgctcctgcctcctgagaagggtcatcatctggggagatcatcgccctttgggaaaagcacgttgtcttcctcctcaccagtggcacatgagactggtcagtatctaatacagagcgtcttggatgctgccccagagcctggcttatagagctagcatggaactcacaccacagcttccctggtccacagaggctctcaccgccattgccaccagtatggtggtatgtactcacaaagattaagaaagaaatgtattctgatta

SEQ ID NO: 429652 - DNA, 1457 bp, Homo sapiens
ggtggcaggtgagcggcgggcggggatggcggagcaatgggagctggacgaggaaggcattcgccgcctgggggcgctgacgctggagcagccggactcaaacaaaggactttttattcccttccccaaccgggaaataaaggattccctaagtacttctgcaactcagggcaatggtacacgtgatcagaaattagacaccttcccactggggacacagacacaggaagtagcaagaagggagatgccaagtgacaatcaccaggaagatgatctgtatgccacaacccatttcaacagtgaccctgctgtacttgtcaatgtagagcaacaattatctaccagcctggatgatttaacaccagcacatggttctgtcccaaacaacgctgtcctgggaaacaggacaactcctctgcggacactgctgttgtctcctgggacttcagaacacagaaagatttttaccaagaggtcactaagcccatcgaagagaggattcaaatggaaggacaatatccttgccaacctgaatctaaagcatggtttccaagatgctacaggcagcgagcctctctctagtgacctgggtagtttgcacggtttggctggaaaccacagtccccccatctctgccagaaccccccatgtggccactgtcctcagacagctcctggagcttgtggataagcactggaatggctccggctccctcctcctcaacaagaagtttctcggtcctgcccgagatttgcttctgtctttggtagtcccggctccttctcagccgaggtgttgctcacatcctgaagacacgatgaaagcattctgcaggagggagcttgaactgaaggaggctgcgcagctggtccctaatgacatggaaagtttgaagcaaaaactggtcagagtgctggaggaaaacctcattttgtcagaaaaaattcaacagttggaggaaggtgctgccatctcaattgtgagtgggcaacagtcacatacttatgatgatcttctgcacaaaaaccaacagctgaccatgcaggtggcttgcctgaaccaggagcttgcccagctgaaaaagctggagaagacagttgccattctccatgaaagtcagagatccctggtggtaactaatgagtatctgctgcagcagctgaataaggagccaaaaggttattccgggaaagcgctcctgcctcctgagaagggtcatcatctggggagatcatcgccctttgggaaaagcacgttgtcttcctcctcaccagtggcacatgagactggtcagtatctaatacagagcgtcttggatgctgccccagagcctggcttatagagctagcatggaactcacaccacagcttccctggtccacagaggctctcaccgccattgccaccagtatggtggtatgtactcacaaagattaagaaagaaatgtattctgatta

SEQ ID NO: 429653 - DNA, 824 bp, Homo sapiens
  misc_feature (803)..(803): n is a, c, g, or t
attacaacatctgcctcctgggttcaagcgattatcgtgcctcagcctccaagtagctgggactacaggcacgcaccaccatacccagcaaatttttgtatttttggtagagacaaggttttgccatgttggccaggctggtcttgaactcctgacctcaggtgatctgcccgcctcagcctcccaaagtgctgagattacaggcatgagccactgcgcccaggcaaaaaatttaaaattgtaaaaatcagccaaacatggtggcattcatctgtagtcccagcaacttgggaggctgaggtgggaggatttcttgagcccaggaggtcaaggttgcagtgacctatgactgcaccactgcactccagcctggacaacagagtgaggccctgtctcaaaaaaataaataaataggagtttgaggccatgttcacacatcactgcagtccagtctggtaaacagagcaagacgctgagtctttaacaaaaaaaaaaaaaatttttaaagtcagctgctaagacacactagccacatatcaagtgctcaactgccccgtgtggctaatggcttccaaactggcagcacaggcaactgttttcatcactgaagttctgttggacaagaatacctctgtaatcctagcactttgggaggccaagtgggaggatagcttgaggccaatagttcaagaacaccctgggcaacatagtgaagccccttttctacaaaaaataaataaataggagtttgaggccatgttcacacatcactgcagtccagtctggtaaacagagcaagacgntgagtctttaacaaaaaaaaa

SEQ ID NO: 429654 - DNA, 685 bp, Homo sapiens
  misc_feature (664)..(664): n is a, c, g, or t
attacaacatctgcctcctgggttcaagcgattatcgtgcctcagcctccaagtagctgggactacaggcacgcaccaccatacccagcaaatttttgtatttttggtagagacaaggttttgccatgttggccaggctggtcttgaactcctgacctcaggtgggaggatttcttgagcccaggaggtcaaggttgcagtgacctatgactgcaccactgcactccagcctggacaacagagtgaggccctgtctcaaaaaaataaataaataggagtttgaggccatgttcacacatcactgcagtccagtctggtaaacagagcaagacgctgagtctttaacaaaaaaaaaaaaaatttttaaagtcagctgctaagacacactagccacatatcaagtgctcaactgccccgtgtggctaatggcttccaaactggcagcacaggcaactgttttcatcactgaagttctgttggacaagaatacctctgtaatcctagcactttgggaggccaagtgggaggatagcttgaggccaatagttcaagaacaccctgggcaacatagtgaagccccttttctacaaaaaataaataaataggagtttgaggccatgttcacacatcactgcagtccagtctggtaaacagagcaagacgntgagtctttaacaaaaaaaaa

SEQ ID NO: 429655 - DNA, 502 bp, Homo sapiens
cctgacctcaggtgatctgcccgcctcagcctcccaaagtgctgagattacaggcatgagccactgcgcccaggcaaaaaatttaaaattgtaaaaatcagccaaacatggtggcattcatctgtagtcccagcaacttgggaggctgaggtgggaggatttcttgagcccaggaggtcaaggttgcagtgacctatgactgcaccactgcactccagcctggacaacagagtgaggccctgtctcaaaaaaataaataaataggagtttgaggccatgttcacacatcactgcagtccagtctggtaaacagagcaagacgctgagtctttaacaaaaaaaaaaaaaatttttaaagtcagctgctaagacacactagccacatatcaagtgctcaactgccccgtgtggctaatggcttccaaactggcagcacaggcaactgttttcatcactgaagttctgttggacaagaatacctctggaagcacacacgagaaac

SEQ ID NO: 429656 - DNA, 964 bp, Homo sapiens
taacggtctaggtacgaggctgggtggtggtggtcgtgggcggcggcggcgtgggcaagagcgcgctgaccatccagttcatccagtcctacttcgtgtctgactacgaccccactattgaggactcctacacgaagatctgcagtgtggatggcatcccagcccggctggacatcctggacaccgcgggccaggaagagttcggggccatgagagagcagtacatgcgtgctggccacggcttcctgctggtgttcgccattaatgaccggcagagtttcaacgaggtgggcaagctcttcacgcagattctgcgggtcaaggaccgcgacgacttccccgttgtgttggtcgggaacaaggcagatctggagtcacagcgccaggtcccccgatcagaagcctctgccttcggcgcctcccaccacgtggcctactttgaggcctcggccaaactgcgtctcaacgtggacgaggcttttgagcagctggtgcgggctgtccggaaataccaggaacaagagctcccaccgagccctcccagtgcccccaggaagaagggcgggggctgcccctgcgtcctcctgtagcccaggcaagagagaagcaaccaccacaagctctcgggactagctgccttcgcaccttgctgtgtgacctgaggccctcactgagcctcaatttcctcatctgggtctcccaggacacatcacatacccacccttacttcctggcctcttctgggctactgccactgtgtgccttctgccaacgcctcctgtccccacctaagcctggtgggggtgaggggctccgggtcactgctgtatataactcccctcccccagaaaaataaatgtcactgccaacgtcaaaaaaaaaaaccgaggtttttggtggggaaaggtggatggccggtctagttcgcacattttggaaagggaatgcggcccaaggggaaaga

SEQ ID NO: 429657 - DNA, 1135 bp, Homo sapiens
cagagctcatgattatgcagtagcctcattagcgtagcccgcccccccgggtcccgcccggctcccccgcaggcggtagcgaaggcagcagcagcggtggcgacatgagcagcggggcggcgtccgggacagggcgggggcggccccggggcgggggacctgggcccggggaccccccgcccagcgagacacacaagctggtggtcgtgggcggcggcggcgtgggcaagagcgcgctgaccatccagttcatccagtcctacttcgtgtctgactacgaccccactattgaggactcctacacgaagatctgcagtgtggatggcatcccagcccggctggacatcctggacaccgcgggccaggaagagttcggggccatgagagagcagtacatgcgtgctggccacggcttcctgctggtgttcgccattaatgaccggcagagtttcaacgaggtgggcaagctcttcacgcagattctgcgggtcaaggaccgcgacgacttccccgttgtgttggtcgggaacaaggcagatctggagtcacagcgccaggtcccccgatcagaagcctctgccttcggcgcctcccaccacgtggcctactttgaggcctcggccaaactgcgtctcaacgtggacgaggcttttgagcagctggtgcgggctgtccggaaataccaggaacaagagctcccaccgagccctcccagtgcccccaggaagaagggcgggggctgcccctgcgtcctcctgtagcccaggcaagagagaagcaaccaccacaagctctcgggactagctgccttcgcaccttgctgtgtgacctgaggccctcactgagcctcaatttcctcatctgggtctcccaggacacatcacatacccacccttacttcctggcctcttctgggctactgccactgtgtgccttctgccaacgcctcctgtccccacctaagcctggtgggggtgaggggctccgggtcactgctgtatataactcccctcccccagaaaaataaatgtcactgccaacgtcaaaaaaaaaaaccgaggtttttggtggggaaaggtggatggccggtctagttcgcacattttggaaagggaatgcggcccaaggggaaaga

SEQ ID NO: 429658 - DNA, 1087 bp, Homo sapiens
cagagctcatgattatgcagtagcctcattagcgtagcccgcccccccgggtcccgcccggctcccccgcaggcggtagcgaaggcagcagcagcggtggcgacatgagcagcggggcggcgtccgggacagggcgggggcggccccggggcgggggacctgggcccggggaccccccgcccagcgagacacacaagctggtggtcgtgggcggcggcggcgtgggcaagagcgcgctgaccatccagttcatccagtcctacttcgtgtctgactacgaccccactattgaggactcctacacgaagatctgcagtgtggatggcatcccagcccggctggacatcctggacaccgcgggccaggaagagttcggggccatgagagagcagtacatgcgtgctggccacggcttcctgctggtgttcgccattaatgaccggcagagtttcaacgaggtgggcaagctcttcacgcagattctgcgggtcaaggaccgcgacgacttccccgttgtgttggtcgggaacaaggcagatctggagtcacagcgccaggtcccccgatcagaagcctctgccttcggcgcctcccaccacgtggcctactttgaggcctcggccaaactgcgtctcaacgtggacgaggcttttgagcagctggtgcgggctgtccggaaataccaggaacaagagctcccaccgagccctcccagtgcccccaggaagaagggcgggggctgcccctgcgtcctcctgtagcccaggcaagagagaagcaaccaccacaagctctcgggactagctgccttcgcaccttgctgtgtgacctgaggccctcactgagcctcaatttcctcatctgggtctcccaggacacatcacatacccacccttacttcctggcctcttctgggctactgccactgtgtgccttctgccaacgcctcctgtccccacctaagcctggtgggggtgaggggctccgggtcactgctgtatataactcccctcccccagaaatatgtcctcccacgtcacaatattacaacacttaaaaaatcgggtttttggtggacacagttttc

SEQ ID NO: 429659 - DNA, 959 bp, Homo sapiens
cacttcgacctcgcagagaggctgactgagagccgagtgttagtggtgggcaagagcgcgctgaccatccagttcatccagtcctacttcgtgtctgactacgaccccactattgaggactcctacacgaagatctgcagtgtggatggcatcccagcccggctggacatcctggacaccgcgggccaggaagagttcggggccatgagagagcagtacatgcgtgctggccacggcttcctgctggtgttcgccattaatgaccggcagagtttcaacgaggtgggcaagctcttcacgcagattctgcgggtcaaggaccgcgacgacttccccgttgtgttggtcgggaacaaggcagatctggagtcacagcgccaggtcccccgatcagaagcctctgccttcggcgcctcccaccacgtggcctactttgaggcctcggccaaactgcgtctcaacgtggacgaggcttttgagcagctggtgcgggctgtccggaaataccaggaacaagagctcccaccgagccctcccagtgcccccaggaagaagggcgggggctgcccctgcgtcctcctgtagcccaggcaagagagaagcaaccaccacaagctctcgggactagctgccttcgcaccttgctgtgtgacctgaggccctcactgagcctcaatttcctcatctgggtctcccaggacacatcacatacccacccttacttcctggcctcttctgggctactgccactgtgtgccttctgccaacgcctcctgtccccacctaagcctggtgggggtgaggggctccgggtcactgctgtatataactcccctcccccagaaaaataaatgtcactgccaacgtcaaaaaaaaaaaccgaggtttttggtggggaaaggtggatggccggtctagttcgcacattttggaaagggaatgcggcccaaggggaaaga

SEQ ID NO: 429660 - DNA, 1251 bp, Homo sapiens
cagagctcatgattatgcagtagcctcattagcgtagcccgcccccccgggtcccgcccggctcccccgcaggcggtagcgaaggcagcagcagcggtggcgacatgagcagcggggcggcgtccgggacagggcgggggcggccccggggcgggggacctgggcccggggaccccccgcccagcgagacacacaagctggtggtcgtgggcggcggcggcgtgggcaagagcgcgctgaccatccagttcatccagtcctacttcgtgtctgactacgaccccactattgaggactcctacacgaagatctgcagtgtggatggcatcccagcccggctggacagtgagggcggcaaggatggatgatggatgggggtggtgtcagtgggggctgagggctcttgggggtgactgcggggagcctggtccccacgatggcccctctccctgtctctgcagtcctggacaccgcgggccaggaagagttcggggccatgagagagcagtacatgcgtgctggccacggcttcctgctggtgttcgccattaatgaccggcagagtttcaacgaggtgggcaagctcttcacgcagattctgcgggtcaaggaccgcgacgacttccccgttgtgttggtcgggaacaaggcagatctggagtcacagcgccaggtcccccgatcagaagcctctgccttcggcgcctcccaccacgtggcctactttgaggcctcggccaaactgcgtctcaacgtggacgaggcttttgagcagctggtgcgggctgtccggaaataccaggaacaagagctcccaccgagccctcccagtgcccccaggaagaagggcgggggctgcccctgcgtcctcctgtagcccaggcaagagagaagcaaccaccacaagctctcgggactagctgccttcgcaccttgctgtgtgacctgaggccctcactgagcctcaatttcctcatctgggtctcccaggacacatcacatacccacccttacttcctggcctcttctgggctactgccactgtgtgccttctgccaacgcctcctgtccccacctaagcctggtgggggtgaggggctccgggtcactgctgtatataactcccctcccccagaaaaataaatgtcactgccaacgtcaaaaaaaaaaaccgaggtttttggtggggaaaggtggatggccggtctagttcgcacattttggaaagggaatgcggcccaaggggaaaga

SEQ ID NO: 429661 - DNA, 1080 bp, Homo sapiens
cagagctcatgattatgcagtagcctcattagcgtagcccgcccccccgggtcccgcccggctcccccgcaggcggtagcgaaggcagcagcagcggtggcgacatgagcagcggggcggcgtccgggacagggcgggggcggccccggggcgggggacctgggcccggggaccccccgcccagcgagacacacaagctggtggtcgtgggcggcggcggcgtgggcaagagcgcgctgaccatccagttcatccagtcctacttcgtgtctgactacgaccccactattgaggactcctacacgaagatctgcagtgtggatggcatcccagcccggctggacatcctggacaccgcgggccaggaagagttcggggccatgagagagcagtacatgcgtgctggccacggcttcctgctggtgttcgccattaatgaccggcagagtttcaacgaggtgggcaagctcttcacgcagattctgcgggtcaaggaccgcgacgacttccccgttgtgttggtcgggaacaaggcagatctggagtcacagcgccaggtcccccgatcagaagcctctgccttcggcgcctcccaccacgtggcctactttgaggcctcggccaaactgcgtctcaacgtggacgaggcttttgagcagctggtgcgggctgtccggaaataccaggaacaagagctcccaccgagccctcccagtgcccccaggaagaagggcgggggctgcccctgcgtcctcctgtagcccaggcaagagagaagcaaccaccacaagctctcgggactagctgccttcgcaccttgctgtgtgacctgaggccctcactgagcctcactcttctgggctactgccactgtgtgccttctgccaacgcctcctgtccccacctaagcctggtgggggtgaggggctccgggtcactgctgtatataactcccctcccccagaaaaataaatgtcactgccaacgtcaaaaaaaaaaaccgaggtttttggtggggaaaggtggatggccggtctagttcgcacattttggaaagggaatgcggcccaaggggaaaga

SEQ ID NO: 429662 - DNA, 625 bp, Homo sapiens
  misc_feature (46)..(47): n is a, c, g, or t
tatcgagctcggccgtgttaagtaggcaattggagtcacagcgccnngtcccccgatcagaagcctctgccttcggcgcctcccaccacgtggcctactttgaggcctcggccaaactgcgtctcaacgtggacgaggcttttgagcagctggtgcgggctgtccggaaataccaggaacaagagctcccaccgagccctcccagtgcccccaggaagaagggcgggggctgcccctgcgtcctcctgtagcccaggcaagagagaagcaaccaccacaagctctcgggactagctgccttcgcaccttgctgtgtgacctgaggccctcactgagcctcaatttcctcatctgggtctcccaggacacatcacatacccacccttacttcctggcctcttctgggctactgccactgtgtgccttctgccaacgcctcctgtccccacctaagcctggtgggggtgaggggctccgggtcactgctgtatataactcccctcccccagaaaaataaatgtcactgccaacgtcaaaaaaaaaaaccgaggtttttggtggggaaaggtggatggccggtctagttcgcacattttggaaagggaatgcggcccaaggggaaaga

SEQ ID NO: 429663 - DNA, 872 bp, Homo sapiens
cagagctcatgattatgcagtagcctcattagcgtagcccgcccccccgggtcccgcccggctcccccgcaggcggtagcgaaggcagcagcagcggtggcgacatgagcagcggggcggcgtccgggacagggcgggggcggccccggggcgggggacctgggcccggggaccccccgcccagcgagacacacaagctggtggtcgtgggcggcggcggcgtgggcaagagcgcgctgaccatccagttcatccagtcctacttcgtgtctgactacgaccccactattgaggactcctacacgaagatctgcagtgtggatggcatcccagcccggctggacatttgaggcctcggccaaactgcgtctcaacgtggacgaggcttttgagcagctggtgcgggctgtccggaaataccaggaacaagagctcccaccgagccctcccagtgcccccaggaagaagggcgggggctgcccctgcgtcctcctgtagcccaggcaagagagaagcaaccaccacaagctctcgggactagctgccttcgcaccttgctgtgtgacctgaggccctcactgagcctcaatttcctcatctgggtctcccaggacacatcacatacccacccttacttcctggcctcttctgggctactgccactgtgtgccttctgccaacgcctcctgtccccacctaagcctggtgggggtgaggggctccgggtcactgctgtatataactcccctcccccagaaaaataaatgtcactgccaacgtcaaaaaaaaaaaccgaggtttttggtggggaaaggtggatggccggtctagttcgcacattttggaaagggaatgcggcccaaggggaaaga

SEQ ID NO: 429664 - DNA, 342 bp, Homo sapiens
aatggggttttgctccgaatcttgccagtgctggatggagtgtagtgctgttcttagcatttcctcatctgggtctcccaggacacatcacatacccacccttacttcctggcctcttctgggctactgccactgtgtgccttctgccaacgcctcctgtccccacctaagcctggtgggggtgaggggctccgggtcactgctgtatataactcccctcccccagaaaaataaatgtcactgccaacgtcaaaaaaaaaaaccgaggtttttggtggggaaaggtggatggccggtctagttcgcacattttggaaagggaatgcggcccaaggggaaaga

SEQ ID NO: 429665 - DNA, 1289 bp, Homo sapiens
ccgcttttctctcgggtgatccggccgagtggccctgggttagcagctgctgcatttccccggctggctgcggtcactggtggcagtgctcaggcgcccgccgcccttgaccttcggccccgcgagctctaaccctacagcgcaggaagatcggccgccgcggccaggctctgatgctggtgtctggtagaagaaggttactcacagttctgctgcaggctcagaagtggccctttcaaccctccagagacatgagactagtgcagttccgggcaccccacctggtggggcctcacttgggcctggagacagggaatggtggaggggttatcaacctcaatgcctttgaccccacactcccgaagacgatgacgcagttcctagagcagggagaggccaccctctcagtggcaagaagagccctggctgcccagttgccagtcctaccacggtcggaggtaaccttcctggctccagtcacacgaccagataaggtggtgtgtgtgggcatgaattatgtggaccactgcaaagaacagaacgtgcccgtgcccaaggagcccatcatcttcagcaagtttgccagctccatcgtggggccctatgatgaggtggtcctcccaccacagagccaggaggtagattgggaagtggagctggccgtggtcattggaaagaaaggcaagcacatcaaggccacagatgctatggcccacgtggccggcttcactgtggctcatgacgtgagtgctcgtgactggcaaatgagacgtaatgggaaacaatggctgctgggaaaaaccttcgacaccttctgccctctgggccctgccttggtgaccaaggacagtgtagcagatccacacaacttaaagatctgctgccgagtgaatggggaagtggtccagagcggcaacaccaaccagatggtattcaagacagaggacctgatagcctgggtctcccagtttgttaccttttacccaggggatgtcatcctaactgggacccccccaggtgtcggtgtattcaggaaacctcctgtctttctcaagaagggggatgaagtccagtgtgagattgaagaactaggtgtcatcatcaacaaggtggtgtgatggctcctgcacaggccctgcacataggatgagggcatctgctcccactcagcctagcccagggaaaggcccagtgacaggtgtggacaggtgccagccctgcaagccgcctcttctcggtagaagggagaaggacagagctctcttcaataaattcgtcaggtcaaagca

SEQ ID NO: 429666 - DNA, 1008 bp, Homo sapiens
aaatcaacactggataaataaaagccctgctctgatagcaaaggacaatggtcagtgattttcacactgactctgatggttgatagagctaggaaatagatttcaaaaagcaaaacctgtagctgctgcaggatctgcccagcctgcccgggattgcccacctgttcccagccagaccctctcacctgctctggtctctacagagccctggctgcccagttgccagtcctaccacggtcggaggtaaccttcctggctccagtcacacgaccagataaggtggtgtgtgtgggcatgaattatgtggaccactgcaaagaacagaacgtgcccgtgcccaaggagcccatcatcttcagcaagtttgccagctccatcgtggggccctatgatgaggtggtcctcccaccacagagccaggtcagtgtctccccactgccctccctagtcactgggcccatcacaagggcattctgagctcagtattgagcctactggagccacctctcgctcaatagcgcattcagcagaaactctacaggattgtacacacagtagtaacactggccttggaaaaaaaaagttaatgtacgtgttttcctggttacaaaagcaatgcaccttcactgtagataataaaatagagataaacattaaaaaattatgtcacccataatcccactgcccatggctcggaatattaatgtttttctgtctaccttcccagtgtttctccgctcctgtatatgtttatactgtacatatacttaccttttacttaagactccatcaggagcattttttcatgccattaagtattcgccctgacaccacggagtttgttatgtagattagtttattcctgagtaccttactgctggatactgtttctagtttttggcttctataaataaatgttgcagtaaacatccttatgtggaaaaggctttgcatgtccattaatacattattatttcctttgaataaaccctttggaatttaaatatg

SEQ ID NO: 429667 - DNA, 1415 bp, Homo sapiens
ccgcttttctctcgggtgatccggccgagtggccctgggttagcagctgctgcatttccccggctggctgcggtcactggtggcagtgctcaggcgcccgccgcccttgaccttcggccccgcgagctctaaccctacagcgcaggaagatcggccgccgcggccagcagagccaagcacagtgggaactttcagaaagcactggttgaaggaacgctggaatccctgggacttactgcgtagcatgtagtagttgctcctctagaaaagtttcaccttatgaagtatagcaggctctgatgctggtgtctggtagaagaaggttactcacagttctgctgcaggctcagaagtggccctttcaaccctccagagacatgagactagtgcagttccgggcaccccacctggtggggcctcacttgggcctggagacagggaatggtggaggggttatcaacctcaatgcctttgaccccacactcccgaagacgatgacgcagttcctagagcagggagaggccaccctctcagtggcaagaagagccctggctgcccagttgccagtcctaccacggtcggaggtaaccttcctggctccagtcacacgaccagataaggtggtgtgtgtgggcatgaattatgtggaccactgcaaagaacagaacgtgcccgtgcccaaggagcccatcatcttcagcaagtttgccagctccatcgtggggccctatgatgaggtggtcctcccaccacagagccaggaggtagattgggaagtggagctggccgtggtcattggaaagaaaggcaagcacatcaaggccacagatgctatggcccacgtggccggcttcactgtggctcatgacgtgagtgctcgtgactggcaaatgagacgtaatgggaaacaatggctgctgggaaaaaccttcgacaccttctgccctctgggccctgccttggtgaccaaggacagtgtagcagatccacacaacttaaagatctgctgccgagtgaatggggaagtggtccagagcggcaacaccaaccagatggtattcaagacagaggacctgatagcctgggtctcccagtttgttaccttttacccaggggatgtcatcctaactgggacccccccaggtgtcggtgtattcaggaaacctcctgtctttctcaagaagggggatgaagtccagtgtgagattgaagaactaggtgtcatcatcaacaaggtggtgtgatggctcctgcacaggccctgcacataggatgagggcatctgctcccactcagcctagcccagggaaaggcccagtgacaggtgtggacaggtgccagccctgcaagccgcctcttctcggtagaagggagaaggacagagctctcttcaataaattcgtcaggtcaaagca

SEQ ID NO: 429668 - DNA, 1549 bp, Homo sapiens
ccgcttttctctcgggtgatccggccgagtggccctgggttagcagctgctgcatttccccggctggctgcggtcactggtggcagtgctcaggcgcccgccgcccttgaccttcggccccgcgagctctaaccctacagcgcaggaagatcggccgccgcggccaggctctgatgctggtgtctggtagaagaaggttactcacagttctgctgcaggctcagaagtggccctttcaaccctccagagacatgagactagtgcagttccgggcaccccacctggtggggcctcacttgggcctggagacagggaatggtggaggggttatcaacctcaatgcctttgaccccacactcccgaagacgatgacgcagttcctagagcagggagaggccaccctctcagtggcaagaagagccctggctgcccagttgccagtcctaccacggtcggaggtaaccttcctggctccagtcacacgaccagataaggtggtgtgtgtgggcatgaattatgtggaccactgcaaagaacagaacgtgcccgtgcccaaggagcccatcatcttcagcaagtttgccagctccatcgtggggccctatgatgaggtggtcctcccaccacagagccaggaggtagattgggaagtggagctggccgtggtcattggaaagaaaggcaagcacatcaaggccacagatgctatggcccacgtggccggcttcactgtggctcatgacgtgagtgctcgtgactggcaaatgagacgtaatgggaaacaatggctgctgggaaaaaccttcgacaccttctgccctctgggccctgccttggtgaccaaggacagtgtagcagatccacacaacttaaagatctgctgccgagtgaatggggaagtggtccagagcggcaacaccaaccagatggtattcaagacagaggacctgatagcctgggtctcccagtttgttaccttttacccaggggatgtcatcctaactgggacccccccaggtgtcggtgtattcaggaaacctcctgtctttctcaagaagggggatgaagtccagtgtgagattgaagaactaggtgtcatcatcaacaaggtggtgtgatggctcctgcacaggccctgcacataggatgagggcatctgctcccactcagcctagcccagggaaaggcccagtgacaggtgtggacaggtgccagccctgcaagccgcctcttctcggtagaagggagaaggacagagctctcttcaataaattcgtcaggtcaaagcaaaaaaaaaaaggcacaaacacacaaccacaagccaaccaaacacacacgaaaggaaacaagaaacggcaaaacacaagagaacacacgccgcaacccacacgagcaccatacgcagacaaaaaaccgagggcaagcacccgcccacgagaggggagacaaaagagaaagaggaacaacacacagacgaccaagcggggagcaccgagcgcgaaagagcaaaggacaacggacacagagaaagaacacaccacacactcaa

SEQ ID NO: 429669 - DNA, 1409 bp, Homo sapiens
ccgcttttctctcgggtgatccggccgagtggccctgggttagcagctgctgcatttccccggctggctgcggtcactggtggcagtgctcaggcgcccgccgcccttgaccttcggccccgcgagctctaaccctacagcgcaggaagatcggccgccgcggccaggtaggacgagcctggctgggtctaggccagaagggtgtccgtggcgccggtctcccgcggagcgcagaactagtaccggatccccagccgcttctgaccacacagacggggcggacctgtgctctgatgctggtgtctggtagaagaaggttactcacagttctgctgcaggctcagaagtggccctttcaaccctccagagacatgagactagtgcagttccgggcaccccacctggtggggcctcacttgggcctggagacagggaatggtggaggggttatcaacctcaatgcctttgaccccacactcccgaagacgatgacgcagttcctagagcagggagaggccaccctctcagtggcaagaagagccctggctgcccagttgccagtcctaccacggtcggaggtaaccttcctggctccagtcacacgaccagataaggtggtgtgtgtgggcatgaattatgtggaccactgcaaagaacagaacgtgcccgtgcccaaggagcccatcatcttcagcaagtttgccagctccatcgtggggccctatgatgaggtggtcctcccaccacagagccaggaggtagattgggaagtggagctggccgtggtcattggaaagaaaggcaagcacatcaaggccacagatgctatggcccacgtggccggcttcactgtggctcatgacgtgagtgctcgtgactggcaaatgagacgtaatgggaaacaatggctgctgggaaaaaccttcgacaccttctgccctctgggccctgccttggtgaccaaggacagtgtagcagatccacacaacttaaagatctgctgccgagtgaatggggaagtggtccagagcggcaacaccaaccagatggtattcaagacagaggacctgatagcctgggtctcccagtttgttaccttttacccaggggatgtcatcctaactgggacccccccaggtgtcggtgtattcaggaaacctcctgtctttctcaagaagggggatgaagtccagtgtgagattgaagaactaggtgtcatcatcaacaaggtggtgtgatggctcctgcacaggccctgcacataggatgagggcatctgctcccactcagcctagcccagggaaaggcccagtgacaggtgtggacaggtgccagccctgcaagccgcctcttctcggtagaagggagaaggacagagctctcttcaataaattcgtcaggtcaaagca

SEQ ID NO: 429670 - DNA, 1419 bp, Homo sapiens
ccgcttttctctcgggtgatccggccgagtggccctgggttagcagctgctgcatttccccggctggctgcggtcactggtggcagtgctcaggcgcccgccgcccttgaccttcggccccgcgagctctaaccctacagcgcaggaagatcggccgccgcggccaggctctgatgctggtgtctggtagaagaaggttactcacagttctgctgcaggctcagaagtggccctttcaaccctccagagacatgagactagtgcagttccgggcaccccacctggtggggcctcacttgggcctggagacagggaatggtggaggggttatcaacctcaatgcctttgaccccacactcccgaagacgatgacgcagttcctagagcagggagaggccaccctctcagtggcaagaagagccctggctgcccagttgccagtcctaccacggtcggaggtaaccttcctggctccagtcacacgaccagataaggtggtgtgtgtgggcatgaattatgtggaccactgcaaagaacagaacgtgcccgtgcccaaggagcccatcatcttcagcaagtttgccagctccatcgtggggccctatgatgaggtggtcctcccaccacagagccaggaggtagattgggaagtggagctggccgtggtcattggaaagaaaggcaagcacatcaaggccacagatgctatggcccacgtggccggcttcactgtggctcatgacgtgagtgctcgtgactggcaaatgagacgtaatgggaaacaatggctgctgggaaaaaccttcgacaccttctgccctctgggccctgccttggtgaccaaggacagtgtagcagatccacacaacttaaagatctgctgccgagtgaatggggaagtggtccagagcggcaacaccaaccagatggtattcaagacagaggacctgatagcctgggtctcccagtttgttaccttttacccaggggatgtcatcctaactgggacccccccaggtgtcggtgtattcaggaaacctcctgtctttctcaaggtaggttagcgaaaagcaaagagcaagggccccaaaggcctggcaggcttgcctcagacttgagaagtacaggcttgtgtatgtgtgtctgacggaagggctgacactgtcatggcctgctctgttgcagaagggggatgaagtccagtgtgagattgaagaactaggtgtcatcatcaacaaggtggtgtgatggctcctgcacaggccctgcacataggatgagggcatctgctcccactcagcctagcccagggaaaggcccagtgacaggtgtggacaggtgccagccctgcaagccgcctcttctcggtagaagggagaaggacagagctctcttcaataaattcgtcaggtcaaagca

SEQ ID NO: 429671 - DNA, 1544 bp, Homo sapiens
ccgcttttctctcgggtgatccggccgagtggccctgggttagcagctgctgcatttccccggctggctgcggtcactggtggcagtgctcaggcgcccgccgcccttgaccttcggccccgcgagctctaaccctacagcgcaggaagatcggccgccgcggccaggctctgatgctggtgtctggtagaagaaggttactcacagttctgctgcaggctcagaagtggccctttcaaccctccagagacatgagactagtgcagttccgggcaccccacctggtggggcctcacttgggcctggagacagggaatggtggaggggttatcaacctcaatgcctttgaccccacactcccgaagacgatgacgcagttcctagagcagggagaggccaccctctcagtggcaagaagagccctggctgcccagttgccagtcctaccacggtcggaggtaaccttcctggctccagtcacacgaccagataaggtggtgtgtgtgggcatgaattatgtggaccactgcaaagaacagaacgtgcccgtgcccaaggagcccatcatcttcagcaagtttgccagctccatcgtggggccctatgatgaggtggtcctcccaccacagagccaggaggtagattgggaagtggagctggccgtggtcattggaaagaaaggcaagcacatcaaggccacagatgctatggcccacgtggccggcttcactgtggctcatgacgtgagtgctcgtgactggcaaatgagacgtaatgggaaacaatggctgctgggaaaaaccttcgacaccttctgccctctgggccctgccttggtgaccaaggacagtgtagcagatccacacaacttaaagatctgctgccgagtgaatggggaagtggtccagagcggcaacaccaaccagatggtattcaagacagaggacctgatagcctgggtctcccagtgagtgacaggggctgtcctgcagcccgttcacctgcacacatgtggaggctgacctgagccctccatctttgggtgtggcacctcagccagccctggtctcacgggtccttctgcttgatccagtttgttaccttttacccaggggatgtcatcctaactgggacccccccaggtgtcggtgtattcaggaaacctcctgtctttctcaaggtaggttagcgaaaagcaaagagcaagggccccaaaggcctggcaggcttgcctcagacttgagaagtacaggcttgtgtatgtgtgtctgacggaagggctgacactgtcatggcctgctctgttgcagaagggggatgaagtccagtgtgagattgaagaactaggtgtcatcatcaacaaggtggtgtgatggctcctgcacaggccctgcacataggatgagggcatctgctcccactcagcctagcccagggaaaggcccagtgacaggtgtggacaggtgccagccctgcaagccgcctcttctcggtagaagggagaaggacagagctctcttcaataaattcgtcaggtcaaagca

SEQ ID NO: 429672 - DNA, 1252 bp, Homo sapiens
ccgcttttctctcgggtgatccggccgagtggccctgggttagcagctgctgcatttccccggctggctgcggtcactggtggcagtgctcaggcgcccgccgcccttgaccttcggccccgcgagctctaaccctacagcgcaggaagatcggccgccgcggccagcagagccaagcacagtgggaactttcagaaagcactggttgaaggaacgctggaatccctgggacttactgcgtagcatgtagtagttgctcctctagaaaagtttcaccttatgaagtatagcaggctctgatgctggtgtctggtagaagaaggttactcacagttctgctgcaggctcagaagtggccctttcaaccctccagagacatgagactagtgcagttccgggcaccccacctggtggggcctcacttgggcctggagacagggaatggtggaggggttatcaacctcaatgcctttgaccccacactcccgaagacgatgacgcagttcctagagcagggagaggccaccctctcagtggcaagaagagccctggctgcccagttgccagtcctaccacggtcggaggtaaccttcctggctccagtcacacgaccagataaggtggtgtgtgtgggcatgaattatgtggaccactgcaaagaacagaacgtgcccgtgcccaaggagcccatcatcttcagcaagtttgccagctccatcgtggggccctatgatgaggtggtcctcccaccacagagccaggaggtagattgggaagtggagctggccgtggtcattggaaagaaaggcaagcacatcaagatccacacaacttaaagatctgctgccgagtgaatggggaagtggtccagagcggcaacaccaaccagatggtattcaagacagaggacctgatagcctgggtctcccagtttgttaccttttacccaggggatgtcatcctaactgggacccccccaggtgtcggtgtattcaggaaacctcctgtctttctcaagaagggggatgaagtccagtgtgagattgaagaactaggtgtcatcatcaacaaggtggtgtgatggctcctgcacaggccctgcacataggatgagggcatctgctcccactcagcctagcccagggaaaggcccagtgacaggtgtggacaggtgccagccctgcaagccgcctcttctcggtagaagggagaaggacagagctctcttcaataaattcgtcaggtcaaagca

SEQ ID NO: 429673 - DNA, 1414 bp, Homo sapiens
ccgcttttctctcgggtgatccggccgagtggccctgggttagcagctgctgcatttccccggctggctgcggtcactggtggcagtgctcaggcgcccgccgcccttgaccttcggccccgcgagctctaaccctacagcgcaggaagatcggccgccgcggccaggctctgatgctggtgtctggtagaagaaggttactcacagttctgctgcaggctcagaagtggccctttcaaccctccagagacatgagactagtgcagttccgggcaccccacctggtggggcctcacttgggcctggagacagggaatggtggaggggttatcaacctcaatgcctttgaccccacactcccgaagacgatgacgcagttcctagagcagggagaggccaccctctcagtggcaagaagagccctggctgcccagttgccagtcctaccacggtcggaggtaaccttcctggctccagtcacacgaccagataaggtggtgtgtgtgggcatgaattatgtggaccactgcaaagaacagaacgtgcccgtgcccaaggagcccatcatcttcagcaagtttgccagctccatcgtggggccctatgatgaggtggtcctcccaccacagagccaggaggtagattgggaagtggagctggccgtggtcattggaaagaaaggcaagcacatcaaggccacagatgctatggcccacgtggccggcttcactgtggctcatgacgtgagtgctcgtgactggcaaatgagacgtaatgggaaacaatggctgctgggaaaaaccttcgacaccttctgccctctgggccctgccttggtgaccaaggacagtgtagcagatccacacaacttaaagatctgctgccgagtgaatggggaagtggtccagagcggcaacaccaaccagatggtattcaagacagaggacctgatagcctgggtctcccagtgagtgacaggggctgtcctgcagcccgttcacctgcacacatgtggaggctgacctgagccctccatctttgggtgtggcacctcagccagccctggtctcacgggtccttctgcttgatccagtttgttaccttttacccaggggatgtcatcctaactgggacccccccaggtgtcggtgtattcaggaaacctcctgtctttctcaagaagggggatgaagtccagtgtgagattgaagaactaggtgtcatcatcaacaaggtggtgtgatggctcctgcacaggccctgcacataggatgagggcatctgctcccactcagcctagcccagggaaaggcccagtgacaggtgtggacaggtgccagccctgcaagccgcctcttctcggtagaagggagaaggacagagctctcttcaataaattcgtcaggtcaaagca

SEQ ID NO: 429674 - DNA, 983 bp, Homo sapiens
cggtacccgctgagatgacagtcggcaacctcaatgcctttgaccccacactcccgaagacgatgacgcagttcctagagcagggagaggccaccctctcagtggcaagaagagccctggctgcccagttgccagtcctaccacggtcggaggtaaccttcctggctccagtcacacgaccagataaggtggtgtgtgtgggcatgaattatgtggaccactgcaaagaacagaacgtgcccgtgcccaaggagcccatcatcttcagcaagtttgccagctccatcgtggggccctatgatgaggtggtcctcccaccacagagccaggaggtagattgggaagtggagctggccgtggtcattggaaagaaaggcaagcacatcaaggccacagatgctatggcccacgtggccggcttcactgtggctcatgacgtgagtgctcgtgactggcaaatgagacgtaatgggaaacaatggctgctgggaaaaaccttcgacaccttctgccctctgggccctgccttggtgaccaaggacagtgtagcagatccacacaacttaaagatctgctgccgagtgaatggggaagtggtccagagcggcaacaccaaccagatggtattcaagacagaggacctgatagcctgggtctcccagtttgttaccttttacccaggggatgtcatcctaactgggacccccccaggtgtcggtgtattcaggaaacctcctgtctttctcaagaagggggatgaagtccagtgtgagattgaagaactaggtgtcatcatcaacaaggtggtgtgatggctcctgcacaggccctgcacataggatgagggcatctgctcccactcagcctagcccagggaaaggcccagtgacaggtgtggacaggtgccagccctgcaagccgcctcttctcggtagaagggagaaggacagagctctcttcaataaattcgtcaggtcaaagca

SEQ ID NO: 429675 - DNA, 1176 bp, Homo sapiens
  misc_feature (1063)..(1063): n is a, c, g, or t
  misc_feature (1073)..(1073): n is a, c, g, or t
  misc_feature (1083)..(1083): n is a, c, g, or t
  misc_feature (1114)..(1114): n is a, c, g, or t
  misc_feature (1125)..(1125): n is a, c, g, or t
  misc_feature (1128)..(1129): n is a, c, g, or t
  misc_feature (1131)..(1131): n is a, c, g, or t
ccgcttttctctcgggtgatccggccgagtggccctgggttagcagctgctgcatttccccggctggctgcggtcactggtggcagtgctcaggcgcccgccgcccttgaccttcggccccgcgagctctaaccctacagcgcaggaagatcggccgccgcggccagcagagccaagcacagtgggaactttcagaaagcactggttgaaggaacgctggaatccctgggacttactgcgtagcatgtagtagttgctcctctagaaaagtttcaccttatgaagtatagcaggctctgatgctggtgtctggtagaagaaggttactcacagttctgctgcaggctcagaagtggccctttcaaccctccagagacatgagactagtgcagttccgggcaccccacctggtggggcctcacttgggcctggagacagggaatggtggaggggttatcaacctcaatgcctttgaccccacactcccgaagacgatgacgcagttcctagagcagggagaggccaccctctcagtggcaagaagagccctggctgcccagttgccagtcctaccacggtcggaggtaaccttcctggctccagtcacacgaccagataaggtggtgtgtgtgggcatgaattatgtggaccactgcaaagaacagaacgtgcccgtgcccaaggagcccatcatcttcagcaagtttgccagctccatcgtggggccctatgatgaggtggtcctcccaccacagagccaggaggtagattgggaagtggagctggccgtggtcattggaaagaaaggcaagcacatcaagatccacacaacttaaagatctgctgccgagtgaatggggaagtggtccagagcggcaacaccaaccagatggtattcaagacagaggacctgatagcctgggtctcccagtgagtgacaggggctgtcctgcagcccgttcacctgcacacatgtggaggctgacctgagccctccatctttgggtgtggcacctcagccagccctggtctcacgggtccttctgcttgatccaacggtggngcctttcccngggtgtgtcnaatgggcccccgggtgggttccggaccccgngttctcgggtngannanagagggccagcgggtcccataaaaagcgggtgttacggggcacaa

SEQ ID NO: 429676 - DNA, 1269 bp, Homo sapiens
ccgcttttctctcgggtgatccggccgagtggccctgggttagcagctgctgcatttccccggctggctgcggtcactggtggcagtgctcaggcgcccgccgcccttgaccttcggccccgcgagctctaaccctacagcgcaggaagatcggccgccgcggccaggctctgatgctggtgtctggtagaagaaggttactcacagttctgctgcaggctcagaagtggccctttcaaccctccagagacatgagactagtgcagttccgggcaccccacctggtggggcctcacttgggcctggagacagggaatggtggaggggttatcaacctcaatgcctttgaccccacactcccgaagacgatgacgcagttcctagagcagggagaggccaccctctcagtggcaagaagagccctggctgcccagttgccagtcctaccacggtcggaggtaaccttcctggctccagtcacacgaccagataaggtggtgtgtgtgggcatgaattatgtggaccactgcaaagaacagaacgtgcccgtgcccaaggagcccatcatcttcagcaagtttgccagctccatcgtggggccctatgatgaggtggtcctcccaccacagagccaggaggtagattgggaagtggagctggccgtggtcattggaaagaaaggcaagcacatcaaggccacagatgctatggcccacgtggccggcttcactgtggctcatgacgtgagtgctcgtgactggcaaatgagacgtaatgggaaacaatggctgctgggaaaaaccttcgacaccttctgccctctgggccctgccttggtgaccaaggacagtgtagcagatccacacaacttaaagatctgctgccgagtgaatggggaagtggtccagagcggcaacaccaaccagatggtattcaagacagaggacctgatagcctgggtctcccagggatgtcatcctaactgggacccccccaggtgtcggtgtattcaggaaacctcctgtctttctcaagaagggggatgaagtccagtgtgagattgaagaactaggtgtcatcatcaacaaggtggtgtgatggctcctgcacaggccctgcacataggatgagggcatctgctcccactcagcctagcccagggaaaggcccagtgacaggtgtggacaggtgccagccctgcaagccgcctcttctcggtagaagggagaaggacagagctctcttcaataaattcgtcaggtcaaagca

SEQ ID NO: 429677 - DNA, 1074 bp, Homo sapiens
aaatcaacactggataaataaaagccctgctctgatagcaaaggacaatggtcagtgattttcacactgactctgatggttgatagagctaggaaatagatttcaaaaagcaaaacctgtagctgctgcaggatctgcccagcctgcccgggattgcccacctgttcccagccagaccctctcacctgctctggtctctacagagccctggctgcccagttgccagtcctaccacggtcggaggtaaccttcctggctccagtcacacgaccagataaggtggtgtgtgtgggcatgaattatgtggaccactgcaaagaacagaacgtgcccgtgcccaaggagcccatcatcttcagcaagtttgccagctccatcgtggggccctatgatgaggtggtcctcccaccacagagccaggaggtagattgggaagtggagctggccgtggtcattggaaagaaaggcaagcacatcaaggccacagatgctatggcccacgtggccggcttcactgtggctcatgacgtgagtgctcgtgactggcaaatgagacgtaatgggaaacaatggctgctgggaaaaaccttcgacaccttctgccctctgggccctgccttggtgaccaaggacagtgtagcagatccacacaacttaaagatctgctgccgagtgaatggggaagtggtccagagcggcaacaccaaccagatggtattcaagacagaggacctgatagcctgggtctcccagtttgttaccttttacccaggggatgtcatcctaactgggacccccccaggtgtcggtgtattcaggaaacctcctgtctttctcaagaagggggatgaagtccagtgtgagattgaagaactaggtgtcatcatcaacaaggtggtgtgatggctcctgcacaggccctgcacataggatgagggcatctgctcccactcagcctagcccagggaaaggcccagtgacaggtgtggacaggtgccagccctgcaagccgcctcttctcggtagaagggagaaggacagagctctcttcaataaattcgtcaggtcaaagca

SEQ ID NO: 429678 - DNA, 913 bp, Homo sapiens
ttgctcttctgcagtcagtggtgtggggacctgtgcctgcatcccatgatgctgtctgccactgcccaaaatgtatgggtctacaagtcacacctcccttgtcattcactgggctctggttcgtggtgatggcaaacatgggatggcagcgaagccatactgacaaaggttgaggcccttcagcatggtgtgcagcctctcagcatggacagtgggccctgaagccactgcagctcactgttcctctcccaccctacaggaggtagattgggaagtggagctggccgtggtcattggaaagaaaggcaagcacatcaaggccacagatgctatggcccacgtggccggcttcactgtggctcatgacgtgagtgctcgtgactggcaaatgagacgtaatgggaaacaatggctgctgggaaaaaccttcgacaccttctgccctctgggccctgccttggtgaccaaggacagtgtagcagatccacacaacttaaagatctgctgccgagtgaatggggaagtggtccagagcggcaacaccaaccagatggtattcaagacagaggacctgatagcctgggtctcccagtttgttaccttttacccaggggatgtcatcctaactgggacccccccaggtgtcggtgtattcaggaaacctcctgtctttctcaagaagggggatgaagtccagtgtgagattgaagaactaggtgtcatcatcaacaaggtggtgtgatggctcctgcacaggccctgcacataggatgagggcatctgctcccactcagcctagcccagggaaaggcccagtgacaggtgtggacaggtgccagccctgcaagccgcctcttctcggtagaagggagaaggacagagctctcttcaataaattcgtcaggtcaaagca

SEQ ID NO: 429679 - DNA, 1126 bp, Homo sapiens
ccgcttttctctcgggtgatccggccgagtggccctgggttagcagctgctgcatttccccggctggctgcggtcactggtggcagtgctcaggcgcccgccgcccttgaccttcggccccgcgagctctaaccctacagcgcaggaagatcggccgccgcggccaggctctgatgctggtgtctggtagaagaaggttactcacagttctgctgcaggctcagaagtggccctttcaaccctccagagacatgagactagtgcagttccgggcaccccacctggtggggcctcacttgggcctggagacagggaatggtggaggggttatcaacctcaatgcctttgaccccacactcccgaagacgatgacgcagttcctagagcagggagaggccaccctctcagtggcaagaagagccctggctgcccagttgccagtcctaccacggtcggaggtaaccttcctggctccagtcacacgaccagataaggtggtgtgtgtgggcatgaattatgtggaccactgcaaagaacagaacgtgcccgtgcccaaggagcccatcatcttcagcaagtttgccagctccatcgtggggccctatgatgaggtggtcctcccaccacagagccaggaggtagattgggaagtggagctggccgtggtcattggaaagaaaggcaagcacatcaagatccacacaacttaaagatctgctgccgagtgaatggggaagtggtccagagcggcaacaccaaccagatggtattcaagacagaggacctgatagcctgggtctcccagtttgttaccttttacccaggggatgtcatcctaactgggacccccccaggtgtcggtgtattcaggaaacctcctgtctttctcaagaagggggatgaagtccagtgtgagattgaagaactaggtgtcatcatcaacaaggtggtgtgatggctcctgcacaggccctgcacataggatgagggcatctgctcccactcagcctagcccagggaaaggcccagtgacaggtgtggacaggtgccagccctgcaagccgcctcttctcggtagaagggagaaggacagagctctcttcaataaattcgtcaggtcaaagca

SEQ ID NO: 429680 - DNA, 999 bp, Homo sapiens
tgttatttcatcagggctgggctttattgtatatactggccctgttcttcatagtctagatagaagaaggttactcacagttctgctgcaggctcagaagtggccctttcaaccctccagagacatgagactagtgcagttccgggcaccccacctggtggggcctcacttgggcctggagacagggaatggtggaggggttatcaacctcaatgcctttgaccccacactcccgaagacgatgacgcagttcctagagcagggagaggccaccctctcagtggcaagaagagccctggctgcccagttgccagtcctaccacggtcggaggtaaccttcctggctccagtcacacgaccagataaggtggtgtgtgtgggcatgaattatgtggaccactgcaaagaacagaacgtgcccgtgcccaaggagcccatcatcttcagcaagtttgccagctccatcgtggggccctatgatgaggtggtcctcccaccacagagccaggaggtagattgggaagtggagctggccgtggtcattggaaagaaaggcaagcacatcaagatccacacaacttaaagatctgctgccgagtgaatggggaagtggtccagagcggcaacaccaaccagatggtattcaagacagaggacctgatagcctgggtctcccagtttgttaccttttacccaggggatgtcatcctaactgggacccccccaggtgtcggtgtattcaggaaacctcctgtctttctcaagaagggggatgaagtccagtgtgagattgaagaactaggtgtcatcatcaacaaggtggtgtgatggctcctgcacaggccctgcacataggatgagggcatctgctcccactcagcctagcccagggaaaggcccagtgacaggtgtggacaggtgccagccctgcaagccgcctcttctcggtagaagggagaaggacagagctctcttcaataaattcgtcaggtcaaagca

SEQ ID NO: 429681 - DNA, 1349 bp, Homo sapiens
ccgcttttctctcgggtgatccggccgagtggccctgggttagcagctgctgcatttccccggctggctgcggtcactggtggcagtgctcaggcgcccgccgcccttgaccttcggccccgcgagctctaaccctacagcgcaggaagatcggccgccgcggccagcagagccaagcacagtgggaactttcagaaagcactggttgaaggaacgctggaatccctgggacttactgcgtagcatgtagtagttgctcctctagaaaagtttcaccttatgaagtatagcaggctctgatgctggtgtctggtagaagaaggttactcacagttctgctgcaggctcagaagtggccctttcaaccctccagagacatgagactagtgcagttccgggcaccccacctggtggggcctcacttgggcctggagacagggaatggtggaggggttatcaacctcaatgcctttgaccccacactcccgaagacgatgacgcagttcctagagcagggagaggccaccctctcagtggcaagaagagccctggctgcccagttgccagtcctaccacggtcggaggtaaccttcctggctccagtcacacgaccagataaggtggtgtgtgtgggcatgaattatgtggaccactgcaaagaacagaacgtgcccgtgcccaaggagcccatcatcttcagcaagtttgccagctccatcgtggggccctatgatgaggtggtcctcccaccacagagccaggtcagtgtctccccactgccctccctagtcactgggcccatcacaagggcattctgagctcagtattgagcctactggagccacctctcgctcaatagcgcattcagcagaaactctacaggattgtacacacagtagtaacactggccttggaaaaaaaaagttaatgtacgtgttttcctggttacaaaagcaatgcaccttcactgtagataataaaatagagataaacattaaaaaattatgtcacccataatcccactgcccatggctcggaatattaatgtttttctgtctaccttcccagtgtttctccgctcctgtatatgtttatactgtacatatacttaccttttacttaagactccatcaggagcattttttcatgccattaagtattcgccctgacaccacggagtttgttatgtagattagtttattcctgagtaccttactgctggatactgtttctagtttttggcttctataaataaatgttgcagtaaacatccttatgtggaaaaggctttgcatgtccattaatacattattatttcctttgaataaaccctttggaatttaaatatg

SEQ ID NO: 429682 - DNA, 1104 bp, Homo sapiens
ccgcttttctctcgggtgatccggccgagtggccctgggttagcagctgctgcatttccccggctggctgcggtcactggtggcagtgctcaggcgcccgccgcccttgaccttcggccccgcgagctctaaccctacagcgcaggaagatcggccgccgcggccagcagagccaagcacagtgggaactttcagaaagcactggttgaaggaacgctggaatccctgggacttactgcgtagcatgtagtagttgctcctctagaaaagtttcaccttatgaagtatagcaggctctgatgctggtgtctggtagaagaaggttactcacagttctgctgcaggctcagaagtggccctttcaaccctccagagacatgagactagtgcagttccgggcaccccacctggtggggcctcacttgggcctggagacagggaatggtggaggggttatcaacctcaatgcctttgaccccacactcccgaagacgatgacgcagttcctagagcagggagaggccaccctctcagtggcaagaagagccctggctgcccagttgccagtcctaccacggtcggaggtaaccttcctggctccagtcacacgaccagataaggtggtgtgtgtgggcatgaattatgtggaccactgcaaagaacagaacgtgcccgtgccctgcacaggccctgcacataggatgagggcatctgctcccactcagcctagcccagggaaaggcccagtgacaggtgtggacaggtgccagccctgcaagccgcctcttctcggtagaagggagaaggacagagctctcttcaataaattcgtcaggtcaaagcaaaaaaaaaaaggcacaaacacacaaccacaagccaaccaaacacacacgaaaggaaacaagaaacggcaaaacacaagagaacacacgccgcaacccacacgagcaccatacgcagacaaaaaaccgagggcaagcacccgcccacgagaggggagacaaaagagaaagaggaacaacacacagacgaccaagcggggagcaccgagcgcgaaagagcaaaggacaacggacacagagaaagaacacaccacacactcaa

SEQ ID NO: 429683 - DNA, 1047 bp, Homo sapiens
ccgcttttctctcgggtgatccggccgagtggccctgggttagcagctgctgcatttccccggctggctgcggtcactggtggcagtgctcaggcgcccgccgcccttgaccttcggccccgcgagctctaaccctacagcgcaggaagatcggccgccgcggccagcagagccaagcacagtgggaactttcagaaagcactggttgaaggaacgctggaatccctgggacttactgcgtagcatgtagtagttgctcctctagaaaagtttcaccttatgaagtatagcaggctctgatgctggtgtctggtagaagaaggttactcacagttctgctgcaggctcagaagtggccctttcaaccctccagagacatgagactagtgcagttccgggcaccccacctggtggggcctcacttgggcctggagacagggaatggtggaggggttatcaacctcaatgcctttgaccccacactcccgaagacgatgacgcagttcctagagcaggtgtcggtgtattcaggaaacctcctgtctttctcaagaagggggatgaagtccagtgtgagattgaagaactaggtgtcatcatcaacaaggtggtgtgatggctcctgcacaggccctgcacataggatgagggcatctgctcccactcagcctagcccagggaaaggcccagtgacaggtgtggacaggtgccagccctgcaagccgcctcttctcggtagaagggagaaggacagagctctcttcaataaattcgtcaggtcaaagcaaaaaaaaaaaggcacaaacacacaaccacaagccaaccaaacacacacgaaaggaaacaagaaacggcaaaacacaagagaacacacgccgcaacccacacgagcaccatacgcagacaaaaaaccgagggcaagcacccgcccacgagaggggagacaaaagagaaagaggaacaacacacagacgaccaagcggggagcaccgagcgcgaaagagcaaaggacaacggacacagagaaagaacacaccacacactcaa

SEQ ID NO: 429684 - DNA, 477 bp, Homo sapiens
ggagtgtcagccccacaagggcaaggatgtttgttttgtttgtagctccatactcggtacccaggatgctgcctggcatatagtagggtcttgatattaagtgatttactccatacggttcccctagcatgcaggatggtacctggcattcagtaggagctcaagagatgtttgttgaatgaattggtgtgataggggacttggtgaggacccgcccccacttagatagctttagaagctgttggatacttcatccctctgcgtggtgctgcagacatggagatgaagaggtggcctcagtgtgggagtagaggggagcattcccttgactgaggaaggaatgttagaaaagagagctgaggctgggcatggtggctcatgtctgtaaacccagcactttgggaggccgaggtgggcagatcatgaggtcaggagtttgagatcagcctgaccaacattgtgaaccccgtctctact

SEQ ID NO: 429685 - DNA, 577 bp, Homo sapiens
tgtctgtatcctcctgctctctgtaccaagaccacacaatagtcagagaagcctggtcaggacccaggccccagtcctcaccttgtggcctcccacaggaaggggccctggaccttctgaagaagctgcacagctgccagatgtccatccagctactacagacaaccaggattggagttgctgttaatggggtccgcaagcactgctcagacaaggaggtggtgtccttggccaaagtccttatcaaaaactggaagcggctgctagactcccctggacccccaaaaggagaaaaaggagaggaaagagaaaaggcaaagaagaaggaaaaagggcttgagtgttcagactggaagccagaagcaggcctttctccaccaaggaaaaaaacgagaagaccccaaaaccaggagagactctgtggactccaagtcttctgcctcctcctctccaaaaagaccatcggtggaaaggtaaaggaaaccacagctttctccatcccagtgtcctattcagcctgtgtccccttctctgtttttatggaggaagcccaaggcagaggaaaggagggaaggaa

SEQ ID NO: 429686 - DNA, 356 bp, Homo sapiens
cgccgtgacgcagctgtccctttgcctgctactaaatgatttgcggtgggtgaggtggcagctggggacccccttgaggagaaaaaggagaggaaagagaaaaggcaaagaagaaggaaaaagggcttgagtgttcagactggaagccagaagcaggcctttctccaccaaggaaaaaaacgagaagaccccaaaaccaggtattcttttttgggatggagagaagggagctgacacttgtcacgtcctctgacagcaactcagtgtatattatctcatttaaacctttcatcctggggaggaagatattggtattatctcctgcagtgccccctctgggggtcttctttggctca

SEQ ID NO: 429687 - DNA, 793 bp, Homo sapiens
tccttgccaattttcttctttcaggagagactctgtggactccaagtcttctgcctcctcctctccaaaaagaccatcggtggaaagatcaaacagcagcaaatcaaaagcggagagccccaaaacacctagcagccccttgacccccacgtttgcctcttccatgtgtctcctggccccctgctatctcacaggggactctgtccgggacaagtgtgtggagatgctgtcagcagccctgaaggcggacgatgattacaaggactatggagtcaactgtgacaagatggcatcagaaatcgaagatcatatctaccaagagctcaagagcacggacatgaagtaccggaaccgcgtgcgcagccgcataagcaacctcaaggaccccaggaaccccggcctgcggcggaacgtgctcagtggggccatctccgcagggcttatagccaagatgacggcagaggaaatggccagtgatgaactgagggagttgaggaatgccatgacccaggaggccatccgtgagcaccagatggccaagactggcggcaccaccactgacctcttccagtgcagcaaatgcaagaagaagaactgcacctataaccaggtgcagacacgcagtgctgatgagcccatgactacctttgtcttatgcaatgaatgtggcaatcgctggaagttctgctgatggaacagccagccatgaacaaggtgaggaagaagaaagaggaagcgctgaattatctgaactggagaagcaataaaaattaaagtgaaggaaaatactgaa

SEQ ID NO: 429688 - DNA, 1566 bp, Homo sapiens
  misc_feature (100)..(100): n is a, c, g, or t
cgtgtgtgtttggggcccgcgcgggttgcgcgccctccgccttcgcgcctcctgcccccgaggccctactgctgcccctgtgcccctcgccccgccgggngtcgcgggccaacatgggccaggaagaggagctgctgaggatcgccaaaaagctggagaagatggtggccaggaagaacacggaaggggccctggaccttctgaagaagctgcacagctgccagatgtccatccagctactacagacaaccaggattggagttgctgttaatggggtccgcaagcactgctcagacaaggaggtggtgtccttggccaaagtccttatcaaaaactggaagcggctgctagactcccctggacccccaaaaggagaaaaaggagaggaaagagaaaaggcaaagaagaaggaaaaagggcttgagtgttcagactggaagccagaagcaggcctttctccaccaaggaaaaaaacgagaagaccccaaaaccaggagagactctgtggactccaagtcttctgcctcctcctctccaaaaagaccatcggtggaaagatcaaacagcagcaaatcaaaagcggagagccccaaaacacctagcagccccttgacccccacgtttgcctcttccatgtgtctcctggccccctgctatctcacaggggactctgtccgggacaagtgtgtggagatgctgtcagcagccctgaaggcggacgatgattacaaggactatggagtcaactgtgacaagatggcatcagaaatcgaagatcatatctaccaagagctcaagagcacggacatgaagtaccggaaccgcgtgcgcagccgcataagcaacctcaaggaccccaggaaccccggcctgcggcggaacgtgctcagtggggccatctccgcagggcttatagccaagatgacggcagaggaaatggccagtgatgaactgagggagttgaggaatgccatgacccaggaggccatccgtgagcaccagatggccaagactggcggcaccaccactgacctcttccagtgcagcaaatgcaagaagaagaactgcacctataaccaggtgcagacacgcagtgctgatgagcccatgactacctttgtcttatgcaatgaatgtggcaatcgctggaagttctgctgatggaacagccagccatgaacaaggtgaggaagaagaaagaggaagcgctgaattatctgaactggagaagcaataaaaattaaagtgaaggaaaatactgaactctgtctgagtgggatggtatgagttagaggaagaattctcttgcaaattaataatcggtcattagaaacaattggttaatgggggagcctaattggagaatgatgctgagaatttgtattgatgaacctcttttagaaactgcagagggctgggcacggtggcttatggctgtaatctgcaaactctgggaggctgaggtgggagaatcgcttaaccccagaagtttgagtccagcccaggcaacacagcaagaccccatctctataaaaagaaaaaataaagaaactgcagcgccttaga

SEQ ID NO: 429689 - DNA, 1051 bp, Homo sapiens
gctgccgcctactactactaaattagcggccggtcgatccgtttcaaaaaaaaaaaaaaaaattgggagtgatattagtgcctatctcagagtgattgtaagggtgaaatgagttaatacatgttaatactgcctagcacagaataaatgctcaataaatgtagctcttgtgattttgttactgttagagaaaggacattctgaatgctttaaatccagctcctcttccttgactcttactagttggagggacaggatccactagaggtaacaactacagacttctgaacacattttcagttggtctccgttgccatgtgggagaccaaaagtctaaccaagtgattagtagccatcccagtgatgttcttgaccataaattgagagctcagcacattcctggcaccgaattgccattcatttattacctgatatcattctcacattcacaagctttatgagctcattttacaggtgagtgatttgttcaagatcacacagctaataatggcagagctgggctttggactctggtctgtgtggctccagacaccaccttctttttcatattcccccacagcctccttggaggatgccgagaaacctttcaaattttgttgcctttctggttttgtagttctgctgatggaacagccagccatgaacaaggtgaggaagaagaaagaggaagcgctgaattatctgaactggagaagcaataaaaattaaagtgaaggaaaatactgaactctgtctgagtgggatggtatgagttagaggaagaattctcttgcaaattaataatcggtcattagaaacaattggttaatgggggagcctaattggagaatgatgctgagaatttgtattgatgaacctcttttagaaactgcagagggctgggcacggtggcttatggctgtaatctgcaaactctgggaggctgaggtgggagaatcgcttaaccccagaagtttgagtccagcccaggcaacacagcaagaccccatctctataaaaagaaaaaataaagaaactgcagcgccttaga

SEQ ID NO: 429690 - DNA, 748 bp, Homo sapiens
gctgccgcctactactactaaattagcggccggtcgatccgtttcaaaaaaaaaaaaaaaaattgggagtgatattagtgcctatctcagagtgattgtaagggtgaaatgagttaatacatgttaatactgcctagcacagaataaatgctcaataaatgtagctcttgtgattttgttactgttagagaaaggacattctgaatgctttaaatccagctcctcttccttgactcttactagttggagggacaggatccactagaggtaacaactacagacttctgaacacattttcagttggtctccgttgccatgtgggagaccaaaagtctaaccaagtgattagtagccatcccagtgatgttcttgaccataaattgagagctcagcacattcctggcaccgaattgccattcatttattacctgatatcattctcacattcacaagctttatgagctcattttacaggtgagtgatttgttcaagatcacacagctaataatggcagagctgggctttggactctggtctgtgtggctccagacaccaccttctttttcatattcccccacagcctccttggaggatgccgagaaacctttcaaattttgttgcctttctggttttgtagttctgctgatggaacagccagccatgaacaaggtgaggaagaagaaagaggaagcgctgaattatctgaactggagaagcaataaaaattaaagtgaaggaaaatactgaa

SEQ ID NO: 429691 - DNA, 1222 bp, Homo sapiens
  misc_feature (100)..(100): n is a, c, g, or t
cgtgtgtgtttggggcccgcgcgggttgcgcgccctccgccttcgcgcctcctgcccccgaggccctactgctgcccctgtgcccctcgccccgccgggngtcgcgggccaacatgggccaggaagaggagctgctgaggatcgccaaaaagctggagaagatggtggccaggaagaacacggaaggggccctggaccttctgaagaagctgcacagctgccagatgtccatccagctactacagacaaccaggattggagttgctgttaatggggtccgcaagcactgctcagacaaggaggtggtgtccttggccaaagtccttatcaaaaactggaagcggctgctagactcccctggacccccaaaaggagaaaaaggagaggaaagagaaaaggcaaagaagaaggaaaaagggcttgagtgttcagactggaagccagaagcaggcctttctccaccaaggaaaaaaacgagaagaccccaaaaccaggagagactctgtggactccaagtcttctgcctcctcctctccaaaaagaccatcggtggaaagatcaaacagcagcaaatcaaaagcggagagccccaaaacacctagcagccccttgacccccacgtttgcctcttccatgtgtctcctggccccctgctatctcacaggggactctgtccgggacaagtgtgtggagatgctgtcagcagccctgaaggcggacgatgattacaaggactatggagtcaactgtgacaagatggcatcagaaatcgaagatcatatctaccaagagctcaagagcacggacatgaagtaccggaaccgcgtgcgcagccgcataagcaacctcaaggaccccaggaaccccggcctgcggcggaacgtgctcagtggggccatctccgcagggcttatagccaagatgacggcagagagatgagggaagcgggagtgatgaagacgagaatgatgaaggcaatgatgaagattatagtagccctgccagtgaagggggttgcaagaagaagaagagtaaagttcctagcagaaacagtgctgatgatgaggaactgaccaatgatagcctgaccctatctcaaagcaagagtaatgaggactcgctgattcttgagaagagtcaaaactggagctctccaaaaatggaccatattctgatttgctgtgtttgttgggcggatgatagtgaggaccgatgaaataag

SEQ ID NO: 429692 - DNA, 624 bp, Homo sapiens
  misc_feature (100)..(100): n is a, c, g, or t
cgtgtgtgtttggggcccgcgcgggttgcgcgccctccgccttcgcgcctcctgcccccgaggccctactgctgcccctgtgcccctcgccccgccgggngtcgcgggccaacatgggccaggaagaggagctgctgaggatcgccaaaaagctggagaagatggtggccaggaagaacacggaaggggccctggaccttctgaagaagctgcacagctgccagatgtccatccagctactacagacaaccaggattggagttgctgttaatggggtccgcaagcactgctcaggaaatggccagtgatgaactgagggagttgaggaatgccatgacccaggaggccatccgtgagcaccagatggccaagactggcggcaccaccactgacctcttccagtgcagcaaatgcaagaagaagaactgcacctataaccaggtgcagacacgcagtgctgatgagcccatgactacctttgtcttatgcaatgaatgtggcaatcgctggaagttctgctgatggaacagccagccatgaacaaggtgaggaagaagaaagaggaagcgctgaattatctgaactggagaagcaataaaaattaaagtgaaggaaaatactgaa

SEQ ID NO: 429693 - DNA, 874 bp, Homo sapiens
  misc_feature (100)..(100): n is a, c, g, or t
cgtgtgtgtttggggcccgcgcgggttgcgcgccctccgccttcgcgcctcctgcccccgaggccctactgctgcccctgtgcccctcgccccgccgggngtcgcgggccaacatgggccaggaagaggagctgctgaggatcgccaaaaagctggagaagatggtggccaggaagaacacggaaggggccctggaccttctgaagaagctgcacagctgccagatgtccatccagctactacagacaaccaggattggagttgctgttaatggggtccgcaagcactgctcagacaaggaggtggtgtccttggccaaagtccttatcaaaaactggaagcggctgctagactcccctggacccccaaaaggagaaaaaggagaggaaagagaaaaggcaaagaagaaggaaaaagggcttgagtgttcagactggaagccagaagcaggcctttctccaccaaggaaaaaaacgagaagaccccaaaaccaggagagactctgtggactccaagtcttctgcctcctcctctccaaaaagaccatcggtggaaagatcaaacagcagcaaatcaaaagcggagagccccaaaacacctagcagccccttgacccccacgtttgcctcttccatgtgtctcctggccccctgctatctcacaggggactctgtccgggacaagtgtgtggagatgctgtcagcagccctgaaggcggacgatgattacaaggactatggagtcaactgtgacaagatggcatcagaaatcgaagatcatatccttgaactgtgccggggctgtgggtgtctgcaccgtctagcagcacccatccaaggtgcaagcgagctgggagagtgaggaaggagaggaa

SEQ ID NO: 429694 - DNA, 282 bp, Homo sapiens
agatcatgccattgcactccagcctgggtgacaagtgaaactccgtttcaaaaaaaaaaaaaaaaattgggagtgatattagtgcctatctcagagtgattgtaagggtgaaatgagttaatacatgttaatactgcctagcacagaataaatgctcaataaatgtagctcttgtgattttgttactgttagagaaaggacattctgaatgctttaaatccagctcctcttccttgactcttactagttggagggacaggatccactagaggtaacaactac

SEQ ID NO: 429695 - DNA, 396 bp, Homo sapiens
ccaagtgattagtagccatcccagtgatgttcttgaccataaattgagagctcagcacattcctggcaccgaattgccattcatttattacctgatatcattctcacattcacaagctttatgagctcattttacaggtgagtgatttgttcaagatcacacagctaataatggcagagctgggctttggactctggtctgtgtggctccagacaccaccttctttttcatattcccccacagcctccttggaggatgccgagaaacctttcaaattttgttgcctttctggttttgtagttctgctgatggaacagccagccatgaacaaggtgaggaagaagaaagaggaagcgctgaattatctgaactggagaagcaataaaaattaaagtg

SEQ ID NO: 429696 - DNA, 1263 bp, Homo sapiens
  misc_feature (100)..(100): n is a, c, g, or t
cgtgtgtgtttggggcccgcgcgggttgcgcgccctccgccttcgcgcctcctgcccccgaggccctactgctgcccctgtgcccctcgccccgccgggngtcgcgggccaacatgggccaggaagaggagctgctgaggatcgccaaaaagctggagaagatggtggccaggaagaacacggaaggggccctggaccttctgaagaagctgcacagctgccagatgtccatccagctactacagacaaccaggattggagttgctgttaatggggtccgcaagcactgctcagacaaggaggtggtgtccttggccaaagtccttatcaaaaactggaagcggctgctagactcccctggacccccaaaaggagaaaaaggagaggaaagagaaaaggcaaagaagaaggaaaaagggcttgagtgttcagactggaagccagaagcaggcctttctccaccaaggaaaaaaacgagaagaccccaaaaccaggagagactctgtggactccaagtcttctgcctcctcctctccaaaaagaccatcggtggaaagatcaaacagcagcaaatcaaaagcggagagccccaaaacacctagcagccccttgacccccacgtttgcctcttccatgtgtctcctggccccctgctatctcacaggggactctgtccgggacaagtgtgtggagatgctgtcagcagccctgaaggcggacgatgattacaaggactatggagtcaactgtgacaagatggcatcagaaatcgaagatcatatctaccaagagctcaagagcacggacatgaagtaccggaaccgcgtgcgcagccgcataagcaacctcaaggaccccaggaaccccggcctgcggcggaacgtgctcagtggggccatctccgcagggcttatagccaagatgacggcagaggaaatggccagtgatgaactgagggagttgaggaatgccatgacccaggaggccatccgtgagcaccagatggccaagactggcggcaccaccactgacctcttccagtgcagcaaatgcaagaagaagaactgcacctataaccaggtgcagacacgcagtgctgatgagcccatgactacctttgtcttatgcaatgaatgtggcaatcgctggaagttctgctgatggaacagccagccatgaacaaggtgaggaagaagaaagaggaagcgctgaattatctgaactggagaagcaataaaaattaaagtgaaggaaaatactgaa

SEQ ID NO: 429697 - DNA, 1314 bp, Homo sapiens
ggaatgggaggggtcctgacagtcagccaagtgccacccccaaccctaggttcaggtttcaccaaagctacagatatcctccatgtcaggcttagccctgggccctcggcctcgtgcagagcagggccttagttacagtagtggggttctgacctcagccaggagtcagggctaggactctgggggtccaggttggaaggggaggtggtggtagagctggggcaggatctgccaatgatggcagccattcctgtgtatccattcccagattatgccttaaccctctcactttgcagacaaccaggattggagttgctgttaatggggtccgcaagcactgctcagacaaggaggtggtgtccttggccaaagtccttatcaaaaactggaagcggctgctagactcccctggacccccaaaaggagaaaaaggagaggaaagagaaaaggcaaagaagaaggaaaaagggcttgagtgttcagactggaagccagaagcaggcctttctccaccaaggaaaaaaacgagaagaccccaaaaccaggagagactctgtggactccaagtcttctgcctcctcctctccaaaaagaccatcggtggaaagatcaaacagcagcaaatcaaaagcggagagccccaaaacacctagcagccccttgacccccacgtttgcctcttccatgtgtctcctggccccctgctatctcacaggggactctgtccgggacaagtgtgtggagatgctgtcagcagccctgaaggcggacgatgattacaaggactatggagtcaactgtgacaagatggcatcagaaatcgaagatcatatctaccaagagctcaagagcacggacatgaagtaccggaaccgcgtgcgcagccgcataagcaacctcaaggaccccaggaaccccggcctgcggcggaacgtgctcagtggggccatctccgcagggcttatagccaagatgacggcagaggaaatggccagtgatgaactgagggagttgaggaatgccatgacccaggaggccatccgtgagcaccagatggccaagactggcggcaccaccactgacctcttccagtgcagcaaatgcaagaagaagaactgcacctataaccaggtgcagacacgcagtgctgatgagcccatgactacctttgtcttatgcaatgaatgtggcaatcgctggaagttctgctgatggaacagccagccatgaacaaggtgaggaagaagaaagaggaagcgctgaattatctgaactggagaagcaataaaaattaaagtgaaggaaaatactgaa

SEQ ID NO: 429698 - DNA, 690 bp, Homo sapiens
cgtgtgtgtttggggcccgcgcgggttgcgcgccctccgccttcgcgcctcctgcccccgaggccctactgctgcccctgctatctcacaggggactctgtccgggacaagtgtgtggagatgctgtcagcagccctgaaggcggacgatgattacaaggactatggagtcaactgtgacaagatggcatcagaaatcgaagatcatatctaccaagagctcaagagcacggacatgaagtaccggaaccgcgtgcgcagccgcataagcaacctcaaggaccccaggaaccccggcctgcggcggaacgtgctcagtggggccatctccgcagggcttatagccaagatgacggcagaggaaatggccagtgatgaactgagggagttgaggaatgccatgacccaggaggccatccgtgagcaccagatggccaagactggcggcaccaccactgacctcttccagtgcagcaaatgcaagaagaagaactgcacctataaccaggtgcagacacgcagtgctgatgagcccatgactacctttgtcttatgcaatgaatgtggcaatcgctggaagttctgctgatggaacagccagccatgaacaaggtgaggaagaagaaagaggaagcgctgaattatctgaactggagaagcaataaaaattaaagtgaaggaaaatactgaa

SEQ ID NO: 429699 - DNA, 1948 bp, Homo sapiens
  misc_feature (100)..(100): n is a, c, g, or t
cgtgtgtgtttggggcccgcgcgggttgcgcgccctccgccttcgcgcctcctgcccccgaggccctactgctgcccctgtgcccctcgccccgccgggngtcgcgggccaacatgggccaggaagaggagctgctgaggatcgccaaaaagctggagaagatggtggccaggaagaacacggaaggggccctggaccttctgaagaagctgcacagctgccagatgtccatccagctactacagacaaccaggattggagttgctgttaatggggtccgcaagcactgctcagacaaggaggtggtgtccttggccaaagtccttatcaaaaactggaagcggctgctagactcccctggacccccaaaaggagaaaaaggagaggaaagagaaaaggcaaagaagaaggaaaaagggcttgagtgttcagactggaagccagaagcaggcctttctccaccaaggaaaaaaacgagaagaccccaaaaccaggagagactctgtggactccaagtcttctgcctcctcctctccaaaaagaccatcggtggaaagatcaaacagcagcaaatcaaaagcggagagccccaaaacacctagcagccccttgacccccacgtttgcctcttccatgtgtctcctggccccctgctatctcacaggggactctgtccgggacaagtgtgtggagatgctgtcagcagccctgaaggcggacgatgattacaaggactatggagtcaactgtgacaagatggcatcagaaatcgaagatcatatctaccaagagctcaagagcacggacatgaagtaccggaaccgcgtgcgcagccgcataagcaacctcaaggaccccaggaaccccggcctgcggcggaacgtgctcagtggggccatctccgcagggcttatagccaagatgacggcagaggaaatggccagtgatgaactgagggagttgaggaatgccatgacccaggaggccatccgtgagcaccagatggccaagactggcggcaccaccactgacctcttccagtgcagcaaatgcaagaagaagaactgcacctataaccaggtgcagacacgcagtgctgatgagcccatgactacctttgtcttatgcaatgaatgtggcaatcgctggaagttctgctgatggaacagccagccatgaacaaggtgaggaagaagaaagaggaagcgctgaattatctgaactggagaagcaataaaaattaaagtgaaggaaaatactgaactctgtctgagtgggatggtatgagttagaggaagaattctcttgcaaattaataatcggtcattagaaacaattggttaatgggggagcctaattggagaatgatgctgagaatttgtattgatgaacctcttttagaaactgcagagggctgggcacggtggcttatggctgtaatctgcaaactctgggaggctgaggtgggagaatcgcttaaccccagaagtttgagtccagcccaggcaacacagcaagaccccatctctataaaaagaaaaaataaagaaactgcagcgccttagacctgaggtgtcatatctttgacagtgggctggcagacctttgctttgagttccttctctcccatctggatctcccagccttttccaaattgaaaaatgccagatcaacacaaaccttaccccacccccacctccgagtcacacgtgcagaactgttgatacaccatttggcttcagcagatattacttccatactacgtattaggttgctgcaaaagtaattgtggtttttgcagttacttttgcagtggcctaatagaaatatttcttccctactctttcctcatctcttcccaaactctctgctattccctgttcacagctggctgtgggggcctttgaggactccagatcatatccctctaggcagggaacagatcctc

SEQ ID NO: 429700 - DNA, 1039 bp, Homo sapiens
  misc_feature (100)..(100): n is a, c, g, or t
cgtgtgtgtttggggcccgcgcgggttgcgcgccctccgccttcgcgcctcctgcccccgaggccctactgctgcccctgtgcccctcgccccgccgggngtcgcgggccaacatgggccaggaagaggagctgctgaggatcgccaaaaagctggagaagatggtggccaggaagaacacggaaggggccctggaccttctgaagaagctgcacagctgccagatgtccatccagctactacagacaaccaggattggagttgctgttaatggggtccgcaagcactgctcagacaaggaggtggtgtccttggccaaagtccttatcaaaaactggaagcggctgctagactcccctggacccccaaaaggagaaaaaggagaggaaagagaaaaggcaaagaagaaggaaaaagggcttgagtgttcagactggaagccagaagcaggcctttctccaccaaggaaaaaaacgagaagaccccaaaaccaggagagactctgtggactccaagtcttctgcctcctcctctccaaaaagaccatcggtggaaagatcaaacagcagcaaatcaaaagcggagagccccaaaacacctagcagccccttgacccccacgtttgcctcttccatgtgtctcctggccccctgctatctcacaggggactctgtccgggacaagtgtgtggagatgctgtcagcagccctgaaggcggacgatgattacaaggactatggagtcaactgtgacaagatggcatcagaaatcgaagatcatggccaagactggcggcaccaccactgacctcttccagtgcagcaaatgcaagaagaagaactgcacctataaccaggtgcagacacgcagtgctgatgagcccatgactacctttgtcttatgcaatgaatgtggcaatcgctggaagttctgctgatggaacagccagccatgaacaaggtgaggaagaagaaagaggaagcgctgaattatctgaactggagaagcaataaaaattaaagtgaaggaaaatactgaa

SEQ ID NO: 429701 - DNA, 681 bp, Homo sapiens
caggaactcggctttcagtctggccccacctccccaggcctctcatcaggtttctcaccaacttcctcttcccccaggtgccagtggcattggcaggccacactggggagttcatgtgccttgtggttgtgtctgaccgcaggctgtacctgttgaaggtgactggggagatgcgtgagcctccagctagctggctgcagctgaccctggctgttcccctgcaggatctgagtggcatagagctgggcctggcaggccagagcctgcggctagagtgggcagctggggcgggccgctgtgtgctgctgccccgagatgccaggcattgccgggccttcctagaggagctccttgatgtcttgcagtctctgccccctgcctggaggaactgtgtcagtgccacagaggaggaggtcaccccccagcaccggctctggccattgctggaaaaagactcatccttggaggctcgccagttcttctaccttcgggcgttcctggttgaaggtgaagcctctgtgcagctgatgcttccctggtctctgtaccctaccttgtcacaggcactggcccacgcgcagcacctgtacagtgcccttgcagcaactgtcagttcctggaacctggagaacctctcacttgagggcatagctgagtaacagcctcagtgtgccctgaccc

SEQ ID NO: 429702 - DNA, 3606 bp, Homo sapiens
atcattgataggcgccgggcagctgagctggtaggaggaccagacggggatgttcggctccgcccccagcgtcccgtggccatgacgaccgctcagagggactccctgttgtggaagctcgcggggttgctgcgggagtccggggatgtggtcctgtctggctgtagcaccctgagcctgctgactcccacactgcaacagctgaaccacgtatttgagctgcacctggggccatggggccctggccagacaggctttgtggctctgccctcccatcctgccgactcccctgttattcttcagcttcagtttctcttcgatgtgctgcagaaaacactttcactcaagctggtccatgttgctggtcctggccccacagggcccatcaagattttccccttcaaatcccttcggcacctggagctccgaggtgttcccctccactgtctgcatggcctccgaggcatctactcccagctggagaccctgatttgcagcaggagcctccaggcattagaggagctcctctcagcctgcggcggcgacttctgctctgccctcccttggctggctctgctttctgccaacttcagctacaatgcactgaccgccttagacagctccctgcgcctcttgtcagctctgcgtttcttgaacctaagccacaatcaagtccaggactgtcagggattcctgatggatttgtgtgagctccaccatctggacatctcctataatcgcctgcatttggtgccaagaatgggaccctcaggggctgctctgggggtcctgatactgcgaggcaatgagcttcggagcctgcatggcctagagcagctgaggaatctgcggcacctggatttggcatacaacctgctggaaggacaccgggagctgtcaccactgtggctgctggctgagctccgcaagctctacctggaggggaaccctctttggttccaccctgagcaccgagcagccactgcccagtacttgtcaccccgggccagggatgctgctactggcttccttctcgatggcaaggtcttgtcactgacagattttcagactcacacatccttggggctcagccccatgggcccacctttgccctggccagtggggagtactcctgaaacctcaggtggccctgacctgagtgacagcctctcctcagggggtgttgtgacccagcccctgcttcataaggttaagagccgagtccgtgtgaggcgggcaagcatctctgaacccagtgatacggacccggagccccgaactctgaacccctctccggctggatggttcgtgcagcagcacccggagctggagctcatgagcagcttccgggaacggttcggccgcaactggctgcagtacaggagtcacctggagccctccggaaaccctctgccggccacccccactacttctgcacccagtgcacctccagccagctcccagggccccgacactgcacccagaccttcacccccgcaggaggaagccagaggcccccaggagtcaccacagaaaatgtcagaggaggtcagggcggagccacaggaggaggaagaggagaaggaggggaaggaggagaaggaggagggggagatggtggaacagggagaagaggaggcaggagaggaggaagaagaggagcaggaccagaaggaagtggaagcggaactctgtcgccccttgttggtgtgtcccctggaggggcctgagggcgtacggggcagggaatgctttctcagggtcacttctgcccacctgtttgaggtggaactccaagcagctcgcaccttggagcgactggagctccagagtctggaggcagctgagatagagccggaggcccaggcccagaggtcgcccaggcccacgggctcagatctgctccctggagcccccatcctcagtctgcgcttctcctacatctgccctgaccggcagttgcgtcgctatttggtgctggagcctgatgcccacgcagctgtccaggagctgcttgccgtgttgaccccagtcaccaatgtggctcgggaacagcttggggaggccagggacctcctgctgggtagattccagtgtctacgctgtggccatgagttcaagccagaggagcccaggatgggattagacagtgaggaaggctggaggcctctgttccaaaagacagaatctcctgctgtgtgtcctaactgtggtagtgaccacgtggttctcctcgctgtgtctcggggaacccccaacagggagcggaaacagggagagcagtctctggctccttctccgtttgccagccctgtctgccaccctcctggccatggtgaccaccttgacagggccaagaacagcccacctcaggcaccgagcacccgtgaccatggtagttggagcctcagtcccccccctgagcgctgtggcctccgctctgtggaccaccgactccggctcttcctggatgttgaggtgttcagcgatgcccaggaggagttccagtgctgcctcaaggtgccagtggcattggcaggccacactggggagttcatgtgccttgtggttgtgtctgaccgcaggctgtacctgttgaaggtgactggggagatgcgtgagcctccagctagctggctgcagctgaccctggctgttcccctgcaggatctgagtggcatagagctgggcctggcaggccagagcctgcggctagagtgggcagctggggcgggccgctgtgtgctgctgccccgagatgccaggcattgccgggccttcctagaggagctccttgatgtcttgcagtctctgccccctgcctggaggaactgtgtcagtgccacagaggaggaggtcaccccccagcaccggctctggccattgctggaaaaagactcatccttggaggctcgccagttcttctaccttcgggcgttcctggttgaaggcccttccacctgcctcgtatccctgttgctgactccgtccaccctgttcctgttagatgaggatgctgcagggtccccggcagagccctctcctccagcagcatctggcgaagcctctgagaaggtgcctccctcggggccgggccctgctgtgcgtgtcagggagcagcagccactcagcagcctgagctccgtgctgctctaccgctcagcccctgaggacttgcggctgctcttctacgatgaggtgtcccggctggagagcttttgggcactccgtgtggtgtgtcaggagcagctgacagccctgcttgcctggatccgggaaccatgggaggagctgttttccatcggactccggacagtgatccaagaggcgctggcccttgaccgatgagggtcccacgctgaccttggccctgacctcaggagccacgctgtagacattccctctcctggtctctgggtctggcttccaggctctggctgtggatgtcttcagcctctgggtgctggccagtgaggtcccaaatgacccagggcttaagggagaggcgagagaatgatctggcctcaggggacaggccacctggtcaggaggaatatttttcctgcactttttctcaggtatcaataaagttgtttccaactcata

SEQ ID NO: 429703 - DNA, 3534 bp, Homo sapiens
atcattacctgactaaaagcccctcaggaccagggactgatctcggtcataatcattattgtgtagcaaggggatgtggtcctgtctggctgtagcaccctgagcctgctgactcccacactgcaacagctgaaccacgtatttgagctgcacctggggccatggggccctggccagacaggctttgtggctctgccctcccatcctgccgactcccctgttattcttcagcttcagtttctcttcgatgtgctgcagaaaacactttcactcaagctggtccatgttgctggtcctggccccacagggcccatcaagattttccccttcaaatcccttcggcacctggagctccgaggtgttcccctccactgtctgcatggcctccgaggcatctactcccagctggagaccctgatttgcagcaggagcctccaggcattagaggagctcctctcagcctgcggcggcgacttctgctctgccctcccttggctggctctgctttctgccaacttcagctacaatgcactgaccgccttagacagctccctgcgcctcttgtcagctctgcgtttcttgaacctaagccacaatcaagtccaggactgtcagggattcctgatggatttgtgtgagctccaccatctggacatctcctataatcgcctgcatttggtgccaagaatgggaccctcaggggctgctctgggggtcctgatactgcgaggcaatgagcttcggagcctgcatggcctagagcagctgaggaatctgcggcacctggatttggcatacaacctgctggaaggacaccgggagctgtcaccactgtggctgctggctgagctccgcaagctctacctggaggggaaccctctttggttccaccctgagcaccgagcagccactgcccagtacttgtcaccccgggccagggatgctgctactggcttccttctcgatggcaaggtcttgtcactgacagattttcagactcacacatccttggggctcagccccatgggcccacctttgccctggccagtggggagtactcctgaaacctcaggtggccctgacctgagtgacagcctctcctcagggggtgttgtgacccagcccctgcttcataaggttaagagccgagtccgtgtgaggcgggcaagcatctctgaacccagtgatacggacccggagccccgaactctgaacccctctccggctggatggttcgtgcagcagcacccggagctggagctcatgagcagcttccgggaacggttcggccgcaactggctgcagtacaggagtcacctggagccctccggaaaccctctgccggccacccccactacttctgcacccagtgcacctccagccagctcccagggccccgacactgcacccagaccttcacccccgcaggaggaagccagaggcccccaggagtcaccacagaaaatgtcagaggaggtcagggcggagccacaggaggaggaagaggagaaggaggggaaggaggagaaggaggagggggagatggtggaacagggagaagaggaggcaggagaggaggaagaagaggagcaggaccagaaggaagtggaagcggaactctgtcgccccttgttggtgtgtcccctggaggggcctgagggcgtacggggcagggaatgctttctcagggtcacttctgcccacctgtttgaggtggaactccaagcagctcgcaccttggagcgactggagctccagagtctggaggcagctgagatagagccggaggcccaggcccagaggtcgcccaggcccacgggctcagatctgctccctggagcccccatcctcagtctgcgcttctcctacatctgccctgaccggcagttgcgtcgctatttggtgctggagcctgatgcccacgcagctgtccaggagctgcttgccgtgttgaccccagtcaccaatgtggctcgggaacagcttggggaggccagggacctcctgctgggtagattccagtgtctacgctgtggccatgagttcaagccagaggagcccaggatgggattagacagtgaggaaggctggaggcctctgttccaaaagacagaatctcctgctgtgtgtcctaactgtggtagtgaccacgtggttctcctcgctgtgtctcggggaacccccaacagggagcggaaacagggagagcagtctctggctccttctccgtttgccagccctgtctgccaccctcctggccatggtgaccaccttgacagggccaagaacagcccacctcaggcaccgagcacccgtgaccatggtagttggagcctcagtcccccccctgagcgctgtggcctccgctctgtggaccaccgactccggctcttcctggatgttgaggtgttcagcgatgcccaggaggagttccagtgctgcctcaaggtgccagtggcattggcaggccacactggggagttcatgtgccttgtggttgtgtctgaccgcaggctgtacctgttgaaggtgactggggagatgcgtgagcctccagctagctggctgcagctgaccctggctgttcccctgcaggatctgagtggcatagagctgggcctggcaggccagagcctgcggctagagtgggcagctggggcgggccgctgtgtgctgctgccccgagatgccaggcattgccgggccttcctagaggagctccttgatgtcttgcagtctctgccccctgcctggaggaactgtgtcagtgccacagaggaggaggtcaccccccagcaccggctctggccattgctggaaaaagactcatccttggaggctcgccagttcttctaccttcgggcgttcctggttgaaggcccttccacctgcctcgtatccctgttgctgactccgtccaccctgttcctgttagatgaggatgctgcagggtccccggcagagccctctcctccagcagcatctggcgaagcctctgagaaggtgcctccctcggggccgggccctgctgtgcgtgtcagggagcagcagccactcagcagcctgagctccgtgctgctctaccgctcagcccctgaggacttgcggctgctcttctacgatgaggtgtcccggctggagagcttttgggcactccgtgtggtgtgtcaggagcagctgacagccctgcttgcctggatccgggaaccatgggaggagctgttttccatcggactccggacagtgatccaagaggcgctggcccttgaccgatgagggtcccacgctgaccttggccctgacctcaggagccacgctgtagacattccctctcctggtctctgggtctggcttccaggctctggctgtggatgtcttcagcctctgggtgctggccagtgaggtcccaaatgacccagggcttaagggagaggcgagagaatgatctggcctcaggggacaggccacctggtcaggaggaatatttttcctgcactttttctcaggtatcaataaagttgtttccaactcata

SEQ ID NO: 429704 - DNA, 3985 bp, Homo sapiens
atcattgataggcgccgggcagctgagctggtaggaggaccagacggggatgttcggctccgcccccagcgtcccgtggccatgacgaccgctcagagggactccctgttgtggaagctcgcggggttgctgcgggagtccggggatgtggtcctgtctggctgtagcaccctgagcctgctgactcccacactgcaacagctgaaccacgtatttgagctgcacctggggccatggggccctggccagacaggctttgtggctctgccctcccatcctgccgactcccctgttattcttcagcttcagtttctcttcgatgtgctgcagaaaacactttcactcaagctggtccatgttgctggtcctggccccacagggcccatcaagattttccccttcaaatcccttcggcacctggagctccgaggtgttcccctccactgtctgcatggcctccgaggcatctactcccagctggagaccctgatttgcagcaggagcctccaggcattagaggagctcctctcagcctgcggcggcgacttctgctctgccctcccttggctggctctgctttctgccaacttcagctacaatgcactgaccgccttagacagctccctgcgcctcttgtcagctctgcgtttcttgaacctaagccacaatcaagtccaggactgtcagggattcctgatggatttgtgtgagctccaccatctggacatctcctataatcgcctgcatttggtgccaagaatgggaccctcaggggctgctctgggggtcctgatactgcgaggcaatgagcttcggagcctgcatggcctagagcagctgaggaatctgcggcacctggatttggcatacaacctgctggaaggacaccgggagctgtcaccactgtggctgctggctgagctccgcaagctctacctggaggggaaccctctttggttccaccctgagcaccgagcagccactgcccagtacttgtcaccccgggccagggatgctgctactggcgtgagtgatcgtcctgtgtccactcttcttcccctttcctgcccagtcctcccccaccttgcaccctcttgccatccctgggtgaggggccaaggacctggaccctgcttactgtgttcttaatacctggagctcagcaggatgggcctaccacatactccctccccctttttgtctttgctcagttccttctcgatggcaaggtcttgtcactgacagattttcaggtcggtgtggttggggggcgaggactgttgggggaagacacgaagggagggcgctggggagagaacagagggctggctggtgacagggtcttcctggtcagtggaaagtagggtcccgccttttggctggcttgggcaaggcagaggtgctcccaggctccaacctctctctccttcctgtcgtcacgtgccagactcacacatccttggggctcagccccatgggcccacctttgccctggccagtggggagtactcctgaaacctcaggtggccctgacctgagtgacagcctctcctcagggggtgttgtgacccagcccctgcttcataaggttaagagccgagtccgtgtgaggcgggcaagcatctctgaacccagtgatacggacccggagccccgaactctgaacccctctccggctggatggttcgtgcagcagcacccggagctggagctcatgagcagcttccgggaacggttcggccgcaactggctgcagtacaggagtcacctggagccctccggaaaccctctgccggccacccccactacttctgcacccagtgcacctccagccagctcccagggccccgacactgcacccagaccttcacccccgcaggaggaagccagaggcccccaggagtcaccacagaaaatgtcagaggaggtcagggcggagccacaggaggaggaagaggagaaggaggggaaggaggagaaggaggagggggagatggtggaacagggagaagaggaggcaggagaggaggaagaagaggagcaggaccagaaggaagtggaagcggaactctgtcgccccttgttggtgtgtcccctggaggggcctgagggcgtacggggcagggaatgctttctcagggtcacttctgcccacctgtttgaggtggaactccaagcagctcgcaccttggagcgactggagctccagagtctggaggcagctgagatagagccggaggcccaggcccagaggtcgcccaggcccacgggctcagatctgctccctggagcccccatcctcagtctgcgcttctcctacatctgccctgaccggcagttgcgtcgctatttggtgctggagcctgatgcccacgcagctgtccaggagctgcttgccgtgttgaccccagtcaccaatgtggctcgggaacagcttggggaggccagggacctcctgctgggtagattccagtgtctacgctgtggccatgagttcaagccagaggagcccaggatgggattagacagtgaggaaggctggaggcctctgttccaaaagacagaatctcctgctgtgtgtcctaactgtggtagtgaccacgtggttctcctcgctgtgtctcggggaacccccaacagggagcggaaacagggagagcagtctctggctccttctccgtttgccagccctgtctgccaccctcctggccatggtgaccaccttgacagggccaagaacagcccacctcaggcaccgagcacccgtgaccatggtagttggagcctcagtcccccccctgagcgctgtggcctccgctctgtggaccaccgactccggctcttcctggatgttgaggtgttcagcgatgcccaggaggagttccagtgctgcctcaaggtgccagtggcattggcaggccacactggggagttcatgtgccttgtggttgtgtctgaccgcaggctgtacctgttgaaggtgactggggagatgcgtgagcctccagctagctggctgcagctgaccctggctgttcccctgcaggatctgagtggcatagagctgggcctggcaggccagagcctgcggctagagtgggcagctggggcgggccgctgtgtgctgctgccccgagatgccaggcattgccgggccttcctagaggagctccttgatgtcttgcagtctctgccccctgcctggaggaactgtgtcagtgccacagaggaggaggtcaccccccagcaccggctctggccattgctggaaaaagactcatccttggaggctcgccagttcttctaccttcgggcgttcctggttgaaggcccttccacctgcctcgtatccctgttgctgactccgtccaccctgttcctgttagatgaggatgctgcagggtccccggcagagccctctcctccagcagcatctggcgaagcctctgagaaggtgcctccctcggggccgggccctgctgtgcgtgtcagggagcagcagccactcagcagcctgagctccgtgctgctctaccgctcagcccctgaggacttgcggctgctcttctacgatgaggtgtcccggctggagagcttttgggcactccgtgtggtgtgtcaggagcagctgacagccctgcttgcctggatccgggaaccatgggaggagctgttttccatcggactccggacagtgatccaagaggcgctggcccttgaccgatgagggtcccacgctgaccttggccctgacctcaggagccacgctgtagacattccctctcctggtctctgggtctggcttccaggctctggctgtggatgtcttcagcctctgggtgctggccagtgaggtcccaaatgacccagggcttaagggagaggcgagagaatgatctggcctcaggggacaggccacctggtcaggaggaatatttttcctgcactttttctcaggtatcaataaagttgtttccaactcata

SEQ ID NO: 429705 - DNA, 3393 bp, Homo sapiens
agttttatataggccaaggttgaggcctagtccagaagaggtctcagaggaccctggctagagtttggtcaacgagataatctttttctcccctgtacccctgccaggatttgtgtgagctccaccatctggacatctcctataatcgcctgcatttggtgccaagaatgggaccctcaggggctgctctgggggtcctgatactgcgaggcaatgagcttcggagcctgcatggcctagagcagctgaggaatctgcggcacctggatttggcatacaacctgctggaaggacaccgggagctgtcaccactgtggctgctggctgagctccgcaagctctacctggaggggaaccctctttggttccaccctgagcaccgagcagccactgcccagtacttgtcaccccgggccagggatgctgctactggcgtgagtgatcgtcctgtgtccactcttcttcccctttcctgcccagtcctcccccaccttgcaccctcttgccatccctgggtgaggggccaaggacctggaccctgcttactgtgttcttaatacctggagctcagcaggatgggcctaccacatactccctccccctttttgtctttgctcagttccttctcgatggcaaggtcttgtcactgacagattttcaggtcggtgtggttggggggcgaggactgttgggggaagacacgaagggagggcgctggggagagaacagagggctggctggtgacagggtcttcctggtcagtggaaagtagggtcccgccttttggctggcttgggcaaggcagaggtgctcccaggctccaacctctctctccttcctgtcgtcacgtgccagactcacacatccttggggctcagccccatgggcccacctttgccctggccagtggggagtactcctgaaacctcaggtggccctgacctgagtgacagcctctcctcagggggtgttgtgacccagcccctgcttcataaggttaagagccgagtccgtgtgaggcgggcaagcatctctgaacccagtgatacggacccggagccccgaactctgaacccctctccggctggatggttcgtgcagcagcacccggagctggagctcatgagcagcttccgggaacggttcggccgcaactggctgcagtacaggagtcacctggagccctccggaaaccctctgccggccacccccactacttctgcacccagtgcacctccagccagctcccagggccccgacactgcacccagaccttcacccccgcaggaggaagccagaggcccccaggagtcaccacagaaaatgtcagaggaggtcagggcggagccacaggaggaggaagaggagaaggaggggaaggaggagaaggaggagggggagatggtggaacagggagaagaggaggcaggagaggaggaagaagaggagcaggaccagaaggaagtggaagcggaactctgtcgccccttgttggtgtgtcccctggaggggcctgagggcgtacggggcagggaatgctttctcagggtcacttctgcccacctgtttgaggtggaactccaagcagctcgcaccttggagcgactggagctccagagtctggaggcagctgagatagagccggaggcccaggcccagaggtcgcccaggcccacgggctcagatctgctccctggagcccccatcctcagtctgcgcttctcctacatctgccctgaccggcagttgcgtcgctatttggtgctggagcctgatgcccacgcagctgtccaggagctgcttgccgtgttgaccccagtcaccaatgtggctcgggaacagcttggggaggccagggacctcctgctgggtagattccagtgtctacgctgtggccatgagttcaagccagaggagcccaggatgggattagacagtgaggaaggctggaggcctctgttccaaaagacagaatctcctgctgtgtgtcctaactgtggtagtgaccacgtggttctcctcgctgtgtctcggggaacccccaacagggagcggaaacagggagagcagtctctggctccttctccgtttgccagccctgtctgccaccctcctggccatggtgaccaccttgacagggccaagaacagcccacctcaggcaccgagcacccgtgaccatggtagttggagcctcagtcccccccctgagcgctgtggcctccgctctgtggaccaccgactccggctcttcctggatgttgaggtgttcagcgatgcccaggaggagttccagtgctgcctcaaggtgccagtggcattggcaggccacactggggagttcatgtgccttgtggttgtgtctgaccgcaggctgtacctgttgaaggtgactggggagatgcgtgagcctccagctagctggctgcagctgaccctggctgttcccctgcaggatctgagtggcatagagctgggcctggcaggccagagcctgcggctagagtgggcagctggggcgggccgctgtgtgctgctgccccgagatgccaggcattgccgggccttcctagaggagctccttgatgtcttgcagtctctgccccctgcctggaggaactgtgtcagtgccacagaggaggaggtcaccccccagcaccggctctggccattgctggaaaaagactcatccttggaggctcgccagttcttctaccttcgggcgttcctggttgaaggcccttccacctgcctcgtatccctgttgctgactccgtccaccctgttcctgttagatgaggatgctgcagggtccccggcagagccctctcctccagcagcatctggcgaagcctctgagaaggtgcctccctcggggccgggccctgctgtgcgtgtcagggagcagcagccactcagcagcctgagctccgtgctgctctaccgctcagcccctgaggacttgcggctgctcttctacgatgaggtgtcccggctggagagcttttgggcactccgtgtggtgtgtcaggagcagctgacagccctgcttgcctggatccgggaaccatgggaggagctgttttccatcggactccggacagtgatccaagaggcgctggcccttgaccgatgagggtcccacgctgaccttggccctgacctcaggagccacgctgtagacattccctctcctggtctctgggtctggcttccaggctctggctgtggatgtcttcagcctctgggtgctggccagtgaggtcccaaatgacccagggcttaagggagaggcgagagaatgatctggcctcaggggacaggccacctggtcaggaggaatatttttcctgcactttttctcaggtatcaataaagttgtttccaactcata

SEQ ID NO: 429706 - DNA, 3750 bp, Homo sapiens
atcattgataggcgccgggcagctgagctggtaggaggaccagacggggatgttcggctccgcccccagcgtcccgtggccatgacgaccgctcagagggactccctgttgtggaagctcgcggggttgctgcgggagtccggggatgtggtcctgtctggctgtagcaccctgagcctgctgactcccacactgcaacagctgaaccacgtatttgagctgcacctggggccatggggccctggccagacaggctttgtggctctgccctcccatcctgccgactcccctgttattcttcagcttcagtttctcttcgatgtgctgcagaaaacactttcactcaagctggtccatgttgctggtcctggccccacagggcccatcaagattttccccttcaaatcccttcggcacctggagctccgaggtgttcccctccactgtctgcatggcctccgaggcatctactcccagctggagaccctgatttgcagcaggagcctccaggcattagaggagctcctctcagcctgcggcggcgacttctgctctgccctcccttggctggctctgctttctgccaacttcagctacaatgcactgaccgccttagacagctccctgcgcctcttgtcagctctgcgtttcttgaacctaagccacaatcaagtccaggactgtcagggattcctgatggatttgtgtgagctccaccatctggacatctcctataatcgcctgcatttggtgccaagaatgggaccctcaggggctgctctgggggtcctgatactgcgaggcaatgagcttcggagcctgcatggcctagagcagctgaggaatctgcggcacctggatttggcatacaacctgctggaaggacaccgggagctgtcaccactgtggctgctggctgagctccgcaagctctacctggaggggaaccctctttggttccaccctgagcaccgagcagccactgcccagtacttgtcaccccgggccagggatgctgctactggcttccttctcgatggcaaggtcttgtcactgacagattttcagactcacacatccttggggctcagccccatgggcccacctttgccctggccagtggggagtactcctgaaacctcaggtggccctgacctgagtgacagcctctcctcagggggtgttgtgacccagcccctgcttcataaggttaagagccgagtccgtgtgaggcgggcaagcatctctgaacccagtgatacggacccggagccccgaactctgaacccctctccggctggatggttcgtgcagcagcacccggagctggagctcatgagcagcttccgggaacggttcggccgcaactggctgcagtacaggagtcacctggagccctccggaaaccctctgccggccacccccactacttctgcacccagtgcacctccagccagctcccagggccccgacactgcacccagaccttcacccccgcaggaggaagccagaggcccccaggagtcaccacagaaaatgtcagaggaggtcagggcggagccacaggaggaggaagaggagaaggaggggaaggaggagaaggaggagggggagatggtggaacagggagaagaggaggcaggagaggaggaagaagaggagcaggaccagaaggaagtggaagcggaactctgtcgccccttgttggtgtgtcccctggaggggcctgagggcgtacggggcagggaatgctttctcagggtcacttctgcccacctgtttgaggtggaactccaagcagctcgcaccttggagcgactggagctccagagtctggaggcagctgagatagagccggaggcccaggcccagaggtcgcccaggcccacgggctcagatctgctccctggagcccccatcctcagtctgcgcttctcctacatctgccctgaccggcagttgcgtcgctatttggtgctggagcctgatgcccacgcagctgtccaggagctgcttgccgtgttgaccccagtcaccaatgtggctcgggaacagcttggggaggccagggacctcctgctgggtagattccagtgtctacgctgtggccatgagttcaagccagaggagcccaggatgggattagacagtgaggaaggctggaggcctctgttccaaaagacagaatctcctgctgtgtgtcctaactgtggtagtgaccacgtggttctcctcgctgtgtctcggggaacccccaacagggagcggaaacagggagagcagtctctggctccttctccgtttgccagccctgtctgccaccctcctggccatggtgaccaccttgacagggccaagaacagcccacctcaggcaccgagcacccgtgaccatggtagttggagcctcagtcccccccctgagcgctgtggcctccgctctgtggaccaccgactccggctcttcctggatgttgaggtgttcagcgatgcccaggaggagttccagtgctgcctcaaggtgccagtggcattggcaggccacactggggagttcatgtgccttgtggttgtgtctgaccgcaggctgtacctgttgaaggtgactggggagatgcgtgagcctccagctagctggctgcagctgaccctggctgttcccctgcaggatctgagtggcatagagctgggcctggcaggccagagcctgcggctagagtgggcagctggggcgggccgctgtgtgctgctgccccgagatgccaggcattgccgggccttcctagaggagctccttgatgtcttgcagtctctgccccctgcctggaggaactgtgtcagtgccacagaggaggaggtcaccccccagcaccggctctggccattgctggaaaaagactcatccttggaggctcgccagttcttctaccttcgggcgttcctggttgaaggtgaagcctctgtgcagctgatgcttccctggtctctgtaccctaccttgtcacaggcactggcccacgcgcagcacctgtacagtgcccttgcagcaactgtcagttcctggaacctggagaacctctcacttgagggcataggcccttccacctgcctcgtatccctgttgctgactccgtccaccctgttcctgttagatgaggatgctgcagggtccccggcagagccctctcctccagcagcatctggcgaagcctctgagaaggtgcctccctcggggccgggccctgctgtgcgtgtcagggagcagcagccactcagcagcctgagctccgtgctgctctaccgctcagcccctgaggacttgcggctgctcttctacgatgaggtgtcccggctggagagcttttgggcactccgtgtggtgtgtcaggagcagctgacagccctgcttgcctggatccgggaaccatgggaggagctgttttccatcggactccggacagtgatccaagaggcgctggcccttgaccgatgagggtcccacgctgaccttggccctgacctcaggagccacgctgtagacattccctctcctggtctctgggtctggcttccaggctctggctgtggatgtcttcagcctctgggtgctggccagtgaggtcccaaatgacccagggcttaagggagaggcgagagaatgatctggcctcaggggacaggccacctggtcaggaggaatatttttcctgcactttttctcaggtatcaataaagttgtttccaactcata

SEQ ID NO: 429707 - DNA, 3859 bp, Homo sapiens
atcattgataggcgccgggcagctgagctggtaggaggaccagacggggatgttcggctccgcccccagcgtcccgtggccatgacgaccgctcagagggactccctgttgtggaagctcgcggggttgctgcgggagtccggggatgtggtcctgtctggctgtagcaccctgagcctgctgactcccacactgcaacagctgaaccacgtatttgagctgcacctggggccatggggccctggccagacaggctttgtggctctgccctcccatcctgccgactcccctgttattcttcagcttcagtttctcttcgatgtgctgcagaaaacactttcactcaagctggtccatgttgctggtcctggccccacagggcccatcaagattttccccttcaaatcccttcggcacctggagctccgaggtgttcccctccactgtctgcatggcctccgaggcatctactcccagctggagaccctgatttgcagcaggagcctccaggcattagaggagctcctctcagcctgcggcggcgacttctgctctgccctcccttggctggctctgctttctgccaacttcagctacaatgcactgaccgccttagacagctccctgcgcctcttgtcagctctgcgtttcttgaacctaagccacaatcaagtccaggactgtcagggattcctgatggatttgtgtgagctccaccatctggacatctcctataatcgcctgcatttggtgccaagaatgggaccctcaggggctgctctgggggtcctgatactgcgaggcaatgagcttcggagcctgcatggcctagagcagctgaggaatctgcggcacctggatttggcatacaacctgctggaaggacaccgggagctgtcaccactgtggctgctggctgagctccgcaagctctacctggaggggaaccctctttggttccaccctgagcaccgagcagccactgcccagtacttgtcaccccgggccagggatgctgctactggcttccttctcgatggcaaggtcttgtcactgacagattttcagactcacacatccttggggctcagccccatgggcccacctttgccctggccagtggggagtactcctgaaacctcaggtggccctgacctgagtgacagcctctcctcagggggtgttgtgacccagcccctgcttcataaggttaagagccgagtccgtgtgaggcgggcaagcatctctgaacccagtgatacggacccggagccccgaactctgaacccctctccggctggatggttcgtgcagcagcacccggagctggagctcatgagcagcttccgggaacggttcggccgcaactggctgcagtacaggagtcacctggagccctccggaaaccctctgccggccacccccactacttctgcacccagtgcacctccagccagctcccagggccccgacactgcacccagaccttcacccccgcaggaggaagccagaggcccccaggagtcaccacagaaaatgtcagaggaggtcagggcggagccacaggaggaggaagaggagaaggaggggaaggaggagaaggaggagggggagatggtggaacagggagaagaggaggcaggagaggaggaagaagaggagcaggaccagaaggaagtggaagcggaactctgtcgccccttgttggtgtgtcccctggaggggcctgagggcgtacggggcagggaatgctttctcagggtcacttctgcccacctgtttgaggtggaactccaagcagctcgcaccttggagcgactggagctccagagtctggaggcagctgagatagagccggaggcccaggcccagaggtcgcccaggcccacgggctcagatctgctccctggagcccccatcctcagtctgcgcttctcctacatctgccctgaccggcagttgcgtcgctatttggtgctggagcctgatgcccacgcagctgtccaggagctgcttgccgtgttgaccccagtcaccaatgtggctcgggaacagcttggggaggccagggacctcctgctgggtagattccagtgtctacgctgtggccatgagttcaagccagaggagcccaggatgggattagacagtgaggaaggctggaggcctctgttccaaaagacagaatctcctgctgtgtgtcctaactgtggtagtgaccacgtggttctcctcgctgtgtctcggggaacccccaacagggagcggaaacagggagagcagtctctggctccttctccgtttgccagccctgtctgccaccctcctggccatggtgaccaccttgacagggccaagaacagcccacctcaggcaccgagcacccgtgaccatggtagttggagcctcagtcccccccctgagcgctgtggcctccgctctgtggaccaccgactccggctcttcctggatgttgaggtgttcagcgatgcccaggaggagttccagtgctgcctcaaggtgccagtggcattggcaggccacactggggagttcatgtgccttgtggttgtgtctgaccgcaggctgtacctgttgaaggtgactggggagatgcgtgagcctccagctagctggctgcagctgaccctggctgttcccctgcaggatctgagtggcatagagctgggcctggcaggccagagcctgcggctagagtgggcagctggggcgggccgctgtgtgctgctgccccgagatgccaggcattgccgggccttcctagaggagctccttgatgtcttgcagtctctgccccctgcctggaggaactgtgtcagtgccacagaggaggaggtcaccccccagcaccggctctggccattgctggaaaaagactcatccttggaggctcgccagttcttctaccttcgggcgttcctggttgaaggcccttccacctgcctcgtatccctgttgctgactccgtccaccctgttcctgttagatgaggatgctgcagggtccccggcagagccctctcctccagcagcatctggcgaagcctctgagaaggtgcctccctcggggccgggccctgctgtgcgtgtcagggagcagcagccactcagcagcctgagctccgtgctgctctaccgctcagcccctgaggacttgcggctgctcttctacgatgaggtgtcccggctggagagcttttgggcactccgtgtggtgtgtcaggagcagctgacagccctgcttgcctggatccgggaaccatgggaggagctgttttccatcggactccggacagtgatccaagaggcgctggcccttgaccgatgagggtcccacgctgaccttggccctgacctcaggagccacgctgtagacattccctctcctggtctctgggtctggcttccaggctctggctgtggatgtcttcagcctctgggtgctggccagtgaggtcccaaatgacccagggcttaagggagaggcgagagaatgatctggcctcaggggacaggccacctggtcaggaggaatatttttcctgcactttttctcaggtatcaataaagttgtttccaactcataaaaaaaaaaaaataaaaaataaaaaaacaatatcaataaaatactaacaacctttctgggggggcccctttacatctaacttggccttttatttcgcccgtttttaacattcatatacccttggtgttctccatcctcatactggttacaccctgttcatgcccccacaaattcggggcttgaaggatatcccccctcttcctctttgggactttctctattatggccattctctaatgttccattttaaaca

SEQ ID NO: 429708 - DNA, 1524 bp, Homo sapiens
tgtgatctagaggatcgtgtaactgggttcgagttcaagccagaggagcccaggatgggattagacagtgaggaaggctggaggcctctgttccaaaagacagaatctcctgctgtgtgtcctaactgtggtagtgaccacgtggttctcctcgctgtgtctcggggaacccccaacagggagcggaaacagggagagcagtctctggctccttctccgtttgccagccctgtctgccaccctcctggccatggtgaccaccttgacagggccaagaacagcccacctcaggcaccgagcacccgtgaccatggtagttggagcctcagtcccccccctgagcgctgtggcctccgctctgtggaccaccgactccggctcttcctggatgttgaggtgttcagcgatgcccaggaggagttccagtgctgcctcaaggtgccagtggcattggcaggccacactggggagttcatgtgccttgtggttgtgtctgaccgcaggctgtacctgttgaaggtgactggggagatgcgtgagcctccagctagctggctgcagctgaccctggctgttcccctgcaggatctgagtggcatagagctgggcctggcaggccagagcctgcggctagagtgggcagctggggcgggccgctgtgtgctgctgccccgagatgccaggcattgccgggccttcctagaggagctccttgatgtcttgcagtctctgccccctgcctggaggaactgtgtcagtgccacagaggaggaggtcaccccccagcaccggctctggccattgctggaaaaagactcatccttggaggctcgccagttcttctaccttcgggcgttcctggttgaaggcccttccacctgcctcgtatccctgttgctgactccgtccaccctgttcctgttagatgaggatgctgcagggtccccggcagagccctctcctccagcagcatctggcgaagcctctgagaaggtgcctccctcggggccgggccctgctgtgcgtgtcagggagcagcagccactcagcagcctgagctccgtgctgctctaccgctcagcccctgaggacttgcggctgctcttctacgatgaggtgtcccggctggagagcttttgggcactccgtgtggtgtgtcaggagcagctgacagccctgcttgcctggatccgggaaccatgggaggagctgttttccatcggactccggacagtgatccaagaggcgctggcccttgaccgatgagggtcccacgctgaccttggccctgacctcaggagccacgctgtagacattccctctcctggtctctgggtctggcttccaggctctggctgtggatgtcttcagcctctgggtgctggccagtgaggtcccaaatgacccagggcttaagggagaggcgagagaatgatctggcctcaggggacaggccacctggtcaggaggaatatttttcctgcactttttctcaggtatcaataaagttgtttccaactcata

SEQ ID NO: 429709 - DNA, 1977 bp, Homo sapiens
tggctgttgtgtgccctgcactgggctgggcatttctttcagtctctccttggcactaggagccgaggaggggagcctcagaggttgcaagcactcgggaagctgggctgaggagcagggattctgtgctggagcttggacgtcagtacaggcctttgacaggcttcagaggtcctgccatcctccatgctctcagcatcccctcatccctctgatcaccgcccctgctgtttttcacccggtccccctcttgctgcgcagggctcagatctgctccctggagcccccatcctcagtctgcgcttctcctacatctgccctgaccggcagttgcgtcgctatttggtgctggagcctgatgcccacgcagctgtccaggagctgcttgccgtgttgaccccagtcaccaatgtggctcgggaacagcttggggaggccagggacctcctgctgggtagattccagtgtctacgctgtggccatgagttcaagccagaggagcccaggatgggattagacagtgaggaaggctggaggcctctgttccaaaagacagaatctcctgctgtgtgtcctaactgtggtagtgaccacgtggttctcctcgctgtgtctcggggaacccccaacagggagcggaaacagggagagcagtctctggctccttctccgtttgccagccctgtctgccaccctcctggccatggtgaccaccttgacagggccaagaacagcccacctcaggcaccgagcacccgtgaccatggtagttggagcctcagtcccccccctgagcgctgtggcctccgctctgtggaccaccgactccggctcttcctggatgttgaggtgttcagcgatgcccaggaggagttccagtgctgcctcaaggtgccagtggcattggcaggccacactggggagttcatgtgccttgtggttgtgtctgaccgcaggctgtacctgttgaaggtgactggggagatgcgtgagcctccagctagctggctgcagctgaccctggctgttcccctgcaggatctgagtggcatagagctgggcctggcaggccagagcctgcggctagagtgggcagctggggcgggccgctgtgtgctgctgccccgagatgccaggcattgccgggccttcctagaggagctccttgatgtcttgcagtctctgccccctgcctggaggaactgtgtcagtgccacagaggaggaggtcaccccccagcaccggctctggccattgctggaaaaagactcatccttggaggctcgccagttcttctaccttcgggcgttcctggttgaaggcccttccacctgcctcgtatccctgttgctgactccgtccaccctgttcctgttagatgaggatgctgcagggtccccggcagagccctctcctccagcagcatctggcgaagcctctgagaaggtgcctccctcggggccgggccctgctgtgcgtgtcagggagcagcagccactcagcagcctgagctccgtgctgctctaccgctcagcccctgaggacttgcggctgctcttctacgatgaggtgtcccggctggagagcttttgggcactccgtgtggtgtgtcaggagcagctgacagccctgcttgcctggatccgggaaccatgggaggagctgttttccatcggactccggacagtgatccaagaggcgctggcccttgaccgatgagggtcccacgctgaccttggccctgacctcaggagccacgctgtagacattccctctcctggtctctgggtctggcttccaggctctggctgtggatgtcttcagcctctgggtgctggccagtgaggtcccaaatgacccagggcttaagggagaggcgagagaatgatctggcctcaggggacaggccacctggtcaggaggaatatttttcctgcactttttctcaggtatcaataaagttgtttccaactcata

SEQ ID NO: 429710 - DNA, 3398 bp, Homo sapiens
atcattgataggcgccgggcagctgagctggtaggaggaccagacggggatgttcggctccgcccccagcgtcccgtggccatgacgaccgctcagagggactccctgttgtggaagctcgcggggttgctgcgggagtccggggatgtggtcctgtctggctgtagcaccctgagcctgctgactcccacactgcaacagctgaaccacgtatttgagctgcacctggggccatggggccctggccagacaggctttgtggctctgccctcccatcctgccgactcccctgttattcttcagcttcagtttctcttcgatgtgctgcagaaaacactttcactcaagctggtccatgttgctggtcctggccccacagggcccatcaagattttccccttcaaatcccttcggcacctggagctccgaggtgttcccctccactgtctgcatggcctccgaggcatctactcccagctggagaccctgatttgcagcaggagcctccaggcattagaggagctcctctcagcctgcggcggcgacttctgctctgccctcccttggctggctctgctttctgccaacttcagctacaatgcactgaccgccttagacagctccctgcgcctcttgtcagctctgcgtttcttgaacctaagccacaatcaagtccaggactgtcagggattcctgatggatttgtgtgagctccaccatctggacatctcctataatcgcctgcatttggtgccaagaatgggaccctcaggggctgctctgggggtcctgatactgcgaggcaatgagcttcggagcctgcatggcctagagcagctgaggaatctgcggcacctggatttggcatacaacctgctggaaggacaccgggagctgtcaccactgtggctgctggctgagctccgcaagctctacctggaggggaaccctctttggttccaccctgagcaccgagcagccactgcccagtacttgtcaccccgggccagggatgctgctactggcttccttctcgatggcaaggtcttgtcactgacagattttcagactcacacatccttggggctcagccccatgggcccacctttgccctggccagtggggagtactcctgaaacctcaggtggccctgacctgagtgacagcctctcctcagggggtgttgtgacccagcccctgcttcataaggttaagagccgagtccgtgtgaggcgggcaagcatctctgaacccagtgatacggacccggagccccgaactctgaacccctctccggctggatggttcgtgcagcagcacccggagctggagctcatgagcagcttccgggaacggttcggccgcaactggctgcagtacaggagtcacctggagccctccggaaaccctctgccggccacccccactacttctgcacccagtgcacctccagccagctcccagggccccgacactgcacccagaccttcacccccgcaggaggaagccagaggcccccaggagtcaccacagaaaatgtcagaggaggtcagggcggagccacaggaggaggaagaggagaaggaggggaaggaggagaaggaggagggggagatggtggaacagggagaagaggaggcaggagaggaggaagaagaggagcaggaccagaaggaagtggaagcggaactctgtcgccccttgttggtgtgtcccctggaggggcctgagggcgtacggggcagggaatgctttctcagggtcacttctgcccacctgtttgaggtggaactccaagcagctcgcaccttggagcgactggagctccagagtctggaggcagctgagatagagccggaggcccaggcccagaggtcgcccaggcccacgggctcagatctgctccctggagcccccatcctcagtctgcgcttctcctacatctgccctgaccggcagttgcgtcgctatttggtgctggagcctgatgcccacgcagctgtccaggagctgcttgccgtgttgaccccagtcaccaatgtggctcgggaacagcttggggaggccagggacctcctgctgggtagattccagtgtctacgctgtggccatgagttcaagccagaggagcccaggatgggattagacagtgaggaaggctggaggcctctgttccaaaagacagaatctcctgctgtgtgtcctaactgtggtagtgaccacgtggttctcctcgctgtgtctcggggaacccccaacagggagcggaaacagggagagcagtctctggctccttctccgtttgccagccctgtctgccaccctcctggccatggtgaccaccttgacagggccaagaacagcccacctcaggcaccgagcacccgtgaccatggtagttggagcctcagtcccccccctgagcgctgtggcctccgctctgtggaccaccgactccggctcttcctggatgttgaggtgttcagcgatgcccaggaggagttccagtgctgcctcaaggtgccagtggcattggcaggccacactggggagttcatgtgccttgtggttgtgtctgaccgcaggctgtacctgttgaaggtgactggggagatgcgtgagcctccagctagctggctgcagctgaccctggctgttcccctgcaggatctgagtggcatagagctgggcctggcaggccagagcctgcggctagagtgggcagctggggcgggccgctgtgtgctgctgccccgagatgccaggcattgccgggccttcctagaggagctccttgatgtcttgcagtctctgccccctgcctggaggaactgtgtcagtgccacagaggaggaggtcaccccccagcaccggctctggccattgctggaaaaagactcatccttggaggctcgccagttcttctaccttcgggcgttcctggttgaaggcccttccacctgcctcgtatccctgttgctgactccgtccaccctgttcctgttagatgaggatgctgcagggtccccggcagagccctctcctccagcagcatctggcgaagcctctgagaaggtgcctccctcggggccgggccctgctgtgcgtgtcagggagcagcagccactcagcagcctgagctccgtgctgctctaccgctcagcccctgaggacttgcggctgctcttctacgatgaggtgaggaagctgaggcttggggatgttaaccagtttgcccagtccaaagtggtggagccgggaattgaatccacagttccctgaaattgagcccgcatcttctgtacaacagggaagatgaaaaagacaggtcctctggaggctttcagtaaacgtcggctggattctgtttacaaagctcagagtcaggatcttttatg

SEQ ID NO: 429711 - DNA, 2250 bp, Homo sapiens
atcattgataggcgccgggcagctgagctggtaggaggaccagacggggatgttcggctccgcccccagcgtcccgtggccatgacgaccgctcagagggactccctgttgtggaagctcgcggggttgctgcgggagtccggggatgtggtcctgtctggctgtagcaccctgagcctgctgactcccacactgcaacagctgaaccacgtatttgagctgcacctggggccatggggccctggccagacaggctttgtggctctgccctcccatcctgccgactcccctgttattcttcagcttcagtttctcttcgatgtgctgcagaaaacactttcactcaagctggtccatgttgctggtcctggccccacagggcccatcaagattttccccttcaaatcccttcggcacctggagctccgaggtgttcccctccactgtctgcatggcctccgaggcatctactcccagctggagaccctgatttgcagcaggagcctccaggcattagaggagctcctctcagcctgcggcggcgacttctgctctgccctcccttggctggctctgctttctgccaacttcagctacaatgcactgaccgccttagacagctccctgcgcctcttgtcagctctgcgtttcttgaacctaagccacaatcaagtccaggactgtcagggattcctgatggatttgtgtgagctccaccatctggacatctcctataatcgcctgcatttggtgccaagaatgggaccctcaggggctgctctgggggtcctgatactgcgaggcaatgagcttcggagcctgcatggcctagagcagctgaggaatctgcggcacctggatttggcatacaacctgctggaaggacaccgggagctgtcaccactgtggctgctggctgagctccgcaagctctacctggaggggaaccctctttggttccaccctgagcaccgagcagccactgcccagtacttgtcaccccgggccagggatgctgctactggcttccttctcgatggcaaggtcttgtcactgacagattttcagactcacacatccttggggctcagccccatgggcccacctttgccctggccagtggggagtactcctgaaacctcaggtggccctgacctgagtgacagcctctcctcagggggtgttgtgacccagcccctgcttcataaggttaagagccgagtccgtgtgaggcgggcaagcatctctgaacccagtgatacggacccggagccccgaactctgaacccctctccggctggatggttcgtgcagcagcacccggagctggagctcatgagcagcttccgggaacggttcggccgcaactggctgcagtacaggagtcacctggagccctccggaaaccctctgccggccacccccactacttctgcacccagtgcacctccagccagctcccagggccccgacactgcacccagaccttcacccccgcaggaggaagccagaggcccccaggagtcaccacagaaaatgtcagaggaggtcagggcggagccacaggaggaggaagaggagaaggaggggaaggaggagaaggaggagggggagatggtggaacagggagaagaggaggcaggagaggaggaagaagaggagcaggaccagaaggaagtggaagcggaactctgtcgccccttgttggtgtgtcccctggaggggcctgagggcgtacggggcagggaatgctttctcagggtcacttctgcccacctgtttgaggtggaactccaagcagctcgcaccttggagcgactggagctccagagtctggaggcagctgagatagagccggaggcccaggcccagaggtcgcccaggcccacgggctcagatctgctccctggagcccccatcctcagtctgcgcttctcctacatctgccctgaccggcagttgcgtcgctatttggtgctggagcctgatgcccacgcagctgtccaggagctgcttgccgtgttgaccccagtcaccaatgtggctcgggaacagcttggggaggccagggacctcctgctgggtagattccagtgtctacgctgtggccatgagttcaagccagaggagcccaggatgggattagacagtgaggaaggctggaggcctctgttccaaaagacagaccagtcagcactatctttgaagaagacattgaagaagaaataaatattcttgataacagctctg

SEQ ID NO: 429712 - DNA, 1346 bp, Homo sapiens
atcattgataggcgccgggcagctgagctggtaggaggaccagacggggatgttcggctccgcccccagcgtcccgtggccatgacgaccgctcagagggactccctgttgtggaagctcgcggggttgctgcgggagtccggggatgtggtcctgtctggctgtagcaccctgagcctgctgactcccacactgcaacagctgaaccacgtatttgagctgcacctggggccatggggccctggccagacaggctttgtggctctgccctcccatcctgccgactcccctgttattcttcagcttcagtttctcttcgatgtgctgcagaaaacactttcactcaagctggtccatgttgctggtcctggccccacagggcccatcaagattttccccttcaaatcccttcggcacctggagctccgaggtgttcccctccactgtctgcatggcctccgaggcatctactcccagctggagaccctgatttgcagcaggagcctccaggcattagaggagctcctctcagcctgcggcggcgacttctgctctgccctcccttggctggctctgctttctgccaacttcagctacaatgcactgaccgccttagacagctccctgcgcctcttgtcagctctgcgtttcttgaacctaagccacaatcaagtccaggactgtcagggattcctgatggatttgtgtgagctccaccatctggacatctcctataatcgcctgcatttggtgccaagaatgggaccctcaggggctgctctgggggtcctgatactgcgaggcaatgagcttcggagcctgcatggcctagagcagctgaggaatctgcggcacctggatttggcatacaacctgctggaaggacaccgggagctgtcaccactgtggctgctggctgagctccgcaagctctacctggaggggaaccctctttggttccaccctgagcaccgagcagccactgcccagtacttgtcaccccgggccagggatgctgctactggcttccttctcgatggcaaggtcttgtcactgacagattttcagactcacacatccttggggctcagccccatgggcccacctttgccctggccagtggggagtactcctgaaacctcaggtggccctgacctgagtgacagcctctcctcagggggtgttgtgacccacctctgggtgctggccagtgaggtcccaaatgacccagggcttaagggagaggcgagagaatgatctggcctcaggggacaggccacctggtcaggaggaatatttttcctgcactttttctcaggtatcaataaagttgtttccaactcata

SEQ ID NO: 429713 - DNA, 1031 bp, Homo sapiens
  misc_feature (857)..(857): n is a, c, g, or t
  misc_feature (920)..(920): n is a, c, g, or t
  misc_feature (962)..(962): n is a, c, g, or t
aacttaggtcttaggtacgaggctgggtgttgtctagccgctgtcccaagggttggtctcgcgctttcggctgcgagctctctgtggtgctggcagcgacatgtggcgcctcccgggactcctgggccgagctcttccccgtacactgggacctagcctctggagggtgactcctaagtccaccagcccagatgggcctcagactacctcctccactttgctggttcctgtgcctaacctcgacaggtcaggtccccatggcccaggcacgagcgggggtccaaggtcccatggatggaaggatgccttccaatggatgtcttcccgtgtctccccgaacaccctatgggatgccatatcttggggcactctggccgtgctggccctgcagctggcaaggcagatccacttccaggcatccctgccagcaggacctcagcgggtagaacactgctcctggcacagtcccctggaccgtttcttctcatctcccttgtggcacccatgctcctcactgcgacaacacatcctccccagccccgatggcccagctcccaggcacactggcctcagggaacccaggcttggccaggaagaagcctcagctcagccccggaacttctcacacaactctttgagaggagctcgtcctcaggacccctctgaggaaggtcccggtgattttggcttcctgcatgccagtagtagcatcgagtccgaggcaaaaccagcccagcctcagcccactggtgaaaaggaacaagataaatcaaaaactctttcccttgaggaggctgtgacttccattcagcagctcttccagctcagtgtttccatcgctttcaacttcctgggancgagacctgacagtgggacaccggagctttttaattcagaagtgagccgggtaggaagcgcgnaagggtggggttgagtggaggccccggataagggctttaaangggccccggcccgtccggcggtaaaacctcggccccggggtcgcctaaacccgtcccccagatgcctag

SEQ ID NO: 429714 - DNA, 499 bp, Homo sapiens
  misc_feature (74)..(74): n is a, c, g, or t
  misc_feature (101)..(101): n is a, c, g, or t
tttagaattttatatgactccccatagaaaaattggccctcccggccaagaatttggctgggggaagaaaaggnaaataccccccccccttcccccaaatnttaagcacctgcgccagttgtagaccaaaggcaatggtgtctgccctcctaccttagaagacaaatgcaagggcatttcaccacagagaggacctttgtgctcactttggcccaggaggcagtgatgctcatggttgcatgactttatgagtcgctgggccagggtgaggacctgggcctcctgactcctggcccagagttcttgtccatcagttcatactgcaattttatgtgaaagcattatgactgtcctacccatgggagagtaaatgtagattgaatgctaggagtcttaaagctggagagtatagattttgaggtccccatttgggaaacatgtgccagaaatgtctaggtgtttaataaaacagatattggattatctcaaaaaaaaaaac

SEQ ID NO: 429715 - DNA, 1730 bp, Homo sapiens
aaacgagagattttattttctcccaggtaggtagaccaaatctggcatggcagggacccattcttatgcagatgtgtcctgccatttttaaaactggctcccatcttgaggcgcagtttggcaattccagctcctgccctcctgtccgtattctagccagctggtcggggcaaggtagggaagctaaaggatcactccttccctttaatctagacgttgcacaaatccttgtccagaatataggcacatggccacacctcgccacagaggagactagttactgtgtatgaaggaaaaaataatcttggagggcacgtagcattctctgccacacttaggaaagaacaggctcctggggtttggagcagatcctcgatgtgtgaacaggaacctcttaaccctcatgtggggactccaaatacccttccaccatttgccctgttctttgcagtaacttggctcattttaggccttctaatgcggagactcagactccccacagcatctattggggtctagtgggcagataggcaagaggctgggattcattcacaacaaatttgttgagcatttaccttttgccagttcctgttttaggtactggggatacagtgatttacaagacaaagtccttattctcagggagcagaaaaacaataattgagaaacaaaaagagaatttcagatgttgatagatgttatgaagaaaataaaggaatgtgttagtgacttgagcaaggagcagtttttgatttagaagtcctcactgagcagaagacctttgatctaagacctgtcacaaagacagccacttttgtttcaatctggagaaagagctttccaagtggcgggaacagtaagcgcgaaaatcctgaggcaggattggattttgattgctagaggaacaaaagaaaggtgagtgtggctggagcttagagatcttgggaagggcggaaggagataaagccagaaaagcaggcaggggtcagatcaggtgaggtcttctgagccacagtaaagagtgtggattttctaagtgagacaggaagtctttggagggctttaagcaggagcaggaaagggggcagccacatgatctgatgtacttttccaaagatctctctggctgccatgtagacagacatggattgtaggattgccggggggaaaaaggagacgaggcaggcgctgttggtgacggctgaacaaaacatgtcagtggcatggtctagatgagagaaagaagagagcaagaagagtagatggatctggttatattaatgagccaggtgggaaagaggaggatggtgggatcctttgcactcttgagtcttctacccaagggcagagggctctgtcaaccctggacagtgagttttcaggcagcaaggaggcaactttatttaattcactgctggctgaatggaacctggtttctccctcatgagctttatgtgattttgatgggcaaagagtctcttctcagaatttacttgcccatcccttcattcatatattcatttattcagcaagcgcttggcatggtggcagaacgcgaaaggagcataagccataatcatgttttgcatttgtatggcgccttcaccctaggcaaaattatttcttctacattctttttctgcttctgcctccaggattttacagtctaattgaggagacaggacttgtacttttgaaacggtttagtttgtagaaaaaggcttggtata

SEQ ID NO: 429716 - DNA, 701 bp, Homo sapiens
aggaagggcctctcctgtggaaagggaaggatggcagagtcgtgagaaaggtgttgtcaagggaccaaaaatccttggctgttcagtcactgcggtcttgatccagccccagggggatgggcttcactggcagagctgggtactgctgtgcttttgccattaaaattctgttattaatgactcatcatcagtgccccagaggaagtgtgagaggacgagagggaggtggctcccatcagcagggccagcctgggtcaggatgctgggttaaagcccggcgccctcaccaatgagacctttgtgggaagctctactgcctcagtttccctatccggagatgctgttttcagggagtcctgacactatgatgggaacaaggctatttggtttactatatcattagtgctaatatagtgtggggcactcagatgttcagtaaatatacattcaacaaataagtgagtgattatactcaactccccccacccaatgcccagcaccaagcctacccagcacatagtaggtactttaagtaatttgaatgaataattttaaataacttgaatgaataattctgtattgccccccactcgccgcctatacacacgcacacacgcacacacacacacacggtttcctgtgctacttctggcacttagtaattattcaataaacacaaaatgtttgttgcaaaaaaaaat

SEQ ID NO: 429717 - DNA, 495 bp, Homo sapiens
gggtggcttcactgggggaatgggagttggtggaaggaggggttgtgcaagagatgctgggttaaagcccggcgccctcaccaatgagacctttgtgggaagctctactgcctcagtttccctatccggagatgctgttttcagggagtcctgacactatgatgggaacaaggctatttggtttactatatcattagtgctaatatagtgtggggcactcagatgttcagtaaatatacattcaacaaataagtgagtgattatactcaactccccccacccaatgcccagcaccaagcctacccagcacatagtaggtactttaagtaatttgaatgaataattttaaataacttgaatgaataattctgtattgccccccactcgccgcctatacacacgcacacacgcacacacacacacacggtttcctgtgctacttctggcacttagtaattattcaataaacacaaaatgtttgttgcaaaaaaaaat

SEQ ID NO: 429718 - DNA, 613 bp, Homo sapiens
aggaagggcctctcctgtggaaagggaaggatggcagagtcgtgagaaaggtgttgtcaagggaccaaaaatccttggctgttcagtcactgcggtcttgatccagccccagggggatgggcttcactggcagagctgggtactgctgtgcttttgccattaaaattctgttattaatgactcatcatcagtgccccagaggaagtgtgagaggacgagagggaggtggctcccatcagcagggccagcctgggtcaggatgctgggttaaagcccggcgccctcaccaatgagacctttgtgggaagctctactgcctcatgtttcccgagggagctcgagcaagttcactgctgccaacagctcacctccagggccttcccttctcctgtctttggttggcaggctggtgtcaaggttgaaggcatgggttttggtgttggcccagcctgggtccaaatcctggctctggctctactccctgcttgatcttgggaaagccacttgacctctccaagccccatatccgtgtctgtgaaatggggttaataatacctccctcccaggattgttggaaaatcaaattaaatcctattgtaaagcctgaaacctg

SEQ ID NO: 429719 - DNA, 3911 bp, Homo sapiens
gccagctcagagcttcctcgggtactcggccactcggggcatcgcggcggcctttctagccgctgtcccaagggttggtctcgcgctttcggctgcgagctctctgtggtgctggcagcgacatgtggcgcctcccgggactcctgggccgagctcttccccgtacactgggacctagcctctggagggtgactcctaagtccaccagcccagatgggcctcagactacctcctccactttgctggttcctgtgcctaacctcgacaggtcaggtccccatggcccaggcacgagcgggggtccaaggtcccatggatggaaggatgccttccaatggatgtcttcccgtgtctccccgaacaccctatgggatgccatatcttggggcactctggccgtgctggccctgcagctggcaaggcagatccacttccaggcatccctgccagcaggacctcagcgggtagaacactgctcctggcacagtcccctggaccgtttcttctcatctcccttgtggcacccatgctcctcactgcgacaacacatcctccccagccccgatggcccagctcccaggcacactggcctcagggaacccaggcttggccaggaagaagcctcagctcagccccggaacttctcacacaactctttgagaggagctcgtcctcaggacccctctgaggaaggtcccggtgattttggcttcctgcatgccagtagtagcatcgagtccgaggcaaaaccagcccagcctcagcccactggtgaaaaggaacaagataaatcaaaaactctttcccttgaggaggctgtgacttccattcagcagctcttccagctcagtgtttccatcgctttcaacttcctgggaacagagaacatgaagagtggcgaccacacggcagccttttcttacttccagaaagctgcagcccgcggctacagcaaagcgcagtacaatgcgggcttgtgtcatgagcatggcagaggcacccccagggacattagcaaggtattcccctgcccccaagcctgccttctgtgctgggctgctgagattgatgtctagaaatgagcagtgggcagggatgggggaaagtttggcttcttttctccacttggttctagcccagctgcgaaggaaaaataagaaagaagctcctaacttccaggaatttagactcaaaattcagggagggcagggattttgcctttcttctttgcaactacatcctcagcctagaatagcatcttgatgaatggattaattaatttttaaaaagtgggataagaacacaaagaggttatatataagaatgtatttcgtagagttgtatgtgaaggcaaaaaaacccaaaaaaacctgaaagtttcttcaatggaaaactggttaattacatctatttgggccttaaaatgatgtgctagatctgtatgtcagggaaagacattcatggtgtactattaaagttaaaaaaataggttataaagtagtatagagtgatctaagtctctctctctctctgcccccccccacacatatgtgcgtgcaaatgcgtagatgtctaaaaggtatgtgtgtgagtatgtctaacacatatatgtgagaagatatttgcaaggctgtacgctaaaattttaagcaagaatgatctttaggaggctgaatttcttgggattttatgtttctatttttggtttatatttttaaattttagcttatctgaattttctgactagtctataattattatgtattagttaattaaaataatttttaaaaatttcactgagtgcaaaagatgcttacagagttgccagccgactgggtgtttctccctttgccccagcggtcctttattatcagttggctgccagccagggccacagcctggctcagtaccgctatgccaggtgcctactacgagacccagcctcttcgtggaaccctgagcggcagagggcagtgtccttgctgaagcaggctgcagactcaggcttgagagaggcccaagctttcctcggggtgcttttcaccaaggagccctacctggatgagcagagagctgtgaaatatctttggcttgcagccaacaatggggactcacagagcaggtaccaccttggaatttgctatgagaaaggccttggtgtgcagaggaatctgggagaggccttgagatgttaccagcagtcagccgctctgggaaatgaggccgcccaggagaggctgcgagccctcttttccatgggggctgcagccccggggcccagcgacctgacagttacaggactgaagtctttctccagcccctccctctgcagcttgaacaccctgctagcaggaacctcacgcctaccacatgcctcgagcacaggcaaccttggcctcctctgcagaagtgggcatctcggagccagcctggaagcctccagcagggctattcccccacacccctacccactggaaaggagtgttgtaagactaggttttggctaaggtgagataaaacatagtccctggtgcctcttaggggccagagcgggcaggaggttggataacaaaaatagagcatcagcaaccctttccaggtagaaattccagcgggagttcaggttcccaagcaatttcacgtacatggctggtaagtgactgatctttccccccgcttggtagcctcacagatgagtcttggatgcattcacagtcatttctggtctgtgcaccaaaggatgcattcagtgacctatgaaaaaccctactgaagggtccagagaccctggtgctcaccttagcctttgtctttgagcaaataacttaccttcttccttcttatgcctgggttttctcacacttaaatctgtactactgtttgccaatgtctgatgtgtgtatccctggttcacaagaagattttagatggtattcaaattaatattttctatttagttatatatttaatgtataatataaaaatatgattagcatattgacctgtagtttgatagatgttctgtctaggataaagctaactgtaaaaaaaaatagtgaatcagtttaaagaaaaacataacgtaaaagtgggcacagatccagagaggtagcaaaaatcacaggggtggttccatgaatggctgacacttaggaaactctgaattaggccatcctcgagactagcccaccattcacctctgttcatcccccgtgggctcataatcgttttcatttcacctttgatttggaaggaagaagtttcttgcccaaatgcctggatgtgtctgcttgactttcagaacttctcacctcagccctaaagagggagcctgtgggttctcagagagatatcacaatttgagtcccaaagaagaggccagatacccacccaccttcccccaaatcttaagcacctgcgccagtacagtcaagaagaggaaagtgtgtgaagacccaggtctggctctgccacttgcctggccatgtcaccttgaagctgtgacctgactccctatattgtttcctcagttgtagaccaaaggcaatggtgtctgccctcctaccttagaagacaaatgcaagggcatttcaccacagagaggacctttgtgctcactttggcccaggaggcagtgatgctcatggttgcatgactttatgagtcgctgggccagggtgaggacctgggcctcctgactcctggcccagagttcttgtccatcagttcatactgcaattttatgtgaaagcattatgactgtcctacccatgggagagtaaatgtagattgaatgctaggagtcttaaagctggagagtatagattttgaggtccccatttgggaaacatgtgccagaaatgtctaggtgtttaataaaacagatattggattatctcaaaaaaaaaaac

SEQ ID NO: 429720 - DNA, 3636 bp, Homo sapiens
gccagctcagagcttcctcgggtactcggccactcggggcatcgcggcggcctttctagccgctgtcccaagggttggtctcgcgctttcggctgcgagctctctgtggtgctggcagcgacatgtggcgcctcccgggactcctgggccgagctcttccccgtacactgggacctagcctctggagggtgactcctaagtccaccagcccagatgggcctcagactacctcctccactttgctggttcctgtgcctaacctcgacaggtcaggtccccatggcccaggcacgagcgggggtccaaggtcccatggatggaaggatgccttccaatggatgtcttcccgtgtctccccgaacaccctatgggatgccatatcttggggcactctggccgtgctggccctgcagctggcaaggcagatccacttccaggcatccctgccagcaggacctcagcgggtagaacactgctcctggcacagtcccctggaccgtttcttctcatctcccttgtggcacccatgctcctcactgcgacaacacatcctccccagccccgatggcccagctcccaggcacactggcctcagggaacccaggcttggccaggaagaagcctcagctcagccccggaacttctcacacaactctttgagaggagctcgtcctcaggacccctctgaggaaggtcccggtgattttggcttcctgcatgccagtagtagcatcgagtccgaggcaaaaccagcccagcctcagcccactggtgaaaaggaacaagataaatcaaaaactctttcccttgaggaggctgtgacttccattcagcagctcttccagctcagtgtttccatcgctttcaacttcctgggaacagagaacatgaagagtggcgaccacacggcagccttttcttacttccagaaagctgcagcccgcggctacagcaaagcgcagtacaatgcgggcttgtgtcatgagcatggcagaggcacccccagggacattagcaaggcggtcctttattatcagttggctgccagccagggccacagcctggctcagtaccgctatgccaggtgcctactacgagacccagcctcttcgtggaaccctgagcggcagagggcagtgtccttgctgaagcaggctgcagactcaggcttgagagaggcccaagctttcctcggggtgcttttcaccaaggagccctacctggatgagcagagagctgtgaaatatctttggcttgcagccaacaatggggactcacagagcaggtaccaccttggaatttgctatgagaaaggccttggtgtgcagaggaatctgggagaggccttgagatgttaccagcagtcagccgctctgggaaatgaggccgcccaggagaggctgcgagccctcttttccatgggggctgcaggtacagacccaagtccaagccaacaggttcattccctgagctcagtactctgtgacagataagtaggtagcagtagtctctggtctcctagtcatttccaaccccagtggtggctaagaatgcagcttttgtgctgggattacaagtgtgagccaccgcgcccagtcaaacctgagttttaacccccactatcactgaacttggactccatggcttagtgcctcagtttcttcacctctgaaaatgaaggtaatggtagcacctaactcattaagttgtcataaggatgaaatgagatgacactaagggacttagcacagcctgacagcacagtaggtattgaacaaatggtagctgctctgatgattttgtaggagagacaatatcccaaggttgcctgaattacccttctagggctctaagagccctgctcactcatgagtcactggggttgggagttaacaatgcctggggaaccaagcccttgaagaagtgctggctccaaagtaggagtccaagaatatacagcaagagtaagagttgctctcacctcttcttgtagccccggggcccagcgacctgacagttacaggactgaagtctttctccagcccctccctctgcagcttgaacaccctgctagcaggaacctcacgcctaccacatgcctcgagcacaggcaaccttggcctcctctgcagaagtgggcatctcggagccagcctggaagcctccagcagggctattcccccacacccctacccactggaaaggagtgttgtaagactaggttttggctaaggtgagataaaacatagtccctggtgcctcttaggggccagagcgggcaggaggttggataacaaaaatagagcatcagcaaccctttccaggtagaaattccagcgggagttcaggttcccaagcaatttcacgtacatggctggtaagtgactgatctttccccccgcttggtagcctcacagatgagtcttggatgcattcacagtcatttctggtctgtgcaccaaaggatgcattcagtgacctatgaaaaaccctactgaagggtccagagaccctggtgctcaccttagcctttgtctttgagcaaataacttaccttcttccttcttatgcctgggttttctcacacttaaatctgtactactgtttgccaatgtctgatgtgtgtatccctggttcacaagaagattttagatggtattcaaattaatattttctatttagttatatatttaatgtataatataaaaatatgattagcatattgacctgtagtttgatagatgttctgtctaggataaagctaactgtaaaaaaaaatagtgaatcagtttaaagaaaaacataacgtaaaagtgggcacagatccagagaggtagcaaaaatcacaggggtggttccatgaatggctgacacttaggaaactctgaattaggccatcctcgagactagcccaccattcacctctgttcatcccccgtgggctcataatcgttttcatttcacctttgatttggaaggaagaagtttcttgcccaaatgcctggatgtgtctgcttgactttcagaacttctcacctcagccctaaagagggagcctgtgggttctcagagagatatcacaatttgagtcccaaagaagaggccagatacccacccaccttcccccaaatcttaagcacctgcgccagtacagtcaagaagaggaaagtgtgtgaagacccaggtctggctctgccacttgcctggccatgtcaccttgaagctgtgacctgactccctatattgtttcctcagttgtagaccaaaggcaatggtgtctgccctcctaccttagaagacaaatgcaagggcatttcaccacagagaggacctttgtgctcactttggcccaggaggcagtgatgctcatggttgcatgactttatgagtcgctgggccagggtgaggacctgggcctcctgactcctggcccagagttcttgtccatcagttcatactgcaattttatgtgaaagcattatgactgtcctacccatgggagagtaaatgtagattgaatgctaggagtcttaaagctggagagtatagattttgaggtccccatttgggaaacatgtgccagaaatgtctaggtgtttaataaaacagatattggattatctcaaaaaaaaaaac

SEQ ID NO: 429721 - DNA, 3089 bp, Homo sapiens
acccaccatccctcaccacccaccccaccaatcagcacagaaatccctcggtataaacggcacgagggctctagccgctgtcccaagggttggtctcgcgctttcggctgcgagctctctgtggtgctggcagcgacatgtggcgcctcccgggactcctgggccgagctcttccccgtacactgggacctagcctctggagggtgactcctaagtccaccagcccagatgggcctcagactacctcctccactttgctggttcctgtgcctaacctcgacaggtcaggtccccatggcccaggcacgagcgggggtccaaggtcccatggatggaaggatgccttccaatggatgtcttcccgtgtctccccgaacaccctatgggatgccatatcttggggcactctggccgtgctggccctgcagctggcaaggcagatccacttccaggcatccctgccagcaggacctcagcgggtagaacactgctcctggcacagtcccctggaccgtttcttctcatctcccttgtggcacccatgctcctcactgcgacaacacatcctccccagccccgatggcccagctcccaggcacactggcctcagggaacccaggcttggccaggaagaagcctcagctcagccccggaacttctcacacaactctttgagaggagctcgtcctcaggacccctctgaggaaggtcccggtgattttggcttcctgcatgccagtagtagcatcgagtccgaggcaaaaccagcccagcctcagcccactggtgaaaaggaacaagataaatcaaaaactctttcccttgaggaggctgtgacttccattcagcagctcttccagctcagtgtttccatcgctttcaacttcctgggaacagagaacatgaagagtggcgaccacacggcagccttttcttacttccagaaagctgcagcccgcggctacagcaaagcgcagtacaatgcgggcttgtgtcatgagcatggcagaggcacccccagggacattagcaaggcggtcctttattatcagttggctgccagccagggccacagcctggctcagtaccgctatgccaggtgcctactacgagacccagcctcttcgtggaaccctgagcggcagagggcagtgtccttgctgaagcaggctgcagactcaggcttgagagaggcccaagctttcctcggggtgcttttcaccaaggagccctacctggatgagcagagagctgtgaaatatctttggcttgcagccaacaatggggactcacagagcaggtaccaccttggaatttgctatgagaaaggccttggtgtgcagaggaatctgggagaggccttgagatgttaccagcagtcagccgctctgggaaatgaggccgcccaggagaggctgcgagccctcttttccatgggggctgcagccccggggcccagcgacctgacagttacaggactgaagtctttctccagcccctccctctgcagcttgaacaccctgctagcaggaacctcacgcctaccacatgcctcgagcacaggcaaccttggcctcctctgcagaagtgggcatctcggagccagcctggaagcctccagcagggctattcccccacacccctacccactggaaaggagtgttgtaagactaggttttggctaaggtgagataaaacatagtccctggtgcctcttaggggccagagcgggcaggaggttggataacaaaaatagagcatcagcaaccctttccaggtagaaattccagcgggagttcaggttcccaagcaatttcacgtacatggctggtaagtgactgatctttccccccgcttggtagcctcacagatgagtcttggatgcattcacagtcatttctggtctgtgcaccaaaggatgcattcagtgacctatgaaaaaccctactgaagggtccagagaccctggtgctcaccttagcctttgtctttgagcaaataacttaccttcttccttcttatgcctgggttttctcacacttaaatctgtactactgtttgccaatgtctgatgtgtgtatccctggttcacaagaagattttagatggtattcaaattaatattttctatttagttatatatttaatgtataatataaaaatatgattagcatattgacctgtagtttgatagatgttctgtctaggataaagctaactgtaaaaaaaaatagtgaatcagtttaaagaaaaacataacgtaaaagtgggcacagatccagagaggtagcaaaaatcacaggggtggttccatgaatggctgacacttaggaaactctgaattaggccatcctcgagactagcccaccattcacctctgttcatcccccgtgggctcataatcgttttcatttcacctttgatttggaaggaagaagtttcttgcccaaatgcctggatgtgtctgcttgactttcagaacttctcacctcagccctaaagagggagcctgtgggttctcagagagatatcacaatttgagtcccaaagaagaggccagatacccacccaccttcccccaaatcttaagcacctgcgccagtacagtcaagaagaggaaagtgtgtgaagacccaggtctggctctgccacttgcctggccatgtcaccttgaagctgtgacctgactccctatattgtttcctcagttgtagaccaaaggcaatggtgtctgccctcctaccttagaagacaaatgcaagggcatttcaccacagagaggacctttgtgctcactttggcccaggaggcagtgatgctcatggttgcatgactttatgagtcgctgggccagggtgaggacctgggcctcctgactcctggcccagagttcttgtccatcagttcatactgcaattttatgtgaaagcattatgactgtcctacccatgggagagtaaatgtagattgaatgctaggagtcttaaagctggagagtatagattttgaggtccccatttgggaaacatgtgccagaaatgtctaggtgtttaataaaacagatattggattatctcaaaaaaaaaaac

SEQ ID NO: 429722 - DNA, 3052 bp, Homo sapiens
aacttaggtcttaggtacgaggctgggtgttgtctagccgctgtcccaagggttggtctcgcgctttcggctgcgagctctctgtggtgctggcagcgacatgtggcgcctcccgggactcctgggccgagctcttccccgtacactgggacctagcctctggagggtgactcctaagtccaccagcccagatgggcctcagactacctcctccactttgctggttcctgtgcctaacctcgacaggtcaggtccccatggcccaggcacgagcgggggtccaaggtcccatggatggaaggatgccttccaatggatgtcttcccgtgtctccccgaacaccctatgggatgccatatcttggggcactctggccgtgctggccctgcagctggcaaggcagatccacttccaggcatccctgccagcaggacctcagcgggtagaacactgctcctggcacagtcccctggaccgtttcttctcatctcccttgtggcacccatgctcctcactgcgacaacacatcctccccagccccgatggcccagctcccaggcacactggcctcagggaacccaggcttggccaggaagaagcctcagctcagccccggaacttctcacacaactctttgagaggagctcgtcctcaggacccctctgaggaaggtcccggtgattttggcttcctgcatgccagtagtagcatcgagtccgaggcaaaaccagcccagcctcagcccactggtgaaaaggaacaagataaatcaaaaactctttcccttgaggaggctgtgacttccattcagcagctcttccagctcagtgtttccatcgctttcaacttcctgggaacagagaacatgaagagtggcgaccacacggcagccttttcttacttccagaaagctgcagcccgcggctacagcaaagcgcagtacaatgcgggcttgtgtcatgagcatggcagaggcacccccagggacattagcaaggcggtcctttattatcagttggctgccagccagggccacagcctggctcagtaccgctatgccaggtgcctactacgagacccagcctcttcgtggaaccctgagcggcagagggcagtgtccttgctgaagcaggctgcagactcaggcttgagagaggcccaagctttcctcggggtgcttttcaccaaggagccctacctggatgagcagagagctgtgaaatatctttggcttgcagccaacaatggggactcacagagcaggtaccaccttggaatttgctatgagaaaggccttggtgtgcagaggaatctgggagaggccttgagatgttaccagcagtcagccgctctgggaaatgaggccgcccaggagaggctgcgagccctcttttccatgggggctgcagccccggggcccagcgacctgacagttacaggactgaagtctttctccagcccctccctctgcagcttgaacaccctgctagcaggaacctcacgcctaccacatgcctcgagcacaggcaaccttggcctcctctgcagaagtgggcatctcggagccagcctggaagcctccagcagggctattcccccacacccctacccactggaaaggagtgttgtaagactaggttttggctaaggtgagataaaacatagtccctggtgcctcttaggggccagagcgggcaggaggttggataacaaaaatagagcatcagcaaccctttccaggtagaaattccagcgggagttcaggttcccaagcaatttcacgtacatggctggtaagtgactgatctttccccccgcttggtagcctcacagatgagtcttggatgcattcacagtcatttctggtctgtgcaccaaaggatgcattcagtgacctatgaaaaaccctactgaagggtccagagaccctggtgctcaccttagcctttgtctttgagcaaataacttaccttcttccttcttatgcctgggttttctcacacttaaatctgtactactgtttgccaatgtctgatgtgtgtatccctggttcacaagaagattttagatggtattcaaattaatattttctatttagttatatatttaatgtataatataaaaatatgattagcatattgacctgtagtttgatagatgttctgtctaggataaagctaactgtaaaaaaaaatagtgaatcagtttaaagaaaaacataacgtaaaagtgggcacagatccagagaggtagcaaaaatcacaggggtggttccatgaatggctgacacttaggaaactctgaattaggccatcctcgagactagcccaccattcacctctgttcatcccccgtgggctcataatcgttttcatttcacctttgatttggaaggaagaagtttcttgcccaaatgcctggatgtgtctgcttgactttcagaacttctcacctcagccctaaagagggagcctgtgggttctcagagagatatcacaatttgagtcccaaagaagaggccagatacccacccaccttcccccaaatcttaagcacctgcgccagtacagtcaagaagaggaaagtgtgtgaagacccaggtctggctctgccacttgcctggccatgtcaccttgaagctgtgacctgactccctatattgtttcctcagttgtagaccaaaggcaatggtgtctgccctcctaccttagaagacaaatgcaagggcatttcaccacagagaggacctttgtgctcactttggcccaggaggcagtgatgctcatggttgcatgactttatgagtcgctgggccagggtgaggacctgggcctcctgactcctggcccagagttcttgtccatcagttcatactgcaattttatgtgaaagcattatgactgtcctacccatgggagagtaaatgtagattgaatgctaggagtcttaaagctggagagtatagattttgaggtccccatttgggaaacatgtgccagaaatgtctaggtgtttaataaaacagatattggattatctcaaaaaaaaaaac

SEQ ID NO: 429723 - DNA, 2329 bp, Homo sapiens
gccagctcagagcttcctcgggtactcggccactcggggcatcgcggcggcctttctagccgctgtcccaagggttggtctcgcgctttcggctgcgagctctctgtggtgctggcagcgacatgtggcgcctcccgggactcctgggccgagctcttccccgtacactgggacctagcctctggagggtgactcctaagtccaccagcccagatgggcctcagactacctcctccactttgctggttcctgtgcctaacctcgacaggtcaggtccccatggcccaggcacgagcgggggtccaaggtcccatggatggaaggatgccttccaatggatgtcttcccgtgtctccccgaacaccctatgggatgccatatcttggggcactctggccgtgctggccctgcagctggcaaggcagatccacttccaggcatccctgccagcaggacctcagcgggtagaacactgctcctggcacagtcccctggaccgtttcttctcatctcccttgtggcacccatgctcctcactgcgacaacacatcctccccagccccgatggcccagctcccaggcacactggcctcagggaacccaggcttggccaggaagaagcctcagctcagccccggaacttctcacacaactctttgagaggagctcgtcctcaggacccctctgaggaaggtcccggtgattttggcttcctgcatgccagtagtagcatcgagtccgaggcaaaaccagcccagcctcagcccactggtgaaaaggaacaagataaatcaaaaactctttcccttgaggaggctgtgacttccattcagcagctcttccagctcagtgtttccatcgctttcaacttcctgggaacagagaacatgaagagtggcgaccacacggcagccttttcttacttccagaaagctgcagcccgcggctacagcaaagcgcagtacaatgcgggcttgtgtcatgagcatggcagaggcacccccagggacattagcaaggcggtcctttattatcagttggctgccagccagggccacagcctggctcagtaccgctatgccaggtgcctactacgagacccagcctcttcgtggaaccctgagcggcagagggcagtgtccttgctgaagcaggctgcagactcaggcttgagagaggcccaagctttcctcggggtgcttttcaccaaggagccctacctggatgagcagagagctgtgaaatatctttggcttgcagccaacaatggggactcacagagcaggtaccaccttggaatttgctatgagaaaggccttggtgtgcagaggaatctgggagaggccttgagatgttaccagcagtcagccgctctgggaaatgaggccgcccaggagaggctgcgagccctcttttccatgggggctgcagccccggggcccagcgacctgacagttacaggactgaagtctttctccagcccctccctctgcagcttgaacaccctgctagcaggaacctcacgcctaccacatgcctcgagcacaggcaaccttggcctcctctgcagaagtgggcatctcggagccagcctggaagcctccagcagggctattcccccacacccctacccactggaaaggagtgttgtaagactaggttttggctaaggaagaagtttcttgcccaaatgcctggatgtgtctgcttgactttcagaacttctcacctcagccctaaagagggagcctgtgggttctcagagagatatcacaatttgagtcccaaagaagaggccagatacccacccaccttcccccaaatcttaagcacctgcgccagtacagtcaagaagaggaaagtgtgtgaagacccaggtctggctctgccacttgcctggccatgtcaccttgaagctgtgacctgactccctatattgtttcctcagttgtagaccaaaggcaatggtgtctgccctcctaccttagaagacaaatgcaagggcatttcaccacagagaggacctttgtgctcactttggcccaggaggcagtgatgctcatggttgcatgactttatgagtcgctgggccagggtgaggacctgggcctcctgactcctggcccagagttcttgtccatcagttcatactgcaattttatgtgaaagcattatgactgtcctacccatgggagagtaaatgtagattgaatgctaggagtcttaaagctggagagtatagattttgaggtccccatttgggaaacatgtgccagaaatgtctaggtgtttaataaaacagatattggattatctcaaaaaaaaaaac

SEQ ID NO: 429724 - DNA, 3893 bp, Homo sapiens
gccagctcagagcttcctcgggtactcggccactcggggcatcgcggcggcctttctagccgctgtcccaagggttggtctcgcgctttcggctgcgagctctctgtggtgctggcagcgacatgtggcgcctcccgggactcctgggccgagctcttccccgtacactgggacctagcctctggagggtgactcctaagtccaccagcccagatgggcctcagactacctcctccactttgctggttcctgtgcctaacctcgacaggtcaggtccccatggcccaggcacgagcgggggtccaaggtcccatggatggaaggatgccttccaatggatgtcttcccgtgtctccccgaacaccctatgggatgccatatcttggggcactctggccgtgctggccctgcagctggcaaggcagatccacttccaggcatccctgccagcaggacctcagcgggtagaacactgctcctggcacagtcccctggaccgtttcttctcatctcccttgtggcacccatgctcctcactgcgacaacacatcctccccagccccgatggcccagctcccaggcacactggcctcagggaacccaggcttggccaggaagaagcctcagctcagccccggaacttctcacacaactctttgagaggagctcgtcctcaggacccctctgaggaaggtcccggtgattttggcttcctgcatgccagtagtagcatcgagtccgaggcaaaaccagcccagcctcagcccactggtgaaaaggaacaagataaatcaaaaactctttcccttgaggaggctgtgacttccattcagcagctcttccagctcagtgtttccatcgctttcaacttcctgggaacagagaacatgaagagtggcgaccacacggcagccttttcttacttccagaaagctgcagcccgcggctacagcaaagcgcagtacaatgcgggcttgtgtcatgagcatggcagaggcacccccagggacattagcaaggcggtcctttattatcagttggctgccagccagggccacagcctggctcagtaccgctatgccaggtgcctactacgagacccagcctcttcgtggaaccctgagcggcagagggcagtgtccttgctgaagcaggctgcagactcaggcttgagagaggcccaagctttcctcggggtgcttttcaccaaggagccctacctggatgagcagagagctgtgaaatatctttggcttgcagccaacaatggggactcacagagcaggtaccaccttggaatttgctatgagaaaggccttggtgtgcagaggaatctgggagaggccttgagatgttaccagcagtcagccgctctgggaaatgaggccgcccaggagaggctgcgagccctcttttccatgggggctgcagccccggggcccagcgacctgacagttacaggactgaagtctttctccagcccctccctctgcagcttgaacaccctgctagcaggaacctcacgcctaccacatgcctcgagcacaggcaaccttggcctcctctgcagaagtgggcatctcggagccagcctggaagcctccagcagggctattcccccacacccctacccactggaaaggagtgttgtaagactaggttttggctaaggtgagataaaacatagtccctggtgcctcttaggggccagagcgggcaggaggttggataacaaaaatagagcatcagcaaccctttccaggtagaaattccagcgggagttcaggttcccaagcaatttcacgtacatggctggtaagtgactgatctttccccccgcttggtagcctcacagatgagtcttggatgcattcacagtcatttctggtctgtgcaccaaaggatgcattcagtgacctatgaaaaaccctactgaagggtccagagaccctggtgctcaccttagcctttgtctttgagcaaataacttaccttcttccttcttatgcctgggttttctcacacttaaatctgtactactgtttgccaatgtctgatgtgtgtatccctggttcacaagaagattttagatggtattcaaattaatattttctatttagttatatatttaatgtataatataaaaatatgattagcatattgacctgtagtttgatagatgttctgtctaggataaagctaactgtaaaaaaaaatagtgaatcagtttaaagaaaaacataacgtaaaagtgggcacagatccagagaggtagcaaaaatcacaggggtggttccatgaatggctgacacttaggaaactctgaattaggccatcctcgagactagcccaccattcacctctgttcatcccccgtgggctcataatcgttttcatttcacctttgatttggaaggaagaagtttcttgcccaaatgcctggatgtgtctgcttgactttcagaacttctcacctcagccctaaagagggagcctgtgggttctcagagagatatcacaatttgagtcccaaagaagaggccagatacccacccaccttcccccaaatcttaagcacctgcgccagtacagtcaagaagaggaaagtgtgtgaagacccaggtctggctctgccacttgcctggccatgtcaccttgaagctgtgacctgactccctatattgtttcctcagttgtagaccaaaggcaatggtgtctgccctcctaccttagaagacaaatgcaagggcatttcaccacagagaggacctttgtgctcactttggcccaggaggcagtgatgctcatggttgcatgactttatgagtcgctgggccagggtgaggacctgggcctcctgactcctggcccagagttcttgtccatcagttcatactgcaattttatgtgaaagcattatgactgtcctacccatgggagagtaaatgtagattgaatgctaggagtcttaaagctggagagtatagattttgaggtccccatttgggaaacatgtgccagaaatgtctaggtgtttaataaaacagatattggattatctcaaaaaaaaaaaccttgagtattatgggaagagccagggagacgggcagggggagctgaaagctgaggctccgtcctcatctctaaactctccactaaccaatttaaaggatcttaaaagcttctccaggagagagacttaggaaaaaaaaagatttctgagtcagtgctaatgagtccagttactgaatttgtgaatagctattccctggcttctggatgttagcccaagttgaatagcatagatgtggttgagagtggggtctgggagggatagagagcccaccgcccaccccccacaatcccatgactgagtggagaccaaccagcctggccaattcaaaggcaagaagatttgaggggggaaagttgtccacgtttccctctctgcttcccaccccatctctctcaacttcttagtggtcctgccatactttcctagcacctctctttcacccggggagcccaagcgtcctctagctccatctcctcgcctgctccctgcctccttttcagggctgccctgcacactggctcaccactgttggaccctgcacatggccaccttccacagatggcactccttgggagcagggtccttgtctttgtattccagtgtccccagcactgagtgcaaggccccatgcagggtaggaaacctgaggtttcaagctcagggttttaagctgtgcagtgcactaagctctctgccaaaaaacaaacaaaaaaaggtttctgtggttaaataagtttgggaaatgctgcaccagacgtcccctttttatagattcacaatacacatcagcatatttgaggttccaagaagtcctcca

SEQ ID NO: 429725 - DNA, 3202 bp, Homo sapiens
gccagctcagagcttcctcgggtactcggccactcggggcatcgcggcggcctttctagccgctgtcccaagggttggtctcgcgctttcggctgcgagctctctgtggtgctggcagcgacatgtggcgcctcccgggactcctgggccgagctcttccccgtacactgggacctagcctctggagggtgactcctaagtccaccagcccagatgggcctcagactacctcctccactttgctggttcctgtgcctaacctcgacaggtcaggtccccatggcccaggcacgagcgggggtccaaggtcccatggatggaaggatgccttccaatggatgtcttcccgtgtctccccgaacaccctatgggatgccatatcttggggcactctggccgtgctggccctgcagctggcaaggcagatccacttccaggcatccctgccagcaggacctcagcgggtagaacactgctcctggcacagtcccctggaccgtttcttctcatctcccttgtggcacccatgctcctcactgcgacaacacatcctccccagccccgatggcccagctcccaggcacactggcctcagggaacccaggcttggccaggaagaagcctcagctcagccccggaacttctcacacaactctttgagaggagctcgtcctcaggacccctctgaggaaggtcccggtgattttggcttcctgcatgccagtagtagcatcgagtccgaggcaaaaccagcccagcctcagcccactggtgaaaaggaacaagataaatcaaaaactctttcccttgaggaggctgtgacttccattcagcagctcttccagctcagtgtttccatcgctttcaacttcctgggaacagagaacatgaagagtggcgaccacacggcagccttttcttacttccagaaagctgcagcccgcggctacagcaaagcgcagtacaatgcgggcttgtgtcatgagcatggcagaggcacccccagggacattagcaaggcggtcctttattatcagttggctgccagccagggccacagcctggctcagtaccgctatgccaggtgcctactacgagacccagcctcttcgtggaaccctgagcggcagagggcagtgtccttgctgaagcaggctgcagactcaggcttgagagaggcccaagctttcctcggggtgcttttcaccaaggagccctacctggatgagcagagagctgtgaaatatctttggcttgcagccaacaatggggactcacagagcaggtaccaccttggaatttgctatgagaaaggccttggtgtgcagaggaatctgggagaggccttgagatgttaccagcagtcagccgctctgggaaatgaggccgcccaggagaggctgcgagccctcttttccatgggggctgcagccccggggcccagcgacctgacagttacaggactgaagtctttctccagcccctccctctgcagcttgaacaccctgctagcaggaacctcacgcctaccacatgcctcgagcacaggcaaccttggcctcctctgcagaagtgggcatctcggagccagcctggaagcctccagcagggctattcccccacacccctacccactggaaaggagtgttgtaagactaggttttggctaaggtgagataaaacatagtccctggtgcctcttaggggccagagcgggcaggaggttggataacaaaaatagagcatcagcaaccctttccaggtagaaattccagcgggagttcaggttcccaagcaatttcacgtacatggctggtaagtgactgatctttccccccgcttggtagcctcacagatgagtcttggatgcattcacagtcatttctggtctgtgcaccaaaggatgcattcagtgacctatgaaaaaccctactgaagggtccagagaccctggtgctcaccttagcctttgtctttgagcaaataacttaccttcttccttcttatgcctgggttttctcacacttaaatctgtactactgtttgccaatgtctgatgtgtgtatccctggttcacaagaagattttagatggtattcaaattaatattttctatttagttatatatttaatgtataatataaaaatatgattagcatattgacctgtagtttgatagatgttctgtctaggataaagctaactgtaaaaaaaaatagtgaatcagtttaaagaaaaacataacgtaaaagtgggcacagatccagagaggtagcaaaaatcacaggggtggttccatgaatggctgacacttaggaaactctgaattaggccatcctcgagactagcccaccattcacctctgttcatcccccgtgggctcataatcgttttcatttcacctttgatttggaaggaagaagtttcttgcccaaatgcctggatgtgtctgcttgactttcagaacttctcacctcagccctaaagagggagcctgtgggttctcagagagatatcacaatttgagtcccaaagaagaggccagatacccacccaccttcccccaaatcttaagcacctgcgccagtacagtcaagaagaggaaagtgtgtgaagacccaggtctggctctgccacttgcctggccatgtcaccttgaagctgtgacctgactccctatattgtttcctcagttgtagaccaaaggcaatggtgtctgccctcctaccttagaagacaaatgcaagggcatttcaccacagagaggacctttgtgctcactttggcccaggaggcagtgatgctcatggttgcatgactttatgagtcgctgggccagggtgaggacctgggcctcctgactcctggcccagagttcttgtccatcagttcatactgcaattttatgtgaaagcattatgactgtcctacccatgggagagtaaatgtagattgaatgctaggagtcttaaagctggagagtatagattttgaggtccccatttgggaaacatgtgccagaaatgtctaggtgtttaataaaacagatattggattatctcaaaaaaaaaaacttgatcttgggaaagccacttgacctctccaagccccatatccgtgtctgtgaaatggggttaataatacctccctcccaggattgttggaaaatcaaattaaatcctattgtaaagcctgaaacctg

SEQ ID NO: 429726 - DNA, 3015 bp, Homo sapiens
gccagctcagagcttcctcgggtactcggccactcggggcatcgcggcggcctttctagccgctgtcccaagggttggtctcgcgctttcggctgcgagctctctgtggtgctggcagcgacatgtggcgcctcccgggactcctgggccgagctcttccccgtacactgggacctagcctctggagggtgactcctaagtccaccagcccagatgggcctcagactacctcctccactttgctggttcctgtgcctaacctcgacaggtcaggtccccatggcccaggcacgagcgggggtccaaggtcccatggatggaaggatgccttccaatggatgtcttcccgtgtctccccgaacaccctatgggatgccatatcttggggcactctggccgtgctggccctgcagctggcaaggcagatccacttccaggcatccctgccagcaggacctcagcgggtagaacactgctcctggcacagtcccctggaccgtttcttctcatctcccttgtggcacccatgctcctcactgcgacaacacatcctccccagccccgatggcccagctcccaggcacactggcctcagggaacccaggcttggccaggaagaagcctcagctcagccccggaacttctcacacaactctttgagaggagctcgtcctcaggacccctctgaggaaggtcccggtgattttggcttcctgcatgccagtagtagcatcgagtccgaggcaaaaccagcccagcctcagcccactggtgaaaaggaacaagataaatcaaaaactctttcccttgaggaggctgtgacttccattcagcagctcttccagctcagtgtttccatcgctttcaacttcctgggaacagagaacatgaagagtggcgaccacacggcagccttttcttacttccagaaagctgcagcccgcggctacagcaaagcgcagtacaatgcgggcttgtgtcatgagcatggcagaggcacccccagggacattagcaaggtattcccctgcccccaagcctgccttctgtgctgggctgctgagattgatgtctagaaatgagcagtgggcagggatgggggaaagtttggcttcttttctccacttggttctagcccagctgcgaaggaaaaataagaaagaagctcctaacttccaggaatttagactcaaaattcagggagggcagggattttgcctttcttctttgcaactacatcctcagcctagaatagcatcttgatgaatggattaattaatttttaaaaagtgggataagaacacaaagaggttatatataagaatgtatttcgtagagttgtatgtgaaggcaaaaaaacccaaaaaaacctgaaagtttcttcaatggaaaactggttaattacatctatttgggccttaaaatgatgtgctagatctgtatgtcagggaaagacattcatggtgtactattaaagttaaaaaaataggttataaagtagtatagagtgatctaagtctctctctctctctgcccccccccacacatatgtgcgtgcaaatgcgtagatgtctaaaaggtatgtgtgtgagtatgtctaacacatatatgtgagaagatatttgcaaggctgtacgctaaaattttaagcaagaatgatctttaggaggctgaatttcttgggattttatgtttctatttttggtttatatttttaaattttagcttatctgaattttctgactagtctataattattatgtattagttaattaaaataatttttaaaaatttcactgagtgcaaaagatgcttacagagttgccagccgactgggtgtttctccctttgccccagcggtcctttattatcagttggctgccagccagggccacagcctggctcagtaccgctatgccaggtgcctactacgagacccagcctcttcgtggaaccctgagcggcagagggcagtgtccttgctgaagcaggctgcagactcaggcttgagagaggcccaagctttcctcggggtgcttttcaccaaggagccctacctggatgagcagagagctgtgaaatatctttggcttgcagccaacaatggggtatgcgatctcagtggacaagcatgttggggatgaagcctgataagagaagggattttggaactggtactgagttcttctgtgcttaggagattgttggataggagccttggcctggcttcaagccttagcgctcactgacttactgtgtgaccgttgggcagttgcagtagtacgccagagctggcttgcaccaggctgtgagagctgttggcagcttaaaatctgctatggtgggaatatttgcaccacagaaattgctaaatgccataaaacagggctttttccctcctcgagagccagttgttcaacatttaccagcacactactgggcctggtcacttcttgattcaaacctgtttcctcgtctttaaaatcagaataataatgcttgccttacctgtccagtacttcacagggtggttgtgaggatcaaaatctaactgagataactaacaggtgtgacagtgctgtgaaacctgtacacatgaaaaacacatcattacaagtgatggtaacccagggaaattagaagacgcatcaagtggagacagtaaacagggaacactgctcagtttggggtgggtggggatgtctggttgtctgtgaactggggtcattggcattcagacaattcagatgtgttccatgaagcattagttctctgggatgcttgtaagtcataagaggaaaaaaatggttagatgggtttgggaaatactgagttaaacagttaatataggaagtctcaaagctttatgtcactgtagatcactgaaaaggccatctgtaatttgctgtattcctcaagtgtatttgaccagtatatcttttgagttgcatcttgaaggaccaggagtcttggattaaatcaagcaatatatgcgtgaactgtaatctccctaca

SEQ ID NO: 429727 - DNA, 2364 bp, Homo sapiens
gttgggcagactggtctccaactcatgacctcgtgatctgcccaccttgccctcccaaagtgctgggattacaggtgtgagccaccgcgcccaggccaagcatagctttttaaaggagaagagtttccttttctgtcagccctcccaggcagagattcaggaaggcacagggcctttgggaagacaaccctccaccttcgcctccttgctgtttcagggcaacataggagcccgactcccaggtttgctataactggcctgagtgtttcctgtagccttcgttgtgcatgctttcagccagcctatgcaagagaagcctccacactgccctggctggaatctccctgggtggagggatccccctctcctttgtgttgggtgagctctgagcctctggcatttcgtagttgagatcccttgctatggggcgggccaggactgggccttgaccgtgtgtggatgaagtcccagcatgcctgacttcatcttcctcctcccttagcatgtcagttcctcattcctgcatgtgtgtatctgtttgtctgtccattttctccttaggactcacagagcaggtaccaccttggaatttgctatgagaaaggccttggtgtgcagaggaatctgggagaggccttgagatgttaccagcagtcagccgctctgggaaatgaggccgcccaggagaggctgcgagccctcttttccatgggggctgcagccccggggcccagcgacctgacagttacaggactgaagtctttctccagcccctccctctgcagcttgaacaccctgctagcaggaacctcacgcctaccacatgcctcgagcacaggcaaccttggcctcctctgcagaagtgggcatctcggagccagcctggaagcctccagcagggctattcccccacacccctacccactggaaaggagtgttgtaagactaggttttggctaaggtgagataaaacatagtccctggtgcctcttaggggccagagcgggcaggaggttggataacaaaaatagagcatcagcaaccctttccaggtagaaattccagcgggagttcaggttcccaagcaatttcacgtacatggctggtaagtgactgatctttccccccgcttggtagcctcacagatgagtcttggatgcattcacagtcatttctggtctgtgcaccaaaggatgcattcagtgacctatgaaaaaccctactgaagggtccagagaccctggtgctcaccttagcctttgtctttgagcaaataacttaccttcttccttcttatgcctgggttttctcacacttaaatctgtactactgtttgccaatgtctgatgtgtgtatccctggttcacaagaagattttagatggtattcaaattaatattttctatttagttatatatttaatgtataatataaaaatatgattagcatattgacctgtagtttgatagatgttctgtctaggataaagctaactgtaaaaaaaaatagtgaatcagtttaaagaaaaacataacgtaaaagtgggcacagatccagagaggtagcaaaaatcacaggggtggttccatgaatggctgacacttaggaaactctgaattaggccatcctcgagactagcccaccattcacctctgttcatcccccgtgggctcataatcgttttcatttcacctttgatttggaaggaagaagtttcttgcccaaatgcctggatgtgtctgcttgactttcagaacttctcacctcagccctaaagagggagcctgtgggttctcagagagatatcacaatttgagtcccaaagaagaggccagatacccacccaccttcccccaaatcttaagcacctgcgccagtacagtcaagaagaggaaagtgtgtgaagacccaggtctggctctgccacttgcctggccatgtcaccttgaagctgtgacctgactccctatattgtttcctcagttgtagaccaaaggcaatggtgtctgccctcctaccttagaagacaaatgcaagggcatttcaccacagagaggacctttgtgctcactttggcccaggaggcagtgatgctcatggttgcatgactttatgagtcgctgggccagggtgaggacctgggcctcctgactcctggcccagagttcttgtccatcagttcatactgcaattttatgtgaaagcattatgactgtcctacccatgggagagtaaatgtagattgaatgctaggagtcttaaagctggagagtatagattttgaggtccccatttgggaaacatgtgccagaaatgtctaggtgtttaataaaacagatattggattatctcaaaaaaaaaaac

SEQ ID NO: 429728 - DNA, 1898 bp, Homo sapiens
  misc_feature (45)..(45): n is a, c, g, or t
gagggattcggcacgaatcccttgtgaagcaagctgcaaaactangcttgaaaaatgcccaagctttccctcgggggcttttcaacaaagaacccgactcacagagcaggtaccaccttggaatttgctatgagaaaggccttggtgtgcagaggaatctgggagaggccttgagatgttaccagcagtcagccgctctgggaaatgaggccgcccaggagaggctgcgagccctcttttccatgggggctgcagccccggggcccagcgacctgacagttacaggactgaagtctttctccagcccctccctctgcagcttgaacaccctgctagcaggaacctcacgcctaccacatgcctcgagcacaggcaaccttggcctcctctgcagaagtgggcatctcggagccagcctggaagcctccagcagggctattcccccacacccctacccactggaaaggagtgttgtaagactaggttttggctaaggtgagataaaacatagtccctggtgcctcttaggggccagagcgggcaggaggttggataacaaaaatagagcatcagcaaccctttccaggtagaaattccagcgggagttcaggttcccaagcaatttcacgtacatggctggtaagtgactgatctttccccccgcttggtagcctcacagatgagtcttggatgcattcacagtcatttctggtctgtgcaccaaaggatgcattcagtgacctatgaaaaaccctactgaagggtccagagaccctggtgctcaccttagcctttgtctttgagcaaataacttaccttcttccttcttatgcctgggttttctcacacttaaatctgtactactgtttgccaatgtctgatgtgtgtatccctggttcacaagaagattttagatggtattcaaattaatattttctatttagttatatatttaatgtataatataaaaatatgattagcatattgacctgtagtttgatagatgttctgtctaggataaagctaactgtaaaaaaaaatagtgaatcagtttaaagaaaaacataacgtaaaagtgggcacagatccagagaggtagcaaaaatcacaggggtggttccatgaatggctgacacttaggaaactctgaattaggccatcctcgagactagcccaccattcacctctgttcatcccccgtgggctcataatcgttttcatttcacctttgatttggaaggaagaagtttcttgcccaaatgcctggatgtgtctgcttgactttcagaacttctcacctcagccctaaagagggagcctgtgggttctcagagagatatcacaatttgagtcccaaagaagaggccagatacccacccaccttcccccaaatcttaagcacctgcgccagtacagtcaagaagaggaaagtgtgtgaagacccaggtctggctctgccacttgcctggccatgtcaccttgaagctgtgacctgactccctatattgtttcctcagttgtagaccaaaggcaatggtgtctgccctcctaccttagaagacaaatgcaagggcatttcaccacagagaggacctttgtgctcactttggcccaggaggcagtgatgctcatggttgcatgactttatgagtcgctgggccagggtgaggacctgggcctcctgactcctggcccagagttcttgtccatcagttcatactgcaattttatgtgaaagcattatgactgtcctacccatgggagagtaaatgtagattgaatgctaggagtcttaaagctggagagtatagattttgaggtccccatttgggaaacatgtgccagaaatgtctaggtgtttaataaaacagatattggattatctcaaaaaaaaaaac

SEQ ID NO: 429729 - DNA, 2926 bp, Homo sapiens
gttgggcagactggtctccaactcatgacctcgtgatctgcccaccttgccctcccaaagtgctgggattacaggtgtgagccaccgcgcccaggccaagcatagctttttaaaggagaagagtttccttttctgtcagccctcccaggcagagattcaggaaggcacagggcctttgggaagacaaccctccaccttcgcctccttgctgtttcagggcaacataggagcccgactcccaggtttgctataactggcctgagtgtttcctgtagccttcgttgtgcatgctttcagccagcctatgcaagagaagcctccacactgccctggctggaatctccctgggtggagggatccccctctcctttgtgttgggtgagctctgagcctctggcatttcgtagttgagatcccttgctatggggcgggccaggactgggccttgaccgtgtgtggatgaagtcccagcatgcctgacttcatcttcctcctcccttagcatgtcagttcctcattcctgcatgtgtgtatctgtttgtctgtccattttctccttaggactcacagagcaggtaccaccttggaatttgctatgagaaaggccttggtgtgcagaggaatctgggagaggccttgagatgttaccagcagtcagccgctctgggaaatgaggccgcccaggagaggctgcgagccctcttttccatgggggctgcaggtacagacccaagtccaagccaacaggttcattccctgagctcagtactctgtgacagataagtaggtagcagtagtctctggtctcctagtcatttccaaccccagtggtggctaagaatgcagcttttgtgctgggattacaagtgtgagccaccgcgcccagtcaaacctgagttttaacccccactatcactgaacttggactccatggcttagtgcctcagtttcttcacctctgaaaatgaaggtaatggtagcacctaactcattaagttgtcataaggatgaaatgagatgacactaagggacttagcacagcctgacagcacagtaggtattgaacaaatggtagctgctctgatgattttgtaggagagacaatatcccaaggttgcctgaattacccttctagggctctaagagccctgctcactcatgagtcactggggttgggagttaacaatgcctggggaaccaagcccttgaagaagtgctggctccaaagtaggagtccaagaatatacagcaagagtaagagttgctctcacctcttcttgtagccccggggcccagcgacctgacagttacaggactgaagtctttctccagcccctccctctgcagcttgaacaccctgctagcaggaacctcacgcctaccacatgcctcgagcacaggcaaccttggcctcctctgcagaagtgggcatctcggagccagcctggaagcctccagcagggctattcccccacacccctacccactggaaaggagtgttgtaagactaggttttggctaaggtgagataaaacatagtccctggtgcctcttaggggccagagcgggcaggaggttggataacaaaaatagagcatcagcaaccctttccaggtagaaattccagcgggagttcaggttcccaagcaatttcacgtacatggctggtaagtgactgatctttccccccgcttggtagcctcacagatgagtcttggatgcattcacagtcatttctggtctgtgcaccaaaggatgcattcagtgacctatgaaaaaccctactgaagggtccagagaccctggtgctcaccttagcctttgtctttgagcaaataacttaccttcttccttcttatgcctgggttttctcacacttaaatctgtactactgtttgccaatgtctgatgtgtgtatccctggttcacaagaagattttagatggtattcaaattaatattttctatttagttatatatttaatgtataatataaaaatatgattagcatattgacctgtagtttgatagatgttctgtctaggataaagctaactgtaaaaaaaaatagtgaatcagtttaaagaaaaacataacgtaaaagtgggcacagatccagagaggtagcaaaaatcacaggggtggttccatgaatggctgacacttaggaaactctgaattaggccatcctcgagactagcccaccattcacctctgttcatcccccgtgggctcataatcgttttcatttcacctttgatttggaaggaagaagtttcttgcccaaatgcctggatgtgtctgcttgactttcagaacttctcacctcagccctaaagagggagcctgtgggttctcagagagatatcacaatttgagtcccaaagaagaggccagatacccacccaccttcccccaaatcttaagcacctgcgccagtacagtcaagaagaggaaagtgtgtgaagacccaggtctggctctgccacttgcctggccatgtcaccttgaagctgtgacctgactccctatattgtttcctcagttgtagaccaaaggcaatggtgtctgccctcctaccttagaagacaaatgcaagggcatttcaccacagagaggacctttgtgctcactttggcccaggaggcagtgatgctcatggttgcatgactttatgagtcgctgggccagggtgaggacctgggcctcctgactcctggcccagagttcttgtccatcagttcatactgcaattttatgtgaaagcattatgactgtcctacccatgggagagtaaatgtagattgaatgctaggagtcttaaagctggagagtatagattttgaggtccccatttgggaaacatgtgccagaaatgtctaggtgtttaataaaacagatattggattatctcaaaaaaaaaaac

SEQ ID NO: 429730 - DNA, 2514 bp, Homo sapiens
gccagctcagagcttcctcgggtactcggccactcggggcatcgcggcggcctttctagccgctgtcccaagggttggtctcgcgctttcggctgcgagctctctgtggtgctggcagcgacatgtggcgcctcccgggactcctgggccgagctcttccccgtacactgggacctagcctctggagggtgactcctaagtccaccagcccagatgggcctcagactacctcctccactttgctggttcctgtgcctaacctcgacaggtcaggtccccatggcccaggcacgagcgggggtccaaggtcccatggatggaaggatgccttccaatggatgtcttcccgtgtctccccgaacaccctatgggatgccatatcttggggcactctggccgtgctggccctgcagctggcaaggcagatccacttccaggcatccctgccagcaggacctcagcgggtagaacactgctcctggcacagtcccctggaccgtttcttctcatctcccttgtggcacccatgctcctcactgcgacaacacatcctccccagccccgatggcccagctcccaggcacactggcctcagggaacccaggcttggccaggaagaagcctcagctcagccccggaacttctcacacaactctttgagaggagctcgtcctcaggacccctctgaggaaggtcccggtgattttggcttcctgcatgccagtagtagcatcgagtccgaggcaaaaccagcccagcctcagcccactggtgaaaaggaacaagataaatcaaaaactctttcccttgaggaggctgtgacttccattcagcagctcttccagctcagtgtttccatcgctttcaacttcctgggaacagagaacatgaagagtggcgaccacacggcagccttttcttacttccagaaagctgcagcccgcggctacagcaaagcgcagtacaatgcgggcttgtgtcatgagcatggcagaggcacccccagggacattagcaaggtattcccctgcccccaagcctgccttctgtgctgggctgctgagattgatgtctagaaatgagcagtgggcagggatgggggaaagtttggcttcttttctccacttggttctagcccagctgcgaaggaaaaataagaaagaagctcctaacttccaggaatttagactcaaaattcagggagggcagggattttgcctttcttctttgcaactacatcctcagcctagaatagcatcttgatgaatggattaattaatttttaaaaagtgggataagaacacaaagaggttatatataagaatgtatttcgtagagttgtatgtgaaggcaaaaaaacccaaaaaaacctgaaagtttcttcaatggaaaactggttaattacatctatttgggccttaaaatgatgtgctagatctgtatgtcagggaaagacattcatggtgtactattaaagttaaaaaaataggttataaagtagtatagagtgatctaagtctctctctctctctgcccccccccacacatatgtgcgtgcaaatgcgtagatgtctaaaaggtatgtgtgtgagtatgtctaacacatatatgtgagaagatatttgcaaggctgtacgctaaaattttaagcaagaatgatctttaggaggctgaatttcttgggattttatgtttctatttttggtttatatttttaaattttagcttatctgaattttctgactagtctataattattatgtattagttaattaaaataatttttaaaaatttcactgagtgcaaaagatgcttacagagttgccagccgactgggtgtttctccctttgccccacacagaaattgctaaatgccataaaacagggctttttccctcctcgagagccagttgttcaacatttaccagcacactactgggcctggtcacttcttgattcaaacctgtttcctcgtctttaaaatcagaataataatgcttgccttacctgtccagtacttcacagggtggttgtgaggatcaaaatctaactgagataactaacaggtgtgacagtgctgtgaaacctgtacacatgaaaaacacatcattacaagtgatggtaacccagggaaattagaagacgcatcaagtggagacagtaaacagggaacactgctcagtttggggtgggtggggatgtctggttgtctgtgaactggggtcattggcattcagacaattcagatgtgttccatgaagcattagttctctgggatgcttgtaagtcataagaggaaaaaaatggttagatgggtttgggaaatactgagttaaacagttaatataggaagtctcaaagctttatgtcactgtagatcactgaaaaggccatctgtaatttgctgtattcctcaagtgtatttgaccagtatatcttttgagttgcatcttgaaggaccaggagtcttggattaaatcaagcaatatatgcgtgaactgtaatctccctaca

SEQ ID NO: 429731 - DNA, 1631 bp, Homo sapiens
  misc_feature (35)..(35): n is a, c, g, or t
gggggggggcggggtgggggggagggggcgtgccntcgctgcaggctggggagggccacagcctggctcagtaccgctatgccaggtgcctactacgagacccagcttgaacaccctgctagcaggaacctcacgcctaccacatgcctcgagcacaggcaaccttggcctcctctgcagaagtgggcatctcggagccagcctggaagcctccagcagggctattcccccacacccctacccactggaaaggagtgttgtaagactaggttttggctaaggtgagataaaacatagtccctggtgcctcttaggggccagagcgggcaggaggttggataacaaaaatagacaatttcacgtacatggctggtaagtgactgatctttccccccgcttggtagcctcacagatgagtcttggatgcattcacagtcatttctggtctgtgcaccaaaggatgcattcagtgacctatgaaaaaccctactgaagggtccagagaccctggtgctcaccttagcctttgtctttgagcaaataacttaccttcttccttcttatgcctgggttttctcacacttaaatctgtactactgtttgccaatgtctgatgtgtgtatccctggttcacaagaagattttagatggtattcaaattaatattttctatttagttatatatttaatgtataatataaaaatatgattagcatattgacctgtagtttgatagatgttctgtctaggataaagctaactgtaaaaaaaaatagtgaatcagtttaaagaaaaacataacgtaaaagtgggcacagatccagagaggtagcaaaaatcacaggggtggttccatgaatggctgacacttaggaaactctgaattaggccatcctcgagactagcccaccattcacctctgttcatcccccgtgggctcataatcgttttcatttcacctttgatttggaaggaagaagtttcttgcccaaatgcctggatgtgtctgcttgactttcagaacttctcacctcagccctaaagagggagcctgtgggttctcagagagatatcacaatttgagtcccaaagaagaggccagatacccacccaccttcccccaaatcttaagcacctgcgccagtacagtcaagaagaggaaagtgtgtgaagacccaggtctggctctgccacttgcctggccatgtcaccttgaagctgtgacctgactccctatattgtttcctcagttgtagaccaaaggcaatggtgtctgccctcctaccttagaagacaaatgcaagggcatttcaccacagagaggacctttgtgctcactttggcccaggaggcagtgatgctcatggttgcatgactttatgagtcgctgggccagggtgaggacctgggcctcctgactcctggcccagagttcttgtccatcagttcatactgcaattttatgtgaaagcattatgactgtcctacccatgggagagtaaatgtagattgaatgctaggagtcttaaagctggagagtatagattttgaggtccccatttgggaaacatgtgccagaaatgtctaggtgtttaataaaacagatattggattatctcaaaaaaaaaaac

SEQ ID NO: 429732 - DNA, 2358 bp, Homo sapiens
gccagctcagagcttcctcgggtactcggccactcggggcatcgcggcggcctttctagccgctgtcccaagggttggtctcgcgctttcggctgcgagctctctgtggtgctggcagcgacatgtggcgcctcccgggactcctgggccgagctcttccccgtacactgggacctagcctctggagggtgactcctaagtccaccagcccagatgggcctcagactacctcctccactttgctggttcctgtgcctaacctcgacaggtcaggtccccatggcccaggcacgagcgggggtccaaggtcccatggatggaaggatgccttccaatggatgtcttcccgtgtctccccgaacaccctatgggatgccatatcttggggcactctggccgtgctggccctgcagctggcaaggcagatccacttccaggcatccctgccagcaggacctcagcgggtagaacactgctcctggcacagtcccctggaccgtttcttctcatctcccttgtggcacccatgctcctcactgcgacaacacatcctccccagccccgatggcccagctcccaggcacactggcctcagggaacccaggcttggccaggaagaagcctcagctcagccccggaacttctcacacaactctttgagaggagctcgtcctcaggacccctctgaggaaggtcccggtgattttggcttcctgcatgccagtagtagcatcgagtccgaggcaaaaccagcccagcctcagcccactggtgaaaaggaacaagataaatcaaaaactctttcccttgaggaggctgtgacttccattcagcagctcttccagctcagtgtttccatcgctttcaacttcctgggaacagagaacatgaagagtggcgaccacacggcagccttttcttacttccagaaagctgcagcccgcggctacagcaaagcgcagtacaatgcgggcttgtgtcatgagcatggcagaggcacccccagggacattagcaaggcggtcctttattatcagttggctgccagccagggccacagcctggctcagtaccgctatgccaggtgcctactacgagacccagcctcttcgtggaaccctgagcggcagagggcagtgtccttgctgaagcaggctgcagactcaggcttgagagaggcccaagctttcctcggggtgcttttcaccaaggagccctacctggatgagcagagagctgtgaaatatctttggcttgcagccaacaatggggactcacagagcaggtaccaccttggaatttgctatgagaaaggccttggtgtgcagaggaatctgggagaggccttgagatgttaccagcagtcagccgctctgggaaatgaggccgcccaggagaggctgcgagccctcttttccatgggggctgcaggtacagacccaagtccaagccaacaggttcattccctgagctcagtactctgtgacagataagtaggtagcagtagtctctggtctcctagtcatttccaaccccagtggtggctaagaatgcagcttttgtgctgggattacaagtgtgagccaccgcgcccagtcaaacctgagttttaacccccactatcactgaacttggactccatggcttagtgcctcagtttcttcacctctgaaaatgaaggtaatggtagcacctaactcattaagttgtcataaggatgaaatgagatgacactaagggacttagcacagcctgacagcacagtaggtattgaacaaatggtagctgctctgatgattttgtaggagagacaatatcccaaggttgcctgaattacccttctagggctctaagagccctgctcactcatgagtcactggggttgggagttaacaatgcctggggaaccaagcccttgaagaagtgctggctccaaagtaggagtccaagaatatacagcaagagtaagagttgctctcacctcttcttgtagccccggggcccagcgacctgacagttacaggactgaagtctttctccagcccctccctctgcagcttgaacaccctgctagcaggaacctcacgctcatggttgcatgactttatgagtcgctgggccagggtgaggacctgggcctcctgactcctggcccagagttcttgtccatcagttcatactgcaattttatgtgaaagcattatgactgtcctacccatgggagagtaaatgtagattgaatgctaggagtcttaaagctggagagtatagattttgaggtccccatttgggaaacatgtgccagaaatgtctaggtgtttaataaaacagatattggattatctcaaaaaaaaaaac

SEQ ID NO: 429733 - DNA, 623 bp, Homo sapiens
tcgagctcggtccaggctcctctttaggctgaggtgagaagttctgaaagtcagcagacacatccaggaatttgagtcccaaagaagaggccagatacccacccaccttcccccaaatcttaagcacctgcgccagtacagtcaagaagaggaaagtgtgtgaagacccaggtctggctctgccacttgcctggccatgtcaccttgaagctgtgacctgactccctatattgtttcctcagttgtagaccaaaggcaatggtgtctgccctcctaccttagaagacaaatgcaagggcatttcaccacagagaggacctttgtgctcactttggcccaggaggcagtgatgctcatggttgcatgactttatgagtcgctgggccagggtgaggacctgggcctcctgactcctggcccagagttcttgtccatcagttcatactgcaattttatgtgaaagcattatgactgtcctacccatgggagagtaaatgtagattgaatgctaggagtcttaaagctggagagtatagattttgaggtccccatttgggaaacatgtgccagaaatgtctaggtgtttaataaaacagatattggattatctcaaaaaaaaaaac

SEQ ID NO: 429734 - DNA, 571 bp, Homo sapiens
gctcggtacccgtcgtgctggcctcgaactcctgacctcaggtgatccacccaccttcccccaaatcttaagcacctgcgccagtacagtcaagaagaggaaagtgtgtgaagacccaggtctggctctgccacttgcctggccatgtcaccttgaagctgtgacctgactccctatattgtttcctcagttgtagaccaaaggcaatggtgtctgccctcctaccttagaagacaaatgcaagggcatttcaccacagagaggacctttgtgctcactttggcccaggaggcagtgatgctcatggttgcatgactttatgagtcgctgggccagggtgaggacctgggcctcctgactcctggcccagagttcttgtccatcagttcatactgcaattttatgtgaaagcattatgactgtcctacccatgggagagtaaatgtagattgaatgctaggagtcttaaagctggagagtatagattttgaggtccccatttgggaaacatgtgccagaaatgtctaggtgtttaataaaacagatattggattatctcaaaaaaaaaaac

SEQ ID NO: 429735 - DNA, 1053 bp, Homo sapiens
  misc_feature (879)..(879): n is a, c, g, or t
  misc_feature (942)..(942): n is a, c, g, or t
  misc_feature (984)..(984): n is a, c, g, or t
gccagctcagagcttcctcgggtactcggccactcggggcatcgcggcggcctttctagccgctgtcccaagggttggtctcgcgctttcggctgcgagctctctgtggtgctggcagcgacatgtggcgcctcccgggactcctgggccgagctcttccccgtacactgggacctagcctctggagggtgactcctaagtccaccagcccagatgggcctcagactacctcctccactttgctggttcctgtgcctaacctcgacaggtcaggtccccatggcccaggcacgagcgggggtccaaggtcccatggatggaaggatgccttccaatggatgtcttcccgtgtctccccgaacaccctatgggatgccatatcttggggcactctggccgtgctggccctgcagctggcaaggcagatccacttccaggcatccctgccagcaggacctcagcgggtagaacactgctcctggcacagtcccctggaccgtttcttctcatctcccttgtggcacccatgctcctcactgcgacaacacatcctccccagccccgatggcccagctcccaggcacactggcctcagggaacccaggcttggccaggaagaagcctcagctcagccccggaacttctcacacaactctttgagaggagctcgtcctcaggacccctctgaggaaggtcccggtgattttggcttcctgcatgccagtagtagcatcgagtccgaggcaaaaccagcccagcctcagcccactggtgaaaaggaacaagataaatcaaaaactctttcccttgaggaggctgtgacttccattcagcagctcttccagctcagtgtttccatcgctttcaacttcctgggancgagacctgacagtgggacaccggagctttttaattcagaagtgagccgggtaggaagcgcgnaagggtggggttgagtggaggccccggataagggctttaaangggccccggcccgtccggcggtaaaacctcggccccggggtcgcctaaacccgtcccccagatgcctag

SEQ ID NO: 429736 - DNA, 3074 bp, Homo sapiens
gccagctcagagcttcctcgggtactcggccactcggggcatcgcggcggcctttctagccgctgtcccaagggttggtctcgcgctttcggctgcgagctctctgtggtgctggcagcgacatgtggcgcctcccgggactcctgggccgagctcttccccgtacactgggacctagcctctggagggtgactcctaagtccaccagcccagatgggcctcagactacctcctccactttgctggttcctgtgcctaacctcgacaggtcaggtccccatggcccaggcacgagcgggggtccaaggtcccatggatggaaggatgccttccaatggatgtcttcccgtgtctccccgaacaccctatgggatgccatatcttggggcactctggccgtgctggccctgcagctggcaaggcagatccacttccaggcatccctgccagcaggacctcagcgggtagaacactgctcctggcacagtcccctggaccgtttcttctcatctcccttgtggcacccatgctcctcactgcgacaacacatcctccccagccccgatggcccagctcccaggcacactggcctcagggaacccaggcttggccaggaagaagcctcagctcagccccggaacttctcacacaactctttgagaggagctcgtcctcaggacccctctgaggaaggtcccggtgattttggcttcctgcatgccagtagtagcatcgagtccgaggcaaaaccagcccagcctcagcccactggtgaaaaggaacaagataaatcaaaaactctttcccttgaggaggctgtgacttccattcagcagctcttccagctcagtgtttccatcgctttcaacttcctgggaacagagaacatgaagagtggcgaccacacggcagccttttcttacttccagaaagctgcagcccgcggctacagcaaagcgcagtacaatgcgggcttgtgtcatgagcatggcagaggcacccccagggacattagcaaggcggtcctttattatcagttggctgccagccagggccacagcctggctcagtaccgctatgccaggtgcctactacgagacccagcctcttcgtggaaccctgagcggcagagggcagtgtccttgctgaagcaggctgcagactcaggcttgagagaggcccaagctttcctcggggtgcttttcaccaaggagccctacctggatgagcagagagctgtgaaatatctttggcttgcagccaacaatggggactcacagagcaggtaccaccttggaatttgctatgagaaaggccttggtgtgcagaggaatctgggagaggccttgagatgttaccagcagtcagccgctctgggaaatgaggccgcccaggagaggctgcgagccctcttttccatgggggctgcagccccggggcccagcgacctgacagttacaggactgaagtctttctccagcccctccctctgcagcttgaacaccctgctagcaggaacctcacgcctaccacatgcctcgagcacaggcaaccttggcctcctctgcagaagtgggcatctcggagccagcctggaagcctccagcagggctattcccccacacccctacccactggaaaggagtgttgtaagactaggttttggctaaggtgagataaaacatagtccctggtgcctcttaggggccagagcgggcaggaggttggataacaaaaatagagcatcagcaaccctttccaggtagaaattccagcgggagttcaggttcccaagcaatttcacgtacatggctggtaagtgactgatctttccccccgcttggtagcctcacagatgagtcttggatgcattcacagtcatttctggtctgtgcaccaaaggatgcattcagtgacctatgaaaaaccctactgaagggtccagagaccctggtgctcaccttagcctttgtctttgagcaaataacttaccttcttccttcttatgcctgggttttctcacacttaaatctgtactactgtttgccaatgtctgatgtgtgtatccctggttcacaagaagattttagatggtattcaaattaatattttctatttagttatatatttaatgtataatataaaaatatgattagcatattgacctgtagtttgatagatgttctgtctaggataaagctaactgtaaaaaaaaatagtgaatcagtttaaagaaaaacataacgtaaaagtgggcacagatccagagaggtagcaaaaatcacaggggtggttccatgaatggctgacacttaggaaactctgaattaggccatcctcgagactagcccaccattcacctctgttcatcccccgtgggctcataatcgttttcatttcacctttgatttggaaggaagaagtttcttgcccaaatgcctggatgtgtctgcttgactttcagaacttctcacctcagccctaaagagggagcctgtgggttctcagagagatatcacaatttgagtcccaaagaagaggccagatacccacccaccttcccccaaatcttaagcacctgcgccagtacagtcaagaagaggaaagtgtgtgaagacccaggtctggctctgccacttgcctggccatgtcaccttgaagctgtgacctgactccctatattgtttcctcagttgtagaccaaaggcaatggtgtctgccctcctaccttagaagacaaatgcaagggcatttcaccacagagaggacctttgtgctcactttggcccaggaggcagtgatgctcatggttgcatgactttatgagtcgctgggccagggtgaggacctgggcctcctgactcctggcccagagttcttgtccatcagttcatactgcaattttatgtgaaagcattatgactgtcctacccatgggagagtaaatgtagattgaatgctaggagtcttaaagctggagagtatagattttgaggtccccatttgggaaacatgtgccagaaatgtctaggtgtttaataaaacagatattggattatctcaaaaaaaaaaac

SEQ ID NO: 429737 - DNA, 483 bp, Homo sapiens
gcctgaacctgcaatgacagaggaaggtttacccgcaaatggggttgggaaagatgacatccgcacttgaagagctacttgttgggaaagaacgggtctgcatcagttcagatccaagttccttttgccttgtgcttgggaatgtagagaggtgcgggcctggatggctttggaaatgttcctttcaacagtgtttcccgagggagctcgagcaagttcactgctgccaacagctcacctccagggccttcccttctcctgtctttggttggcaggctggtgtcaaggttgaaggcatgggttttggtgttggcccagcctgggtccaaatcctggctctggctctactccctgcttgatcttgggaaagccacttgacctctccaagccccatatccgtgtctgtgaaatggggttaataatacctccctcccaggattgttggaaaatcaaattaaatcctattgtaaagcctgaaacctg

SEQ ID NO: 429738 - DNA, 3021 bp, Homo sapiens
gccagctcagagcttcctcgggtactcggccactcggggcatcgcggcggcctttctagccgctgtcccaagggttggtctcgcgctttcggctgcgagctctctgtggtgctggcagcgacatgtggcgcctcccgggactcctgggccgagctcttccccgtacactgggacctagcctctggagggtgactcctaagtccaccagcccagatgggcctcagactacctcctccactttgctggttcctgtgcctaacctcgacaggtcaggtccccatggcccaggcacgagcgggggtccaaggtcccatggatggaaggatgccttccaatggatgtcttcccgtgtctccccgaacaccctatgggatgccatatcttggggcactctggccgtgctggccctgcagctggcaaggcagatccacttccaggcatccctgccagcaggacctcagcgggtagaacactgctcctggcacagtcccctggaccgtttcttctcatctcccttgtggcacccatgctcctcactgcgacaacacatcctccccagccccgatggcccagctcccaggcacactggcctcagggaacccaggcttggccaggaagaagcctcagctcagccccggaacttctcacacaactctttgagaggagctcgtcctcaggacccctctgaggaaggtcccggtgattttggcttcctgcatgccagtagtagcatcgagtccgaggcaaaaccagcccagcctcagcccactggtgaaaaggaacaagataaatcaaaaactctttcccttgaggaggctgtgacttccattcagcagctcttccagctcagtgtttccatcgctttcaacttcctgggaacagagaacatgaagagtggcgaccacacggcagccttttcttacttccagaaagctgcagcccgcggctacagcaaagcgcagtacaatgcgggcttgtgtcatgagcatggcagaggcacccccagggacattagcaaggcggtcctttattatcagttggctgccagccagggccacagcctggctcagtaccgctatgccaggtgcctactacgagacccagcctcttcgtggaaccctgagcggcagagggcagtgtccttgctgaagcaggctgcagactcaggcttgagagaggcccaagctttcctcggggtgcttttcaccaaggagccctacctggatgagcagagagctgtgaaatatctttggcttgcagccaacaatggggactcacagagcaggtaccaccttggaatttgctatgagaaaggccttggtgtgcagaggaatctgggagaggccttgagatgttaccagcagtcagccgctctgggaaatgaggccgcccaggagaggctgcgagccctcttttccatgggggctgcagccccggggcccagcgacctgacagttacaggactgaagtctttctccagcccctccctctgcagcttgaacaccctgctagcaggaacctcacgcctaccacatgcctcgagcacaggcaaccttggcctcctctgcagaagtgggcatctcggagccagcctggaagcctccagcagggctattcccccacacccctacccactggaaaggagtgttgtaagactaggttttggctaaggtgagataaaacatagtccctggtgcctcttaggggccagagcgggcaggaggttggataacaaaaatagacaatttcacgtacatggctggtaagtgactgatctttccccccgcttggtagcctcacagatgagtcttggatgcattcacagtcatttctggtctgtgcaccaaaggatgcattcagtgacctatgaaaaaccctactgaagggtccagagaccctggtgctcaccttagcctttgtctttgagcaaataacttaccttcttccttcttatgcctgggttttctcacacttaaatctgtactactgtttgccaatgtctgatgtgtgtatccctggttcacaagaagattttagatggtattcaaattaatattttctatttagttatatatttaatgtataatataaaaatatgattagcatattgacctgtagtttgatagatgttctgtctaggataaagctaactgtaaaaaaaaatagtgaatcagtttaaagaaaaacataacgtaaaagtgggcacagatccagagaggtagcaaaaatcacaggggtggttccatgaatggctgacacttaggaaactctgaattaggccatcctcgagactagcccaccattcacctctgttcatcccccgtgggctcataatcgttttcatttcacctttgatttggaaggaagaagtttcttgcccaaatgcctggatgtgtctgcttgactttcagaacttctcacctcagccctaaagagggagcctgtgggttctcagagagatatcacaatttgagtcccaaagaagaggccagatacccacccaccttcccccaaatcttaagcacctgcgccagtacagtcaagaagaggaaagtgtgtgaagacccaggtctggctctgccacttgcctggccatgtcaccttgaagctgtgacctgactccctatattgtttcctcagttgtagaccaaaggcaatggtgtctgccctcctaccttagaagacaaatgcaagggcatttcaccacagagaggacctttgtgctcactttggcccaggaggcagtgatgctcatggttgcatgactttatgagtcgctgggccagggtgaggacctgggcctcctgactcctggcccagagttcttgtccatcagttcatactgcaattttatgtgaaagcattatgactgtcctacccatgggagagtaaatgtagattgaatgctaggagtcttaaagctggagagtatagattttgaggtccccatttgggaaacatgtgccagaaatgtctaggtgtttaataaaacagatattggattatctcaaaaaaaaaaac

SEQ ID NO: 429739 - DNA, 3312 bp, Homo sapiens
gggagcagattgccgtcatcgcacaggagctcaatgagctggactattatgactcacccagtgtcaacgcccgttgccaaaagatctgtgaccagtgggacaatctgggggccctaactcagaagcgaagggaagctctggagcggaccgagaaactgctggagaccattgaccagctgtacttggagtatgccaagcgggctgcacccttcaacaactggatggagggggccatggaggacctgcaggacaccttcattgtgcacatcagggagggtggccttgaactgcttctagccgctgtcccaagggttggtctcgcgctttcggctgcgagctctctgtggtgctggcagcgacatgtggcgcctcccgggactcctgggccgagctcttccccgtacactgggacctagcctctggagggtgactcctaagtccaccagcccagatgggcctcagactacctcctccactttgctggttcctgtgcctaacctcgacaggtcaggtccccatggcccaggcacgagcgggggtccaaggtcccatggatggaaggatgccttccaatggatgtcttcccgtgtctccccgaacaccctatgggatgccatatcttggggcactctggccgtgctggccctgcagctggcaaggcagatccacttccaggcatccctgccagcaggacctcagcgggtagaacactgctcctggcacagtcccctggaccgtttcttctcatctcccttgtggcacccatgctcctcactgcgacaacacatcctccccagccccgatggcccagctcccaggcacactggcctcagggaacccaggcttggccaggaagaagcctcagctcagccccggaacttctcacacaactctttgagaggagctcgtcctcaggacccctctgaggaaggtcccggtgattttggcttcctgcatgccagtagtagcatcgagtccgaggcaaaaccagcccagcctcagcccactggtgaaaaggaacaagataaatcaaaaactctttcccttgaggaggctgtgacttccattcagcagctcttccagctcagtgtttccatcgctttcaacttcctgggaacagagaacatgaagagtggcgaccacacggcagccttttcttacttccagaaagctgcagcccgcggctacagcaaagcgcagtacaatgcgggcttgtgtcatgagcatggcagaggcacccccagggacattagcaaggcggtcctttattatcagttggctgccagccagggccacagcctggctcagtaccgctatgccaggtgcctactacgagacccagcctcttcgtggaaccctgagcggcagagggcagtgtccttgctgaagcaggctgcagactcaggcttgagagaggcccaagctttcctcggggtgcttttcaccaaggagccctacctggatgagcagagagctgtgaaatatctttggcttgcagccaacaatggggactcacagagcaggtaccaccttggaatttgctatgagaaaggccttggtgtgcagaggaatctgggagaggccttgagatgttaccagcagtcagccgctctgggaaatgaggccgcccaggagaggctgcgagccctcttttccatgggggctgcagccccggggcccagcgacctgacagttacaggactgaagtctttctccagcccctccctctgcagcttgaacaccctgctagcaggaacctcacgcctaccacatgcctcgagcacaggcaaccttggcctcctctgcagaagtgggcatctcggagccagcctggaagcctccagcagggctattcccccacacccctacccactggaaaggagtgttgtaagactaggttttggctaaggtgagataaaacatagtccctggtgcctcttaggggccagagcgggcaggaggttggataacaaaaatagagcatcagcaaccctttccaggtagaaattccagcgggagttcaggttcccaagcaatttcacgtacatggctggtaagtgactgatctttccccccgcttggtagcctcacagatgagtcttggatgcattcacagtcatttctggtctgtgcaccaaaggatgcattcagtgacctatgaaaaaccctactgaagggtccagagaccctggtgctcaccttagcctttgtctttgagcaaataacttaccttcttccttcttatgcctgggttttctcacacttaaatctgtactactgtttgccaatgtctgatgtgtgtatccctggttcacaagaagattttagatggtattcaaattaatattttctatttagttatatatttaatgtataatataaaaatatgattagcatattgacctgtagtttgatagatgttctgtctaggataaagctaactgtaaaaaaaaatagtgaatcagtttaaagaaaaacataacgtaaaagtgggcacagatccagagaggtagcaaaaatcacaggggtggttccatgaatggctgacacttaggaaactctgaattaggccatcctcgagactagcccaccattcacctctgttcatcccccgtgggctcataatcgttttcatttcacctttgatttggaaggaagaagtttcttgcccaaatgcctggatgtgtctgcttgactttcagaacttctcacctcagccctaaagagggagcctgtgggttctcagagagatatcacaatttgagtcccaaagaagaggccagatacccacccaccttcccccaaatcttaagcacctgcgccagtacagtcaagaagaggaaagtgtgtgaagacccaggtctggctctgccacttgcctggccatgtcaccttgaagctgtgacctgactccctatattgtttcctcagttgtagaccaaaggcaatggtgtctgccctcctaccttagaagacaaatgcaagggcatttcaccacagagaggacctttgtgctcactttggcccaggaggcagtgatgctcatggttgcatgactttatgagtcgctgggccagggtgaggacctgggcctcctgactcctggcccagagttcttgtccatcagttcatactgcaattttatgtgaaagcattatgactgtcctacccatgggagagtaaatgtagattgaatgctaggagtcttaaagctggagagtatagattttgaggtccccatttgggaaacatgtgccagaaatgtctaggtgtttaataaaacagatattggattatctcaaaaaaaaaaac

SEQ ID NO: 429740 - DNA, 2207 bp, Homo sapiens
gccagctcagagcttcctcgggtactcggccactcggggcatcgcggcggcctttctagccgctgtcccaagggttggtctcgcgctttcggctgcgagctctctgtggtgctggcagcgacatgtggcgcctcccgggactcctgggccgagctcttccccgtacactgggacctagcctctggagggtgactcctaagtccaccagcccagatgggcctcagactacctcctccactttgctggttcctgtgcctaacctcgacaggtcaggtccccatggcccaggcacgagcgggggtccaaggtcccatggatggaaggatgccttccaatggatgtcttcccgtgtctccccgaacaccctatgggatgccatatcttggggcactctggccgtgctggccctgcagctggcaaggcagatccacttccaggcatccctgccagcaggacctcagcgggtagaacactgctcctggcacagtcccctggaccgtttcttctcatctcccttgtggcacccatgctcctcactgcgacaacacatcctccccagccccgatggcccagctcccaggcacactggcctcagggaacccaggcttggccaggaagaagcctcagctcagccccggaacttctcacacaactctttgagaggagctcgtcctcaggacccctctgaggaaggtcccggtgattttggcttcctgcatgccagtagtagcatcgagtccgaggcaaaaccagcccagcctcagcccactggtgaaaaggaacaagataaatcaaaaactctttcccttgaggaggctgtgacttccattcagcagctcttccagctcagtgtttccatcgctttcaacttcctgggaacagagaacatgaagagtggcgaccacacggcagccttttcttacttccagaaagctgcagcccgcggctacagcaaagcgcagtacaatgcgggcttgtgtcatgagcatggcagaggcacccccagggacattagcaaggcggtcctttattatcagttggctgccagccagggccacagcctggctcagtaccgctatgccaggtgcctactacgagacccagcctcttcgtggaaccctgagcggcagagggcagtgtccttgctgaagcaggctgcagactcaggcttgagagaggcccaagctttcctcggggtgcttttcaccaaggagccctacctggatgagcagagagctgtgaaatatctttggcttgcagccaacaatggggactcacagagcaggtaccaccttggaatttgctatgagaaaggccttggtgtgcagaggaatctgggagaggccttgagatgttaccagcagtcagccgctctgggaaatgaggccgcccaggagaggctgcgagccctcttttccatgggggctgcagccccggggcccagcgacctgacagttacaggactgaagtctttctccagcccctccctctgcagcttgaacaccctgctagcaggaacctcacgcctaccacatgcctcgagcacaggcaaccttggcctcctctgcagaagtgggcatctcggagccagcctggaagcctccagcagggctattcccccacacccctacccactggaaaggagtgttgtaagactaggttttggctaaggtgagataaaacatagtccctggtgcctcttaggggccagagcgggcaggaggttggataacaaaaatagagcatcagcaaccctttccaggtagaaattccagcgggagttcaggttcccaagcaatttcacgtacatggctggtaagtgactgatctttccccccgcttggtagcctcacagatgagtcttggatgcattcacagtcatttctggtctgtgcaccaaaggatgcattcagtgacctatgaaaaaccctactgaagggtccagagaccctggtgctcaccttagcctttgtctttgagcaaataacttaccttcttccttcttatgcctgggttttctcacacttaaatctgtactactgtttgccaatgtctgatgtgtgtatccctggttcacaagaagattttagatggtattcaaattaatattttctatttagttatatatttaatgtataatataaaaatatgattagcatattgacctgtagtttgatagatgttctgtctaggataaagctaactgt

SEQ ID NO: 429741 - DNA, 3678 bp, Homo sapiens
  misc_feature (3678)..(3678): n is a, c, g, or t
gccagctcagagcttcctcgggtactcggccactcggggcatcgcggcggcctttctagccgctgtcccaagggttggtctcgcgctttcggctgcgagctctctgtggtgctggcagcgacatgtggcgcctcccgggactcctgggccgagctcttccccgtacactgggacctagcctctggagggtgactcctaagtccaccagcccagatgggcctcagactacctcctccactttgctggttcctgtgcctaacctcgacaggtcaggtccccatggcccaggcacgagcgggggtccaaggtcccatggatggaaggatgccttccaatggatgtcttcccgtgtctccccgaacaccctatgggatgccatatcttggggcactctggccgtgctggccctgcagctggcaaggcagatccacttccaggcatccctgccagcaggacctcagcgggtagaacactgctcctggcacagtcccctggaccgtttcttctcatctcccttgtggcacccatgctcctcactgcgacaacacatcctccccagccccgatggcccagctcccaggcacactggcctcagggaacccaggcttggccaggaagaagcctcagctcagccccggaacttctcacacaactctttgagaggagctcgtcctcaggacccctctgaggaaggtcccggtgattttggcttcctgcatgccagtagtagcatcgagtccgaggcaaaaccagcccagcctcagcccactggtgaaaaggaacaagataaatcaaaaactctttcccttgaggaggctgtgacttccattcagcagctcttccagctcagtgtttccatcgctttcaacttcctgggaacagagaacatgaagagtggcgaccacacggcagccttttcttacttccagaaagctgcagcccgcggctacagcaaagcgcagtacaatgcgggcttgtgtcatgagcatggcagaggcacccccagggacattagcaaggcggtcctttattatcagttggctgccagccagggccacagcctggctcagtaccgctatgccaggtgcctactacgagacccagcctcttcgtggaaccctgagcggcagagggcagtgtccttgctgaagcaggctgcagactcaggcttgagagaggcccaagctttcctcggggtgcttttcaccaaggagccctacctggatgagcagagagctgtgaaatatctttggcttgcagccaacaatggggactcacagagcaggtaccaccttggaatttgctatgagaaaggccttggtgtgcagaggaatctgggagaggccttgagatgttaccagcagtcagccgctctgggaaatgaggccgcccaggagaggctgcgagccctcttttccatgggggctgcagccccggggcccagcgacctgacagttacaggactgaagtctttctccagcccctccctctgcagcttgaacaccctgctagcaggaacctcacgcctaccacatgcctcgagcacaggcaaccttggcctcctctgcagaagtgggcatctcggagccagcctggaagcctccagcagggctattcccccacacccctacccactggaaaggagtgttgtaagactaggttttggctaaggtgagataaaacatagtccctggtgcctcttaggggccagagcgggcaggaggttggataacaaaaatagagcatcagcaaccctttccaggtagaaattccagcgggagttcaggttcccaagcaatttcacgtacatggctggtaagtgactgatctttccccccgcttggtagcctcacagatgagtcttggatgcattcacagtcatttctggtctgtgcaccaaaggatgcattcagtgacctatgaaaaaccctactgaagggtccagagaccctggtgctcaccttagcctttgtctttgagcaaataacttaccttcttccttcttatgcctgggttttctcacacttaaatctgtactactgtttgccaatgtctgatgtgtgtatccctggttcacaagaagattttagatggtattcaaattaatattttctatttagttatatatttaatgtataatataaaaatatgattagcatattgacctgtagtttgatagatgttctgtctaggataaagctaactgtaaaaaaaaatagtgaatcagtttaaagaaaaacataacgtaaaagtgggcacagatccagagaggtagcaaaaatcacaggggtggttccatgaatggctgacacttaggaaactctgaattaggccatcctcgagactagcccaccattcacctctgttcatcccccgtgggctcataatcgttttcatttcacctttgatttggaaggaagaagtttcttgcccaaatgcctggatgtgtctgcttgactttcagaacttctcacctcagccctaaagagggagcctgtgggttctcagagagatatcacaatttgagtcccaaagaagaggccagatacccacccaccttcccccaaatcttaagcacctgcgccagtacagtcaagaagaggaaagtgtgtgaagacccaggtctggctctgccacttgcctggccatgtcaccttgaagctgtgacctgactccctatattgtttcctcagttgtagaccaaaggcaatggtgtctgccctcctaccttagaagacaaatgcaagggcatttcaccacagagaggacctttgtgctcactttggcccaggaggcagtgatgctcatggttgcatgactttatgagtcgctgggccagggtgaggacctgggcctcctgactcctggcccagagttcttgtccatcagttcatactgcaattttatgtgaaagcattatgactgtcctacccatgggagagtaaatgtagattgaatgctaggagtcttaaagctggagagtatagattttgaggtccccatttgggaaacatgtgccagaaatgtctaggtgtttaataaaacagatattggattatctcaaaaaaaaaaacaaaaaaaaaaaaaaaaaaaaaaaaaaaaaaaaaaaagaagagaaaagacaagaaaagaaaaaaaaagaagaaaaaaaaaaaagaagagagcgagaagaagagagagagagagaggacaacaagaaaagtatagagaagagcaccacgggccgccgcaacgcggcgcgcgcgcccagccaggagagaaccgagggagagaagagagataaaaggagacgagaggaaacaacaacacaacaaaaagaagaagagcacgacgaagaagaggagagaagaagcagcaacagtacacgaacaaaagaacaacaaaaacagagagaggggataacaggagcgcaaatctaacagagcggagagaaaaccgagccgagagagaggagacacaaatcgaggagcatcacgaacagaagcaaagaataagtatacagaagacgccgacgagatcacaggcgacgaacaagaggccaacagaaagaaagaaagaaaaccaacagggacaacaaagacagaagcagagagagagagaaaaaaaaaaataaggagataagaaaaacacaacgcgaccgcaaccgccggacaagacgaaagcgataacgcaaaactn

SEQ ID NO: 429742 - DNA, 3689 bp, Homo sapiens
cacaacagggtgtttttggctggaagcctctcatgggctcagacttggagaggcatggatagaatccaaagacagaagcccccacgggggtgggggtggggcctcatctgtggaagggggtggtcgactttccaggagttttccagctccacattcccatgtatttcagggaagccattctgaagcgggaggtggtacagcacagagtttatgcagtcaggctctgggggacggccttccggtcacttccaggaaccaatgtgtcttcatctatcgactgaggatatgcgtggcccctgatctccctgctctcactgcgacaacacatcctccccagccccgatggcccagctcccaggcacactggcctcagggaacccaggcttggccaggaagaagcctcagctcagccccggaacttctcacacaactctttgagaggagctcgtcctcaggacccctctgaggaaggtcccggtgattttggcttcctgcatgccagtagtagcatcgagtccgaggcaaaaccagcccagcctcagcccactggtgaaaaggaacaagataaatcaaaaactctttcccttgaggaggctgtgacttccattcagcagctcttccagctcagtgtttccatcgctttcaacttcctgggaacagagaacatgaagagtggcgaccacacggcagccttttcttacttccagaaagctgcagcccgcggctacagcaaagcgcagtacaatgcgggcttgtgtcatgagcatggcagaggcacccccagggacattagcaaggtattcccctgcccccaagcctgccttctgtgctgggctgctgagattgatgtctagaaatgagcagtgggcagggatgggggaaagtttggcttcttttctccacttggttctagcccagctgcgaaggaaaaataagaaagaagctcctaacttccaggaatttagactcaaaattcagggagggcagggattttgcctttcttctttgcaactacatcctcagcctagaatagcatcttgatgaatggattaattaatttttaaaaagtgggataagaacacaaagaggttatatataagaatgtatttcgtagagttgtatgtgaaggcaaaaaaacccaaaaaaacctgaaagtttcttcaatggaaaactggttaattacatctatttgggccttaaaatgatgtgctagatctgtatgtcagggaaagacattcatggtgtactattaaagttaaaaaaataggttataaagtagtatagagtgatctaagtctctctctctctctgcccccccccacacatatgtgcgtgcaaatgcgtagatgtctaaaaggtatgtgtgtgagtatgtctaacacatatatgtgagaagatatttgcaaggctgtacgctaaaattttaagcaagaatgatctttaggaggctgaatttcttgggattttatgtttctatttttggtttatatttttaaattttagcttatctgaattttctgactagtctataattattatgtattagttaattaaaataatttttaaaaatttcactgagtgcaaaagatgcttacagagttgccagccgactgggtgtttctccctttgccccagcggtcctttattatcagttggctgccagccagggccacagcctggctcagtaccgctatgccaggtgcctactacgagacccagcctcttcgtggaaccctgagcggcagagggcagtgtccttgctgaagcaggctgcagactcaggcttgagagaggcccaagctttcctcggggtgcttttcaccaaggagccctacctggatgagcagagagctgtgaaatatctttggcttgcagccaacaatggggactcacagagcaggtaccaccttggaatttgctatgagaaaggccttggtgtgcagaggaatctgggagaggccttgagatgttaccagcagtcagccgctctgggaaatgaggccgcccaggagaggctgcgagccctcttttccatgggggctgcagccccggggcccagcgacctgacagttacaggactgaagtctttctccagcccctccctctgcagcttgaacaccctgctagcaggaacctcacgcctaccacatgcctcgagcacaggcaaccttggcctcctctgcagaagtgggcatctcggagccagcctggaagcctccagcagggctattcccccacacccctacccactggaaaggagtgttgtaagactaggttttggctaaggtgagataaaacatagtccctggtgcctcttaggggccagagcgggcaggaggttggataacaaaaatagagcatcagcaaccctttccaggtagaaattccagcgggagttcaggttcccaagcaatttcacgtacatggctggtaagtgactgatctttccccccgcttggtagcctcacagatgagtcttggatgcattcacagtcatttctggtctgtgcaccaaaggatgcattcagtgacctatgaaaaaccctactgaagggtccagagaccctggtgctcaccttagcctttgtctttgagcaaataacttaccttcttccttcttatgcctgggttttctcacacttaaatctgtactactgtttgccaatgtctgatgtgtgtatccctggttcacaagaagattttagatggtattcaaattaatattttctatttagttatatatttaatgtataatataaaaatatgattagcatattgacctgtagtttgatagatgttctgtctaggataaagctaactgtaaaaaaaaatagtgaatcagtttaaagaaaaacataacgtaaaagtgggcacagatccagagaggtagcaaaaatcacaggggtggttccatgaatggctgacacttaggaaactctgaattaggccatcctcgagactagcccaccattcacctctgttcatcccccgtgggctcataatcgttttcatttcacctttgatttggaaggaagaagtttcttgcccaaatgcctggatgtgtctgcttgactttcagaacttctcacctcagccctaaagagggagcctgtgggttctcagagagatatcacaatttgagtcccaaagaagaggccagatacccacccaccttcccccaaatcttaagcacctgcgccagtacagtcaagaagaggaaagtgtgtgaagacccaggtctggctctgccacttgcctggccatgtcaccttgaagctgtgacctgactccctatattgtttcctcagttgtagaccaaaggcaatggtgtctgccctcctaccttagaagacaaatgcaagggcatttcaccacagagaggacctttgtgctcactttggcccaggaggcagtgatgctcatggttgcatgactttatgagtcgctgggccagggtgaggacctgggcctcctgactcctggcccagagttcttgtccatcagttcatactgcaattttatgtgaaagcattatgactgtcctacccatgggagagtaaatgtagattgaatgctaggagtcttaaagctggagagtatagattttgaggtccccatttgggaaacatgtgccagaaatgtctaggtgtttaataaaacagatattggattatctcaaaaaaaaaaac

SEQ ID NO: 429743 - DNA, 2178 bp, Homo sapiens
gccagctcagagcttcctcgggtactcggccactcggggcatcgcggcggcctttctagccgctgtcccaagggttggtctcgcgctttcggctgcgagctctctgtggtgctggcagcgacatgtggcgcctcccgggactcctgggccgagctcttccccgtacactgggacctagcctctggagggtgactcctaagtccaccagcccagatgggcctcagactacctcctccactttgctggttcctgtgcctaacctcgacaggtcaggtccccatggcccaggcacgagcgggggtccaaggtcccatggatggaaggatgccttccaatggatgtcttcccgtgtctccccgaacaccctatgggatgccatatcttggggcactctggccgtgctggccctgcagctggcaaggcagatccacttccaggcatccctgccagcaggacctcagcgggtagaacactgctcctggcacagtcccctggaccgtttcttctcatctcccttgtggcacccatgctcctcactgcgacaacacatcctccccagccccgatggcccagctcccaggcacactggcctcagggaacccaggcttggccaggaagaagcctcagctcagccccggaacttctcacacaactctttgagaggagctcgtcctcaggacccctctgaggaaggtcccggtgattttggcttcctgcatgccagtagtagcatcgagtccgaggcaaaaccagcccagcctcagcccactggtgaaaaggaacaagataaatcaaaaactctttcccttgaggaggctgtgacttccattcagcagctcttccagctcagtgtttccatcgctttcaacttcctgggaacagagaacatgaagagtggcgaccacacggcagccttttcttacttccagaaagctgcagcccgcggctacagcaaagcgcagtacaatgcgggcttgtgtcatgagcatggcagaggcacccccagggacattagcaaggcggtcctttattatcagttggctgccagccagggccacagcctggctcagtaccgctatgccaggtgcctactacgagacccagcctcttcgtggaaccctgagcggcagagggcagtgtccttgctgaagcaggctgcagactcaggcttgagagaggcccaagctttcctcggggtgcttttcaccaaggagccctacctggatgagcagagagctgtgaaatatctttggcttgcagccaacaatggggtatgcgatctcagtggacaagcatgttggggatgaagcctgataagagaagggattttggaactggtactgagttcttctgtgcttaggagattgttggataggagccttggcctggcttcaagccttagcgctcactgacttactgtgtgaccgttgggcagttgcagtagtacgccagagctggcttgcaccaggctgtgagagctgttggcagcttaaaatctgctatggtgggaatatttgcaccacagaaattgctaaatgccataaaacagggctttttccctcctcgagagccagttgttcaacatttaccagcacactactgggcctggtcacttcttgattcaaacctgtttcctcgtctttaaaatcagaataataatgcttgccttacctgtccagtacttcacagggtggttgtgaggatcaaaatctaactgagataactaacaggtgtgacagtgctgtgaaacctgtacacatgaaaaacacatcattacaagtgatggtaacccagggaaattagaagacgcatcaagtggagacagtaaacagggaacactgctcagtttggggtgggtggggatgtctggttgtctgtgaactggggtcattggcattcagacaattcagatgtgttccatgaagcattagttctctgggatgcttgtaagtcataagaggaaaaaaatggttagatgggtttgggaaatactgagttaaacagttaatataggaagtctcaaagctttatgtcactgtagatcactgaaaaggccatctgtaatttgctgtattcctcaagtgtatttgaccagtatatcttttgagttgcatcttgaaggaccaggagtcttggattaaatcaagcaatatatgcgtgaactgtaatctccctaca

SEQ ID NO: 429744 - DNA, 2872 bp, Homo sapiens
gccagctcagagcttcctcgggtactcggccactcggggcatcgcggcggcctttctagccgctgtcccaagggttggtctcgcgctttcggctgcgagctctctgtggtgctggcagcgacatgtggcgcctcccgggactcctgggccgagctcttccccgtacactgggacctagcctctggagggtgactcctaagtccaccagcccagatgggcctcagactacctcctccactttgctggttcctgtgcctaacctcgacaggtcaggtccccatggcccaggcacgagcgggggtccaaggtcccatggatggaaggatgccttccaatggatgtcttcccgtgtctccccgaacaccctatgggatgccatatcttggggcactctggccgtgctggccctgcagctggcaaggcagatccacttccaggcatccctgccagcaggacctcagcgggtagaacactgctcctggcacagtcccctggaccgtttcttctcatctcccttgtggcacccatgctcctcactgcgacaacacatcctccccagccccgatggcccagctcccaggcacactggcctcagggaacccaggcttggccaggaagaagcctcagctcagccccggaacttctcacacaactctttgagaggagctcgtcctcaggacccctctgaggaaggtcccggtgattttggcttcctgcatgccagtagtagcatcgagtccgaggcaaaaccagcccagcctcagcccactggtgaaaaggaacaagataaatcaaaaactctttcccttgaggaggctgtgacttccattcagcagctcttccagctcagtgtttccatcgctttcaacttcctgggaacagagaacatgaagagtggcgaccacacggcagccttttcttacttccagaaagctgcagcccgcggctacagcaaagcgcagtacaatgcgggcttgtgtcatgagcatggcagaggcacccccagggacattagcaaggtattcccctgcccccaagcctgccttctgtgctgggctgctgagattgatgtctagaaatgagcagtgggcagggatgggggaaagtttggcttcttttctccacttggttctagcccagctgcgaaggaaaaataagaaagaagctcctaacttccaggaatttagactcaaaattcagggagggcagggattttgcctttcttctttgcaactacatcctcagcctagaatagcatcttgatgaatggattaattaatttttaaaaagtgggataagaacacaaagaggttatatataagaatgtatttcgtagagttgtatgtgaaggcaaaaaaacccaaaaaaacctgaaagtttcttcaatggaaaactggttaattacatctatttgggccttaaaatgatgtgctagatctgtatgtcagggaaagacattcatggtgtactattaaagttaaaaaaataggttataaagtagtatagagtgatctaagtctctctctctctctgcccccccccacacatatgtgcgtgcaaatgcgtagatgtctaaaaggtatgtgtgtgagtatgtctaacacatatatgtgagaagatatttgcaaggctgtacgctaaaattttaagcaagaatgatctttaggaggctgaatttcttgggattttatgtttctatttttggtttatatttttaaattttagcttatctgaattttctgactagtctataattattatgtattagttaattaaaataatttttaaaaatttcactgagtgcaaaagatgcttacagagttgccagccgactgggtgtttctccctttgccccagcggtcctttattatcagttggctgccagccagggccacagcctggctcagtaccgctatgccaggtgcctactacgagacccagcctcttcgtggaaccctgagcggcagagggcagtgtccttgctgaagcaggctgcagactcaggcttgagagaggcccaagctttcctcggggtgcttttcaccaaggagccctacctggatgagcagagagctgtgaaatatctttggcttgcagccaacaatggggtatgcgatctcagtggacaagcatgttggggatgaagcctgataagagaagggattttggaactggtactgagttcttctgtgcttaggagattgttggataggagccttggcctggcttcaagccttagcgctcactgacttactgtgtgaccgttgggcagttgcagtagtacgccagagctggcttgcaccaggctgtgagagctgttggcagcttaaaatctgctatggtgggaatatttgcaccacagaaattgctaaatgccataaaacagggctttttccctcctcgagagccagttgttcaacatttaccagcacactactgggcctggtcacttcttgattcaaacctgtttcctcgtctttaaaatcagaataataatgcttgccttacctgtccagtacttcacagggtggttgtgaggatcaaaatctaactgagataactaacaggtgtgacagtgctgtgaaacctgtacacatgaaaaacacatcattacaagtgatggtaacccagggaaattagaagacgcatcaagtggagacagtaaacagggaacactgctcagtttggggtgggtggggatgtctggttgtctgtgaactggggtcattggcattcagatctgtaatatgtgtaacatttgatattaatttttgtggtttttcttgtaaagttatatgagggatatttattggttaataggggttttgtgatatacattttttttatctttttatttatagtagttctctaa

SEQ ID NO: 429745 - DNA, 1143 bp, Homo sapiens
  misc_feature (31)..(31): n is a, c, g, or t
  misc_feature (61)..(61): n is a, c, g, or t
  misc_feature (63)..(63): n is a, c, g, or t
  misc_feature (73)..(73): n is a, c, g, or t
  misc_feature (75)..(76): n is a, c, g, or t
  misc_feature (84)..(84): n is a, c, g, or t
agcgaaataagttaaaagccaacttctcggngtttcacaagacctactggtgagaaaggtntnaatatctttntnnaccacaanggactcacagagcaggtaccaccttggaatttgctatgagaaaggccttggtgtgcagaggaatctgggagaggccttgagatgttaccagcagtcagccgctctgggaaatgaggccgcccaggagaggctgcgagccctcttttccatgggggctgcagccccggggcccagcgacctgacagttacaggactgaagtctttctccagcccctccctctgcagcttgaacaccctgctagcaggaacctcacgcctaccacatgcctcgagcacaggcaaccttggcctcctctgcagaagtgggcatctcggagccagcctggaagcctccagcagggctattcccccacacccctacccactggaaaggagtgttgtaagactaggttttggctaaggaagaagtttcttgcccaaatgcctggatgtgtctgcttgactttcagaacttctcacctcagccctaaagagggagcctgtgggttctcagagagatatcacaatttgagtcccaaagaagaggccagatacccacccaccttcccccaaatcttaagcacctgcgccagtacagtcaagaagaggaaagtgtgtgaagacccaggtctggctctgccacttgcctggccatgtcaccttgaagctgtgacctgactccctatattgtttcctcagttgtagaccaaaggcaatggtgtctgccctcctaccttagaagacaaatgcaagggcatttcaccacagagaggacctttgtgctcactttggcccaggaggcagtgatgctcatggttgcatgactttatgagtcgctgggccagggtgaggacctgggcctcctgactcctggcccagagttcttgtccatcagttcatactgcaattttatgtgaaagcattatgactgtcctacccatgggagagtaaatgtagattgaatgctaggagtcttaaagctggagagtatagattttgaggtccccatttgggaaacatgtgccagaaatgtctaggtgtttaataaaacagatattggattatctcaaaaaaaaaaac

SEQ ID NO: 429746 - DNA, 1618 bp, Homo sapiens
gggtggtcggtgtgcttgtgaccctgcctttgtgtggctgtcaccggtgggactggcggggagctgtgtgattaacctccatttcagctaatcatgggagagattaaagtctctcctgattataactggtttagaggtacagttccccttaaaaagattattgtggatgatgatgacagtaagatatggtcgctctatgacgcgggcccccgaagtatcaggtgtcctctcatattcctgccccctgtcagtggaactgcagatgtctttttccggcagattttggctctgactggatggggttaccgggttatcgctttgcagtatccagtttattgggaccatctcgagttctgtgatggattcagaaaacttttagaccatttacaattggataaagttcatctttttggcgcttctttgggaggctttttggcccagaaatttgctgaatacactcacaaatctcctagagtccattccctaatcctctgcaattccttcagtgacacctctatcttcaaccaaacttggactgcaaacagcttttggctgatgcctgcatttatgctcaaaaaaatagttcttggaaatttttcatctggcccggtggaccctatgatggctgatgccattgatttcatggtagacaggctagaaagtttgggtcagagtgaactggcttcaagacttaccttgaattgtcaaaattcttatgtggaacctcataaaattcgggacatacctgtaactattatggatgtgtttgatcagagtgcgctttcaactgaagctaaagaagaaatgtacaagctgtatcctaatgcccgaagagctcatctgaaaacaggaggcaatttcccatacctgtgcagaagtgcagaggtcaatctttatgtacagatacatttgctgcaattccatggaaccaaatacgcggccattgacccatcaatggtcagtgccgaggagcttgaggtgcagaaaggcagccttggcatcagccaggaggagcagtagtgtgtctctcgctgtcaatgatgagttgacccggtgtgttcttgtatagtcagtggcatcagcacccgtcagccggccttttccttcaggttcgtcaggctcaccggttctcactgtgtctgggaagtaggactgatggtcatcttcatgacaggcggcatctccactaagcctgtgtaactgttccctctttggttttcttagcttttgaatttgaagaagtacttttgaagactcccattttaagaaccgtgcagattttgctaccaaaagtcttcaccactgtgttcttaagtgaatgttaatttctgaggtttgggactttgtggtggtttttttcttcttttcttttccattcttctttctttctttttatgttgtttgctgtaaatgctgcacatccagattgcatatcaggacattggttattttatgctttcttggatataaccatgatcagagtgccatggccactaccccactgtttgctctcctgcaaatcaactgcttttaatttacacttaaacaaattgttttgagtgttagctactgcctttctagatattagtcatttggaataaaaattcaatttcactga

SEQ ID NO: 429747 - DNA, 2177 bp, Homo sapiens
  misc_feature (75)..(75): n is a, c, g, or t
  misc_feature (1539)..(1540): n is a, c, g, or t
  misc_feature (1598)..(1598): n is a, c, g, or t
  misc_feature (2014)..(2014): n is a, c, g, or t
  misc_feature (2023)..(2023): n is a, c, g, or t
  misc_feature (2032)..(2032): n is a, c, g, or t
cctttgagcagtaggaattggcttgctgcccatgggcacctggctggagtaggcagtgtaggctgagggctgtanaaggccgggtttcattggtttgtacccaggtttccagaatagaaaaatgccacaacctcctgagaagcccagttcatggtctctcacctaagttgtggttcctcactgatgacttttctggccccaccacagatgataccacctttataagcacaaatgttgtctgtggatttaatgtaaatgtgaaaaacaaaattatttcaaaaactttacctgtgtttcttcctgcagctagaaagtttgggtcagagtgaactggcttcaagacttaccttgaattgtcaaaattcttatgtggaacctcataaaattcgggacatacctgtaactattatggatgtaagcttccttttaagtaaaatagctgctttactttttaaaatgtgtatgtcaagatctcctataaaactatttgataactttcaatgtgcctcttcaaatgctgccttggcttttgtttttaccctccagctttctcaattccaaaataatctgtttattgcttatcttggatttctttctggcaggaataacaccattgaaatcaaaataggccgagcacagtggcttatgcctgtaatcccagcgctttgggaggctgaggcaggaggattgcttgagtccaagagttcaggaccagcctgggcaacatagtgagaccctgtctgtatttatttaaaaaaaataaaaataaaaatgaatcaaaataaatttaaacaagggagtctacccatttgatgtatttttgctgttctcatcaatagatattgcaccatatattgcacatatatgggcagcaaagagaaggtgcttcacaagggtaacaagggtagagaatcaagaattccatagtttaattaccacaaaagcttgcttatttttttattgtggtaaaatgtacatttaaaatatgccattttaaccatttttaagtgcatagttcagtggcattaagtatattcacagttcggcaaccatcaccattttcacaacattttcatcattccaagaagaaattgcatacccattaaacaataactcctgttccctttcttcccccggcctctgataatcaacggttttattttctgtctataaaaatttacctattctagaacctcatataagtagaatcatacaacatttatccttttgtgtggccatttcacttagcataatgtttcacaagacttatcttgaaatgttatacatgtgtcagaatgtcatttctttcttttttttttttttttttttggaaacagggtctcactctgttccccaggctggagtgcagtggtgcaatctcagctcactgcaacctctgcctcccgggcccaaacaatcctccctcctcagcctccttagtagcttggaccacaggctcacaccactacgttcggctaattttttgtagagatggggtttcaccatgttgcccatgctggactcaaactctgggactcnngctgtctgcctgcctgggcctcccaaagtgctatgacaggcatgagccaccacgcccngcctatttctttttaaagctgaataatatctaccaataaaaccaatgttggtttataccacattttgtttatccattcatccgtcagtggtcacttgggttgtgttcagcttttggcaattgtgaatagtgcttctatgaacattggtgtaaaagtatatgtttgggcagggcacagtggctcattcctgcaatcccagcactttgggaggctgactcaagaggattgcttgagcccaggaattcgagaccagtctgggcaatacaggagaccctgtctctactactaataaagaaaattaggccgggcgcggtggctcacccctgtaatcccagaactttgggaggccaaggcgggtggatcatgaggtcaagagatcgagaccatcctggccaacgtggtgaaacccgtctctnctgaaaatncaaaaattngccgggcatggtggcacacacctgtactcccagctattcgggaggctgaggcaggagaattgcttgaatctgggcggtggaggttgcagtgagctgagatcgcaccactgcattccagcctgccaatagagtgagacttcgtctc

SEQ ID NO: 429748 - DNA, 402 bp, Homo sapiens
tcccccgggctgcaggattcggcacgagcttttgaagactcccattttaagaaccgtgcagattttgctaccaaaagtcttcaccactgtgttcttaagtgaatgttaatttctgaggtttgggactttgtggtggtttttttcttcttttcttttccattcttctttctttctttttatgttgtttgctgtaaatgctgcacatccagattgcatatcaggacattggttattttatgctttcttggatataaccatgatcagagtgccatggccactaccccactgtttgctctcctgcaaatcaactgcttttaatttacacttaaacaaattgttttgagtgttagctactgcctttctagatattagtcatttggaataaaaattcaatttcactga

SEQ ID NO: 429749 - DNA, 537 bp, Homo sapiens
  misc_feature (148)..(148): n is a, c, g, or t
gccggtgtcgtgttgggtgggaagacccccctgtcctaggggtgtttttcctatcattaacaaatcccgggtggtgcgtatcccagcctcgtggattttatggttagcctccgcgtaggaaaaaaaattttaccaccagggaacaacntaatgcccatgtggggccttttagggtgctcatataaaaacagttttgcacaaaaaaaacagtggggttccccgtttcggaattccgggaatatctttcgacccagggggtccgttcgcgagcggccccccccttttttttttttttttttttttttttttatcaaagtggtttgctgtaaatgctgcacatccagattgcatatcaggacattggttattttatgctttcttggatataaccatgatcagagtgccatggccactaccccactgtttgctctcctgcaaatcaactgcttttaatttacacttaaacaaattgttttgagtgttagctactgcctttctagatattagtcatttggaataaaaattcaatttcactga

SEQ ID NO: 429750 - DNA, 1114 bp, Homo sapiens
cggtatcccgtagtctcgatcaaaacttggactgcaaacagcttttggctgatgcctgcatttatgctcaaaaaaatagttcttggaaatttttcatctggcccggtggaccctatgatggctgatgccattgatttcatggtagacaggctagaaagtttgggtcagagtgaactggcttcaagacttaccttgaattgtcaaaattcttatgtggaacctcataaaattcgggacatacctgtaactattatggatgtgtttgatcagagtgcgctttcaactgaagctaaagaagaaatgtacaagctgtatcctaatgcccgaagagctcatctgaaaacaggaggcaatttcccatacctgtgcagaagtgcagaggtcaatctttatgtacagatacatttgctgcaattccatggaaccaaatacgcggccattgacccatcaatggtcagtgccgaggagcttgaggtgcagaaaggcagccttggcatcagccaggaggagcagtagtgtgtctctcgctgtcaatgatgagttgacccggtgtgttcttgtatagtcagtggcatcagcacccgtcagccggccttttccttcaggttcgtcaggctcaccggttctcactgtgtctgggaagtaggactgatggtcatcttcatgacaggcggcatctccactaagcctgtgtaactgttccctctttggttttcttagcttttgaatttgaagaagtacttttgaagactcccattttaagaaccgtgcagattttgctaccaaaagtcttcaccactgtgttcttaagtgaatgttaatttctgaggtttgggactttgtggtggtttttttcttcttttcttttccattcttctttctttctttttatgttgtttgctgtaaatgctgcacatccagattgcatatcaggacattggttattttatgctttcttggatataaccatgatcagagtgccatggccactaccccactgtttgctctcctgcaaatcaactgcttttaatttacacttaaacaaattgttttgagtgttagctactgcctttctagatattagtcatttggaataaaaattcaatttcactga

SEQ ID NO: 429751 - DNA, 1270 bp, Homo sapiens
  misc_feature (75)..(75): n is a, c, g, or t
cctttgagcagtaggaattggcttgctgcccatgggcacctggctggagtaggcagtgtaggctgagggctgtanaaggccgggtttcattggtttgtacccaggtttccagaatagaaaaatgccacaacctcctgagaagcccagttcatggtctctcacctaagttgtggttcctcactgatgacttttctggccccaccacagatgataccacctttataagcacaaatgttgtctgtggatttaatgtaaatgtgaaaaacaaaattatttcaaaaactttacctgtgtttcttcctgcagctagaaagtttgggtcagagtgaactggcttcaagacttaccttgaattgtcaaaattcttatgtggaacctcataaaattcgggacatacctgtaactattatggatgtgtttgatcagagtgcgctttcaactgaagctaaagaagaaatgtacaagctgtatcctaatgcccgaagagctcatctgaaaacaggaggcaatttcccatacctgtgcagaagtgcagaggtcaatctttatgtacagatacatttgctgcaattccatggaaccaaatacgcggccattgacccatcaatggtcagtgccgaggagcttgaggtgcagaaaggcagccttggcatcagccaggaggagcagtagtgtgtctctcgctgtcaatgatgagttgacccggtgtgttcttgtatagtcagtggcatcagcacccgtcagccggccttttccttcaggttcgtcaggctcaccggttctcactgtgtctgggaagtaggactgatggtcatcttcatgacaggcggcatctccactaagcctgtgtaactgttccctctttggttttcttagcttttgaatttgaagaagtacttttgaagactcccattttaagaaccgtgcagattttgctaccaaaagtcttcaccactgtgttcttaagtgaatgttaatttctgaggtttgggactttgtggtggtttttttcttcttttcttttccattcttctttctttctttttatgttgtttgctgtaaatgctgcacatccagattgcatatcaggacattggttattttatgctttcttggatataaccatgatcagagtgccatggccactaccccactgtttgctctcctgcaaatcaactgcttttaatttacacttaaacaaattgttttgagtgttagctactgcctttctagatattagtcatttggaataaaaattcaatttcactga

SEQ ID NO: 429752 - DNA, 1757 bp, Homo sapiens
agcgggccggcctcccgcacgcaccgcgcagcctgctgtgcccgtgggtcccgagtgctccgccgcccgccccgacccgggcccagccgcctccacggcccgcgctcgtactggagcgaagagcggcctcctgaaggaggggaagggacgtgggggcggccacggcaggattaacctccatttcagctaatcatgggagagattaaagtctctcctgattataactggtttagaggtacagttccccttaaaaagattattgtggatgatgatgacagtaagatatggtcgctctatgacgcgggcccccgaagtatcaggtgtcctctcatattcctgccccctgtcagtggaactgcagatgtctttttccggcagattttggctctgactggatggggttaccgggttatcgctttgcagtatccagtttattgggaccatctcgagttctgtgatggattcagaaaacttttagaccatttacaattggataaagttcatctttttggcgcttctttgggaggctttttggcccagaaatttgctgaatacactcacaaatctcctagagtccattccctaatcctctgcaattccttcagtgacacctctatcttcaaccaaacttggactgcaaacagcttttggctgatgcctgcatttatgctcaaaaaaatagttcttggaaatttttcatctggcccggtggaccctatgatggctgatgccattgatttcatggtagacaggtgctagaaagttgggtcagagtgaaactggcttttcccaaaaaaatgggaaaaaacccatttttaaaaacccccttttggaaaacttggtccaaaattcttatgtggaacctcataaaattcgggacatacctgtaactattatggatgtgtttgatcagagtgcgctttcaactgaagctaaagaagaaatgtacaagctgtatcctaatgcccgaagagctcatctgaaaacaggaggcaatttcccatacctgtgcagaagtgcagaggtcaatctttatgtacagatacatttgctgcaattccatggaaccaaatacgcggccattgacccatcaatggtcagtgccgaggagcttgaggtgcagaaaggcagccttggcatcagccaggaggagcagtagtgtgtctctcgctgtcaatgatgagttgacccggtgtgttcttgtatagtcagtggcatcagcacccgtcagccggccttttccttcaggttcgtcaggctcaccggttctcactgtgtctgggaagtaggactgatggtcatcttcatgacaggcggcatctccactaagcctgtgtaactgttccctctttggttttcttagcttttgaatttgaagaagtacttttgaagactcccattttaagaaccgtgcagattttgctaccaaaagtcttcaccactgtgttcttaagtgaatgttaatttctgaggtttgggactttgtggtggtttttttcttcttttcttttccattcttctttctttctttttatgttgtttgctgtaaatgctgcacatccagattgcatatcaggacattggttattttatgctttcttggatataaccatgatcagagtgccatggccactaccccactgtttgctctcctgcaaatcaactgcttttaatttacacttaaacaaattgttttgagtgttagctactgcctttctagatattagtcatttggaataaaaattcaatttcactga

SEQ ID NO: 429753 - DNA, 886 bp, Homo sapiens
ggattactaaatggctgttaccaatggctggtgtttgatcagagtgcgctttcaactgaagctaaagaagaaatgtacaagctgtatcctaatgcccgaagagctcatctgaaaacaggaggcaatttcccatacctgtgcagaagtgcagaggtcaatctttatgtacagatacatttgctgcaattccatggaaccaaatacgcggccattgacccatcaatggtcagtgccgaggagcttgaggtgcagaaaggcagccttggcatcagccaggaggagcagtagtgtgtctctcgctgtcaatgatgagttgacccggtgtgttcttgtatagtcagtggcatcagcacccgtcagccggccttttccttcaggttcgtcaggctcaccggttctcactgtgtctgggaagtaggactgatggtcatcttcatgacaggcggcatctccactaagcctgtgtaactgttccctctttggttttcttagcttttgaatttgaagaagtacttttgaagactcccattttaagaaccgtgcagattttgctaccaaaagtcttcaccactgtgttcttaagtgaatgttaatttctgaggtttgggactttgtggtggtttttttcttcttttcttttccattcttctttctttctttttatgttgtttgctgtaaatgctgcacatccagattgcatatcaggacattggttattttatgctttcttggatataaccatgatcagagtgccatggccactaccccactgtttgctctcctgcaaatcaactgcttttaatttacacttaaacaaattgttttgagtgttagctactgcctttctagatattagtcatttggaataaaaattcaatttcactga

SEQ ID NO: 429754 - DNA, 1005 bp, Homo sapiens
tcaaggaaacagatttacggccattgacccatcaatggtcatgccgagtgagcttgaggtgcagaaaggcagccttgcatcagccaggaggagcagtattgtgcctctcgctgtcaatgatgagttgacccggtgtgtcatgtatagtcagtggcatcagcacccgtcagccggccttttccttcaggttcgtcaggctcaccggttctcactgtgtctgggaagtaggactgatggtcatcttcatgacaggcggcatctccactaagcctgtgtaactgttcccatggatacatttgctgcaattccatggaaccaaatacgcggccattgacccatcaatggtcagtgccgaggagcttgaggtgcagaaaggcagccttggcatcagccaggaggagcagtagtgtgtctctcgctgtcaatgatgagttgacccggtgtgttcttgtatagtcagtggcatcagcacccgtcagccggccttttccttcaggttcgtcaggctcaccggttctcactgtgtctgggaagtaggactgatggtcatcttcatgacaggcggcatctccactaagcctgtgtaactgttccctctttggttttcttagcttttgaatttgaagaagtacttttgaagactcccattttaagaaccgtgcagattttgctaccaaaagtcttcaccactgtgttcttaagtgaatgttaatttctgaggtttgggactttgtggtggtttttttcttcttttcttttccattcttctttctttctttttatgttgtttgctgtaaatgctgcacatccagattgcatatcaggacattggttattttatgctttcttggatataaccatgatcagagtgccatggccactaccccactgtttgctctcctgcaaatcaactgcttttaatttacacttaaacaaattgttttgagtgttagctactgcctttctagatattagtcatttggaataaaaattcaatttcactga

SEQ ID NO: 429755 - DNA, 716 bp, Homo sapiens
attggctacggattctggattctgcagccttgtaggtcatagcatctatcatgtgtcaaatgccgaggagcttgaggtgcagaaaggcagccttggcatcagccaggaggagcagtagtgtgtctctcgctgtcaatgatgagttgacccggtgtgttcttgtatagtcagtggcatcagcacccgtcagccggccttttccttcaggttcgtcaggctcaccggttctcactgtgtctgggaagtaggactgatggtcatcttcatgacaggcggcatctccactaagcctgtgtaactgttccctctttggttttcttagcttttgaatttgaagaagtacttttgaagactcccattttaagaaccgtgcagattttgctaccaaaagtcttcaccactgtgttcttaagtgaatgttaatttctgaggtttgggactttgtggtggtttttttcttcttttcttttccattcttctttctttctttttatgttgtttgctgtaaatgctgcacatccagattgcatatcaggacattggttattttatgctttcttggatataaccatgatcagagtgccatggccactaccccactgtttgctctcctgcaaatcaactgcttttaatttacacttaaacaaattgttttgagtgttagctactgcctttctagatattagtcatttggaataaaaattcaatttcactga

SEQ ID NO: 429756 - DNA, 1175 bp, Homo sapiens
agcgggccggcctcccgcacgcaccgcgcagcctgctgtgcccgtgggtcccgagtgctccgccgcccgccccgacccgggcccagccgcctccacggcccgcgctcgtactggagcgaagagcggcctcctgaaggaggggaagggacgtgggggcggccacggcaggattaacctccatttcagctaatcatgggagagattaaagtctctcctgattataactggtttagaggtacagttccccttaaaaagattattgtggatgatgatgacagtaagatatggtcgctctatgacgcgggcccccgaagtatcaggtgtcctctcatattcctgccccctgtcagtggaactgcagatgtctttttccggcagattttggctctgactggatggggttaccgggttatcgctttgcagtatccagtttattgggaccatctcgagttctgtgatggattcagaaaacttttagaccatttacaattggataaagttcatctttttggcgcttctttgggaggctttttggcccagaaatttgctgaatacactcacaaatctcctagagtccattccctaatcctctgcaattccttcagtgacacctctatcttcaaccaaacttggactgcaaacagcttttggctgatgcctgcatttatgctcaaaaaaatagttcttggaaatttttcatctggcccggtggaccctatgatggctgatgccattgatttcatggtagacaggctagaaagtttgggtcagagtgaactggcttcaagacttaccttgaattgtcaaaattcttatgtggaacctcataaaattcgggacatacctgtaactattatggatgtgtttgatcagagtgcgctttcaactgaagctaaagaagaaatgtacaagctgtatcctaatgcccgaagagctcatctgaaaacaggaggcaatttcccatacctgtgcagaagtgcagaggtcaatctttatgtacaggtaaggcctagcttgaaacccagagcactctgagccccacatatgtttgcaacataaagacttctctccatggactagttagggaatcagtgaactacagaattccttgtagaaatgaggcattgacttgataaaagtggtgttacatttataacttgtagataccatttgaa

SEQ ID NO: 429757 - DNA, 1717 bp, Homo sapiens
agcgggccggcctcccgcacgcaccgcgcagcctgctgtgcccgtgggtcccgagtgctccgccgcccgccccgacccgggcccagccgcctccacggcccgcgctcgtactggagcgaagagcggcctcctgaaggaggggaagggacgtgggggcggccacggcaggattaacctccatttcagctaatcatgggagagattaaagtctctcctgattataactggtttagaggtacagttccccttaaaaagattattgtggatgatgatgacagtaagatatggtcgctctatgacgcgggcccccgaagtatcaggtgtcctctcatattcctgccccctgtcagtggaactgcagatgtctttttccggcagattttggctctgactggatggggttaccgggttatcgctttgcagtatccagtttattgggaccatctcgagttctgtgatggattcagaaaacttttagaccatttacaattggataaagttcatctttttggcgcttctttgggaggctttttggcccagaaatttgctgaatacactcacaaatctcctagagtccattccctaatcctctgcaattccttcagtgacacctctatcttcaaccaaacttggactgcaaacagcttttggctgatgcctgcatttatgctcaaaaaaatagttcttggaaatttttcatctggcccggtggaccctatgatggctgatgccattgatttcatggtagacaggctagaaagtttgggtcagagtgaactggcttcaagacttaccttgaattgtcaaaattcttatgtggaacctcataaaattcgggacatacctgtaactattatggatgtgtttgatcagagtgcgctttcaactgaagctaaagaagaaatgtacaagctgtatcctaatgcccgaagagctcatctgaaaacaggaggcaatttcccatacctgtgcagaagtgcagaggtcaatctttatgtacagatacatttgctgcaattccatggaaccaaatacgcggccattgacccatcaatggtcagtgccgaggagcttgaggtgcagaaaggcagccttggcatcagccaggaggagcagtagtgtgtctctcgctgtcaatgatgagttgacccggtgtgttcttgtatagtcagtggcatcagcacccgtcagccggccttttccttcaggttcgtcaggctcaccggttctcactgtgtctgggaagtaggactgatggtcatcttcatgacaggcggcatctccactaagcctgtgtaactgttccctctttggttttcttagcttttgaatttgaagaagtacttttgaagactcccattttaagaaccgtgcagattttgctaccaaaagtcttcaccactgtgttcttaagtgaatgttaatttctgaggtttgggactttgtggtggtttttttcttcttttcttttccattcttctttctttctttttatgttgtttgctgtaaatgctgcacatccagattgcatatcaggacattggttattttatgctttcttggatataaccatgatcagagtgccatggccactaccccactgtttgctctcctgcaaatcaactgcttttaatttacacttaaacaaattgttttgagtgttagctactgcctttctagatattagtcatttggaataaaaattcaatttcactga

SEQ ID NO: 429758 - DNA, 1636 bp, Homo sapiens
agcgggccggcctcccgcacgcaccgcgcagcctgctgtgcccgtgggtcccgagtgctccgccgcccgccccgacccgggcccagccgcctccacggcccgcgctcgtactggagcgaagagcggcctcctgaaggaggggaagggacgtgggggcggccacggcaggattaacctccatttcagctaatcatgggagagattaaagtctctcctgattataactggtttagaggtacagttccccttaaaaagattattgtggatgatgatgacagtaagatatggtcgctctatgacgcgggcccccgaagtatcaggtgtcctctcatattcctgccccctgtcagtggaactgcagatgtctttttccggcagattttggctctgactggatggggttaccgggttatcgctgttcatctttttggcgcttctttgggaggctttttggcccagaaatttgctgaatacactcacaaatctcctagagtccattccctaatcctctgcaattccttcagtgacacctctatcttcaaccaaacttggactgcaaacagcttttggctgatgcctgcatttatgctcaaaaaaatagttcttggaaatttttcatctggcccggtggaccctatgatggctgatgccattgatttcatggtagacaggctagaaagtttgggtcagagtgaactggcttcaagacttaccttgaattgtcaaaattcttatgtggaacctcataaaattcgggacatacctgtaactattatggatgtgtttgatcagagtgcgctttcaactgaagctaaagaagaaatgtacaagctgtatcctaatgcccgaagagctcatctgaaaacaggaggcaatttcccatacctgtgcagaagtgcagaggtcaatctttatgtacagatacatttgctgcaattccatggaaccaaatacgcggccattgacccatcaatggtcagtgccgaggagcttgaggtgcagaaaggcagccttggcatcagccaggaggagcagtagtgtgtctctcgctgtcaatgatgagttgacccggtgtgttcttgtatagtcagtggcatcagcacccgtcagccggccttttccttcaggttcgtcaggctcaccggttctcactgtgtctgggaagtaggactgatggtcatcttcatgacaggcggcatctccactaagcctgtgtaactgttccctctttggttttcttagcttttgaatttgaagaagtacttttgaagactcccattttaagaaccgtgcagattttgctaccaaaagtcttcaccactgtgttcttaagtgaatgttaatttctgaggtttgggactttgtggtggtttttttcttcttttcttttccattcttctttctttctttttatgttgtttgctgtaaatgctgcacatccagattgcatatcaggacattggttattttatgctttcttggatataaccatgatcagagtgccatggccactaccccactgtttgctctcctgcaaatcaactgcttttaatttacacttaaacaaattgttttgagtgttagctactgcctttctagatattagtcatttggaataaaaattcaatttcactga

SEQ ID NO: 429759 - DNA, 1664 bp, Homo sapiens
agcgggccggcctcccgcacgcaccgcgcagcctgctgtgcccgtgggtcccgagtgctccgccgcccgccccgacccgggcccagccgcctccacggcccgcgctcgtactggagcgaagagcggcctcctgaaggaggggaagggacgtgggggcggccacggcaggattaacctccatttcagctaatcatgggagagattaaagtctctcctgattataactggtttagaggtacagttccccttaaaaagattattgtggatgatgatgacagtaagatatggtcgctctatgacgcgggcccccgaagtatcaggtgtcctctcatattcctgccccctgtcagtggaactgcagatgtctttttccggcagattttggctctgactggatggggttaccgggttatcgctttgcagtatccagtttattgggaccatctcgagttctgtgatggattcagaaaacttttagaccatttacaattggataaagttcatctttttggcgcttctttgggaggctttttggcccagaaatttgctgaatacactcacaaatctcctagagtccattccctaatcctctgcaattccttcagtgacacctctatcttcaaccaaacttggactgcaaacagcttttggctgatgcctgcatttatgctcaaaaaaatagttcttggaaatttttcatctggcccggtggaccctatgatggctgatgccattgatttcatggtagacaggctagaaagtttgggtcagagtgaactggcttcaagacttaccttgaattgtcaaaattcttatgtggaacctcataaaattcgggacatacctgtaactattatggatgtgtttgatcagagtgcgctttcaactgaagctaaagaagaaatgtacaagctgtatcctaatgcccgaagagctcatctgaaaacagatacatttgctgcaattccatggaaccaaatacgcggccattgacccatcaatggtcagtgccgaggagcttgaggtgcagaaaggcagccttggcatcagccaggaggagcagtagtgtgtctctcgctgtcaatgatgagttgacccggtgtgttcttgtatagtcagtggcatcagcacccgtcagccggccttttccttcaggttcgtcaggctcaccggttctcactgtgtctgggaagtaggactgatggtcatcttcatgacaggcggcatctccactaagcctgtgtaactgttccctctttggttttcttagcttttgaatttgaagaagtacttttgaagactcccattttaagaaccgtgcagattttgctaccaaaagtcttcaccactgtgttcttaagtgaatgttaatttctgaggtttgggactttgtggtggtttttttcttcttttcttttccattcttctttctttctttttatgttgtttgctgtaaatgctgcacatccagattgcatatcaggacattggttattttatgctttcttggatataaccatgatcagagtgccatggccactaccccactgtttgctctcctgcaaatcaactgcttttaatttacacttaaacaaattgttttgagtgttagctactgcctttctagatattagtcatttggaataaaaattcaatttcactga

SEQ ID NO: 429760 - DNA, 1609 bp, Homo sapiens
agcgggccggcctcccgcacgcaccgcgcagcctgctgtgcccgtgggtcccgagtgctccgccgcccgccccgacccgggcccagccgcctccacggcccgcgctcgtactggagcgaagagcggcctcctgaaggaggggaagggacgtgggggcggccacggcaggattaacctccatttcagctaatcatgggagagattaaagtctctcctgattataactggtttagaggtacagttccccttaaaaagattattgtggatgatgatgacagtaagatatggtcgctctatgacgcgggcccccgaagtatcaggtgtcctctcatattcctgccccctgtcagtggaactgcagatgtctttttccggcagattttggctctgactggatggggttaccgggttatcgctttgcagtatccagtttattgggaccatctcgagttctgtgatggattcagaaaacttttagaccatttacaattggataaagttcatctttttggcgcttctttgggaggctttttggcccagaaatttgctgaatacactcacaaatctcctagagtccattccctaatcctctgcaattccttcagtgacacctctatcttcaaccaaacttggactgcaaacagcttttggctgatgcctgcatttatgctcaaaaaaatagttcttggaaatttttcatctggcccggtggaccctatgatggctgatgccattgatttcatggtagacagggtgtttgatcagagtgcgctttcaactgaagctaaagaagaaatgtacaagctgtatcctaatgcccgaagagctcatctgaaaacaggaggcaatttcccatacctgtgcagaagtgcagaggtcaatctttatgtacagatacatttgctgcaattccatggaaccaaatacgcggccattgacccatcaatggtcagtgccgaggagcttgaggtgcagaaaggcagccttggcatcagccaggaggagcagtagtgtgtctctcgctgtcaatgatgagttgacccggtgtgttcttgtatagtcagtggcatcagcacccgtcagccggccttttccttcaggttcgtcaggctcaccggttctcactgtgtctgggaagtaggactgatggtcatcttcatgacaggcggcatctccactaagcctgtgtaactgttccctctttggttttcttagcttttgaatttgaagaagtacttttgaagactcccattttaagaaccgtgcagattttgctaccaaaagtcttcaccactgtgttcttaagtgaatgttaatttctgaggtttgggactttgtggtggtttttttcttcttttcttttccattcttctttctttctttttatgttgtttgctgtaaatgctgcacatccagattgcatatcaggacattggttattttatgctttcttggatataaccatgatcagagtgccatggccactaccccactgtttgctctcctgcaaatcaactgcttttaatttacacttaaacaaattgttttgagtgttagctactgcctttctagatattagtcatttggaataaaaattcaatttcactga

SEQ ID NO: 429761 - DNA, 1663 bp, Homo sapiens
agcgggccggcctcccgcacgcaccgcgcagcctgctgtgcccgtgggtcccgagtgctccgccgcccgccccgacccgggcccagccgcctccacggcccgcgctcgtactggagcgaagagcggcctcctgaaggaggggaagggacgtgggggcggccacggcaggattaacctccatttcagctaatcatgggagagattaaagtctctcctgattataactggtttagaggtacagttccccttaaaaagattattgtggatgatgatgacagtaagatatggtcgctctatgacgcgggcccccgaagtatcaggtgtcctctcatattcctgccccctgtcagtggaactgcagatgtctttttccggcagattttggctctgactggatggggttaccgggttatcgctttgcagtatccagtttattgggaccatctcgagttctgtgatggattcagaaaacttttagaccatttacaattggataaagttcatctttttggcgcttctttgggaggctttttggcccagaaatttgctgaatacactcacaaatctcctagagtccattccctaatcctctgcaattccttcagtgacacctctatcttcaaccaaacttggactgcaaacagcttttggctgatgcctgcatttatgctcaaaaaaatagttcttggaaatttttcatctggcccggtggaccctatgatggctgatgccattgatttcatggtagacaggctagaaagtttgggtcagagtgaactggcttcaagacttaccttgaattgtcaaaattcttatgtggaacctcataaaattcgggacatacctgtaactattatggatgtgtttgatcagagtgcgctttcaactgaagctaaagaagaaatgtacaagctgtatcctaatgcccgaagagctcatctgaaaacaggaggcaatttcccatacctgtgcagaagtgcagaggtcaatctttatgtacagatacatttgctgcaattccatggaaccaaatacgcggccattgacccatcaatggtcagtgccgaggagcttgaggtgcagaaaggcagccttggcatcagccaggaggagcagtagtgtgtctctcgctgtcaatgatgagttgacccggtgtgttcttgtatagtcagtggcatcagcacccgtcagccggccttttccttcaggttcgtcaggctcaccggttctcactgtgtctgggaagtaggactgatggtcatcttcatgacaggcggcatctccactaagcctgtgtaactgttccctctttggttttcttagcttttgaatttgaagaagtacttttgaagactcccattttaagaaccgtgcagattttgctacctttgtggtggtttttttcttcttttcttttccattcttctttctttctttttatgttgtttgctgtaaatgctgcacatccagattgcatatcaggacattggttattttatgctttcttggatataaccatgatcagagtgccatggccactaccccactgtttgctctcctgcaaatcaactgcttttaatttacacttaaacaaattgttttgagtgttagctactgcctttctagatattagtcatttggaataaaaattcaatttcactga

SEQ ID NO: 429762 - DNA, 1176 bp, Homo sapiens
agcgggccggcctcccgcacgcaccgcgcagcctgctgtgcccgtgggtcccgagtgctccgccgcccgccccgacccgggcccagccgcctccacggcccgcgctcgtactggagcgaagagcggcctcctgaaggaggggaagggacgtgggggcggccacggcaggattaacctccatttcagctaatcatgggagagattaaagtctctcctgattataactggtttagaggtacagttccccttaaaaagattattgtggatgatgatgacagtaagatatggtcgctctatgacgcgggcccccgaagtatcaggtgtcctctcatattcctgccccctgtcagtggaactgcagatgtctttttccggcagattttggctctgactggatggggttaccgggttatcgctttgcagtatccagtttattgggaccatctcgagttctgtgatggattcagaaaacttttagaccatttacaattggataaagttcatctttttggcgcttctttgggaggctttttggcccagaaatttgctgaatacactcacaaatctcctagagtccattccctaatcctctgcaattccttcagtgacacctctatcttcaaccaaacttggactgcaaacagcttttggctgatgcctgcatttatgctcaaaaaaatagttcttggaaatttttcatctggcccggtggaccctatgatggctgatgccattgatttcatggtagacaggggtaaggatcatgacattgggttggggacacattgtattgggaattttcacatctacttggttccagaagatagatctgtctcacaagtatgtgtaagaggtatttgctaagcagagtaatacatctgagcagatattattgctggtaagggcttgcctacattagtgcttcccaccagctattcatcaaaatcacttaggggagctttcaaaaatacagattgtaaggcctcacagcagatcatccatctggaatccctgggcatgggatctgggaatctatttttacttcacacttttcctctacccaccaggtaaatctgatgaaccaggtctgttggcttgcatttaggaactgctgggctagatgatttctcaaatctcttttaagatcccttaaaggtttatcttaaaaaaaaaaaa

SEQ ID NO: 429763 - DNA, 843 bp, Homo sapiens
tagggtcttagggagaaaaccaaggaagatattagaaaagttacacacaagctgttggtttagtatgaaaaacttttgattctatctgctacttagaatttatcacaattaaccaatcctttcagtaaattatctgtttgccactgtgtatatggacatatcgtggctaaatacatttaagagagagaagaaaaattcctattaagaacttttaacactggaattacctgagtttcacttacctggaatattttttgtgtggcataaattggcaacagaggtcaggacagttggacgcaaatgccccgggccctatgtgatgagtctcctgcagccaggtcctgtgttcccaagtgggaacagtgagaacagtgacctcactgtactcccaaatcacatttgttctaaaattttatccttctctacttttgccaatcactacttttcttgtcttttgcagatatgttatgctattaatttgggaaaagaaattattgaggttcagaaggtaagatgcattctagcgctggtttagtagctactcaaaacacatctgtgtacacataccaagagtcttttcaaaaagaaaagtgatgttcactggaaagtgtggccaagtttgggatttccttttaaaagtattctaaccaccagaggtttttgatcagctagttccatgttcactgttaacacatgaggacttcttatcactgctggagctcctgcttatctgttttcttgcttgcatactagttggctagatttcctttctttcagattaagatgatagataagtacccaccgtgtgctgctctaaggccttgctcctcagagtaggatcac

SEQ ID NO: 429764 - DNA, 3230 bp, Homo sapiens
ccgggcgcgccacacttcctgttgatccggctcggccgggggctgggccggcgggcaggcggcggcggccactggccaggcgtggacgcgcgcggggccgccgcgggcacggagtggccgccgcgtcgcctgagcccagagccggggagtgctctcggccgccgcgtctcctgccctctgtccttccaacccagccctcggctgagccgcgccgcaccatgcccgccgtggacaagctcctgctagaggaggcgttgcaggacagcccccagactcgctctttactgagcgtgtttgaagaagatgctggcaccctcacagactataccaaccagctgctccaggcaatgcagcgcgtctatggagcccagaatgagatgtgcctggccacacaacagctttctaagcaactgctggcatatgaaaaacagaactttgctcttggcaaaggtgatgaagaagtaatttcaacactccactatttttccaaagtggtggatgagcttaatcttctccatacagagctggctaaacagttggcagacacaatggttctacctatcatacaattccgagaaaaggatctcacagaagtaagcactttaaaggatctatttggactcgctagcaatgagcatgacctctcaatggcaaaatacagcaggctgcctaagaaaaaggagaatgagaaggtgaagaccgaagtcggaaaagaggtggccgcggcccggcggaagcagcacctctcctcccttcagtactactgtgccctcaacgcgctgcagtacagaaagcaaatggccatgatggagcccatgataggctttgcccatggacagattaacttttttaagaagggagcagagatgttttccaaacgtatggacagctttttatcctccgttgcagacatggttcaaagcattcaggtagaactggaagccgaggcggaaaagatgcgggtgtcccagcaagaattactttctgttgatgaatctgtttacactccagactctgatgtggccgcaccacagatcaacaggaacctcatccagaaggctggttaccttaatcttagaaacaaaacagggctggtcaccaccacctgggagaggctttatttcttcacccaaggcgggaatctcatgtgtcagcccaggggagccgtggctggaggtttgatccaggacctggacaactgctcagtgatggccgtggattgcgaagaccggcgctactgctttcagatcaccacgcccaatggaaaatcgggaataatcctccaggctgagagcagaaaggaaaatgaagagtggatatgtgcaataaacaacatctccagacagatctacctgaccgacaaccctgaggcagtcgcgatcaagttgaatcagaccgctctgcaagcagtgactcctattacaagttttggaaaaaaacaagaaagctcatgccccagccagaacctgaaaaattcagagatggaaaatgaaaatgacaagattgttcccaaagcaacagccagtctacctgaagcagaggagctgatcgcgcctggaacgccgattcaattcgatattgtgcttcctgctacagaattccttgatcagaacagagggagcaggcgtaccaacccttttggtgaaactgaggatgaatcatttccagaagcagaagattctcttttgcagcagatgtttatagttcggtttttgggatcaatggcagttaaaacagacagcactactgaagtgatttatgaagcgatgagacaagtattggctgctcgggctattcataacatcttccgcatgacagaatcccatctgatggtcaccagtcaatctttgaggttgatagatccacagactcaagtatcaagggccaattttgaacttaccagtgtcacacaatttgctgctcatcaagaaaacaagagactggttggttttgtcatccgtgttcctgaatccactggagaagaatctctgagtacatacatttttgaaagcaactcagaaggcgaaaagatatgttatgctattaatttgggaaaagaaattattgaggttcagaaggatccagaagcactggctcaattaatgctgtccataccactaaccaatgatggaaaatatgtactgttaaacgatcaaccagatgacgatgatggaaatccaaatgaacatagaggcgcagaatccgaagcataactcacttgcgcctgtgggggaagagcaaacaggaaggagagctacctcctaagggttttaacgtctctgacatacaggcacactgacctgatttccgaaggctgacaatcgtttgtggaatgtaatcttgatgccttgatactgagacttgggagggaaactaagaaatggttgacagcgttcccacccatctacaatgttattttaggtgctttgtggtaagtcttttttcttagattgcgctaaaatttcttagattgttcagcgctcagaacaaaagtttgaaaaatgcattgttcatatgaatgtcatctcttttcagtttccagtatcctttttaaaaaatggcaaaagcctagatttacaatttgatgaacactaaatatttcttattaatataatctatttttgtattttacttaatgagctttaagtgcctgtcgttctgaaaattgtgtatttataattcagcttatctcacaattggacctaatagcatttctttgtgcagttaggtgacgagcactgctttgaggcccaagcactagtagagatgcgcgatacaggtctagtttcggtaactgttccagacatcaagcaataaaaaaatgaataccacaaaagatgtttgattttacagtggagccttactgaaccagcattcagaagtttaaggtcctcctaggtatgagtatttttagtagtggatcactgtggacagggtgcagctctaccagttcctgtttcttctgagccagaccctcttcagggaagggaccaattaattttaaaactcacttgaagcacagctggtcatggggcttggtataaagttcctatttccaccctgatacttccaattcctggaaccccagcccactcccccatccctcctccctatcaaactagtataatgattttgaatcggtacagtgtgtttaactgtaactaagttcaacagactattattatctttgtaataaattaacctagcaataaaaattattctgtttcttt

SEQ ID NO: 429765 - DNA, 3295 bp, Homo sapiens
ccgggcgcgccacacttcctgttgatccggctcggccgggggctgggccggcgggcaggcggcggcggccactggccaggcgtggacgcgcgcggggccgccgcgggcacggagtggccgccgcgtcgcctgagcccagagccggggagtgctctcggccgccgcgtctcctgccctctgtccttccaacccagccctcggctgagccgcgccgcaccatgcccgccgtggacaagctcctgctagaggaggcgttgcaggacagcccccagactcgctctttactgagcgtgtttgaagaagatgctggcaccctcacagactataccaaccagctgctccaggcaatgcagcgcgtctatggagcccagaatgagatgtgcctggccacacaacagctttctaagcaactgctggcatatgaaaaacagaactttgctcttggcaaaggtgatgaagaagtaatttcaacactccactatttttccaaagtggtggatgagcttaatcttctccatacagagctggctaaacagttggcagacacaatggttctacctatcatacaattccgagaaaaggatctcacagaagtaagcactttaaaggatctatttggactcgctagcaatgagcatgacctctcaatggcaaaatacagcaggctgcctaagaaaaaggagaatgagaaggtgaagaccgaagtcggaaaagaggtggccgcggcccggcggaagcagcacctctcctcccttcagtactactgtgccctcaacgcgctgcagtacagaaagcaaatggccatgatggagcccatgataggctttgcccatggacagattaacttttttaagaagggagcagagatgttttccaaacgtatggacagctttttatcctccgttgcagacatggttcaaagcattcaggtagaactggaagccgaggcggaaaagatgcgggtgtcccagcaagaattactttctgttgatgaatctgtttacactccagactctgatgtggccgcaccacagatcaacaggaacctcatccagaaggctggttaccttaatcttagaaacaaaacagggctggtcaccaccacctgggagaggctttatttcttcacccaaggcgggaatctcatgtgtcagcccaggggagccgtggctggaggtttgatccaggacctggacaactgctcagtgatggccgtggattgcgaagaccggcgctactgctttcagatcaccacgcccaatggaaaatcgggaataatcctccaggctgagagcagaaaggaaaatgaagagtggatatgtgcaataaacaacatctccagacagatctacctgaccgacaaccctgaggcagtcgcgatcaagttgaatcagaccgctctgcaagcagtgactcctattacaagttttggaaaaaaacaagaaagctcatgccccagccagaacctgaaaaattcagagatggaaaatgaaaatgacaagattgttcccaaagcaacagccagtctacctgaagcagaggagctgatcgcgcctggaacgccgattcaattcgatattgtgcttcctgctacagaattccttgatcagaacagagggagcagttcaagtgttaagtgcccttctagctgcagctgtcgtgtttgttcaactctggctattcccctaggcgtaccaacccttttggtgaaactgaggatgaatcatttccagaagcagaagattctcttttgcagcagatgtttatagttcggtttttgggatcaatggcagttaaaacagacagcactactgaagtgatttatgaagcgatgagacaagtattggctgctcgggctattcataacatcttccgcatgacagaatcccatctgatggtcaccagtcaatctttgaggttgatagatccacagactcaagtatcaagggccaattttgaacttaccagtgtcacacaatttgctgctcatcaagaaaacaagagactggttggttttgtcatccgtgttcctgaatccactggagaagaatctctgagtacatacatttttgaaagcaactcagaaggcgaaaagatatgttatgctattaatttgggaaaagaaattattgaggttcagaaggatccagaagcactggctcaattaatgctgtccataccactaaccaatgatggaaaatatgtactgttaaacgatcaaccagatgacgatgatggaaatccaaatgaacatagaggcgcagaatccgaagcataactcacttgcgcctgtgggggaagagcaaacaggaaggagagctacctcctaagggttttaacgtctctgacatacaggcacactgacctgatttccgaaggctgacaatcgtttgtggaatgtaatcttgatgccttgatactgagacttgggagggaaactaagaaatggttgacagcgttcccacccatctacaatgttattttaggtgctttgtggtaagtcttttttcttagattgcgctaaaatttcttagattgttcagcgctcagaacaaaagtttgaaaaatgcattgttcatatgaatgtcatctcttttcagtttccagtatcctttttaaaaaatggcaaaagcctagatttacaatttgatgaacactaaatatttcttattaatataatctatttttgtattttacttaatgagctttaagtgcctgtcgttctgaaaattgtgtatttataattcagcttatctcacaattggacctaatagcatttctttgtgcagttaggtgacgagcactgctttgaggcccaagcactagtagagatgcgcgatacaggtctagtttcggtaactgttccagacatcaagcaataaaaaaatgaataccacaaaagatgtttgattttacagtggagccttactgaaccagcattcagaagtttaaggtcctcctaggtatgagtatttttagtagtggatcactgtggacagggtgcagctctaccagttcctgtttcttctgagccagaccctcttcagggaagggaccaattaattttaaaactcacttgaagcacagctggtcatggggcttggtataaagttcctatttccaccctgatacttccaattcctggaaccccagcccactcccccatccctcctccctatcaaactagtataatgattttgaatcggtacagtgtgtttaactgtaactaagttcaacagactattattatctttgtaataaattaacctagcaataaaaattattctgtttcttt

SEQ ID NO: 429766 - DNA, 3391 bp, Homo sapiens
ccgggcgcgccacacttcctgttgatccggctcggccgggggctgggccggcgggcaggcggcggcggccactggccaggcgtggacgcgcgcggggccgccgcgggcacggagtggccgccgcgtcgcctgagcccagagccggggagtgctctcggccgccgcgtctcctgccctctgtccttccaacccagccctcggctgagccgcgccgcaccatgcccgccgtggacaagctcctgctagaggaggcgttgcaggacagcccccagactcgctctttactgagcgtgtttgaagaagatgctggcaccctcacagactataccaaccagctgctccaggcaatgcagcgcgtctatggagcccagaatgagatgtgcctggccacacaacagctttctaagcaactgctggcatatgaaaaacagaactttgctcttggcaaaggtgatgaagaagtaatttcaacactccactatttttccaaagtggtggatgagcttaatcttctccatacagagctggctaaacagttggcagacacaatggttctacctatcatacaattccgagaaaaggatctcacagaagtaagcactttaaaggatctatttggactcgctagcaatgagcatgacctctcaatggcaaaatacagcaggctgcctaagaaaaaggagaatgagaaggtgaagaccgaagtcggaaaagaggtggccgcggcccggcggaagcagcacctctcctcccttcagtactactgtgccctcaacgcgctgcagtacagaaagcaaatggccatgatggagcccatgataggctttgcccatggacagattaacttttttaagaagggagcagagatgttttccaaacgtatggacagctttttatcctccgttgcagacatggttcaaagcattcaggtagaactggaagccgaggcggaaaagatgcgggtgtcccagcaagaattactttctgttgatgaatctgtttacactccagactctgatgtggccgcaccacagatcaacaggaacctcatccagaaggctggttaccttaatcttagaaacaaaacagggctggtcaccaccacctgggagaggctttatttcttcacccaaggcgggaatctcatgtgtcagcccaggggagccgtggctggaggtttgatccaggacctggacaactgctcagtgatggccgtggattgcgaagaccggcgctactgctttcagatcaccacgcccaatggaaaatcgggaataatcctccaggctgagagcagaaaggaaaatgaagagtggatatgtgcaataaacaacatctccagacagatctacctgaccgacaaccctgaggcagtcgcgatcaagttgaatcagaccgctctgcaagcagtgactcctattacaagttttggaaaaaaacaagaaagctcatgccccagccagaacctgaaaaattcagagatggaaaatgaaaatgacaagattgttcccaaagcaacagccagtctacctgaagcagaggagctgatcgcgcctggaacgccgattcaattcgatattgtgcttcctgctacagaattccttgatcagaacagagggagcagggctgagagaggttatctctgggagaactgaaagtaaatttgaggtatcttgtgtccccctccaccaccaaagactgttgccattctgatttccagttcaagtgttaagtgcccttctagctgcagctgtcgtgtttgttcaactctggctattcccctaggcgtaccaacccttttggtgaaactgaggatgaatcatttccagaagcagaagattctcttttgcagcagatgtttatagttcggtttttgggatcaatggcagttaaaacagacagcactactgaagtgatttatgaagcgatgagacaagtattggctgctcgggctattcataacatcttccgcatgacagaatcccatctgatggtcaccagtcaatctttgaggttgatagatccacagactcaagtatcaagggccaattttgaacttaccagtgtcacacaatttgctgctcatcaagaaaacaagagactggttggttttgtcatccgtgttcctgaatccactggagaagaatctctgagtacatacatttttgaaagcaactcagaaggcgaaaagatatgttatgctattaatttgggaaaagaaattattgaggttcagaaggatccagaagcactggctcaattaatgctgtccataccactaaccaatgatggaaaatatgtactgttaaacgatcaaccagatgacgatgatggaaatccaaatgaacatagaggcgcagaatccgaagcataactcacttgcgcctgtgggggaagagcaaacaggaaggagagctacctcctaagggttttaacgtctctgacatacaggcacactgacctgatttccgaaggctgacaatcgtttgtggaatgtaatcttgatgccttgatactgagacttgggagggaaactaagaaatggttgacagcgttcccacccatctacaatgttattttaggtgctttgtggtaagtcttttttcttagattgcgctaaaatttcttagattgttcagcgctcagaacaaaagtttgaaaaatgcattgttcatatgaatgtcatctcttttcagtttccagtatcctttttaaaaaatggcaaaagcctagatttacaatttgatgaacactaaatatttcttattaatataatctatttttgtattttacttaatgagctttaagtgcctgtcgttctgaaaattgtgtatttataattcagcttatctcacaattggacctaatagcatttctttgtgcagttaggtgacgagcactgctttgaggcccaagcactagtagagatgcgcgatacaggtctagtttcggtaactgttccagacatcaagcaataaaaaaatgaataccacaaaagatgtttgattttacagtggagccttactgaaccagcattcagaagtttaaggtcctcctaggtatgagtatttttagtagtggatcactgtggacagggtgcagctctaccagttcctgtttcttctgagccagaccctcttcagggaagggaccaattaattttaaaactcacttgaagcacagctggtcatggggcttggtataaagttcctatttccaccctgatacttccaattcctggaaccccagcccactcccccatccctcctccctatcaaactagtataatgattttgaatcggtacagtgtgtttaactgtaactaagttcaacagactattattatctttgtaataaattaacctagcaataaaaattattctgtttcttt

SEQ ID NO: 429767 - DNA, 3248 bp, Homo sapiens
ccgggcgcgccacacttcctgttgatccggctcggccgggggctgggccggcgggcaggcggcggcggccactggccaggcgtggacgcgcgcggggccgccgcgggcacggagtggccgccgcgtcgcctgagcccagagccggggagtgctctcggccgccgcgtctcctgccctctgtccttccaacccagccctcggctgagccgcgccgcaccatgcccgccgtggacaagctcctgctagaggaggcgttgcaggacagcccccagactcgctctttactgagcgtgtttgaagaagatgctggcaccctcacagactataccaaccagctgctccaggcaatgcagcgcgtctatggagcccagaatgagatgtgcctggccacacaacagctttctaagcaactgctggcatatgaaaaacagaactttgctcttggcaaaggtgatgaagaagtaatttcaacactccactatttttccaaagtggtggatgagcttaatcttctccatacagagctggctaaacagttggcagacacaatggttctacctatcatacaattccgagaaaaggatctcacagcagaagataagcactttacaaggatcctatatggacctcgctagcaatgagcaatgacctctccaatggcaaactacagcaaggctgacctacagaaacacggggagcaatgagcacgcgtgaagaccgaagtcggaaaagaggtggccgcggcccggcggaagcagcacctctcctcccttcagtactactgtgccctcaacgcgctgcagtacagaaagcaaatggccatgatggagcccatgataggctttgcccatggacagattaacttttttaagaagggagcagagatgttttccaaacgtatggacagctttttatcctccgttgcagacatggttcaaagcattcaggtagaactggaagccgaggcggaaaagatgcgggtgtcccagcaagaattactttctgttgatgaatctgtttacactccagactctgatgtggccgcaccacagatcaacaggaacctcatccagaaggctggttaccttaatcttagaaacaaaacagggctggtcaccaccacctgggagaggctttatttcttcacccaaggcgggaatctcatgtgtcagcccaggggagccgtggctggaggtttgatccaggacctggacaactgctcagtgatggccgtggattgcgaagaccggcgctactgctttcagatcaccacgcccaatggaaaatcgggaataatcctccaggctgagagcagaaaggaaaatgaagagtggatatgtgcaataaacaacatctccagacagatctacctgaccgacaaccctgaggcagtcgcgatcaagttgaatcagaccgctctgcaagcagtgactcctattacaagttttggaaaaaaacaagaaagctcatgccccagccagaacctgaaaaattcagagatggaaaatgaaaatgacaagattgttcccaaagcaacagccagtctacctgaagcagaggagctgatcgcgcctggaacgccgattcaattcgatattgtgcttcctgctacagaattccttgatcagaacagagggagcaggcgtaccaacccttttggtgaaactgaggatgaatcatttccagaagcagaagattctcttttgcagcagatgtttatagttcggtttttgggatcaatggcagttaaaacagacagcactactgaagtgatttatgaagcgatgagacaagtattggctgctcgggctattcataacatcttccgcatgacagaatcccatctgatggtcaccagtcaatctttgaggttgatagatccacagactcaagtatcaagggccaattttgaacttaccagtgtcacacaatttgctgctcatcaagaaaacaagagactggttggttttgtcatccgtgttcctgaatccactggagaagaatctctgagtacatacatttttgaaagcaactcagaaggcgaaaagatatgttatgctattaatttgggaaaagaaattattgaggttcagaaggatccagaagcactggctcaattaatgctgtccataccactaaccaatgatggaaaatatgtactgttaaacgatcaaccagatgacgatgatggaaatccaaatgaacatagaggcgcagaatccgaagcataactcacttgcgcctgtgggggaagagcaaacaggaaggagagctacctcctaagggttttaacgtctctgacatacaggcacactgacctgatttccgaaggctgacaatcgtttgtggaatgtaatcttgatgccttgatactgagacttgggagggaaactaagaaatggttgacagcgttcccacccatctacaatgttattttaggtgctttgtggtaagtcttttttcttagattgcgctaaaatttcttagattgttcagcgctcagaacaaaagtttgaaaaatgcattgttcatatgaatgtcatctcttttcagtttccagtatcctttttaaaaaatggcaaaagcctagatttacaatttgatgaacactaaatatttcttattaatataatctatttttgtattttacttaatgagctttaagtgcctgtcgttctgaaaattgtgtatttataattcagcttatctcacaattggacctaatagcatttctttgtgcagttaggtgacgagcactgctttgaggcccaagcactagtagagatgcgcgatacaggtctagtttcggtaactgttccagacatcaagcaataaaaaaatgaataccacaaaagatgtttgattttacagtggagccttactgaaccagcattcagaagtttaaggtcctcctaggtatgagtatttttagtagtggatcactgtggacagggtgcagctctaccagttcctgtttcttctgagccagaccctcttcagggaagggaccaattaattttaaaactcacttgaagcacagctggtcatggggcttggtataaagttcctatttccaccctgatacttccaattcctggaaccccagcccactcccccatccctcctccctatcaaactagtataatgattttgaatcggtacagtgtgtttaactgtaactaagttcaacagactattattatctttgtaataaattaacctagcaataaaaattattctgtttcttt

SEQ ID NO: 429768 - DNA, 2787 bp, Homo sapiens
ccgggcgcgccacacttcctgttgatccggctcggccgggggctgggccggcgggcaggcggcggcggccactggccaggcgtggacgcgcgcggggccgccgcgggcacggagtggccgccgcgtcgcctgagcccagagccggggagtgctctcggccgccgcgtctcctgccctctgtccttccaacccagccctcggctgagccgcgccgcaccatgcccgccgtggacaagctcctgctagaggaggcgttgcaggacagcccccagactcgctctttactgagcgtgtttgaagaagatgctggcaccctcacagactataccaaccaggctgcagtacagaaagcaaatggccatgatggagcccatgataggctttgcccatggacagattaacttttttaagaagggagcagagatgttttccaaacgtatggacagctttttatcctccgttgcagacatggttcaaagcattcaggtagaactggaagccgaggcggaaaagatgcgggtgtcccagcaagaattactttctgttgatgaatctgtttacactccagactctgatgtggccgcaccacagatcaacaggaacctcatccagaaggctggttaccttaatcttagaaacaaaacagggctggtcaccaccacctgggagaggctttatttcttcacccaaggcgggaatctcatgtgtcagcccaggggagccgtggctggaggtttgatccaggacctggacaactgctcagtgatggccgtggattgcgaagaccggcgctactgctttcagatcaccacgcccaatggaaaatcgggaataatcctccaggctgagagcagaaaggaaaatgaagagtggatatgtgcaataaacaacatctccagacagatctacctgaccgacaaccctgaggcagtcgcgatcaagttgaatcagaccgctctgcaagcagtgactcctattacaagttttggaaaaaaacaagaaagctcatgccccagccagaacctgaaaaattcagagatggaaaatgaaaatgacaagattgttcccaaagcaacagccagtctacctgaagcagaggagctgatcgcgcctggaacgccgattcaattcgatattgtgcttcctgctacagaattccttgatcagaacagagggagcaggcgtaccaacccttttggtgaaactgaggatgaatcatttccagaagcagaagattctcttttgcagcagatgtttatagttcggtttttgggatcaatggcagttaaaacagacagcactactgaagtgatttatgaagcgatgagacaagtattggctgctcgggctattcataacatcttccgcatgacagaatcccatctgatggtcaccagtcaatctttgaggttgatagatccacagactcaagtatcaagggccaattttgaacttaccagtgtcacacaatttgctgctcatcaagaaaacaagagactggttggttttgtcatccgtgttcctgaatccactggagaagaatctctgagtacatacatttttgaaagcaactcagaaggcgaaaagatatgttatgctattaatttgggaaaagaaattattgaggttcagaaggatccagaagcactggctcaattaatgctgtccataccactaaccaatgatggaaaatatgtactgttaaacgatcaaccagatgacgatgatggaaatccaaatgaacatagaggcgcagaatccgaagcataactcacttgcgcctgtgggggaagagcaaacaggaaggagagctacctcctaagggttttaacgtctctgacatacaggcacactgacctgatttccgaaggctgacaatcgtttgtggaatgtaatcttgatgccttgatactgagacttgggagggaaactaagaaatggttgacagcgttcccacccatctacaatgttattttaggtgctttgtggtaagtcttttttcttagattgcgctaaaatttcttagattgttcagcgctcagaacaaaagtttgaaaaatgcattgttcatatgaatgtcatctcttttcagtttccagtatcctttttaaaaaatggcaaaagcctagatttacaatttgatgaacactaaatatttcttattaatataatctatttttgtattttacttaatgagctttaagtgcctgtcgttctgaaaattgtgtatttataattcagcttatctcacaattggacctaatagcatttctttgtgcagttaggtgacgagcactgctttgaggcccaagcactagtagagatgcgcgatacaggtctagtttcggtaactgttccagacatcaagcaataaaaaaatgaataccacaaaagatgtttgattttacagtggagccttactgaaccagcattcagaagtttaaggtcctcctaggtatgagtatttttagtagtggatcactgtggacagggtgcagctctaccagttcctgtttcttctgagccagaccctcttcagggaagggaccaattaattttaaaactcacttgaagcacagctggtcatggggcttggtataaagttcctatttccaccctgatacttccaattcctggaaccccagcccactcccccatccctcctccctatcaaactagtataatgattttgaatcggtacagtgtgtttaactgtaactaagttcaacagactattattatctttgtaataaattaacctagcaataaaaattattctgtttcttt

SEQ ID NO: 429769 - DNA, 3242 bp, Homo sapiens
ccgggcgcgccacacttcctgttgatccggctcggccgggggctgggccggcgggcaggcggcggcggccactggccaggcgtggacgcgcgcggggccgccgcgggcacggagtggccgccgcgtcgcctgagcccagagccggggagtgctctcggccgccgcgtctcctgccctctgtccttccaacccagccctcggctgagccgcgccgcaccatgcccgccgtggacaagctcctgctagaggaggcgttgcaggacagcccccagactcgctctttactgagcgtgtttgaagaagatgctggcaccctcacagactataccaaccagctgctccaggcaatgcagcgcgtctatggagcccagaatgagatgtgcctggccacacaacagctttctaagcaactgctggcatatgaaaaacagaactttgctcttggcaaaggtgatgaagaagtaatttcaacactccactatttttccaaagtggtggatgagcttaatcttctccatacagagctggctaaacagttggcagacacaatggttctacctatcatacaattccgagaaaaggatctcacagaagtaagcactttaaaggatctatttggactcgctagcaatgagcatgacctctcaatggcaaaatacagcaggctgcctaagaaaaaggagaatgagaaggtgaagaccgaagtcggaaaagaggtggccgcggcccggcggaagcagcacctctcctcccttcagtactactgtgccctcaacgcgctgcagtacagaaagcaaatggccatgatggagcccatgataggctttgcccatggacagattaacttttttaagaagggagcagagatgttttccaaacgtatggacagctttttatcctccgttgcagacatggttcaaagcattcaggtagaactggaagccgaggcggaaaagatgcgggtgtcccagcaagaattactttctgttgatgaatctgtttacactccagactctgatgtggccgcaccacagatcaacaggaacctcatccagaaggctggttaccttaatcttagaaacaaaacagggctggtcaccaccacctgggagaggctttatttcttcacccaaggcgggaatctcatgtgtcagcccaggggagccgtggctggaggtttgatccaggacctggacaactgctcagtgatggccgtggattgcgaagaccggcgctactgctttcagatcaccacgcccaatggaaaatcgggaataatcctccaggctgagagcagaaaggaaaatgaagagtggatatgtgcaataaacaacatctccagacagatctacctgaccgacaaccctgaggcagtcgcgatcaagttgaatcagaccgctctgcaagcagtgactcctattacaagttttggaaaaaaacaagaaagctcatgccccagccagaacctgaaaaattcagagatggaaaatgaaaatgacaagattgttcccaaagcaacagccagtctacctgaagcagaggagctgatcgcgcctggaacgccgattcaattcgatattgtgcttcctgctacagaattccttgatcagaacagagggagcagttcaagtgttaagtgcccttctagctgcagctgtcgtgtttgttcaactctggctattcccctaggcgtaccaacccttttggtgaaactgaggatgaatcatttccagaagcagaagattctcttttgcagcagatgtttatagttcggtttttgggatcaatggcagttaaaacagacagcactactgaagtgatttatgaagcgatgagacaagtattggctgctcgggctattcataacatcttccgcatgacagaatcccatctgatggtcaccagtcaatctttgaggttgatagatccacagactcaagtatcaagggccaattttgaacttaccagtgtcacacaatttgctgctcatcaagaaaacaagagactggttggttttgtcatccgtgttcctgaatccactggagaagaatctctgagtacatacatttttgaaagcaactcagaaggcgaaaagatatgttatgctattaatttgggaaaagaaattattgaggttcagaaggatccagaagcactggctcaattaatgctgtccataccactaaccaatgatggaaaatataggcgcagaatccgaagcataactcacttgcgcctgtgggggaagagcaaacaggaaggagagctacctcctaagggttttaacgtctctgacatacaggcacactgacctgatttccgaaggctgacaatcgtttgtggaatgtaatcttgatgccttgatactgagacttgggagggaaactaagaaatggttgacagcgttcccacccatctacaatgttattttaggtgctttgtggtaagtcttttttcttagattgcgctaaaatttcttagattgttcagcgctcagaacaaaagtttgaaaaatgcattgttcatatgaatgtcatctcttttcagtttccagtatcctttttaaaaaatggcaaaagcctagatttacaatttgatgaacactaaatatttcttattaatataatctatttttgtattttacttaatgagctttaagtgcctgtcgttctgaaaattgtgtatttataattcagcttatctcacaattggacctaatagcatttctttgtgcagttaggtgacgagcactgctttgaggcccaagcactagtagagatgcgcgatacaggtctagtttcggtaactgttccagacatcaagcaataaaaaaatgaataccacaaaagatgtttgattttacagtggagccttactgaaccagcattcagaagtttaaggtcctcctaggtatgagtatttttagtagtggatcactgtggacagggtgcagctctaccagttcctgtttcttctgagccagaccctcttcagggaagggaccaattaattttaaaactcacttgaagcacagctggtcatggggcttggtataaagttcctatttccaccctgatacttccaattcctggaaccccagcccactcccccatccctcctccctatcaaactagtataatgattttgaatcggtacagtgtgtttaactgtaactaagttcaacagactattattatctttgtaataaattaacctagcaataaaaattattctgtttcttt

SEQ ID NO: 429770 - DNA, 1660 bp, Homo sapiens
tagggtcttagggagaaaaccaaggaagatattagaaaagttacacacaagctgttggtttagtatgaaaaacttttgattctatctgctacttagaatttatcacaattaaccaatcctttcagtaaattatctgtttgccactgtgtatatggacatatcgtggctaaatacatttaagagagagaagaaaaattcctattaagaacttttaacactggaattacctgagtttcacttacctggaatattttttgtgtggcataaattggcaacagaggtcaggacagttggacgcaaatgccccgggccctatgtgatgagtctcctgcagccaggtcctgtgttcccaagtgggaacagtgagaacagtgacctcactgtactcccaaatcacatttgttctaaaattttatccttctctacttttgccaatcactacttttcttgtcttttgcagatatgttatgctattaatttgggaaaagaaattattgaggttcagaaggatccagaagcactggctcaattaatgctgtccataccactaaccaatgatggaaaatatgtactgttaaacgatcaaccagatgacgatgatggaaatccaaatgaacatagaggcgcagaatccgaagcataactcacttgcgcctgtgggggaagagcaaacaggaaggagagctacctcctaagggttttaacgtctctgacatacaggcacactgacctgatttccgaaggctgacaatcgtttgtggaatgtaatcttgatgccttgatactgagacttgggagggaaactaagaaatggttgacagcgttcccacccatctacaatgttattttaggtgctttgtggtaagtcttttttcttagattgcgctaaaatttcttagattgttcagcgctcagaacaaaagtttgaaaaatgcattgttcatatgaatgtcatctcttttcagtttccagtatcctttttaaaaaatggcaaaagcctagatttacaatttgatgaacactaaatatttcttattaatataatctatttttgtattttacttaatgagctttaagtgcctgtcgttctgaaaattgtgtatttataattcagcttatctcacaattggacctaatagcatttctttgtgcagttaggtgacgagcactgctttgaggcccaagcactagtagagatgcgcgatacaggtctagtttcggtaactgttccagacatcaagcaataaaaaaatgaataccacaaaagatgtttgattttacagtggagccttactgaaccagcattcagaagtttaaggtcctcctaggtatgagtatttttagtagtggatcactgtggacagggtgcagctctaccagttcctgtttcttctgagccagaccctcttcagggaagggaccaattaattttaaaactcacttgaagcacagctggtcatggggcttggtataaagttcctatttccaccctgatacttccaattcctggaaccccagcccactcccccatccctcctccctatcaaactagtataatgattttgaatcggtacagtgtgtttaactgtaactaagttcaacagactattattatctttgtaataaattaacctagcaataaaaattattctgtttcttt

SEQ ID NO: 429771 - DNA, 751 bp, Homo sapiens
cttctaaaactaggtgctattgacttctaaaactgggtgctattgaaacttctaaaactaggcctagggttttaaaaaatggcaaaagcctagatttacaatttgatgaacactaaatatttcttattaatataatctatttttgtattttacttaatgagctttaagtgcctgtcgttctgaaaattgtgtatttataattcagcttatctcacaattggacctaatagcatttctttgtgcagttaggtgacgagcactgctttgaggcccaagcactagtagagatgcgcgatacaggtctagtttcggtaactgttccagacatcaagcaataaaaaaatgaataccacaaaagatgtttgattttacagtggagccttactgaaccagcattcagaagtttaaggtcctcctaggtatgagtatttttagtagtggatcactgtggacagggtgcagctctaccagttcctgtttcttctgagccagaccctcttcagggaagggaccaattaattttaaaactcacttgaagcacagctggtcatggggcttggtataaagttcctatttccaccctgatacttccaattcctggaaccccagcccactcccccatccctcctccctatcaaactagtataatgattttgaatcggtacagtgtgtttaactgtaactaagttcaacagactattattatctttgtaataaattaacctagcaataaaaattattctgtttcttt

SEQ ID NO: 429772 - DNA, 1482 bp, Homo sapiens
ccgggcgcgccacacttcctgttgatccggctcggccgggggctgggccggcgggcaggcggcggcggccactggccaggcgtggacgcgcgcggggccgccgcgggcacggagtggccgccgcgtcgcctgagcccagagccggggagtgctctcggccgccgcgtctcctgccctctgtccttccaacccagccctcggctgagccgcgccgcaccatgcccgccgtggacaagctcctgctagaggaggcgttgcaggacagcccccagactcgctctttactgagcgtgtttgaagaagatgctggcaccctcacagactataccaaccagctgctccaggcaatgcagcgcgtctatggagcccagaatgagatgtgcctggccacacaacagctttctaagcaactgctggcatatgaaaaacagaactttgctcttggcaaaggtgatgaagaagtaatttcaacactccactatttttccaaagtggtggatgagcttaatcttctccatacagagctggctaaacagttggcagacacaatggttctacctatcatacaattccgagaaaaggatctcacagaagtaagcactttaaaggatctatttggactcgctagcaatgagcatgacctctcaatggcaaaatacagcaggctgcctaagaaaaaggagaatgagaaggtgaagaccgaagtcggaaaagaggtggccgcggcccggcggaagcagcacctctcctcccttcagtactactgtgccctcaacgcgctgcagtacagaaagcaaatggccatgatggagcccatgataggctttgcccatggacagattaacttttttaagaagggagcagagatgttttccaaacgtatggacagctttttatcctccgttgcagacatggttcaaagcattcaggtagaactggaagccgaggcggaaaagatgcgggtgtcccagcaagaattactttctgttgatgaatctgtttacactccagactctgatgtggccgcaccacagatcaacaggaacctcatccagacatcaagcaataaaaaaatgaataccacaaaagatgtttgattttacagtggagccttactgaaccagcattcagaagtttaaggtcctcctaggtatgagtatttttagtagtggatcactgtggacagggtgcagctctaccagttcctgtttcttctgagccagaccctcttcagggaagggaccaattaattttaaaactcacttgaagcacagctggtcatggggcttggtataaagttcctatttccaccctgatacttccaattcctggaaccccagcccactcccccatccctcctccctatcaaactagtataatgattttgaatcggtacagtgtgtttaactgtaactaagttcaacagactattattatctttgtaataaattaacctagcaataaaaattattctgtttcttt

SEQ ID NO: 429773 - DNA, 2925 bp, Homo sapiens
ccgggcgcgccacacttcctgttgatccggctcggccgggggctgggccggcgggcaggcggcggcggccactggccaggcgtggacgcgcgcggggccgccgcgggcacggagtggccgccgcgtcgcctgagcccagagccggggagtgctctcggccgccgcgtctcctgccctctgtccttccaacccagccctcggctgagccgcgccgcaccatgcccgccgtggacaagctcctgctagaggaggcgttgcaggacagcccccagactcgctctttactgagcgtgtttgaagaagatgctggcaccctcacagactataccaaccagctgctccaggcaatgcagcgcgtctatggagcccagaatgagatgtgcctggccacacaacagctttctaagcaactgctggcatatgaaaaacagaactttgctcttggcaaaggtgatgaagaagtaatttcaacactccactatttttccaaagtggtggatgagcttaatcttctccatacagagctggctaaacagttggcagacacaatggttctacctatcatacaattccgagaaaaggatctcacagaagtaagcactttaaaggatctatttggactcgctagcaatgagcatgacctctcaatggcaaaatacagcaggctgcctaagaaaaaggagaatgagaaggtgaagaccgaagtcggaaaagaggtggccgcggcccggcggaagcagcacctctcctcccttcagtactactgtgccctcaacgcgctgcagtacagaaagcaaatggccatgatggagcccatgataggctttgcccatggacagattaacttttttaagaagggagcagagatgttttccaaacgtatggacagctttttatcctccgttgcagacatggttcaaagcattcaggtagaactggaagccgaggcggaaaagatgcgggtgtcccagcaagaattactttctgttgatgaatctgtttacactccagactctgatgtggccgcaccacagatcaacaggaacctcatccagaaggctggttaccttaatcttagaaacaaaacagggctggtcaccaccacctgggagaggctttatttcttcacccaaggcgggaatctcatgtgtcagcccaggggagccgtggctggaggtttgatccaggacctggacaactgctcagtgatggccgtggattgcgaagaccggcgctactgctttcagatcaccacgcccaatggaaaatcgggaataatcctccaggctgagagcagaaaggaaaatgaagagtggatatgtgcaataaacaacatctccagacagatctacctgaccgacaaccctgaggcagtcgcgatcaagttgaatcagaccgctctgcaagcagtgactcctattacaagttttggaaaaaaacaagaaagctcatgccccagccagaacctgaaaaattcagagatggaaaatgaaaatgacaagattgttcccaaagcaacagccagtctacctgaagcagaggagctgatcgcgcctggaacgccgattcaattcgatattgtgcttcctgctacagaattccttgatcagaacagagggagcagggctgagagaggttatctctgggagaactgaaagtaaatttgaggtatcttgtgtccccctccaccaccaaagactgttgccattctgatttccagttcaagtgttaagtgcccttctagctgcagctgtcgtgtttgttcaactctggctattcccctaggcgtaccaacccttttggtgaaactgaggatgaatcatttccagaagcagaaggtaagtgactagtttggtgtccttattctttcctctgcacaaaatgacaacggccattgaaataagatgtgaaatcatgttttagagagctatgattaggagtatgaattaagatttgttgttctgaaagtttagtaagatatctgcagtggaggcaagtcttggataaaaactgaggggtagctgaaagaccacctacagctatttcaccattagccatagcgtttttgtagcatagcatagaaatgttgtgaaatctgaatctgttatcacattcaaatgcagtcttggtgaactggaaatatgctgtgtcattttagaaaaccaaaagcacaaataacttgttcttgaatttgaagatgacacaaatgatatttaagtctttcaaattcaaatttttggttttttacattcttataatgtacttaagaacgtatctgatggccggcacgctggctcacgcctgtaatcccagcacttttggaggccgaggcaggtgaatcacgtgagcttaggagttcaagaccagcatgggcaacacagtgagaaccctgtctctacaaaaatatatatatatatacaaaaattagccaggtgtagtgacaggtgcctgtaatcctagctactcaggaggctgagacatgagaatcacttgaacctgggaggcggaggttgcagtgagctgaaatcatgccattgcactccagcctgggctacagagtgagaccctgtctcaaaaaagaaaaaaaagaaaaaaccttctttggtcttctagttatggttgctgggagtcagttttgtcaagttatgcgccactgtcagcagccaggactgacttcctttaggctatgaaacatcatcactgcctttccgtaatacacatgaagtatgaattgcatgagacccaacatgagatcttatatcctgcaaataaaatttcttttctaagaggactttatcagtgggccaaagtaatgaattttctattgtctagtgaactcactcttttcagagaaaaggtacaatgtagtcacctagagtttcagcattagaaggatgttcatctggtaccaccatcatttcattt

SEQ ID NO: 429774 - DNA, 2806 bp, Homo sapiens
  misc_feature (2735)..(2735): n is a, c, g, or t
  misc_feature (2760)..(2760): n is a, c, g, or t
ccgggcgcgccacacttcctgttgatccggctcggccgggggctgggccggcgggcaggcggcggcggccactggccaggcgtggacgcgcgcggggccgccgcgggcacggagtggccgccgcgtcgcctgagcccagagccggggagtgctctcggccgccgcgtctcctgccctctgtccttccaacccagccctcggctgagccgcgccgcaccatgcccgccgtggacaagctcctgctagaggaggcgttgcaggacagcccccagactcgctctttactgagcgtgtttgaagaagatgctggcaccctcacagactataccaaccagctgctccaggcaatgcagcgcgtctatggagcccagaatgagatgtgcctggccacacaacagctttctaagcaactgctggcatatgaaaaacagaactttgctcttggcaaaggtgatgaagaagtaatttcaacactccactatttttccaaagtggtggatgagcttaatcttctccatacagagctggctaaacagttggcagacacaatggttctacctatcatacaattccgagaaaaggatctcacagaagtaagcactttaaaggatctatttggactcgctagcaatgagcatgacctctcaatggcaaaatacagcaggctgcctaagaaaaaggagaatgagaaggtgaagaccgaagtcggaaaagaggtggccgcggcccggcggaagcagcacctctcctcccttcagtactactgtgccctcaacgcgctgcagtacagaaagcaaatggccatgatggagcccatgataggctttgcccatggacagattaacttttttaagaagggagcagagatgttttccaaacgtatggacagctttttatcctccgttgcagacatggttcaaagcattcaggtagaactggaagccgaggcggaaaagatgcgggtgtcccagcaagaattactttctgttgatgaatctgtttacactccagactctgatgtggccgcaccacagatcaacaggaacctcatccagaaggctggttaccttaatcttagaaacaaaacagggctggtcaccaccacctgggagaggctttatttcttcacccaaggcgggaatctcatgtgtcagcccaggggagccgtggctggaggtttgatccaggacctggacaactgctcagtgatggccgtggattgcgaagaccggcgctactgctttcagatcaccacgcccaatggaaaatcgggaataatcctccaggctgagagcagaaaggaaaatgaagagtggatatgtgcaataaacaacatctccagacagatctacctgaccgacaaccctgaggcagtcgcgatcaagttgaatcagaccgctctgcaagcagtgactcctattacaagttttggaaaaaaacaagaaagctcatgccccagccagaacctgaaaaattcagagatggaaaatgaaaatgacaagattgttcccaaagcaacagccagtctacctgaagcagaggagctgatcgcgcctggaacgccgattcaattcgatattgtgcttcctgctacagaattccttgatcagaacagagggagcagggctgagagaggttatctctgggagaactgaaagtaaatttgaggtatcttgtgtccccctccaccaccaaagactgttgccattctgatttccagttcaagtgttaagtgcccttctagctgcagctgtcgtgtttgttcaactctggctattcccctaggcgtaccaacccttttggtgaaactgaggatgaatcatttccagaagcagaaggtaagtgactagtttggtgtccttattctttcctctgcacaaaatgacaacggccattgaaataagatgtgaaatcatgttttagagagctatgattaggagtatgaattaagatttgttgttctgaaagtttagtaagatatctgcagtggaggcaagtcttggataaaaactgaggggtagctgaaagaccacctacagctatttcaccattagccatagcgtttttgtagcatagcatagaaatgttgtgaaatctgaatctgttatcacattcaaatgcagtcttggtgaactggaaatatgctgtgtcattttagaaaaccaaaagcacaaataacttgttcttgaatttgaagatgacacaaatgatatttaagtctttcaaattcaaatttttggttttttacattcttataatgtacttaagaacgtatctgatggccggcacgctggctcacgcctgtaatcccagcacttttggaggccgaggcaggtgaatcacgtgagcttaggagttcaagaccagcatgggcaacacagtgagaaccctgtctctacaaaaatatatatatatatacaaaaattagccaggtgtagtgacaggtgcctgtaatcctagctactcaggaggctgagacatgagaatcacttgaacctgggaggcggaggttgcagtgagctgaaatcatgccattgcactccagcctgggctacagagtgagaccctgtctcaaaaaagaaaaaaaagaaagaaaaagaaacaaggaaatcgtagtaccataagaggaaagaatgacacactcctacactcctgcaagacatccaagattacaaaaaaccagactgctggttcctgctgggatgatcacactacagctgtgctagatgaccacnccccagactcgctctttactgagcntgtttgaagaagatgctgcaccctcataacacttggtctggtccag

SEQ ID NO: 429775 - DNA, 1535 bp, Homo sapiens
ccgggcgcgccacacttcctgttgatccggctcggccgggggctgggccggcgggcaggcggcggcggccactggccaggcgtggacgcgcgcggggccgccgcgggcacggagtggccgccgcgtcgcctgagcccagagccggggagtgctctcggccgccgcgtctcctgccctctgtccttccaacccagccctcggctgagccgcgccgcaccatgcccgccgtggacaagctcctgctagaggaggcgttgcaggacagcccccagactcgctctttactgagcgtgtttgaagaagatgctggcaccctcacagactataccaaccagctgctccaggcaatgcagcgcgtctatggagcccagaatgagatgtgcctggccacacaacagctttctaagcaactgctggcatatgaaaaacagaactttgctcttggcaaaggtgatgaagaagtaatttcaacactccactatttttccaaagtggtggatgagcttaatcttctccatacagagctggctaaacagttggcagacacaatggttctacctatcatacaattccgagaaaaggatctcacagaagtaagcactttaaaggatctatttggactcgctagcaatgagcatgacctctcaatggcaaaatacagcaggctgcctaagaaaaaggagaatgagaaggtgaagaccgaagtcggaaaagaggtggccgcggcccggcggaagcagcacctctcctcccttcagtactactgtgccctcaacgcgctgcagtacagaaagcaaatggccatgatggagcccatgataggctttgcccatggacagattaacttttttaagaagggagcagagatgttttccaaacgtatggacagctttttatcctccgttgcagacatggttcaaagcattcaggtagaactggaagccgaggcggaaaagatgcgggtgtcccagcaagaattactttctgttgatgaatctgtttacactccagactctgatgtggccgcaccacagatcaacaggaacctcatccagaaggctggttaccttaatcttagaaacaaaacagggctggtcaccaccacctgggagaggctttatttcttcacccaaggcgggaatctcatgtgtcagcccaggggagccgtggctggaggtttgatccaggacctggacaactgctcagtgatggccgtggattgcgaagaccggcgctactgctttcagatcaccacgcccaatggaaaatcgggaaataatcctccaggctggagagcagaaagcgcaaatgcagagtggactatgtgccataagcaacatctccagaccgatctacctggaccgagaacccctgtggccatccgcgatcccacgtctcgaagccagaaccggctctgccacccccagctgactcccccatttaaacaggctttggcgacaacaccaccaacagctctagccccccaacgaaaacctggcgaaatccccgcaaaccgagagcacacagacacacta

SEQ ID NO: 429776 - DNA, 986 bp, Homo sapiens
ccgggcgcgccacacttcctgttgatccggctcggccgggggctgggccggcgggcaggcggcggcggccactggccaggcgtggacgcgcgcggggccgccgcgggcacggagtggccgccgcgtcgcctgagcccagagccggggagtgctctcggccgccgcgtctcctgccctctgtccttccaacccagccctcggctgagccgcgccgcaccatgcccgccgtggacaagctcctgctagaggaggcgttgcaggacagcccccagactcgctctttactgagcgtgtttgaagaagatgctggcaccctcacagactataccaaccagctgctccaggcaatgcagcgcgtctatggagcccagaatgagatgtgcctggccacacaacagctttctaagcaactgctggcatatgaaaaacagaactttgctcttggcaaaggtgatgaagaagtaatttcaacactccactatttttccaaagtggtggatgagcttaatcttctccatacagagctggctaaacagttggcagacacaatggttctacctatcatacaattccgagaaaaggatctcacagaagtaagcactttaaaggatctatttggactcgctagcaatgagcatgacctctcaatggcaaaatacagcaggctgcctaagaaaaaggagaatgagaaggtgaagaccgaagtcggaaaagaggtggccgcggcccggcggaagcagcacctctcctcccttcagtactactgtgccctcaacgcgctgcagtacagaaagcaaatggccatgatggagcccatgataggctttgcccatggacaggtaggggagtccctccctgagggctgaaacctaagctagctgtggcgttctgctgagagggcacgcaggagacactgaagcatcgtcgtagaaagaaacataaatgcacaatctccctggctactttgtgggattcagcacttggac

SEQ ID NO: 429777 - DNA, 281 bp, Homo sapiens
cctaggttaatttattaccaagataataatagtttgttgaacttagttacagttaaactcacttgaagcacagctggtcatggggcttggtataaagttcctatttccaccctgatacttccaattcctggaaccccagcccactcccccatccctcctccctatcaaactagtataatgattttgaatcggtacagtgtgtttaactgtaactaagttcaacagactattattatctttgtaataaattaacctagcaataaaaattattctgtttcttt

SEQ ID NO: 429778 - DNA, 1356 bp, Homo sapiens
acaccgcaatttgagagccccactggtataaagtgagtgaaacccaggcagagacaggcaaaatggtgaggcccgcatcctattggtgagtcacacagggaacgctgaaattcatggccttctccaggctactgggaacccatgggcggtgatggagggagtggtgccaccttcacttgctgctgaggctcttccccctctccccagcatactccttacctggctgtctctcctcatgtataaggaacctatagtggtgtagaatctactcttcttccccctgtggcttccaggcccccctgtatagctgctatccagcccgatttctcaccactggcccagggcttcctcctgccccgtggcttcacgtctctgaacacatcaatctctgatgttctctctccttccattgaattccaccagacacattcagggtttacttcgtaatgtcttcatatgagtatcaatcaacaccttccccaactcaattgtactaggttgtagagcacaaggatggtctcgtgctgctctgtggcacctgtgcctacactcctctgagctttgaggaggctgctctctttgctgaccccatgatcttttctgcccttctgttaagggcattggccacagcaacggggcaaatgccccaagctggctgtaagtgacccatccctttggctcccatgattagaccaaggagaggcatggggtccagctgagccattcagaaccattccttagcattttccactcaaaggttagagatgagattttctcttcccaaggctacctctggccatggttccagcttcatgggggcaatgggattaggaaaatgaggtcaacctgcaaaggaaagcagatgcaagagatggagacagaatgggggtgtcctggggatcttggagcctgaattcattggcacaaaaggcagcagcatcctcactgtatctgcagtccatttggactcaataaaaactttgaaagtcacatgtgttatggaattccttctcagtgacacattcatctgtgctcagttgtcccagcaagggtcagcccctcatacccctgcagcatccgctgctatgaagcagagctgtaaacgccctccctgtgtataggaaaagctacatggagcaaatcctcctgcctgaagaagtgcatctcagcatcacttcagctgtcggggcatttgtggggagaaccagaccacctctgcggaaggcagcagaccctcttccagccatggatggagttgaattctctataaacggttcaccagcaaaccaccaatacattccattgtttgcctagagagaaatttaaaaataaataaatgttcacttaattgtgcat

SEQ ID NO: 429779 - DNA, 3505 bp, Homo sapiens
aaatgtctgatgctcagggcagctacaaactggatgaagctcaggctgtcttgagagaaacaaaagccatcaaaaaggctattacctgtggggaaaaggaaaagcaagatctcattaagagccttgccatgttgaaggacggcttccgcactgacagggggtctcactcagacctgtggtccagcagcagctctctggagagttcgagtttcccgctaccgaaacagtacctggatgtgagctcccagacagacatctcgggaagcttcggcatcaacagcaacaatcagttggcagagaaggtcagattgcgccttcgatatgaagaggctaagagaaggatcgccaacctgaagatccagctggccaagcttgacagtgaggcctggcctggggtgctggactcagagagggaccggctgatccttatcaacgagaaggaggagctgctgaaggagatgcgcttcatcagcccccgcaagtggacccagggggaggtggagcagctggagatggcccggaagcggctggaaaaggacctgcaggcagcccgggacacccagagcaaggcgctgacggagaggttaaagttaaacagtaagaggaaccagcttgtgagagaactggaggaagccacccggcaggtggcaactctgcactcccagctgaaaagtctctcaagcagcatgcagtccctgtcctcaggcagcagccccggatccctcacgtccagccggggctccctggttgcatccagcctggactcctccacttcagccagcttcactgacctctactatgacccctttgagcagctggactcagagctgcagagcaaggtggagttcctgctcctggagggggccaccggcttccggccctcaggctgcatcaccaccatccacgaggatgaggtggccaagacccagaaggcagagggaggtggccgcctgcaggctctgcgttccctgtctggcaccccaaagtccatgacctccctatccccacgttcctctctctcctccccctccccaccctgttcccctctcatggctgaccccctcctggctggtgatgccttcctcaactccttggagtttgaagacccggagctgagtgccactctttgtgaactgagccttggtaacagcgcccaggaaagataccggctggaggaaccaggaacggagggcaagcagctgggccaagctgtgaatacggcccaggggtgtggcctgaaagtggcctgtgtctcagccgccgtatcggacgagtcagtggctggagacagtggtgtgtacgaggcttccgtgcagagactgggtgcttcagaagctgctgcatttgacagtgacgaatcggaagcagtgggtgcgacccgaattcagattgccctgaagtatgatgagaagaataagcaatttgcaatattaatcatccagctgagtaacctttctgctctgttgcagcaacaagaccagaaagtgaatatccgcgtggctgtccttccttgctctgaaagcacaacctgcctgttccggacccggcctctggacgcctcagacactctagtgttcaatgaggtgttctgggtatccatgtcctatccagcccttcaccagaagaccttaagagtcgatgtctgtaccaccgacaggagccatctggaagagtgcctgggaggcgcccagatcagcctggcggaggtctgccggtctggggagaggtcgactcgctggtacaaccttctcagctacaaatacttgaagaaacagagcagggagctcaagccagtgggagtcatggcccctgcctcagggcctgccagcacggacgctgtgtctgctctgttggaacagacagcagtggagctggagaagaggcaggagggcaggagcagcacacagacactggaagacagctggaggtatgaggagaccagtgagaatgaggcagtagccgaggaagaggaggaggaggtggaggaggaggagggagaagaggatgttttcaccgagaaagcctcacctgatatggatgggtacccagcattaaaggtggacaaagagaccaacacggagaccccggccccatcccccacagtggtgcgacctaaggaccggagagtgggcaccccgtcccaggggccatttcttcgagggagcaccatcatccgctctaagaccttctccccaggaccccagagccagtacgtgtgccggctgaatcggagtgatagtgacagctccactctgtccaaaaagccaccttttgttcgaaactccctggagcgacgcagcgtccggatgaagcggccgtccccacccccacagccttcctcggtcaagtcgctgcgctccgagcgtctgatccgtacctcgctggacctggagttagacctgcaggcgacaagaacctggcacagccaattgacccaggagatctcggtgctgaaggagctcaaggagcagctggaacaagccaagagccacggggagaaggagctgccacagtggttgcgtgaggacgagcgtttccgcctgctgctgaggatgctggagaagcggatggaccgagcggagcacaagggtgagcttcagacagacaagatgatgagggcagctgccaaggatgtgcacaggctccgaggccagagctgtaaggaacccccagaagttcagtctttcagggagaagatggcatttttcacccggcctcggatgaatatcccagctctctctgcagatgacgtctaatcgccagaaaagtatttcctttgttccactgaccaggctgtgaacattgactgtggctaaagttatttatgtggtgttatatgaaggtactgagtcacaagtcctctagtgctcttgttggtttgaagatgaaccgactttttagtttgggtcctactgttgttattaaaaacagaacaaaaacaaaacacacacacacacaaaaacagaaacaaaaaaaaccagcattaaaataataagattgtatagtttgtatatttaggagtgtatttttgggaaagaaaatttaaatgaactaaagcagtattgagttgctgctcttcttaaaatcgtttagattttttttggtttgtacagctccaccttttagaggtcttactgcaataagaagtaatgcctgggggacggtaatcctaataggacgtcccgcacttgtcacagtacagctaatttttcctagttaacatattttgtacaatattaaaaaaatgcacagaaaccattgggggggattcagaggtgcatccacggatcttcttgagctgtgacgtgtttttatgtggctgcccaacgtggagcgggcagtgtgataggctgggtgggctaagcagcctagtctatgtgggtgacaggccacgctggtctcagatgcccagtgaagccactaacatgagtgaggggagggctgtggggaactccattcagttttatctccatcaataaagtggcctttcaaaaagaaaatacct

SEQ ID NO: 429780 - DNA, 594 bp, Homo sapiens
tctagagcggccgcctactactactaaattcgcggccgcgtcgacgcttcatgggggcaatgggattaggaaaatgaggtcaacctgcaaaggaaagcagatgcaagagatggagacagaatgggggtgtcctggggatcttggagcctgaattcattggcacaaaaggcagcagcatcctcactgtatctgcagtccatttggactcaataaaaactttgaaagtcacatgtgttatggaattccttctcagtgacacattcatctgtgctcagttgtcccagcaagggtcagcccctcatacccctgcagcatccgctgctatgaagcagagctgtaaacgccctccctgtgtataggaaaagctacatggagcaaatcctcctgcctgaagaagtgcatctcagcatcacttcagctgtcggggcatttgtggggagaaccagaccacctctgcggaaggcagcagaccctcttccagccatggatggagttgaattctctataaacggttcaccagcaaaccaccaatacattccattgtttgcctagagagaaatttaaaaataaataaatgttcacttaattgtgcat

SEQ ID NO: 429781 - DNA, 464 bp, Homo sapiens
cacagctctgagatgctctgattcctggcaggtagggtggcaccctaaattgtacccaaatgaccccagcaacctttgtctctataggacgctgtgtctgctctgttggaacagacagcagtggagctggagaagaggcaggagggcaggagcagcacacagacactggaagacagctggtgagtgagcccgcccttgggccccaggagctgccctgcctggacctaggcccagcaatgagatcccccaatgccagtgcaactaagagaagggttccactgggaaggctgagaacccctctcctcatgggttctctacaggcaaaaaggcaatgtaacctagtacgatggttcccagaattcctttcgaatttgccatttcgtttcccatgaatcacctatgctagttcacacctaatgttattctttatcttgatatagtgacatttattttgctaaaaaaaa

SEQ ID NO: 429782 - DNA, 627 bp, Homo sapiens
  misc_feature (615)..(615): n is a, c, g, or t
tgtcagtgactcagtacttgttatgtgccagacacccttcccaatcattctgatgaatgaatttttcttatctttaaggcctggggaattggcccaatgttacatacctaataagcagtcacatcaggtcataacaacagtagcaaggacttactatgtgccaagtactgtgctttgcaggttacagattatatcataaaaccttcaaccaaaataacatgaggaaagagcttttgttattccattcagagagatgagcaacttgcccaaggccacacagccggtgctaagaggttagtgcctggtgatgaatccacatctctattgtaccaggaacagggcaaggacattgccttgttcatgtctgcaccccattcctgcagagcctacttcattgttggcacatggtaggcacccacatgtgtttgtttagaaaaaaaataggttccttgagatgacaagctgatcaaaggaagacagtaactgtcaaagattgctctgagatgtctgtttcttcatggcatctcctgttccctcagtgccattaggcacaccagtcatgcttgctttcttggcccccagatcgccaacctgaagatccagctccgttctagngatcctctagat

SEQ ID NO: 429783 - DNA, 2934 bp, Homo sapiens
aaatgtctgatgctcagggcagctacaaactggatgaagctcaggctgtcttgagagaaacaaaagccatcaaaaaggctattacctgtggggaaaaggaaaagcaagatctcattaagagccttgccatgttgaaggacggcttccgcactgacagggggtctcactcagacctgtggtccagcagcagctctctggagagttcgagtttcccgctaccgaaacagtacctggatgtgagctcccagacagacatctcgggaagcttcggcatcaacagcaacaatcagttggcagagaaggtcagattgcgccttcgatatgaagaggctaagagaaggatcgccaacctgaagatccagctggccaagcttgacagtgaggcctggcctggggtgctggactcagagagggaccggctgatccttatcaacgagaaggaggagctgctgaaggagatgcgcttcatcagcccccgcaagtggaccccctcctggctggtgatgccttcctcaactccttggagtttgaagacccggagctgagtgccactctttgtgaactgagccttggtaacagcgcccaggaaagataccggctggaggaaccaggaacggagggcaagcagctgggccaagctgtgaatacggcccaggggtgtggcctgaaagtggcctgtgtctcagccgccgtatcggacgagtcagtggctggagacagtggtgtgtacgaggcttccgtgcagagactgggtgcttcagaagctgctgcatttgacagtgacgaatcggaagcagtgggtgcgacccgaattcagattgccctgaagtatgatgagaagaataagcaatttgcaatattaatcatccagctgagtaacctttctgctctgttgcagcaacaagaccagaaagtgaatatccgcgtggctgtccttccttgctctgaaagcacaacctgcctgttccggacccggcctctggacgcctcagacactctagtgttcaatgaggtgttctgggtatccatgtcctatccagcccttcaccagaagaccttaagagtcgatgtctgtaccaccgacaggagccatctggaagagtgcctgggaggcgcccagatcagcctggcggaggtctgccggtctggggagaggtcgactcgctggtacaaccttctcagctacaaatacttgaagaaacagagcagggagctcaagccagtgggagtcatggcccctgcctcagggcctgccagcacggacgctgtgtctgctctgttggaacagacagcagtggagctggagaagaggcaggagggcaggagcagcacacagacactggaagacagctggaggtatgaggagaccagtgagaatgaggcagtagccgaggaagaggaggaggaggtggaggaggaggagggagaagaggatgttttcaccgagaaagcctcacctgatatggatgggtacccagcattaaaggtggacaaagagaccaacacggagaccccggccccatcccccacagtggtgcgacctaaggaccggagagtgggcaccccgtcccaggggccatttcttcgagggagcaccatcatccgctctaagaccttctccccaggaccccagagccagtacgtgtgccggctgaatcggagtgatagtgacagctccactctgtccaaaaagccaccttttgttcgaaactccctggagcgacgcagcgtccggatgaagcggccgtccccacccccacagccttcctcggtcaagtcgctgcgctccgagcgtctgatccgtacctcgctggacctggagttagacctgcaggcgacaagaacctggcacagccaattgacccaggagatctcggtgctgaaggagctcaaggagcagctggaacaagccaagagccacggggagaaggagctgccacagtggttgcgtgaggacgagcgtttccgcctgctgctgaggatgctggagaagcggatggaccgagcggagcacaagggtgagcttcagacagacaagatgatgagggcagctgccaaggatgtgcacaggctccgaggccagagctgtaaggaacccccagaagttcagtctttcagggagaagatggcatttttcacccggcctcggatgaatatcccagctctctctgcagatgacgtctaatcgccagaaaagtatttcctttgttccactgaccaggctgtgaacattgactgtggctaaagttatttatgtggtgttatatgaaggtactgagtcacaagtcctctagtgctcttgttggtttgaagatgaaccgactttttagtttgggtcctactgttgttattaaaaacagaacaaaaacaaaacacacacacacacaaaaacagaaacaaaaaaaaccagcattaaaataataagattgtatagtttgtatatttaggagtgtatttttgggaaagaaaatttaaatgaactaaagcagtattgagttgctgctcttcttaaaatcgtttagattttttttggtttgtacagctccaccttttagaggtcttactgcaataagaagtaatgcctgggggacggtaatcctaataggacgtcccgcacttgtcacagtacagctaatttttcctagttaacatattttgtacaatattaaaaaaatgcacagaaaccattgggggggattcagaggtgcatccacggatcttcttgagctgtgacgtgtttttatgtggctgcccaacgtggagcgggcagtgtgataggctgggtgggctaagcagcctagtctatgtgggtgacaggccacgctggtctcagatgcccagtgaagccactaacatgagtgaggggagggctgtggggaactccattcagttttatctccatcaataaagtggcctttcaaaaagaaaatacct

SEQ ID NO: 429784 - DNA, 3688 bp, Homo sapiens
aaatgtctgatgctcagggcagctacaaactggatgaagctcaggctgtcttgagagaaacaaaagccatcaaaaaggctattacctgtggggaaaaggaaaagcaagatctcattaagagccttgccatgttgaaggacggcttccgcactgacagggggtctcactcagacctgtggtccagcagcagctctctggagagttcgagtttcccgctaccgaaacagtacctggatgtgagctcccagacagacatctcgggaagcttcggcatcaacagcaacaatcagttggcagagaaggtcagattgcgccttcgatatgaagaggctaagagaagactttcctgtcaatgtggccaggcaactcccagcaattcggagcttacacactaccagctcccccaggcgtccagcaaaacagcaagacatctgtatttggacagccacttcttgttctctctgaagaggaccactctgaaccttggatctgttccatcctgcaggaatgcctgtcttagatggatcgccaacctgaagatccagctggccaagcttgacagtgaggcctggcctggggtgctggactcagagagggaccggctgatccttatcaacgagaaggaggagctgctgaaggagatgcgcttcatcagcccccgcaagtggacccagggggaggtggagcagctggagatggcccggaagcggctggaaaaggacctgcaggcagcccgggacacccagagcaaggcgctgacggagaggttaaagttaaacagtaagaggaaccagcttgtgagagaactggaggaagccacccggcaggtggcaactctgcactcccagctgaaaagtctctcaagcagcatgcagtccctgtcctcaggcagcagccccggatccctcacgtccagccggggctccctggttgcatccagcctggactcctccacttcagccagcttcactgacctctactatgacccctttgagcagctggactcagagctgcagagcaaggtggagttcctgctcctggagggggccaccggcttccggccctcaggctgcatcaccaccatccacgaggatgaggtggccaagacccagaaggcagagggaggtggccgcctgcaggctctgcgttccctgtctggcaccccaaagtccatgacctccctatccccacgttcctctctctcctccccctccccaccctgttcccctctcatggctgaccccctcctggctggtgatgccttcctcaactccttggagtttgaagacccggagctgagtgccactctttgtgaactgagccttggtaacagcgcccaggaaagataccggctggaggaaccaggaacggagggcaagcagctgggccaagctgtgaatacggcccaggggtgtggcctgaaagtggcctgtgtctcagccgccgtatcggacgagtcagtggctggagacagtggtgtgtacgaggcttccgtgcagagactgggtgcttcagaagctgctgcatttgacagtgacgaatcggaagcagtgggtgcgacccgaattcagattgccctgaagtatgatgagaagaataagcaatttgcaatattaatcatccagctgagtaacctttctgctctgttgcagcaacaagaccagaaagtgaatatccgcgtggctgtccttccttgctctgaaagcacaacctgcctgttccggacccggcctctggacgcctcagacactctagtgttcaatgaggtgttctgggtatccatgtcctatccagcccttcaccagaagaccttaagagtcgatgtctgtaccaccgacaggagccatctggaagagtgcctgggaggcgcccagatcagcctggcggaggtctgccggtctggggagaggtcgactcgctggtacaaccttctcagctacaaatacttgaagaaacagagcagggagctcaagccagtgggagtcatggcccctgcctcagggcctgccagcacggacgctgtgtctgctctgttggaacagacagcagtggagctggagaagaggcaggagggcaggagcagcacacagacactggaagacagctggaggtatgaggagaccagtgagaatgaggcagtagccgaggaagaggaggaggaggtggaggaggaggagggagaagaggatgttttcaccgagaaagcctcacctgatatggatgggtacccagcattaaaggtggacaaagagaccaacacggagaccccggccccatcccccacagtggtgcgacctaaggaccggagagtgggcaccccgtcccaggggccatttcttcgagggagcaccatcatccgctctaagaccttctccccaggaccccagagccagtacgtgtgccggctgaatcggagtgatagtgacagctccactctgtccaaaaagccaccttttgttcgaaactccctggagcgacgcagcgtccggatgaagcggccgtccccacccccacagccttcctcggtcaagtcgctgcgctccgagcgtctgatccgtacctcgctggacctggagttagacctgcaggcgacaagaacctggcacagccaattgacccaggagatctcggtgctgaaggagctcaaggagcagctggaacaagccaagagccacggggagaaggagctgccacagtggttgcgtgaggacgagcgtttccgcctgctgctgaggatgctggagaagcggatggaccgagcggagcacaagggtgagcttcagacagacaagatgatgagggcagctgccaaggatgtgcacaggctccgaggccagagctgtaaggaacccccagaagttcagtctttcagggagaagatggcatttttcacccggcctcggatgaatatcccagctctctctgcagatgacgtctaatcgccagaaaagtatttcctttgttccactgaccaggctgtgaacattgactgtggctaaagttatttatgtggtgttatatgaaggtactgagtcacaagtcctctagtgctcttgttggtttgaagatgaaccgactttttagtttgggtcctactgttgttattaaaaacagaacaaaaacaaaacacacacacacacaaaaacagaaacaaaaaaaaccagcattaaaataataagattgtatagtttgtatatttaggagtgtatttttgggaaagaaaatttaaatgaactaaagcagtattgagttgctgctcttcttaaaatcgtttagattttttttggtttgtacagctccaccttttagaggtcttactgcaataagaagtaatgcctgggggacggtaatcctaataggacgtcccgcacttgtcacagtacagctaatttttcctagttaacatattttgtacaatattaaaaaaatgcacagaaaccattgggggggattcagaggtgcatccacggatcttcttgagctgtgacgtgtttttatgtggctgcccaacgtggagcgggcagtgtgataggctgggtgggctaagcagcctagtctatgtgggtgacaggccacgctggtctcagatgcccagtgaagccactaacatgagtgaggggagggctgtggggaactccattcagttttatctccatcaataaagtggcctttcaaaaagaaaatacct

SEQ ID NO: 429785 - DNA, 3746 bp, Homo sapiens
tgtcagtgactcagtacttgttatgtgccagacacccttcccaatcattctgatgaatgaatttttcttatctttaaggcctggggaattggcccaatgttacatacctaataagcagtcacatcaggtcataacaacagtagcaaggacttactatgtgccaagtactgtgctttgcaggttacagattatatcataaaaccttcaaccaaaataacatgaggaaagagcttttgttattccattcagagagatgagcaacttgcccaaggccacacagccggtgctaagaggttagtgcctggtgatgaatccacatctctattgtaccaggaacagggcaaggacattgccttgttcatgtctgcaccccattcctgcagagcctacttcattgttggcacatggtaggcacccacatgtgtttgtttagaaaaaaaataggttccttgagatgacaagctgatcaaaggaagacagtaactgtcaaagattgctctgagatgtctgtttcttcatggcatctcctgttccctcagtgccattaggcacaccagtcatgcttgctttcttggcccccagatcgccaacctgaagatccagctggccaagcttgacagtgaggcctggcctggggtgctggactcagagagggaccggctgatccttatcaacgagaaggaggagctgctgaaggagatgcgcttcatcagcccccgcaagtggacccagggggaggtggagcagctggagatggcccggaagcggctggaaaaggacctgcaggcagcccgggacacccagagcaaggcgctgacggagaggttaaagttaaacagtaagaggaaccagcttgtgagagaactggaggaagccacccggcaggtggcaactctgcactcccagctgaaaagtctctcaagcagcatgcagtccctgtcctcaggcagcagccccggatccctcacgtccagccggggctccctggttgcatccagcctggactcctccacttcagccagcttcactgacctctactatgacccctttgagcagctggactcagagctgcagagcaaggtggagttcctgctcctggagggggccaccggcttccggccctcaggctgcatcaccaccatccacgaggatgaggtggccaagacccagaaggcagagggaggtggccgcctgcaggctctgcgttccctgtctggcaccccaaagtccatgacctccctatccccacgttcctctctctcctccccctccccaccctgttcccctctcatggctgaccccctcctggctggtgatgccttcctcaactccttggagtttgaagacccggagctgagtgccactctttgtgaactgagccttggtaacagcgcccaggaaagataccggctggaggaaccaggaacggagggcaagcagctgggccaagctgtgaatacggcccaggggtgtggcctgaaagtggcctgtgtctcagccgccgtatcggacgagtcagtggctggagacagtggtgtgtacgaggcttccgtgcagagactgggtgcttcagaagctgctgcatttgacagtgacgaatcggaagcagtgggtgcgacccgaattcagattgccctgaagtatgatgagaagaataagcaatttgcaatattaatcatccagctgagtaacctttctgctctgttgcagcaacaagaccagaaagtgaatatccgcgtggctgtccttccttgctctgaaagcacaacctgcctgttccggacccggcctctggacgcctcagacactctagtgttcaatgaggtgttctgggtatccatgtcctatccagcccttcaccagaagaccttaagagtcgatgtctgtaccaccgacaggagccatctggaagagtgcctgggaggcgcccagatcagcctggcggaggtctgccggtctggggagaggtcgactcgctggtacaaccttctcagctacaaatacttgaagaaacagagcagggagctcaagccagtgggagtcatggcccctgcctcagggcctgccagcacggacgctgtgtctgctctgttggaacagacagcagtggagctggagaagaggcaggagggcaggagcagcacacagacactggaagacagctggaggtatgaggagaccagtgagaatgaggcagtagccgaggaagaggaggaggaggtggaggaggaggagggagaagaggatgttttcaccgagaaagcctcacctgatatggatgggtacccagcattaaaggtggacaaagagaccaacacggagaccccggccccatcccccacagtggtgcgacctaaggaccggagagtgggcaccccgtcccaggggccatttcttcgagggagcaccatcatccgctctaagaccttctccccaggaccccagagccagtacgtgtgccggctgaatcggagtgatagtgacagctccactctgtccaaaaagccaccttttgttcgaaactccctggagcgacgcagcgtccggatgaagcggccgtccccacccccacagccttcctcggtcaagtcgctgcgctccgagcgtctgatccgtacctcgctggacctggagttagacctgcaggcgacaagaacctggcacagccaattgacccaggagatctcggtgctgaaggagctcaaggagcagctggaacaagccaagagccacggggagaaggagctgccacagtggttgcgtgaggacgagcgtttccgcctgctgctgaggatgctggagaagcggatggaccgagcggagcacaagggtgagcttcagacagacaagatgatgagggcagctgccaaggatgtgcacaggctccgaggccagagctgtaaggaacccccagaagttcagtctttcagggagaagatggcatttttcacccggcctcggatgaatatcccagctctctctgcagatgacgtctaatcgccagaaaagtatttcctttgttccactgaccaggctgtgaacattgactgtggctaaagttatttatgtggtgttatatgaaggtactgagtcacaagtcctctagtgctcttgttggtttgaagatgaaccgactttttagtttgggtcctactgttgttattaaaaacagaacaaaaacaaaacacacacacacacaaaaacagaaacaaaaaaaaccagcattaaaataataagattgtatagtttgtatatttaggagtgtatttttgggaaagaaaatttaaatgaactaaagcagtattgagttgctgctcttcttaaaatcgtttagattttttttggtttgtacagctccaccttttagaggtcttactgcaataagaagtaatgcctgggggacggtaatcctaataggacgtcccgcacttgtcacagtacagctaatttttcctagttaacatattttgtacaatattaaaaaaatgcacagaaaccattgggggggattcagaggtgcatccacggatcttcttgagctgtgacgtgtttttatgtggctgcccaacgtggagcgggcagtgtgataggctgggtgggctaagcagcctagtctatgtgggtgacaggccacgctggtctcagatgcccagtgaagccactaacatgagtgaggggagggctgtggggaactccattcagttttatctccatcaataaagtggcctttcaaaaagaaaatacct

SEQ ID NO: 429786 - DNA, 3475 bp, Homo sapiens
aaatgtctgatgctcagggcagctacaaactggatgaagctcaggctgtcttgagagaaacaaaagccatcaaaaaggctattacctgtggggaaaaggaaaagcaagatctcattaagagccttgccatgttgaaggacggcttccgcactgacagggggtctcactcagacctgtggtccagcagcagctctctggagagttcgagtttcccgctaccgaaacagtacctggatttcggcatcaacagcaacaatcagttggcagagaaggtcagattgcgccttcgatatgaagaggctaagagaaggatcgccaacctgaagatccagctggccaagcttgacagtgaggcctggcctggggtgctggactcagagagggaccggctgatccttatcaacgagaaggaggagctgctgaaggagatgcgcttcatcagcccccgcaagtggacccagggggaggtggagcagctggagatggcccggaagcggctggaaaaggacctgcaggcagcccgggacacccagagcaaggcgctgacggagaggttaaagttaaacagtaagaggaaccagcttgtgagagaactggaggaagccacccggcaggtggcaactctgcactcccagctgaaaagtctctcaagcagcatgcagtccctgtcctcaggcagcagccccggatccctcacgtccagccggggctccctggttgcatccagcctggactcctccacttcagccagcttcactgacctctactatgacccctttgagcagctggactcagagctgcagagcaaggtggagttcctgctcctggagggggccaccggcttccggccctcaggctgcatcaccaccatccacgaggatgaggtggccaagacccagaaggcagagggaggtggccgcctgcaggctctgcgttccctgtctggcaccccaaagtccatgacctccctatccccacgttcctctctctcctccccctccccaccctgttcccctctcatggctgaccccctcctggctggtgatgccttcctcaactccttggagtttgaagacccggagctgagtgccactctttgtgaactgagccttggtaacagcgcccaggaaagataccggctggaggaaccaggaacggagggcaagcagctgggccaagctgtgaatacggcccaggggtgtggcctgaaagtggcctgtgtctcagccgccgtatcggacgagtcagtggctggagacagtggtgtgtacgaggcttccgtgcagagactgggtgcttcagaagctgctgcatttgacagtgacgaatcggaagcagtgggtgcgacccgaattcagattgccctgaagtatgatgagaagaataagcaatttgcaatattaatcatccagctgagtaacctttctgctctgttgcagcaacaagaccagaaagtgaatatccgcgtggctgtccttccttgctctgaaagcacaacctgcctgttccggacccggcctctggacgcctcagacactctagtgttcaatgaggtgttctgggtatccatgtcctatccagcccttcaccagaagaccttaagagtcgatgtctgtaccaccgacaggagccatctggaagagtgcctgggaggcgcccagatcagcctggcggaggtctgccggtctggggagaggtcgactcgctggtacaaccttctcagctacaaatacttgaagaaacagagcagggagctcaagccagtgggagtcatggcccctgcctcagggcctgccagcacggacgctgtgtctgctctgttggaacagacagcagtggagctggagaagaggcaggagggcaggagcagcacacagacactggaagacagctggaggtatgaggagaccagtgagaatgaggcagtagccgaggaagaggaggaggaggtggaggaggaggagggagaagaggatgttttcaccgagaaagcctcacctgatatggatgggtacccagcattaaaggtggacaaagagaccaacacggagaccccggccccatcccccacagtggtgcgacctaaggaccggagagtgggcaccccgtcccaggggccatttcttcgagggagcaccatcatccgctctaagaccttctccccaggaccccagagccagtacgtgtgccggctgaatcggagtgatagtgacagctccactctgtccaaaaagccaccttttgttcgaaactccctggagcgacgcagcgtccggatgaagcggccgtccccacccccacagccttcctcggtcaagtcgctgcgctccgagcgtctgatccgtacctcgctggacctggagttagacctgcaggcgacaagaacctggcacagccaattgacccaggagatctcggtgctgaaggagctcaaggagcagctggaacaagccaagagccacggggagaaggagctgccacagtggttgcgtgaggacgagcgtttccgcctgctgctgaggatgctggagaagcggatggaccgagcggagcacaagggtgagcttcagacagacaagatgatgagggcagctgccaaggatgtgcacaggctccgaggccagagctgtaaggaacccccagaagttcagtctttcagggagaagatggcatttttcacccggcctcggatgaatatcccagctctctctgcagatgacgtctaatcgccagaaaagtatttcctttgttccactgaccaggctgtgaacattgactgtggctaaagttatttatgtggtgttatatgaaggtactgagtcacaagtcctctagtgctcttgttggtttgaagatgaaccgactttttagtttgggtcctactgttgttattaaaaacagaacaaaaacaaaacacacacacacacaaaaacagaaacaaaaaaaaccagcattaaaataataagattgtatagtttgtatatttaggagtgtatttttgggaaagaaaatttaaatgaactaaagcagtattgagttgctgctcttcttaaaatcgtttagattttttttggtttgtacagctccaccttttagaggtcttactgcaataagaagtaatgcctgggggacggtaatcctaataggacgtcccgcacttgtcacagtacagctaatttttcctagttaacatattttgtacaatattaaaaaaatgcacagaaaccattgggggggattcagaggtgcatccacggatcttcttgagctgtgacgtgtttttatgtggctgcccaacgtggagcgggcagtgtgataggctgggtgggctaagcagcctagtctatgtgggtgacaggccacgctggtctcagatgcccagtgaagccactaacatgagtgaggggagggctgtggggaactccattcagttttatctccatcaataaagtggcctttcaaaaagaaaatacct

SEQ ID NO: 429787 - DNA, 2924 bp, Homo sapiens
aaatgtctgatgctcagggcagctacaaactggatgaagctcaggctgtcttgagagaaacaaaagccatcaaaaaggctattacctgtggggaaaaggaaaagcaagatctcattaagagccttgccatgttgaaggacggcttccgcactgacagggggtctcactcagacctgtggtccagcagcagctctctggagagttcgagtttcccgctaccgaaacagtacctggatgtgagctcccagacagacatctcgggaagcttcggcatcaacagcaacaatcagttggcagagaaggtcagattgcgccttcgatatgaagaggctaagagaaggatcgccaacctgaagatccagctggccaagcttgacagtgaggcctggcctggggtgctggactcagagagggaccggctgatccttatcaacgagaaggaggagctgctgaaggagatgcgcttcatcagcccccgcaagtggacccagggggaggtggagcagctggagatggcccggaagcggctggaaaaggacctgcaggcagcccgggacacccagagcaaggcgctgacggagaggttaaagttaaacagtaagaggaaccagcttgtgagagaactggaggaagccacccggcaggtggcaactctgcactcccagctgaaaagtctctcaagcagcatgcagtccctgtcctcaggcagcagccccggatccctcacgtccagccggggctccctggttgcatccagcctggactcctccacttcagccagcttcactgacctctactatgacccctttgagcagctggactcagagctgcagagcaaggtggagttcctgctcctggagggggccaccggcttccggccctcaggctgcatcaccaccatccacgaggatgaggtggccaagacccagaaggcagagggaggtggccgcctgcaggctctgcgttccctgtctggcaccccaaagtccatgacctccctatccccacgttcctctctctcctccccctccccaccctgttcccctctcatggctgaccccctcctggctggtgatgccttcctcaactccttggagtttgaagacccggagctgagtgccactctttgtgaactgagccttggtaacagcgcccaggaaagataccggctggaggaaccaggaacggagggcaagcagctgggccaagctgtgaatacggcccaggggtgtggcctgaaagtggcctgtgtctcagccgccgtatcggacgagtcagtggctggagacagtggtgtgtacgaggcttccgtgcagagactgggtgcttcagaagctgctgcatttgacagtgacgaatcggaagcagtgggtgcgacccgaattcagattgccctgaagtatgatgagaagaataagcaatttgcaatattaatcatccagctgagtaacctttctgctctgttgcagcaacaagaccagaaagtgaatatccgcgtggctgtccttccttgctctgaaagcacaacctgcctgttccggacccggcctctggacgcctcagacactctagtgttcaatgaggtgttctgggtatccatgtcctatccagcccttcaccagaagaccttaagagtcgatgtctgtaccaccgacaggagccatctggaagagtgcctgggaggcgcccagatcagcctggcggaggtctgccggtctggggagaggtcgactcgctggtacaaccttctcagctacaaatacttgaagaaacagagcagggagctcaagccagtgggagtcatggcccctgcctcagggcctgccagcacggacgctgtgtctgctctgttggaacagacagcagtggagctggagaagaggcaggagggcaggagcagcacacagacactggaagacagctggaggtatgaggagaccagtgagaatgaggcagtagccgaggaagaggaggaggaggtggaggaggaggagggagaagaggatgttttcaccgagaaagcctcacctgatatggatgggtacccagcattaaaggtggacaaagagaccaacacggagaccccggccccatcccccacagtggtgcgacctaaggaccggagagtgggcaccccgtcccaggggccatttcttcgagggagcaccatcatccgctctaagaccttctccccaggaccccagagccagtacgtgtgccggctgaatcggagtgatagtgacagctccactctgtccaaaaagccaccttttgttcgaaactccctggagcgacgcagcgtccggatgaagcggccgtccccacccccacagccttcctcggtcaagtcgctgcgctccgagcgtctgatccgtacctcgctggacctggagttagacctgcaggcgacaagaacctggcacagccaattgacccaggagatctcggtgctgaaggagctcaaggagcagctggaacaagccaagagccacggggagaaggagctgccacagtggttgcgtgaggacgagcgtttccgcctgctgctgaggatgctggagaagcggatggaccgagcggagcacaagggtgagcttcagacagacaagatgatgagggcagctgccaaggatgtgcacaggctccgaggccagagctgtaaggaacccccagaagttcagtctttcaggaaaagctacatggagcaaatcctcctgcctgaagaagtgcatctcagcatcacttcagctgtcggggcatttgtggggagaaccagaccacctctgcggaaggcagcagaccctcttccagccatggatggagttgaattctctataaacggttcaccagcaaaccaccaatacattccattgtttgcctagagagaaatttaaaaataaataaatgttcacttaattgtgcat

SEQ ID NO: 429788 - DNA, 1088 bp, Homo sapiens
ttatcgttctgaatgaagtggatcccacatggagcaagagtgagggtgccgtccctacagtagccccctctgttgtgatagcgagttctccttgcccctttctggaggccccctccactgactcagggccttgcttgctttgcccagcagatggaccgagcggagcacaagggtgagcttcagacagacaagatgatgagggcagctgccaaggatgtgcacaggctccgaggccagagctgtaaggaacccccagaagttcagtctttcagggagaagatggcatttttcacccggcctcggatgaatatcccagctctctctgcagatgacgtctaatcgccagaaaagtatttcctttgttccactgaccaggctgtgaacattgactgtggctaaagttatttatgtggtgttatatgaaggtactgagtcacaagtcctctagtgctcttgttggtttgaagatgaaccgactttttagtttgggtcctactgttgttattaaaaacagaacaaaaacaaaacacacacacacacaaaaacagaaacaaaaaaaaccagcattaaaataataagattgtatagtttgtatatttaggagtgtatttttgggaaagaaaatttaaatgaactaaagcagtattgagttgctgctcttcttaaaatcgtttagattttttttggtttgtacagctccaccttttagaggtcttactgcaataagaagtaatgcctgggggacggtaatcctaataggacgtcccgcacttgtcacagtacagctaatttttcctagttaacatattttgtacaatattaaaaaaatgcacagaaaccattgggggggattcagaggtgcatccacggatcttcttgagctgtgacgtgtttttatgtggctgcccaacgtggagcgggcagtgtgataggctgggtgggctaagcagcctagtctatgtgggtgacaggccacgctggtctcagatgcccagtgaagccactaacatgagtgaggggagggctgtggggaactccattcagttttatctccatcaataaagtggcctttcaaaaagaaaatacct

SEQ ID NO: 429789 - DNA, 758 bp, Homo sapiens
ttcttttttagtagagatggggttttaccatgttggccaggctggtcttgaactcctgactgtggctaaagttatttatgtggtgttatatgaaggtactgagtcacaagtcctctagtgctcttgttggtttgaagatgaaccgactttttagtttgggtcctactgttgttattaaaaacagaacaaaaacaaaacacacacacacacaaaaacagaaacaaaaaaaaccagcattaaaataataagattgtatagtttgtatatttaggagtgtatttttgggaaagaaaatttaaatgaactaaagcagtattgagttgctgctcttcttaaaatcgtttagattttttttggtttgtacagctccaccttttagaggtcttactgcaataagaagtaatgcctgggggacggtaatcctaataggacgtcccgcacttgtcacagtacagctaatttttcctagttaacatattttgtacaatattaaaaaaatgcacagaaaccattgggggggattcagaggtgcatccacggatcttcttgagctgtgacgtgtttttatgtggctgcccaacgtggagcgggcagtgtgataggctgggtgggctaagcagcctagtctatgtgggtgacaggccacgctggtctcagatgcccagtgaagccactaacatgagtgaggggagggctgtggggaactccattcagttttatctccatcaataaagtggcctttcaaaaagaaaatacct

SEQ ID NO: 429790 - DNA, 2643 bp, Homo sapiens
aaatgtctgatgctcagggcagctacaaactggatgaagctcaggctgtcttgagagaaacaaaagccatcaaaaaggctattacctgtggggaaaaggaaaagcaagatctcattaagagccttgccatgttgaaggacggcttccgcactgacagggggtctcactcagacctgtggtccagcagcagctctctggagagttcgagtttcccgctaccgaaacagtacctggatgtgagctcccagacagacatctcgggaagcttcggcatcaacagcaacaatcagttggcagagaaggtcagattgcgccttcgatatgaagaggctaagagaaggatcgccaacctgaagatccagctggccaagcttgacagtgaggcctggcctggggtgctggactcagagagggaccggctgatccttatcaacgagaaggaggagctgctgaaggagatgcgcttcatcagcccccgcaagtggacccagggggaggtggagcagctggagatggcccggaagcggctggaaaaggacctgcaggcagcccgggacacccagagcaaggcgctgacggagaggttaaagttaaacagtaagaggaaccagcttgtgagagaactggaggaagccacccggcaggtggcaactctgcactcccagctgaaaagtctctcaagcagcatgcagtccctgtcctcaggcagcagccccggatccctcacgtccagccggggctccctggttgcatccagcctggactcctccacttcagccagcttcactgacctctactatgacccctttgagcagctggactcagagctgcagagcaaggtggagttcctgctcctggagggggccaccggcttccggccctcaggctgcatcaccaccatccacgaggatgaggtggccaagacccagaaggcagagggaggtggccgcctgcaggctctgcgttccctgtctggcaccccaaagtccatgacctccctatccccacgttcctctctctcctccccctccccaccctgttcccctctcatggctgaccccctcctggctggtgatgccttcctcaactccttggagtttgaagacccggagctgagtgccactctttgtgaactgagccttggtaacagcgcccaggaaagataccggctggaggaaccaggaacggagggcaagcagctgggccaagctgtgaatacggcccaggggtgtggcctgaaagtggcctgtgtctcagccgccgtatcggacgagtcagtggctggagacagtggtgtgtacgaggcttccgtgcagagactgggtgcttcagaagctgctgcatttgacagtgacgaatcggaagcagtgggtgcgacccgaattcagattgccctgaagtatgatgagaagaataagcaatttgcaatattaatcatccagctgagtaacctttctgctctgttgcagcaacaagaccagaaagtgaatatccgcgtggctgtccttccttgctctgaaagcacaacctgcctgttccggacccggcctctggacgcctcagacactctagtgttcaatgaggtgttctgggtatccatgtcctatccagcccttcaccagaagaccttaagagtcgatgtctgtaccaccgacaggagccatctggaagagtgcctgggaggcgcccagatcagcctggcggaggtctgccggtctggggagaggtcgactcgctggtacaaccttctcagctacaaatacttgaagaaacagagcagggagctcaagccagtgggagtcatggcccctgcctcagggcctgccagcacggacgctgtgtctgctctgttggaacagacagcagtggagctggagaagaggcaggagggcaggagcagcacacagacactggaagacagctggaggtatgaggagaccagtgagaatgaggcagtagccgaggaagaggaggaggaggtggaggaggaggagggagaagaggatgttttcaccgagaaagcctcacctgatatggatgggtacccagcattaaaggtggacaaagagaccaacacggagaccccggccccatcccccacagtggtgcgacctaaggaccggagagtgggcaccccgtcccaggggccatttcttcgagggagcaccatcatccgctctaagaccttctccccaggaccccagagccagtacgtgtgccggctgaatcggagtgatagtgacagctccactctgtccaaaaagccaccttttgttcgaaactccctggagcgacgcagcgtccggatgaagcggtttgcagaaccagaagaaaccaggagccagaatgtcagaaagaaaaaaggggccaggcgtggtggctcacgcctgtaatcccagcactttgggaggccgaggcaggtggatcacctgaggtcaggagttcgagaccagcctcagcattgagaaactccgtctctactaaaaatacaaaattagctgggcgtggtggtgcatgcctgtaatcccagctactcgggaggctgaggcaggagaattgcttgaacctgggaggcggaggttgcagtgagccgagatcgcgccgttgcactccagctgggcaacaagagtgaaactacatctc

SEQ ID NO: 429791 - DNA, 2437 bp, Homo sapiens
aaatgtctgatgctcagggcagctacaaactggatgaagctcaggctgtcttgagagaaacaaaagccatcaaaaaggctattacctgtggggaaaaggaaaagcaagatctcattaagagccttgccatgttgaaggacggcttccgcactgacagggggtctcactcagacctgtggtccagcagcagctctctggagagttcgagtttcccgctaccgaaacagtacctggatgtgagctcccagacagacatctcgggaagcttcggcatcaacagcaacaatcagttggcagagaaggtcagattgcgccttcgatatgaagaggctaagagaaggatcgccaacctgaagatccagctggccaagcttgacagtgaggcctggcctggggtgctggactcagagagggaccggctgatccttatcaacgagaaggaggagctgctgaaggagatgcgcttcatcagcccccgcaagtggacccagggggaggtggagcagctggagatggcccggaagcggctggaaaaggacctgcaggcagcccgggacacccagagcaaggcgctgacggagaggttaaagttaaacagtaagaggaaccagcttgtgagagaactggaggaagccacccggcaggtggcaactctgcactcccagctgaaaagtctctcaagcagcatgcagtccctgtcctcaggcagcagccccggatccctcacgtccagccggggctccctggttgcatccagcctggactcctccacttcagccagcttcactgacctctactatgacccctttgagcagctggactcagagctgcagagcaaggtggagttcctgctcctggagggggccaccggcttccggccctcaggctgcatcaccaccatccacgaggatgaggtggccaagacccagaaggcagagggaggtggccgcctgcaggctctgcgttccctgtctggcaccccaaagtccatgacctccctatccccacgttcctctctctcctccccctccccaccctgttcccctctcatggctgaccccctcctggctggtgatgccttcctcaactccttggagtttgaagacccggagctgagtgccactctttgtgaactgagccttggtaacagcgcccaggaaagataccggctggaggaaccaggaacggagggcaagcagctgggccaagctgtgaatacggcccaggggtgtggcctgaaagtggcctgtgtctcagccgccgtatcggacgagtcagtggctggagacagtggtgtgtacgaggcttccgtgcagagactgggtgcttcagaagctgctgcatttgacagtgacgaatcggaagcagtgggtgcgacccgaattcagattgccctgaagtatgatgagaagaataagcaatttgcaatattaatcatccagctgagtaacctttctgctctgttgcagcaacaagaccagaaagtgaatatccgcgtggctgtccttccttgctctgaaagcacaacctgcctgttccggacccggcctctggacgcctcagacactctagtgttcaatgaggtgttctgggtatccatgtcctatccagcccttcaccagaagaccttaagagtcgatgtctgtaccaccgacaggagccatctggaagagtgcctgggaggcgcccagatcagcctggcggaggtctgccggtctggggagaggtcgactcgctggtacaaccttctcagctacaaatacttgaagaaacagagcagggagctcaagccagtgggagtcatggcccctgcctcagggcctgccagcacggtgagctgggaccaggtgtgccaccttcccacaaggccgcacccggatgttggaagggaaagcctctcccagaactggaggtgatcaggcgtcatgagaggagaacaatggggtggaggaagtaggagaagaagacagggaaggagagatctccactaaggggcaggcggctccctttctgcaacttgttcccttccacatctgtgtttcctccttctgtcctttgccctacctaataccacttggctaacgaaaaccttaattcatgattttttacaaatgaagtggagaagaaggtaaaaaactgtggaaggaaaaagattaacctttcttgggcccctactttgttcaaggtccatactggaggctttgtataagaggcagctagaaatcatgggaagagaatcagagggctaggtcagtcatatcacctctctgagctttcaatttttaatgtctaatatgagccttaaaaggttgttatgaggatgggcacggagcctcatgcctataatcccagccctttgggaggctgaggcaggaggatctcttgaggccaggaattcaagacaagcctgggcaacatggtgaggccttgtctctac

SEQ ID NO: 429792 - DNA, 2209 bp, Homo sapiens
aaatgtctgatgctcagggcagctacaaactggatgaagctcaggctgtcttgagagaaacaaaagccatcaaaaaggctattacctgtggggaaaaggaaaagcaagatctcattaagagccttgccatgttgaaggacggcttccgcactgacagggggtctcactcagacctgtggtccagcagcagctctctggagagttcgagtttcccgctaccgaaacagtacctggatgtgagctcccagacagacatctcgggaagcttcggcatcaacagcaacaatcagttggcagagaaggtcagattgcgccttcgatatgaagaggctaagagaaggatcgccaacctgaagatccagctggccaagcttgacagtgaggcctggcctggggtgctggactcagagagggaccggctgatccttatcaacgagaaggaggagctgctgaaggagatgcgcttcatcagcccccgcaagtggacccagggggaggtggagcagctggagatggcccggaagcggctggaaaaggacctgcaggcagcccgggacacccagagcaaggcgctgacggagaggttaaagttaaacagtaagaggaaccagcttgtgagagaactggaggaagccacccggcaggtggcaactctgcactcccagctgaaaagtctctcaagcagcatgcagtccctgtcctcaggcagcagccccggatccctcacgtccagccggggctccctggttgcatccagcctggactcctccacttcagccagcttcactgacctctactatgacccctttgagcagctggactcagagctgcagagcaaggtggagttcctgctcctggagggggccaccggcttccggccctcaggctgcatcaccaccatccacgaggatgaggtggccaagacccagaaggcagagggaggtggccgcctgcaggctctgcgttccctgtctggcaccccaaagtccatgacctccctatccccacgttcctctctctcctccccctccccaccctgttcccctctcatggctgaccccctcctggctggtgatgccttcctcaactccttggagtttgaagacccggagctgagtgccactctttgtgaactgagccttggtaacagcgcccaggaaagataccggctggaggaaccaggaacggagggcaagcagctgggccaagctgtgaatacggcccaggggtgtggcctgaaagtggcctgtgtctcagccgccgtatcggacgagtcagtggctggagacagtggtgtgtacgaggcttccgtgcagagactgggtgcttcagaagctgctgcatttgacagtgacgaatcggaagcagtgggtgcgacccgaattcagattgccctgaagtatgatgagaagaataagcaatttgcaatattaatcatccagctgagtaacctttctgctctgttgcagcaacaagaccagaaagtgaatatccgcgtggctgtccttccttgctctgaaagcacaacctgcctgttccggacccggcctctggacgcctcagacactctagtgttcaatgaggtgttctgggtatccatgtcctatccagcccttcaccagaagaccttaagagtcgatgtctgtaccaccgacaggagccatctggaagagtgcctgggaggcgcccagatcagcctggcggaggtctgccggtctggggagaggtcgactcgctggtacaaccttctcagctacaaatacttgaagaaacagagcagggagctcaagccagtgggagtcatggcccctgcctcagggcctgccagcacggacgctgtgtctgctctgttggaacagacagcagtggagctggagaagaggcaggagggcaggagcagcacacagacactggaagacagctggtgagtgagcccgcccttgggccccaggagctgccctgcctggacctaggcccagcaatgagatcccccaatgccagtgcaactaagagaagggttccactgggaaggctgagaacccctctcctcatgggttctctacaggcaaaaaggcaatgtaacctagtacgatggttcccagaattcctttcgaatttgccatttcgtttcccatgaatcacctatgctagttcacacctaatgttattctttatcttgatatagtgacatttattttgctaaaaaaaa

SEQ ID NO: 429793 - DNA, 183 bp, Homo sapiens
cttgtgagagaactggaggaagccacccggcaggtggcaactctgcactcccagctgaaaaggtgagtggtgggcggtgaggccactgctcccctgggcatggccagacatgggtgtccccagtgtcccagcccaggctctacccttcacttgtcctccgtggcttgagagtggatgtttaga

SEQ ID NO: 429794 - DNA, 742 bp, Homo sapiens
gatgaatccacatctctattgtaccaggaacagggcaaggacattgccttgttcatgtctgcaccccattcctgcagagcctacttcattgttggcacatggtaggcacccacatgtgtttgtttagaaaaaaaataggttccttgagatgacaagctgatcaaaggaagacagtaactgtcaaagattgctctgagatgtctgtttcttcatggcatctcctgttccctcagtgccattaggcacaccagtcatgcttgctttcttggcccccagatcgccaacctgaagatccagctggccaagcttgacagtgaggcctggcctggggtgctggactcagagagggaccggctgatccttatcaacgagaaggaggagctgctgaaggagatgcgcttcatcagcccccgcaagtggacccagggggaggtggagcagctggagatggcccggaagcggctggaaaaggacctgcaggcagcccgggacacccagagcaaggcgctgacggagaggtggggctggggccccagggtgtgtaggacccttctctcactggcagtctgtcctcagcccccagatgggggaagaatgagggggctccgggcccctgggctccaccctgagcacgctcagttcagagatctctcaggttgccgacataggaaatcaggaaagatggtttgccatccagtgcgccagctaccctggaattttgcatggtgaatcatgctaccaa

SEQ ID NO: 429795 - DNA, 786 bp, Homo sapiens
cacaggtagtagggaagaatgtactcgtgttaattgtgtatgatcgtttccatctccctggattcattggcctgcatgatgttatctttactcagacggctcctctaaccatgtttacaactatcaaccctgtgatcatccacggcagccttgtgacagttcgtgcccttgtgtgatagcacaaaatttttgtgaaaagttttgtcaatgtagttcagagtgtaagtatttgttgctttgatgcaattgcatgagaactaaataggtctttggttagcaatttaaaaaatcaaaaataagaacatgggagcactcccttgtttacttgacgaaactcatcaatttgacaagtatttattgagccccatacctggccctgtgccagtggccagtcagtcgcctgggtgttgtgtgtctgtgtgtgtgaggcaggcaaagttgtattaaaggaacctgaattttatttttttcttctttgatcatttaaattaagttgtattaaagttggcacagattgtaagaggaatctagaaggagctacccaaataatttttgggcaccagaaatcgtcagagttaggagggttttagtcttcagattaaaggaatgtagcataaacatagtagatttttataattgtttaatgagactgcacatgaagcttgggtattaagggagtgtttagaactaggggctattggaatggtcaaggaccatggatattgttccatccagaccctttattcacaccgactttaaatatatacactatttaacaaaaaaaaa

SEQ ID NO: 429796 - DNA, 560 bp, Homo sapiens
tgagttttagatgcactgtcatttcagctatgtgataggttccacagattttttttttttaaatgatggagaacaggtaaggggttaggaaaatatgaggtagaaaagttgtttttacgggtactctcttatttttaccatttcccctctttgaaccaagccactcctacctaggaactaaatgggtatatattgcctgttggattttggacagaagattcattgaatggcacctgcagaaggtatcctatttttaagcaatttggtttttgtagaatgaagtataaaactgttggctgctgtcaaacttctcccttctatttccactaaaaaaatggaattcttgagcacttgttttataatattctttacaaggcagaattttgtttggctcatctaaaatgtttctgtggtctctataaaccatgctcttaccattgttttatactttgagactggattattgtacttcataatgcaagatgtaaccctcacagtcttattcctgaagttcctttcatgtcttcctgtggctgtgtatccttcacaggaaaaaaaaa

SEQ ID NO: 429797 - DNA, 3161 bp, Homo sapiens
  misc_feature (2821)..(2821): n is a, c, g, or t
  misc_feature (2824)..(2824): n is a, c, g, or t
  misc_feature (2856)..(2856): n is a, c, g, or t
  misc_feature (2875)..(2875): n is a, c, g, or t
  misc_feature (2878)..(2879): n is a, c, g, or t
  misc_feature (2910)..(2910): n is a, c, g, or t
  misc_feature (2921)..(2921): n is a, c, g, or t
  misc_feature (2956)..(2956): n is a, c, g, or t
ggagtagcttcgcctctgacgtttccccacgacgcaccccgaaatccccctgagctccggcggtcgcgggctgccctcgccgcctggtctggctttatgctaagtttgagggaagagtcgagctgctctgctctctattgattgtgtttctggagggcgtcctgttgaattcccacttcattgtgtacatccccttccgttccccccaaaaatctgtgccacagggttactttttgaaagcgggaggaatcgagaagcacgatcttttggaaaacttggtgaacgcctaaataatcatgggccagactgggaagaaatctgagaagggaccagtttgttggcggaagcgtgtaaaatcagagtacatgcgactgagacagctcaagaggttcagacgagctgatgaagtaaagagtatgtttagttccaatcgtcagaaaattttggaaagaacggaaatcttaaaccaagaatggaaacagcgaaggatacagcctgtgcacatcctgacttctgtgagctcattgcgcgggactagggagtgttcggtgaccagtgacttggattttccaacacaagtcatcccattaaagactctgaatgcagttgcttcagtacccataatgtattcttggtctcccctacagcagaattttatggtggaagatgaaactgttttacataacattccttatatgggagatgaagttttagatcaggatggtactttcattgaagaactaataaaaaattatgatgggaaagtacacggggatagagaatgtgggtttataaatgatgaaatttttgtggagttggtgaatgcccttggtcaatataatgatgatgacgatgatgatgatggagacgatcctgaagaaagagaagaaaagcagaaagatctggaggatcaccgagatgataaagaaagccgcccacctcggaaatttccttctgataaaatttttgaagccatttcctcaatgtttccagataagggcacagcagaagaactaaaggaaaaatataaagaactcaccgaacagcagctcccaggcgcacttcctcctgaatgtacccccaacatagatggaccaaatgctaaatctgttcagagagagcaaagcttacactcctttcatacgcttttctgtaggcgatgttttaaatatgactgcttcctacatccttttcatgcaacacccaacacttataagcggaagaacacagaaacagctctagacaacaaaccttgtggaccacagtgttaccagcatttggagggagcaaaggagtttgctgctgctctcaccgctgagcggataaagaccccaccaaaacgtccaggaggccgcagaagaggacggcttcccaataacagtagcaggcccagcacccccaccattaatgtgctggaatcaaaggatacagacagtgatagggaagcagggactgaaacggggggagagaacaatgataaagaagaagaagagaagaaagatgaaacttcgagctcctctgaagcaaattctcggtgtcaaacaccaataaagatgaagccaaatattgaacctcctgagaatgtggagtggagtggtgctgaagcctcaatgtttagagtcctcattggcacttactatgacaatttctgtgccattgctaggttaattgggaccaaaacatgtagacaggtgtatgagtttagagtcaaagaatctagcatcatagctccagctcccgctgaggatgtggatactcctccaaggaaaaagaagaggaaacaccggttgtgggctgcacactgcagaaagatacagctgaaaaaggacggctcctctaaccatgtttacaactatcaaccctgtgatcatccacggcagccttgtgacagttcgtgcccttgtgtgatagcacaaaatttttgtgaaaagttttgtcaatgtagttcagagtgtcaaaaccgctttccgggatgccgctgcaaagcacagtgcaacaccaagcagtgcccgtgctacctggctgtccgagagtgtgaccctgacctctgtcttacttgtggagccgctgaccattgggacagtaaaaatgtgtcctgcaagaactgcagtattcagcggggctccaaaaagcatctattgctggcaccatctgacgtggcaggctgggggatttttatcaaagatcctgtgcagaaaaatgaattcatctcagaatactgtggagagattatttctcaagatgaagctgacagaagagggaaagtgtatgataaatacatgtgcagctttctgttcaacttgaacaatgattttgtggtggatgcaacccgcaagggtaacaaaattcgttttgcaaatcattcggtaaatccaaactgctatgcaaaagttatgatggttaacggtgatcacaggataggtatttttgccaagagagccatccagactggcgaagagctgttttttgattacagatacagccaggctgatgccctgaagtatgtcggcatcgaaagagaaatggaaatcccttgacatctgctacctcctccccctcctctgaaacagctgccttagcttcaggaacctcgagtactgtgggcaatttagaaaaagaacatgcagtttgaaattctgaatttgcaaagtactgtaagaataatttatagtaatgagtttaaaaatcaactttttattgccttctcaccagctgcaaagtgttttgtaccagtgaatttttgcaataatgcagtatggtacatttttcaactttgaataaagaatacttgaacttgtccttgttgaaaaaaaaaaaaacnccncccccccccaaaaaaacaaaaacaaaaaaacnaaaaaaaaaaaacccctcnaanncctcctcggctccgctcccttttgccccccncccttctggcnccgccgccgccatccctgcggtcttagatcaaagntttctttttgggtggggcttttatgtgttagttggccaaatttccggcgcgggggtgtgggaaaaacttaggggggaccctttttacacccctctggagaaggaaaccctttcggccccccccttttttatggggggggggacacaccaactctgcccccctcggggagtgttttttccaaggtttcgccacccgggtattggtg

SEQ ID NO: 429798 - DNA, 3005 bp, Homo sapiens
  misc_feature (2)..(2): n is a, c, g, or t
  misc_feature (32)..(32): n is a, c, g, or t
  misc_feature (100)..(104): n is a, c, g, or t
  misc_feature (2665)..(2665): n is a, c, g, or t
  misc_feature (2668)..(2668): n is a, c, g, or t
  misc_feature (2700)..(2700): n is a, c, g, or t
  misc_feature (2719)..(2719): n is a, c, g, or t
  misc_feature (2722)..(2723): n is a, c, g, or t
  misc_feature (2754)..(2754): n is a, c, g, or t
  misc_feature (2765)..(2765): n is a, c, g, or t
  misc_feature (2800)..(2800): n is a, c, g, or t
gnaaataaaagcgatggcgattgggctgccgnttttggcgctcggtccggtcgcgtccgacacccggtgggactcagaaggcagtggagccccggtgttnnnnnaacaacgcgagtcggcgcgcgggacgaagaataatcatgggccagactgggaagaaatctgagaagggaccagtttgttggcggaagcgtgtaaaatcagagtacatgcgactgagacagctcaagaggttcagacgagctgatgaagtaaagagtatgtttagttccaatcgtcagaaaattttggaaagaacggaaatcttaaaccaagaatggaaacagcgaaggatacagcctgtgcacatcctgacttctgtgagctcattgcgcgggactagggagtgttcggtgaccagtgacttggattttccaacacaagtcatcccattaaagactctgaatgcagttgcttcagtacccataatgtattcttggtctcccctacagcagaattttatggtggaagatgaaactgttttacataacattccttatatgggagatgaagttttagatcaggatggtactttcattgaagaactaataaaaaattatgatgggaaagtacacggggatagagaatgtgggtttataaatgatgaaatttttgtggagttggtgaatgcccttggtcaatataatgatgatgacgatgatgatgatggagacgatcctgaagaaagagaagaaaagcagaaagatctggaggatcaccgagatgataaagaaagccgcccacctcggaaatttccttctgataaaatttttgaagccatttcctcaatgtttccagataagggcacagcagaagaactaaaggaaaaatataaagaactcaccgaacagcagctcccaggcgcacttcctcctgaatgtacccccaacatagatggaccaaatgctaaatctgttcagagagagcaaagcttacactcctttcatacgcttttctgtaggcgatgttttaaatatgactgcttcctacatccttttcatgcaacacccaacacttataagcggaagaacacagaaacagctctagacaacaaaccttgtggaccacagtgttaccagcatttggagggagcaaaggagtttgctgctgctctcaccgctgagcggataaagaccccaccaaaacgtccaggaggccgcagaagaggacggcttcccaataacagtagcaggcccagcacccccaccattaatgtgctggaatcaaaggatacagacagtgatagggaagcagggactgaaacggggggagagaacaatgataaagaagaagaagagaagaaagatgaaacttcgagctcctctgaagcaaattctcggtgtcaaacaccaataaagatgaagccaaatattgaacctcctgagaatgtggagtggagtggtgctgaagcctcaatgtttagagtcctcattggcacttactatgacaatttctgtgccattgctaggttaattgggaccaaaacatgtagacaggtgtatgagtttagagtcaaagaatctagcatcatagctccagctcccgctgaggatgtggatactcctccaaggaaaaagaagaggaaacaccggttgtgggctgcacactgcagaaagatacagctgaaaaaggacggctcctctaaccatgtttacaactatcaaccctgtgatcatccacggcagccttgtgacagttcgtgcccttgtgtgatagcacaaaatttttgtgaaaagttttgtcaatgtagttcagagtgtcaaaaccgctttccgggatgccgctgcaaagcacagtgcaacaccaagcagtgcccgtgctacctggctgtccgagagtgtgaccctgacctctgtcttacttgtggagccgctgaccattgggacagtaaaaatgtgtcctgcaagaactgcagtattcagcggggctccaaaaagcatctattgctggcaccatctgacgtggcaggctgggggatttttatcaaagatcctgtgcagaaaaatgaattcatctcagaatactgtggagagattatttctcaagatgaagctgacagaagagggaaagtgtatgataaatacatgtgcagctttctgttcaacttgaacaatgattttgtggtggatgcaacccgcaagggtaacaaaattcgttttgcaaatcattcggtaaatccaaactgctatgcaaaagttatgatggttaacggtgatcacaggataggtatttttgccaagagagccatccagactggcgaagagctgttttttgattacagatacagccaggctgatgccctgaagtatgtcggcatcgaaagagaaatggaaatcccttgacatctgctacctcctccccctcctctgaaacagctgccttagcttcaggaacctcgagtactgtgggcaatttagaaaaagaacatgcagtttgaaattctgaatttgcaaagtactgtaagaataatttatagtaatgagtttaaaaatcaactttttattgccttctcaccagctgcaaagtgttttgtaccagtgaatttttgcaataatgcagtatggtacatttttcaactttgaataaagaatacttgaacttgtccttgttgaaaaaaaaaaaaacnccncccccccccaaaaaaacaaaaacaaaaaaacnaaaaaaaaaaaacccctcnaanncctcctcggctccgctcccttttgccccccncccttctggcnccgccgccgccatccctgcggtcttagatcaaagntttctttttgggtggggcttttatgtgttagttggccaaatttccggcgcgggggtgtgggaaaaacttaggggggaccctttttacacccctctggagaaggaaaccctttcggccccccccttttttatggggggggggacacaccaactctgcccccctcggggagtgttttttccaaggtttcgccacccgggtattggtg

SEQ ID NO: 429799 - DNA, 2915 bp, Homo sapiens
  misc_feature (2)..(2): n is a, c, g, or t
  misc_feature (32)..(32): n is a, c, g, or t
  misc_feature (2575)..(2575): n is a, c, g, or t
  misc_feature (2578)..(2578): n is a, c, g, or t
  misc_feature (2610)..(2610): n is a, c, g, or t
  misc_feature (2629)..(2629): n is a, c, g, or t
  misc_feature (2632)..(2633): n is a, c, g, or t
  misc_feature (2664)..(2664): n is a, c, g, or t
  misc_feature (2675)..(2675): n is a, c, g, or t
  misc_feature (2710)..(2710): n is a, c, g, or t
gnaaataaaagcgatggcgattgggctgccgnttttggcgctcggtccggtcgcgtccgacacccggtgggactcagaaggcagtggagccccggcggcggcggcggcggcgcgcgggggcgacgcgcgggaacaacgcgagtcggcgcgcgggacgaagaataatcatgggccagactgggaagaaatctgagaagggaccagtttgttggcggaagcgtgtaaaatcagagtacatgcgactgagacagctcaagaggttcagacgagctgatgaagtaaagagtatgtttagttccaatcgtcagaaaattttggaaagaacggaaatcttaaaccaagaatggaaacagcgaaggatacagcctgtgcacatcctgacttctgtgagctcattgcgcgggactagggaggtggaagatgaaactgttttacataacattccttatatgggagatgaagttttagatcaggatggtactttcattgaagaactaataaaaaattatgatgggaaagtacacggggatagagaatgtgggtttataaatgatgaaatttttgtggagttggtgaatgcccttggtcaatataatgatgatgacgatgatgatgatggagacgatcctgaagaaagagaagaaaagcagaaagatctggaggatcaccgagatgataaagaaagccgcccacctcggaaatttccttctgataaaatttttgaagccatttcctcaatgtttccagataagggcacagcagaagaactaaaggaaaaatataaagaactcaccgaacagcagctcccaggcgcacttcctcctgaatgtacccccaacatagatggaccaaatgctaaatctgttcagagagagcaaagcttacactcctttcatacgcttttctgtaggcgatgttttaaatatgactgcttcctacatccttttcatgcaacacccaacacttataagcggaagaacacagaaacagctctagacaacaaaccttgtggaccacagtgttaccagcatttggagggagcaaaggagtttgctgctgctctcaccgctgagcggataaagaccccaccaaaacgtccaggaggccgcagaagaggacggcttcccaataacagtagcaggcccagcacccccaccattaatgtgctggaatcaaaggatacagacagtgatagggaagcagggactgaaacggggggagagaacaatgataaagaagaagaagagaagaaagatgaaacttcgagctcctctgaagcaaattctcggtgtcaaacaccaataaagatgaagccaaatattgaacctcctgagaatgtggagtggagtggtgctgaagcctcaatgtttagagtcctcattggcacttactatgacaatttctgtgccattgctaggttaattgggaccaaaacatgtagacaggtgtatgagtttagagtcaaagaatctagcatcatagctccagctcccgctgaggatgtggatactcctccaaggaaaaagaagaggaaacaccggttgtgggctgcacactgcagaaagatacagctgaaaaaggacggctcctctaaccatgtttacaactatcaaccctgtgatcatccacggcagccttgtgacagttcgtgcccttgtgtgatagcacaaaatttttgtgaaaagttttgtcaatgtagttcagagtgtcaaaaccgctttccgggatgccgctgcaaagcacagtgcaacaccaagcagtgcccgtgctacctggctgtccgagagtgtgaccctgacctctgtcttacttgtggagccgctgaccattgggacagtaaaaatgtgtcctgcaagaactgcagtattcagcggggctccaaaaagcatctattgctggcaccatctgacgtggcaggctgggggatttttatcaaagatcctgtgcagaaaaatgaattcatctcagaatactgtggagagattatttctcaagatgaagctgacagaagagggaaagtgtatgataaatacatgtgcagctttctgttcaacttgaacaatgattttgtggtggatgcaacccgcaagggtaacaaaattcgttttgcaaatcattcggtaaatccaaactgctatgcaaaagttatgatggttaacggtgatcacaggataggtatttttgccaagagagccatccagactggcgaagagctgttttttgattacagatacagccaggctgatgccctgaagtatgtcggcatcgaaagagaaatggaaatcccttgacatctgctacctcctccccctcctctgaaacagctgccttagcttcaggaacctcgagtactgtgggcaatttagaaaaagaacatgcagtttgaaattctgaatttgcaaagtactgtaagaataatttatagtaatgagtttaaaaatcaactttttattgccttctcaccagctgcaaagtgttttgtaccagtgaatttttgcaataatgcagtatggtacatttttcaactttgaataaagaatacttgaacttgtccttgttgaaaaaaaaaaaaacnccncccccccccaaaaaaacaaaaacaaaaaaacnaaaaaaaaaaaacccctcnaanncctcctcggctccgctcccttttgccccccncccttctggcnccgccgccgccatccctgcggtcttagatcaaagntttctttttgggtggggcttttatgtgttagttggccaaatttccggcgcgggggtgtgggaaaaacttaggggggaccctttttacacccctctggagaaggaaaccctttcggccccccccttttttatggggggggggacacaccaactctgcccccctcggggagtgttttttccaaggtttcgccacccgggtattggtg

SEQ ID NO: 429800 - DNA, 2797 bp, Homo sapiens
  misc_feature (2457)..(2457): n is a, c, g, or t
  misc_feature (2460)..(2460): n is a, c, g, or t
  misc_feature (2492)..(2492): n is a, c, g, or t
  misc_feature (2511)..(2511): n is a, c, g, or t
  misc_feature (2514)..(2515): n is a, c, g, or t
  misc_feature (2546)..(2546): n is a, c, g, or t
  misc_feature (2557)..(2557): n is a, c, g, or t
  misc_feature (2592)..(2592): n is a, c, g, or t
ccattcacctgctcttccctctacgattttccataacacagtttttacttggaaccagccttctgccaagagtctcagtttggttgtgtactcctacaactactatttttggcttgacttccctctccagctcccagtggtccagccacacagtcgcctattgtaccagctggttgattgttcggtgaccagtgacttggattttccaacacaagtcatcccattaaagactctgaatgcagttgcttcagtacccataatgtattcttggtctcccctacagcagaattttatggtggaagatgaaactgttttacataacattccttatatgggagatgaagttttagatcaggatggtactttcattgaagaactaataaaaaattatgatgggaaagtacacggggatagagaatgtgggtttataaatgatgaaatttttgtggagttggtgaatgcccttggtcaatataatgatgatgacgatgatgatgatggagacgatcctgaagaaagagaagaaaagcagaaagatctggaggatcaccgagatgataaagaaagccgcccacctcggaaatttccttctgataaaatttttgaagccatttcctcaatgtttccagataagggcacagcagaagaactaaaggaaaaatataaagaactcaccgaacagcagctcccaggcgcacttcctcctgaatgtacccccaacatagatggaccaaatgctaaatctgttcagagagagcaaagcttacactcctttcatacgcttttctgtaggcgatgttttaaatatgactgcttcctacatccttttcatgcaacacccaacacttataagcggaagaacacagaaacagctctagacaacaaaccttgtggaccacagtgttaccagcatttggagggagcaaaggagtttgctgctgctctcaccgctgagcggataaagaccccaccaaaacgtccaggaggccgcagaagaggacggcttcccaataacagtagcaggcccagcacccccaccattaatgtgctggaatcaaaggatacagacagtgatagggaagcagggactgaaacggggggagagaacaatgataaagaagaagaagagaagaaagatgaaacttcgagctcctctgaagcaaattctcggtgtcaaacaccaataaagatgaagccaaatattgaacctcctgagaatgtggagtggagtggtgctgaagcctcaatgtttagagtcctcattggcacttactatgacaatttctgtgccattgctaggttaattgggaccaaaacatgtagacaggtgtatgagtttagagtcaaagaatctagcatcatagctccagctcccgctgaggatgtggatactcctccaaggaaaaagaagaggaaacaccggttgtgggctgcacactgcagaaagatacagctgaaaaaggacggctcctctaaccatgtttacaactatcaaccctgtgatcatccacggcagccttgtgacagttcgtgcccttgtgtgatagcacaaaatttttgtgaaaagttttgtcaatgtagttcagagtgtcaaaaccgctttccgggatgccgctgcaaagcacagtgcaacaccaagcagtgcccgtgctacctggctgtccgagagtgtgaccctgacctctgtcttacttgtggagccgctgaccattgggacagtaaaaatgtgtcctgcaagaactgcagtattcagcggggctccaaaaagcatctattgctggcaccatctgacgtggcaggctgggggatttttatcaaagatcctgtgcagaaaaatgaattcatctcagaatactgtggagagattatttctcaagatgaagctgacagaagagggaaagtgtatgataaatacatgtgcagctttctgttcaacttgaacaatgattttgtggtggatgcaacccgcaagggtaacaaaattcgttttgcaaatcattcggtaaatccaaactgctatgcaaaagttatgatggttaacggtgatcacaggataggtatttttgccaagagagccatccagactggcgaagagctgttttttgattacagatacagccaggctgatgccctgaagtatgtcggcatcgaaagagaaatggaaatcccttgacatctgctacctcctccccctcctctgaaacagctgccttagcttcaggaacctcgagtactgtgggcaatttagaaaaagaacatgcagtttgaaattctgaatttgcaaagtactgtaagaataatttatagtaatgagtttaaaaatcaactttttattgccttctcaccagctgcaaagtgttttgtaccagtgaatttttgcaataatgcagtatggtacatttttcaactttgaataaagaatacttgaacttgtccttgttgaaaaaaaaaaaaacnccncccccccccaaaaaaacaaaaacaaaaaaacnaaaaaaaaaaaacccctcnaanncctcctcggctccgctcccttttgccccccncccttctggcnccgccgccgccatccctgcggtcttagatcaaagntttctttttgggtggggcttttatgtgttagttggccaaatttccggcgcgggggtgtgggaaaaacttaggggggaccctttttacacccctctggagaaggaaaccctttcggccccccccttttttatggggggggggacacaccaactctgcccccctcggggagtgttttttccaaggtttcgccacccgggtattggtg

SEQ ID NO: 429801 - DNA, 3475 bp, Homo sapiens
  misc_feature (2)..(2): n is a, c, g, or t
  misc_feature (32)..(32): n is a, c, g, or t
  misc_feature (3135)..(3135): n is a, c, g, or t
  misc_feature (3138)..(3138): n is a, c, g, or t
  misc_feature (3170)..(3170): n is a, c, g, or t
  misc_feature (3189)..(3189): n is a, c, g, or t
  misc_feature (3192)..(3193): n is a, c, g, or t
  misc_feature (3224)..(3224): n is a, c, g, or t
  misc_feature (3235)..(3235): n is a, c, g, or t
  misc_feature (3270)..(3270): n is a, c, g, or t
gnaaataaaagcgatggcgattgggctgccgnttttggcgctcggtccggtcgcgtccgacacccggtgggactcagaaggcagtggagccccggcggcggcggcggcggcgcgcgggggcgacgcgcgggaacaacgcgagtcggcgcgcgggacgaagaataatcatgggccagactgggaagaaatctgagaagggaccagtttgttggcggaagcgtgtaaaatcagagtacatgcgactgagacagctcaagaggttcagacgagctgatgaagtaaagagtatgtttagttccaatcgtcagaaaattttggaaagaacggaaatcttaaaccaagaatggaaacagcgaaggatacagcctgtgcacatcctgacttctgtgagctcattgcgcgggactagggagtgttcggtgaccagtgacttggattttccaacacaagtcatcccattaaagactctgaatgcagttgcttcagtacccataatgtattcttggtctcccctacagcagaattttatggtggaagatgaaactgttttacataacattccttatatgggagatgaagttttagatcaggatggtactttcattgaagaactaataaaaaattatgatgggaaagtacacggggatagagaatgtgggtttataaatgatgaaatttttgtggagttggtgaatgcccttggtcaatataatgatgatgacgatgatgatgatggagacgatcctgaagaaagagaagaaaagcagaaagatctggaggatcaccgagatgataaagaaagccgcccacctcggaaatttccttctgataaaatttttgaagccatttcctcaatgtttccagataagggcacagcagaagaactaaaggaaaaatataaagaactcaccgaacagcagctcccaggcgcacttcctcctgaatgtacccccaacatagatggaccaaatgctaaatctgttcagagagagcaaagcttacactcctttcatacgcttttctgtaggcgatgttttaaatatgactgcttcctacatccttttcatgcaacacccaacacttataagcggaagaacacagaaacagctctagacaacaaaccttgtggaccacagtgttaccagcatttggagggagcaaaggagtttgctgctgctctcaccgctgagcggataaagaccccaccaaaacgtccaggaggccgcagaagaggacggcttcccaataacagtagcaggcccagcacccccaccattaatgtgctggaatcaaaggatacagacagtgatagggaagcagggactgaaacggggggagagaacaatgataaagaagaagaagagaagaaagatgaaacttcgagctcctctgaagcaaattctcggtgtcaaacaccaataaagatgaagccaaatattgaacctcctgagaatgtggagtggagtggtgctgaagcctcaatgtttagagtcctcattggcacttactatgacaatttctgtgccattgctaggttaattgggaccaaaacatgtagacaggtaagatatccgataaaaatgttgttaaaagagcttcaaacatagagataaaactgtactcgttgtccaaacaaagaaaattcttggttattactaagctcctattcatctcctaaaaataatttttttttcttcccaagagggaattgaatgaaaattattctccaggtatgttacagaatttccccaatgtagacttttaaggttagatagcagtagcttttaaaagctagtaagaattgaaatttagcatcacagttcttgaccagaatataattacagctacccctaatgtgagggtagggacagcgatgtgtgttatatccccagcatctagcagtgtcacagaagagacaaagacatttttctggtatgcatgagtataagaatggtttgcctaaataagactgtcctcatggctctgtgactgtgcctcttgtcaggtgtatgagtttagagtcaaagaatctagcatcatagctccagctcccgctgaggatgtggatactcctccaaggaaaaagaagaggaaacaccggttgtgggctgcacactgcagaaagatacagctgaaaaaggacggctcctctaaccatgtttacaactatcaaccctgtgatcatccacggcagccttgtgacagttcgtgcccttgtgtgatagcacaaaatttttgtgaaaagttttgtcaatgtagttcagagtgtcaaaaccgctttccgggatgccgctgcaaagcacagtgcaacaccaagcagtgcccgtgctacctggctgtccgagagtgtgaccctgacctctgtcttacttgtggagccgctgaccattgggacagtaaaaatgtgtcctgcaagaactgcagtattcagcggggctccaaaaagcatctattgctggcaccatctgacgtggcaggctgggggatttttatcaaagatcctgtgcagaaaaatgaattcatctcagaatactgtggagagattatttctcaagatgaagctgacagaagagggaaagtgtatgataaatacatgtgcagctttctgttcaacttgaacaatgattttgtggtggatgcaacccgcaagggtaacaaaattcgttttgcaaatcattcggtaaatccaaactgctatgcaaaagttatgatggttaacggtgatcacaggataggtatttttgccaagagagccatccagactggcgaagagctgttttttgattacagatacagccaggctgatgccctgaagtatgtcggcatcgaaagagaaatggaaatcccttgacatctgctacctcctccccctcctctgaaacagctgccttagcttcaggaacctcgagtactgtgggcaatttagaaaaagaacatgcagtttgaaattctgaatttgcaaagtactgtaagaataatttatagtaatgagtttaaaaatcaactttttattgccttctcaccagctgcaaagtgttttgtaccagtgaatttttgcaataatgcagtatggtacatttttcaactttgaataaagaatacttgaacttgtccttgttgaaaaaaaaaaaaacnccncccccccccaaaaaaacaaaaacaaaaaaacnaaaaaaaaaaaacccctcnaanncctcctcggctccgctcccttttgccccccncccttctggcnccgccgccgccatccctgcggtcttagatcaaagntttctttttgggtggggcttttatgtgttagttggccaaatttccggcgcgggggtgtgggaaaaacttaggggggaccctttttacacccctctggagaaggaaaccctttcggccccccccttttttatggggggggggacacaccaactctgcccccctcggggagtgttttttccaaggtttcgccacccgggtattggtg

SEQ ID NO: 429802 - DNA, 2127 bp, Homo sapiens
  misc_feature (1787)..(1787): n is a, c, g, or t
  misc_feature (1790)..(1790): n is a, c, g, or t
  misc_feature (1822)..(1822): n is a, c, g, or t
  misc_feature (1841)..(1841): n is a, c, g, or t
  misc_feature (1844)..(1845): n is a, c, g, or t
  misc_feature (1876)..(1876): n is a, c, g, or t
  misc_feature (1887)..(1887): n is a, c, g, or t
  misc_feature (1922)..(1922): n is a, c, g, or t
agaactgtcttgcctgatttttgtaccattctaggaatatatagaacccatatttctctttctgaaattttcagactatcaaaagcatatcaaaacaagtatattagacatgcaaatgattatttgtgataaatggataatgtgatacattttttgactaacctggcttatatagtatttttttttctcttccatcaaaatgagttttagaactttgccctgatgttgacatttttcatttcgtaggagggagcaaaggagtttgctgctgctctcaccgctgagcggataaagaccccaccaaaacgtccaggaggccgcagaagaggacggcttcccaataacagtagcaggcccagcacccccaccattaatgtgctggaatcaaaggatacagacagtgatagggaagcagggactgaaacggggggagagaacaatgataaagaagaagaagagaagaaagatgaaacttcgagctcctctgaagcaaattctcggtgtcaaacaccaataaagatgaagccaaatattgaacctcctgagaatgtggagtggagtggtgctgaagcctcaatgtttagagtcctcattggcacttactatgacaatttctgtgccattgctaggttaattgggaccaaaacatgtagacaggtgtatgagtttagagtcaaagaatctagcatcatagctccagctcccgctgaggatgtggatactcctccaaggaaaaagaagaggaaacaccggttgtgggctgcacactgcagaaagatacagctgaaaaaggacggctcctctaaccatgtttacaactatcaaccctgtgatcatccacggcagccttgtgacagttcgtgcccttgtgtgatagcacaaaatttttgtgaaaagttttgtcaatgtagttcagagtgtcaaaaccgctttccgggatgccgctgcaaagcacagtgcaacaccaagcagtgcccgtgctacctggctgtccgagagtgtgaccctgacctctgtcttacttgtggagccgctgaccattgggacagtaaaaatgtgtcctgcaagaactgcagtattcagcggggctccaaaaagcatctattgctggcaccatctgacgtggcaggctgggggatttttatcaaagatcctgtgcagaaaaatgaattcatctcagaatactgtggagagattatttctcaagatgaagctgacagaagagggaaagtgtatgataaatacatgtgcagctttctgttcaacttgaacaatgattttgtggtggatgcaacccgcaagggtaacaaaattcgttttgcaaatcattcggtaaatccaaactgctatgcaaaagttatgatggttaacggtgatcacaggataggtatttttgccaagagagccatccagactggcgaagagctgttttttgattacagatacagccaggctgatgccctgaagtatgtcggcatcgaaagagaaatggaaatcccttgacatctgctacctcctccccctcctctgaaacagctgccttagcttcaggaacctcgagtactgtgggcaatttagaaaaagaacatgcagtttgaaattctgaatttgcaaagtactgtaagaataatttatagtaatgagtttaaaaatcaactttttattgccttctcaccagctgcaaagtgttttgtaccagtgaatttttgcaataatgcagtatggtacatttttcaactttgaataaagaatacttgaacttgtccttgttgaaaaaaaaaaaaacnccncccccccccaaaaaaacaaaaacaaaaaaacnaaaaaaaaaaaacccctcnaanncctcctcggctccgctcccttttgccccccncccttctggcnccgccgccgccatccctgcggtcttagatcaaagntttctttttgggtggggcttttatgtgttagttggccaaatttccggcgcgggggtgtgggaaaaacttaggggggaccctttttacacccctctggagaaggaaaccctttcggccccccccttttttatggggggggggacacaccaactctgcccccctcggggagtgttttttccaaggtttcgccacccgggtattggtg

SEQ ID NO: 429803 - DNA, 2515 bp, Homo sapiens
  misc_feature (2175)..(2175): n is a, c, g, or t
  misc_feature (2178)..(2178): n is a, c, g, or t
  misc_feature (2210)..(2210): n is a, c, g, or t
  misc_feature (2229)..(2229): n is a, c, g, or t
  misc_feature (2232)..(2233): n is a, c, g, or t
  misc_feature (2264)..(2264): n is a, c, g, or t
  misc_feature (2275)..(2275): n is a, c, g, or t
  misc_feature (2310)..(2310): n is a, c, g, or t
aggattaaggatgtataatgcattgaataattttcttagttggttagtttcagtataaagaccagagttatctcaagaatgtgtagctgtgttgtttctgtttcctgcctgcacccgtaccctagcttgtggtgtttgccctgcttggttgtttgaaagctgatgatgcactttattctcattctttgtgccattttcttttttcgatctttctcaggtagggaataatgaaatttggatcatttggtttaatattcttgacgttctgtgagtagttttgttggaaaatgtgaactacgatgggttagtgttttgccgattggatttgagttgtcctcatcttttcgcttttttcttaagcacaccctgaattgtacttcttaatattatttccaatcatttcttgaccagtgcttacatttggttttgtagaagcaaattctcggtgtcaaacaccaataaagatgaagccaaatattgaacctcctgagaatgtggagtggagtggtgctgaagcctcaatgtttagagtcctcattggcacttactatgacaatttctgtgccattgctaggttaattgggaccaaaacatgtagacaggtaagatatccgataaaaatgttgttaaaagagcttcaaacatagagataaaactgtactcgttgtccaaacaaagaaaattcttggttattactaagctcctattcatctcctaaaaataatttttttttcttcccaagagggaattgaatgaaaattattctccaggtatgttacagaatttccccaatgtagacttttaaggttagatagcagtagcttttaaaagctagtaagaattgaaatttagcatcacagttcttgaccagaatataattacagctacccctaatgtgagggtagggacagcgatgtgtgttatatccccagcatctagcagtgtcacagaagagacaaagacatttttctggtatgcatgagtataagaatggtttgcctaaataagactgtcctcatggctctgtgactgtgcctcttgtcaggtgtatgagtttagagtcaaagaatctagcatcatagctccagctcccgctgaggatgtggatactcctccaaggaaaaagaagaggaaacaccggttgtgggctgcacactgcagaaagatacagctgaaaaaggacggctcctctaaccatgtttacaactatcaaccctgtgatcatccacggcagccttgtgacagttcgtgcccttgtgtgatagcacaaaatttttgtgaaaagttttgtcaatgtagttcagagtgtcaaaaccgctttccgggatgccgctgcaaagcacagtgcaacaccaagcagtgcccgtgctacctggctgtccgagagtgtgaccctgacctctgtcttacttgtggagccgctgaccattgggacagtaaaaatgtgtcctgcaagaactgcagtattcagcggggctccaaaaagcatctattgctggcaccatctgacgtggcaggctgggggatttttatcaaagatcctgtgcagaaaaatgaattcatctcagaatactgtggagagattatttctcaagatgaagctgacagaagagggaaagtgtatgataaatacatgtgcagctttctgttcaacttgaacaatgattttgtggtggatgcaacccgcaagggtaacaaaattcgttttgcaaatcattcggtaaatccaaactgctatgcaaaagttatgatggttaacggtgatcacaggataggtatttttgccaagagagccatccagactggcgaagagctgttttttgattacagatacagccaggctgatgccctgaagtatgtcggcatcgaaagagaaatggaaatcccttgacatctgctacctcctccccctcctctgaaacagctgccttagcttcaggaacctcgagtactgtgggcaatttagaaaaagaacatgcagtttgaaattctgaatttgcaaagtactgtaagaataatttatagtaatgagtttaaaaatcaactttttattgccttctcaccagctgcaaagtgttttgtaccagtgaatttttgcaataatgcagtatggtacatttttcaactttgaataaagaatacttgaacttgtccttgttgaaaaaaaaaaaaacnccncccccccccaaaaaaacaaaaacaaaaaaacnaaaaaaaaaaaacccctcnaanncctcctcggctccgctcccttttgccccccncccttctggcnccgccgccgccatccctgcggtcttagatcaaagntttctttttgggtggggcttttatgtgttagttggccaaatttccggcgcgggggtgtgggaaaaacttaggggggaccctttttacacccctctggagaaggaaaccctttcggccccccccttttttatggggggggggacacaccaactctgcccccctcggggagtgttttttccaaggtttcgccacccgggtattggtg

SEQ ID NO: 429804 - DNA, 1748 bp, Homo sapiens
  misc_feature (1408)..(1408): n is a, c, g, or t
  misc_feature (1411)..(1411): n is a, c, g, or t
  misc_feature (1443)..(1443): n is a, c, g, or t
  misc_feature (1462)..(1462): n is a, c, g, or t
  misc_feature (1465)..(1466): n is a, c, g, or t
  misc_feature (1497)..(1497): n is a, c, g, or t
  misc_feature (1508)..(1508): n is a, c, g, or t
  misc_feature (1543)..(1543): n is a, c, g, or t
atttctgaccacgtagttcacttgcttggtttatgatgcctgaaataagaggaagtgatcagtgtcatccacatcagaataaatcaacaggcagacacacctgctgctttgtgcagcattgggagctcaggagttctgaccaggagtcatggatgaacacaggaaatgacgtcttgccacacctggggcagcctgagccatcaagctgtttgagttgcttcaaactgatggcaaatataaactgggcagggcatgactcttggctttaacgcattcctgtattcatggcacagatagatccagttaagcagctctctgttggatttgtagcttcccgcagaaatttggtttaattttctttgtgtttttgcaggttgtgggctgcacactgcagaaagatacagctgaaaaaggacggctcctctaaccatgtttacaactatcaaccctgtgatcatccacggcagccttgtgacagttcgtgcccttgtgtgatagcacaaaatttttgtgaaaagttttgtcaatgtagttcagagtgtcaaaaccgctttccgggatgccgctgcaaagcacagtgcaacaccaagcagtgcccgtgctacctggctgtccgagagtgtgaccctgacctctgtcttacttgtggagccgctgaccattgggacagtaaaaatgtgtcctgcaagaactgcagtattcagcggggctccaaaaagcatctattgctggcaccatctgacgtggcaggctgggggatttttatcaaagatcctgtgcagaaaaatgaattcatctcagaatactgtggagagattatttctcaagatgaagctgacagaagagggaaagtgtatgataaatacatgtgcagctttctgttcaacttgaacaatgattttgtggtggatgcaacccgcaagggtaacaaaattcgttttgcaaatcattcggtaaatccaaactgctatgcaaaagttatgatggttaacggtgatcacaggataggtatttttgccaagagagccatccagactggcgaagagctgttttttgattacagatacagccaggctgatgccctgaagtatgtcggcatcgaaagagaaatggaaatcccttgacatctgctacctcctccccctcctctgaaacagctgccttagcttcaggaacctcgagtactgtgggcaatttagaaaaagaacatgcagtttgaaattctgaatttgcaaagtactgtaagaataatttatagtaatgagtttaaaaatcaactttttattgccttctcaccagctgcaaagtgttttgtaccagtgaatttttgcaataatgcagtatggtacatttttcaactttgaataaagaatacttgaacttgtccttgttgaaaaaaaaaaaaacnccncccccccccaaaaaaacaaaaacaaaaaaacnaaaaaaaaaaaacccctcnaanncctcctcggctccgctcccttttgccccccncccttctggcnccgccgccgccatccctgcggtcttagatcaaagntttctttttgggtggggcttttatgtgttagttggccaaatttccggcgcgggggtgtgggaaaaacttaggggggaccctttttacacccctctggagaaggaaaccctttcggccccccccttttttatggggggggggacacaccaactctgcccccctcggggagtgttttttccaaggtttcgccacccgggtattggtg

SEQ ID NO: 429805 - DNA, 1304 bp, Homo sapiens
  misc_feature (964)..(964): n is a, c, g, or t
  misc_feature (967)..(967): n is a, c, g, or t
  misc_feature (999)..(999): n is a, c, g, or t
  misc_feature (1018)..(1018): n is a, c, g, or t
  misc_feature (1021)..(1022): n is a, c, g, or t
  misc_feature (1053)..(1053): n is a, c, g, or t
  misc_feature (1064)..(1064): n is a, c, g, or t
  misc_feature (1099)..(1099): n is a, c, g, or t
ttcgcatagctacgtcgtgaggatgtgatactctcagaaaaagagagcacacacggttgtgggctgcacactgcagaaagatacagctgaaaaagggtcaaaaccgctttccgggatgccgctgcaaagcacagtgcaacaccaagcagtgcccgtgctacctggctgtccgagagtgtgaccctgacctctgtcttacttgtggagccgctgaccattgggacagtaaaaatgtgtcctgcaagaactgcagtattcagcggggctccaaaaagcatctattgctggcaccatctgacgtggcaggctgggggatttttatcaaagatcctgtgcagaaaaatgaattcatctcagaatactgtggagagattatttctcaagatgaagctgacagaagagggaaagtgtatgataaatacatgtgcagctttctgttcaacttgaacaatgattttgtggtggatgcaacccgcaagggtaacaaaattcgttttgcaaatcattcggtaaatccaaactgctatgcaaaagttatgatggttaacggtgatcacaggataggtatttttgccaagagagccatccagactggcgaagagctgttttttgattacagatacagccaggctgatgccctgaagtatgtcggcatcgaaagagaaatggaaatcccttgacatctgctacctcctccccctcctctgaaacagctgccttagcttcaggaacctcgagtactgtgggcaatttagaaaaagaacatgcagtttgaaattctgaatttgcaaagtactgtaagaataatttatagtaatgagtttaaaaatcaactttttattgccttctcaccagctgcaaagtgttttgtaccagtgaatttttgcaataatgcagtatggtacatttttcaactttgaataaagaatacttgaacttgtccttgttgaaaaaaaaaaaaacnccncccccccccaaaaaaacaaaaacaaaaaaacnaaaaaaaaaaaacccctcnaanncctcctcggctccgctcccttttgccccccncccttctggcnccgccgccgccatccctgcggtcttagatcaaagntttctttttgggtggggcttttatgtgttagttggccaaatttccggcgcgggggtgtgggaaaaacttaggggggaccctttttacacccctctggagaaggaaaccctttcggccccccccttttttatggggggggggacacaccaactctgcccccctcggggagtgttttttccaaggtttcgccacccgggtattggtg

SEQ ID NO: 429806 - DNA, 2721 bp, Homo sapiens
  misc_feature (2)..(2): n is a, c, g, or t
  misc_feature (32)..(32): n is a, c, g, or t
gnaaataaaagcgatggcgattgggctgccgnttttggcgctcggtccggtcgcgtccgacacccggtgggactcagaaggcagtggagccccggcggcggcggcggcggcgcgcgggggcgacgcgcgggaacaacgcgagtcggcgcgcgggacgaagaataatcatgggccagactgggaagaaatctgagaagggaccagtttgttggcggaagcgtgtaaaatcagagtacatgcgactgagacagctcaagaggttcagacgagctgatgaagtaaagagtatgtttagttccaatcgtcagaaaattttggaaagaacggaaatcttaaaccaagaatggaaacagcgaaggatacagcctgtgcacatcctgacttctgtgagctcattgcgcgggactagggagtgttcggtgaccagtgacttggattttccaacacaagtcatcccattaaagactctgaatgcagttgcttcagtacccataatgtattcttggtctcccctacagcagaattttatggtggaagatgaaactgttttacataacattccttatatgggagatgaagttttagatcaggatggtactttcattgaagaactaataaaaaattatgatgggaaagtacacggggatagagaatgtgggtttataaatgatgaaatttttgtggagttggtgaatgcccttggtcaatataatgatgatgacgatgatgatgatggagacgatcctgaagaaagagaagaaaagcagaaagatctggaggatcaccgagatgataaagaaagccgcccacctcggaaatttccttctgataaaatttttgaagccatttcctcaatgtttccagataagggcacagcagaagaactaaaggaaaaatataaagaactcaccgaacagcagctcccaggcgcacttcctcctgaatgtacccccaacatagatggaccaaatgctaaatctgttcagagagagcaaagcttacactcctttcatacgcttttctgtaggcgatgttttaaatatgactgcttcctacatccttttcatgcaacacccaacacttataagcggaagaacacagaaacagctctagacaacaaaccttgtggaccacagtgttaccagcatttggagggagcaaaggagtttgctgctgctctcaccgctgagcggataaagaccccaccaaaacgtccaggaggccgcagaagaggacggcttcccaataacagtagcaggcccagcacccccaccattaatgtgctggaatcaaaggatacagacagtgatagggaagcagggactgaaacggggggagagaacaatgataaagaagaagaagagaagaaagatgaaacttcgagctcctctgaagcaaattctcggtgtcaaacaccaataaagatgaagccaaatattgaacctcctgagaatgtggagtggagtggtgctgaagcctcaatgtttagagtcctcattggcacttactatgacaatttctgtgccattgctaggttaattgggaccaaaacatgtagacaggtgtatgagtttagagtcaaagaatctagcatcatagctccagctcccgctgaggatgtggatactcctccaaggaaaaagaagaggaaacaccggttgtgggctgcacactgcagaaagatacagctgaaaaaggacggctcctctaaccatgtttacaactatcaaccctgtgatcatccacggcagccttgtgacagttcgtgcccttgtgtgatagcacaaaatttttgtgaaaagttttgtcaatgtagttcagagtgtcaaaaccgctttccgggatgccgctgcaaagcacagtgcaacaccaagcagtgcccgtgctacctggctgtccgagagtgtgaccctgacctctgtcttacttgtggagccgctgaccattgggacagtaaaaatgtgtcctgcaagaactgcagtattcagcggggctccaaaaagcatctattgctggcaccatctgacgtggcaggctgggggatttttatcaaagatcctgtgcagaaaaatgaattcatctcagaatactgtggagagattatttctcaagatgaagctgacagaagagggaaagtgtatgataaatacatgtgcagctttctgttcaacttgaacaatgattttgtggtggatgcaacccgcaagggtaacaaaattcgttttgcaaatcattcggtaaatccaaactgctatgcaaaagttatgatggttaacggtgatcacaggataggtatttttgccaagagagccatccagactggcgaagagctgttttttgattacagatacagccaggctgatgccctgaagtatgtcggcatcgaaagagaaatggaaatcccttgacatctgctacctcctccccctcctctgaaacagctgccttagcttcaggaacctcgagtactgtgggcaatttagaaaaagaacatgcagtttgaaattctgaatttgcaaagtactgtaagaataatttatagtaatgagtttaaaaatcaactttttattgccttctcaccagctgcaaagtgttttgtaccagtgaatttttgcaataatgcagtatggtacatttttcaactttgataagtacgtcggtggggggggggggggggggggggtggcggggggcggtggtggggtgggtgcgggtggtgga

SEQ ID NO: 429807 - DNA, 3581 bp, Homo sapiens
  misc_feature (2)..(2): n is a, c, g, or t
  misc_feature (32)..(32): n is a, c, g, or t
gnaaataaaagcgatggcgattgggctgccgnttttggcgctcggtccggtcgcgtccgacacccggtgggactcagaaggcagtggagccccggcggcggcggcggcggcgcgcgggggcgacgcgcgggaacaacgcgagtcggcgcgcgggacgaagaataatcatgggccagactgggaagaaatctgagaagggaccagtttgttggcggaagcgtgtaaaatcagagtacatgcgactgagacagctcaagaggttcagacgagctgatgaagtaaagagtatgtttagttccaatcgtcagaaaattttggaaagaacggaaatcttaaaccaagaatggaaacagcgaaggatacagcctgtgcacatcctgacttctgtgagctcattgcgcgggactagggagtgttcggtgaccagtgacttggattttccaacacaagtcatcccattaaagactctgaatgcagttgcttcagtacccataatgtattcttggtctcccctacagcagaattttatggtggaagatgaaactgttttacataacattccttatatgggagatgaagttttagatcaggatggtactttcattgaagaactaataaaaaattatgatgggaaagtacacggggatagagaatgtgggtttataaatgatgaaatttttgtggagttggtgaatgcccttggtcaatataatgatgatgacgatgatgatgatggagacgatcctgaagaaagagaagaaaagcagaaagatctggaggatcaccgagatgataaagaaagccgcccacctcggaaatttccttctgataaaatttttgaagccatttcctcaatgtttccagataagggcacagcagaagaactaaaggaaaaatataaagaactcaccgaacagcagctcccaggcgcacttcctcctgaatgtacccccaacatagatggaccaaatgctaaatctgttcagagagagcaaagcttacactcctttcatacgcttttctgtaggcgatgttttaaatatgactgcttcctacatccttttcatgcaacacccaacacttataagcggaagaacacagaaacagctctagacaacaaaccttgtggaccacagtgttaccagcatttggagggagcaaaggagtttgctgctgctctcaccgctgagcggataaagaccccaccaaaacgtccaggaggccgcagaagaggacggcttcccaataacagtagcaggcccagcacccccaccattaatgtgctggaatcaaaggatacagacagtgatagggaagcagggactgaaacggggggagagaacaatgataaagaagaagaagagaagaaagatgaaacttcgagctcctctgaagcaaattctcggtgtcaaacaccaataaagatgaagccaaatattgaacctcctgagaatgtggagtggagtggtgctgaagcctcaatgtttagagtcctcattggcacttactatgacaatttctgtgccattgctaggttaattgggaccaaaacatgtagacaggtgtatgagtttagagtcaaagaatctagcatcatagctccagctcccgctgaggatgtggatactcctccaaggaaaaagaagaggaaacaccggttgtgggctgcacactgcagaaagatacagctgaaaaaggacggctcctctaaccatgtttacaactatcaaccctgtgatcatccacggcagccttgtgacagttcgtgcccttgtgtgatagcacaaaatttttgtgaaaagttttgtcaatgtagttcagagtgtcaaaaccgctttccgggatgccgctgcaaagcacagtgcaacaccaagcagtgcccgtgctacctggctgtccgagagtgtgaccctgacctctgtcttacttgtggagccgctgaccattgggacagtaaaaatgtgtcctgcaagaactgcagtattcagcggggctccaaaaagcatctattgctggcaccatctgacgtggcaggctgggggatttttatcaaagatcctgtgcagaaaaatgaattcatctcagaatactgtggagagattatttctcaagatgaagctgacagaagagggaaagtgtatgataaatacatgtgcagctttctgttcaacttgaacaatggtatgtttcagagctgggaggcagtgagttcctgagttgcatgtggcagccttctgccggccgagtgttcagaaacgagggtagaggtcagtgaggtgaccagaaggaggatctccttagaggcatggggggctgcttgcttgaaaggaactggagcaaggaattcctcagggagcagatagactagatgtgcaggaaaccgcctctctggagtcccggctgtctgtgggtggcactatcccagcatctggctgtgaaggggacgttgtgctcttgctgctcacctcacctcttgtgttcaggcagctcagcacacctcctccagtcagtgcctctgagcggggaaggaggggaggagcactgcatttgcaaccatcttccagactcccctggatattctcaaaggactgagaggaaaggcagctgctttcatagctgatgttctggggtagaatgtaaggctgtgtagggatgtttctggtgggattatgtgaaaatggaggtaggcttaacatgtaagatattcagagaaactcttagttggaacaagtagaataggtttttttctatgaatgctttatagacattataatgaaaaaaactaattttaaatgtgaaaatgcctattcgtgatgtttggaagaattttgtcagatttttttttttttttgctatgttttgctcagtaatgtatgtttatagttgataattaatagcttttgagtcagataaccatcttgaattataggtgattaattttaacctggaacaatagtgtgttcttccaaatgtcatttcttactgaatgaagctgcttgatttatttgcttttgcaggcaaaccctgaagaactgtaaccagttgcatttacaaaatcataataacttggtttacttataactgaaattattcactgggctgtgcttacttttttctttttagattttgtggtggatgcaacccgcaagggtaacaaaattcgttttgcaaatcattcggtaaatccaaactgctatgcaaaaggtaggtacctttgacgtgagaattggaactcccttttcagtcctgtgatgatggacttgaatacttctgggatagttgtttgttatgtgaacaagtcagttaaccccccgtggcccgtcttcatgctcactgacaccagtgtgtctctttgcagttatgatggttaacggtgatcacaggataggtatttttgccaagagagccatccagactggcgaagagctgttttttgattacaggttggtaaagtacatttctagcatgatctctaagggctttttctactggattgtgaactctggacaaaggagggtttttagttctttgcttcttttgatgggtcactttgccatgagcattagtggggaattaggtta

SEQ ID NO: 429808 - DNA, 2129 bp, Homo sapiens
  misc_feature (2)..(2): n is a, c, g, or t
  misc_feature (32)..(32): n is a, c, g, or t
gnaaataaaagcgatggcgattgggctgccgnttttggcgctcggtccggtcgcgtccgacacccggtgggactcagaaggcagtggagccccggcggcggcggcggcggcgcgcgggggcgacgcgcgggaacaacgcgagtcggcgcgcgggacgaagaataatcatgggccagactgggaagaaatctgagaagggaccagtttgttggcggaagcgtgtaaaatcagagtacatgcgactgagacagctcaagaggttcagacgagctgatgaagtaaagagtatgtttagttccaatcgtcagaaaattttggaaagaacggaaatcttaaaccaagaatggaaacagcgaaggatacagcctgtgcacatcctgacttctgtgagctcattgcgcgggactagggagtgttcggtgaccagtgacttggattttccaacacaagtcatcccattaaagactctgaatgcagttgcttcagtacccataatgtattcttggtctcccctacagcagaattttatggtggaagatgaaactgttttacataacattccttatatgggagatgaagttttagatcaggatggtactttcattgaagaactaataaaaaattatgatgggaaagtacacggggatagagaatgtgggtttataaatgatgaaatttttgtggagttggtgaatgcccttggtcaatataatgatgatgacgatgatgatgatggagacgatcctgaagaaagagaagaaaagcagaaagatctggaggatcaccgagatgataaagaaagccgcccacctcggaaatttccttctgataaaatttttgaagccatttcctcaatgtttccagataagggcacagcagaagaactaaaggaaaaatataaagaactcaccgaacagcagctcccaggcgcacttcctcctgaatgtacccccaacatagatggaccaaatgctaaatctgttcagagagagcaaagcttacactcctttcatacgcttttctgtaggcgatgttttaaatatgactgcttcctacatccttttcatgcaacacccaacacttataagcggaagaacacagaaacagctctagacaacaaaccttgtggaccacagtgttaccagcatttggagggagcaaaggagtttgctgctgctctcaccgctgagcggataaagaccccaccaaaacgtccaggaggccgcagaagaggacggcttcccaataacagtagcaggcccagcacccccaccattaatgtgctggaatcaaaggatacagacagtgatagggaagcagggactgaaacggggggagagaacaatgataaagaagaagaagagaagaaagatgaaacttcgagctcctctgaagcaaattctcggtgtcaaacaccaataaagatgaagccaaatattgaacctcctgagaatgtggagtggagtggtgctgaagcctcaatgtttagagtcctcattggcacttactatgacaatttctgtgccattgctaggttaattgggaccaaaacatgtagacaggtgtatgagtttagagtcaaagaatctagcatcatagctccagctcccgctgaggatgtggatactcctccaaggaaaaagaagaggaaacaccggtgagtctgtcatgaagctccttagagaagtcaacatagatagacactgcaggcaaggcccttcctaagggctgttgttggtttctacttagtctatttttaaaaaaccttaaactgccatcaaaaacagaactatggaatcttatttccactgggaattgctagtatttttctataagaatacagcagccttcagtatatttggtatgttaagagtcataaaaattacggttaccagactgcatttgggttaagaaaaacatatttagtagcttttgcagtaaaggttacgtaaacaattactttaacatcatgaaatgttctgtgtttctgatgtgagctctgggccagtttttagaagtatcttttattccaggagcttgaatttctaagttgtgtggcattgcattccgatactcctaatgggtaccctactttaagcttgtgtgaatgttattttcaccttagcgaa

SEQ ID NO: 429809 - DNA, 2141 bp, Homo sapiens
  misc_feature (1801)..(1801): n is a, c, g, or t
  misc_feature (1804)..(1804): n is a, c, g, or t
  misc_feature (1836)..(1836): n is a, c, g, or t
  misc_feature (1855)..(1855): n is a, c, g, or t
  misc_feature (1858)..(1859): n is a, c, g, or t
  misc_feature (1890)..(1890): n is a, c, g, or t
  misc_feature (1901)..(1901): n is a, c, g, or t
  misc_feature (1936)..(1936): n is a, c, g, or t
tgcggccgctccaacatcagaatgaaaaaaaaagctatcactgtaaatcctcagacctgtttgtctaaggatttacagtgatagcttttgttttcattctgtagtctactttgtccccagtccattttcaccctccttttttgatgatgcgattgtgttttattctctagcatctattgctggcaccatctgacgtggcaggctgggggatttttatcaaagatcctgtgcagaaaaatgaattcatctcagaatactgtggagagattatttctcaagatgaagctgacagaagagggaaagtgtatgataaatacatgtgcagctttctgttcaacttgaacaatggtatgtttcagagctgggaggcagtgagttcctgagttgcatgtggcagccttctgccggccgagtgttcagaaacgagggtagaggtcagtgaggtgaccagaaggaggatctccttagaggcatggggggctgcttgcttgaaaggaactggagcaaggaattcctcagggagcagatagactagatgtgcaggaaaccgcctctctggagtcccggctgtctgtgggtggcactatcccagcatctggctgtgaaggggacgttgtgctcttgctgctcacctcacctcttgtgttcaggcagctcagcacacctcctccagtcagtgcctctgagcggggaaggaggggaggagcactgcatttgcaaccatcttccagactcccctggatattctcaaaggactgagaggaaaggcagctgctttcatagctgatgttctggggtagaatgtaaggctgtgtagggatgtttctggtgggattatgtgaaaatggaggtaggcttaacatgtaagatattcagagaaactcttagttggaacaagtagaataggtttttttctatgaatgctttatagacattataatgaaaaaaactaattttaaatgtgaaaatgcctattcgtgatgtttggaagaattttgtcagatttttttttttttttgctatgttttgctcagtaatgtatgtttatagttgataattaatagcttttgagtcagataaccatcttgaattataggtgattaattttaacctggaacaatagtgtgttcttccaaatgtcatttcttactgaatgaagctgcttgatttatttgcttttgcaggcaaaccctgaagaactgtaaccagttgcatttacaaaatcataataacttggtttacttataactgaaattattcactgggctgtgcttacttttttctttttagattttgtggtggatgcaacccgcaagggtaacaaaattcgttttgcaaatcattcggtaaatccaaactgctatgcaaaagttatgatggttaacggtgatcacaggataggtatttttgccaagagagccatccagactggcgaagagctgttttttgattacagatacagccaggctgatgccctgaagtatgtcggcatcgaaagagaaatggaaatcccttgacatctgctacctcctccccctcctctgaaacagctgccttagcttcaggaacctcgagtactgtgggcaatttagaaaaagaacatgcagtttgaaattctgaatttgcaaagtactgtaagaataatttatagtaatgagtttaaaaatcaactttttattgccttctcaccagctgcaaagtgttttgtaccagtgaatttttgcaataatgcagtatggtacatttttcaactttgaataaagaatacttgaacttgtccttgttgaaaaaaaaaaaaacnccncccccccccaaaaaaacaaaaacaaaaaaacnaaaaaaaaaaaacccctcnaanncctcctcggctccgctcccttttgccccccncccttctggcnccgccgccgccatccctgcggtcttagatcaaagntttctttttgggtggggcttttatgtgttagttggccaaatttccggcgcgggggtgtgggaaaaacttaggggggaccctttttacacccctctggagaaggaaaccctttcggccccccccttttttatggggggggggacacaccaactctgcccccctcggggagtgttttttccaaggtttcgccacccgggtattggtg

SEQ ID NO: 429810 - DNA, 805 bp, Homo sapiens
  misc_feature (465)..(465): n is a, c, g, or t
  misc_feature (468)..(468): n is a, c, g, or t
  misc_feature (500)..(500): n is a, c, g, or t
  misc_feature (519)..(519): n is a, c, g, or t
  misc_feature (522)..(523): n is a, c, g, or t
  misc_feature (554)..(554): n is a, c, g, or t
  misc_feature (565)..(565): n is a, c, g, or t
  misc_feature (600)..(600): n is a, c, g, or t
tttttttaaagacattttaatgcacccactatcttcagcaggctttgttgtgttaagtcaagtctcagcacatgttggatgggtggccatccagcggacatctccttcctgttgtttcagatacagccaggctgatgccctgaagtatgtcggcatcgaaagagaaatggaaatcccttgacatctgctacctcctccccctcctctgaaacagctgccttagcttcaggaacctcgagtactgtgggcaatttagaaaaagaacatgcagtttgaaattctgaatttgcaaagtactgtaagaataatttatagtaatgagtttaaaaatcaactttttattgccttctcaccagctgcaaagtgttttgtaccagtgaatttttgcaataatgcagtatggtacatttttcaactttgaataaagaatacttgaacttgtccttgttgaaaaaaaaaaaaacnccncccccccccaaaaaaacaaaaacaaaaaaacnaaaaaaaaaaaacccctcnaanncctcctcggctccgctcccttttgccccccncccttctggcnccgccgccgccatccctgcggtcttagatcaaagntttctttttgggtggggcttttatgtgttagttggccaaatttccggcgcgggggtgtgggaaaaacttaggggggaccctttttacacccctctggagaaggaaaccctttcggccccccccttttttatggggggggggacacaccaactctgcccccctcggggagtgttttttccaaggtttcgccacccgggtattggtg

SEQ ID NO: 429811 - DNA, 803 bp, Homo sapiens
  misc_feature (463)..(463): n is a, c, g, or t
  misc_feature (466)..(466): n is a, c, g, or t
  misc_feature (498)..(498): n is a, c, g, or t
  misc_feature (517)..(517): n is a, c, g, or t
  misc_feature (520)..(521): n is a, c, g, or t
  misc_feature (552)..(552): n is a, c, g, or t
  misc_feature (563)..(563): n is a, c, g, or t
  misc_feature (598)..(598): n is a, c, g, or t
aagtaagtagatattactaaatagaaaagaaacggcaaagacacaagaaagcaaaaatacggtagaaatagtgcccagtaagtagtacgctagcacgaagtcacgcagcaatagacacaaataattagggagataacatacaatgccttcatagacgaaagaaaagcgcaattagtaaaggaaatgaagacctaaaccttcctctgaaacagctgccttagcttcaggaacctcgagtactgtgggcaatttagaaaaagaacatgcagtttgaaattctgaatttgcaaagtactgtaagaataatttatagtaatgagtttaaaaatcaactttttattgccttctcaccagctgcaaagtgttttgtaccagtgaatttttgcaataatgcagtatggtacatttttcaactttgaataaagaatacttgaacttgtccttgttgaaaaaaaaaaaaacnccncccccccccaaaaaaacaaaaacaaaaaaacnaaaaaaaaaaaacccctcnaanncctcctcggctccgctcccttttgccccccncccttctggcnccgccgccgccatccctgcggtcttagatcaaagntttctttttgggtggggcttttatgtgttagttggccaaatttccggcgcgggggtgtgggaaaaacttaggggggaccctttttacacccctctggagaaggaaaccctttcggccccccccttttttatggggggggggacacaccaactctgcccccctcggggagtgttttttccaaggtttcgccacccgggtattggtg

SEQ ID NO: 429812 - DNA, 786 bp, Homo sapiens
  misc_feature (2)..(2): n is a, c, g, or t
  misc_feature (32)..(32): n is a, c, g, or t
gnaaataaaagcgatggcgattgggctgccgnttttggcgctcggtccggtcgcgtccgacacccggtgggactcagaaggcagtggagccccggcggcggcggcggcggcgcgcgggggcgacgcgcgggaacaacgcgagtcggcgcgcgggacgaagaataatcatgggccagactgggaagaaatctgagaagggaccagtttgttggcggaagcgtgtaaaatcagagtacatgcgactgagacagctcaagaggttcagacgagctgatgaagtaaagagtatgtttagttccaatcgtcagaaaattttggaaagaacggaaatcttaaaccaagaatggaaacagcgaaggatacagcctgtgcacatcctgacttcttgttcggtgaccagtgacttggattttccaacacaagtcatcccattaaagactctgaatgcagttgcttcagtacccataatgtattcttggtctcccctacagcagaattttatggtggaagatgaaactgttttacataacattccttatatgggagatgaagttttagatcaggatggtactttcattgaagaactaataaaaaattatgatgggaaagtacacggggatagagaatgtgggtttataaatgatgaaatttttgtggagttggtgaatgcccttggtcaatataatgatgatgacgatgatgatgatggagacgatcctgaagaaagagaagaaaagcagaaagatctggaggatcaccgagatggtatgcctgattattaggatt

SEQ ID NO: 429813 - DNA, 799 bp, Homo sapiens
cagaaggtccagtattcactctgtgcgcttttgtgtgttctgtcaggcttgatcacctttatccaaaagaattttctcctgtgtctttctttttagattatttctcaagatgaagctgacagaagagggaaagtgtatgataaatacatgtgcagctttctgttcaacttgaacaatggtatgtttcagagctgggaggcagtgagttcctgagttgcatgtggcagccttctgccggccgagtgttcagaaacgagggtagaggtcagtgaggtgaccagaaggaggatctccttagaggcatggggggctgcttgcttgaaaggaactggagcaaggaattcctcagggagcagatagactagatgtgcaggaaaccgcctctctggagtcccggctgtctgtgggtggcactatcccagcatctggctgtgaaggggacgttgtgctcttgctgctcacctcacctcttgtgttcaggcagctcagcacacctcctccagtcagtgcctctgagcggggaaggaggggaggagcactgcatttgcaaccatcttccagactcccctggatattctcaaaggactgagaggaaaggcagctgctttcatagctgatgttctggggtagaatgtaaggctgtgtagggatgtttctggtgggattatgtgaaaatggaggtaggcttaacatgtaagatattcagagaaactcttagttggaacaagtagaataggtttttttctatgaatgctttatagacattataatgaaaaaaactaattttaaatgtgaaaat

SEQ ID NO: 429814 - DNA, 3032 bp, Homo sapiens
  misc_feature (2)..(2): n is a, c, g, or t
  misc_feature (32)..(32): n is a, c, g, or t
  misc_feature (2692)..(2692): n is a, c, g, or t
  misc_feature (2695)..(2695): n is a, c, g, or t
  misc_feature (2727)..(2727): n is a, c, g, or t
  misc_feature (2746)..(2746): n is a, c, g, or t
  misc_feature (2749)..(2750): n is a, c, g, or t
  misc_feature (2781)..(2781): n is a, c, g, or t
  misc_feature (2792)..(2792): n is a, c, g, or t
  misc_feature (2827)..(2827): n is a, c, g, or t
gnaaataaaagcgatggcgattgggctgccgnttttggcgctcggtccggtcgcgtccgacacccggtgggactcagaaggcagtggagccccggcggcggcggcggcggcgcgcgggggcgacgcgcgggaacaacgcgagtcggcgcgcgggacgaagaataatcatgggccagactgggaagaaatctgagaagggaccagtttgttggcggaagcgtgtaaaatcagagtacatgcgactgagacagctcaagaggttcagacgagctgatgaagtaaagagtatgtttagttccaatcgtcagaaaattttggaaagaacggaaatcttaaaccaagaatggaaacagcgaaggatacagcctgtgcacatcctgacttctgtgagctcattgcgcgggactagggagtgttcggtgaccagtgacttggattttccaacacaagtcatcccattaaagactctgaatgcagttgcttcagtacccataatgtattcttggtctcccctacagcagaattttatggtggaagatgaaactgttttacataacattccttatatgggagatgaagttttagatcaggatggtactttcattgaagaactaataaaaaattatgatgggaaagtacacggggatagagaatgtgggtttataaatgatgaaatttttgtggagttggtgaatgcccttggtcaatataatgatgatgacgatgatgatgatggagacgatcctgaagaaagagaagaaaagcagaaagatctggaggatcaccgagatgataaagaaagccgcccacctcggaaatttccttctgataaaatttttgaagccatttcctcaatgtttccagataagggcacagcagaagaactaaaggaaaaatataaagaactcaccgaacagcagctcccaggcgcacttcctcctgaatgtacccccaacatagatggaccaaatgctaaatctgttcagagagagcaaagcttacactcctttcatacgcttttctgtaggcgatgttttaaatatgactgcttcctacatccttttcatgcaacacccaacacttataagcggaagaacacagaaacagctctagacaacaaaccttgtggaccacagtgttaccagcatttggagggagcaaaggagtttgctgctgctctcaccgctgagcggataaagaccccaccaaaacgtccaggaggccgcagaagaggacggcttcccaataacagtagcaggcccagcacccccaccattaatgtgctggaatcaaaggatacagacagtgatagggaagcagggactgaaacggggggagagaacaatgataaagaagaagaagagaagaaagatgaaacttcgagctcctctgaagcaaattctcggtgtcaaacaccaataaagatgaagccaaatattgaacctcctgagaatgtggagtggagtggtgctgaagcctcaatgtttagagtcctcattggcacttactatgacaatttctgtgccattgctaggttaattgggaccaaaacatgtagacaggtgtatgagtttagagtcaaagaatctagcatcatagctccagctcccgctgaggatgtggatactcctccaaggaaaaagaagaggaaacaccggttgtgggctgcacactgcagaaagatacagctgaaaaaggacggctcctctaaccatgtttacaactatcaaccctgtgatcatccacggcagccttgtgacagttcgtgcccttgtgtgatagcacaaaatttttgtgaaaagttttgtcaatgtagttcagagtgtcaaaaccgctttccgggatgccgctgcaaagcacagtgcaacaccaagcagtgcccgtgctacctggctgtccgagagtgtgaccctgacctctgtcttacttgtggagccgctgaccattgggacagtaaaaatgtgtcctgcaagaactgcagtattcagcggggctccaaaaagcatctattgctggcaccatctgacgtggcaggctgggggatttttatcaaagatcctgtgcagaaaaatgaattcatctcagaatactgtggagagattatttctcaagatgaagctgacagaagagggaaagtgtatgataaatacatgtgcagctttctgttcaacttgaacaatgattttgtggtggatgcaacccgcaagggtaacaaaattcgttttgcaaatcattcggtaaatccaaactgctatgcaaaagttatgatggttaacggtgatcacaggataggtatttttgccaagagagccatccagactggcgaagagctgttttttgattacagatacagccaggctgatgccctgaagtatgtcggcatcgaaagagaaatggaaatcccttgacatctgctacctcctccccctcctctgaaacagctgccttagcttcaggaacctcgagtactgtgggcaatttagaaaaagaacatgcagtttgaaattctgaatttgcaaagtactgtaagaataatttatagtaatgagtttaaaaatcaactttttattgccttctcaccagctgcaaagtgttttgtaccagtgaatttttgcaataatgcagtatggtacatttttcaactttgaataaagaatacttgaacttgtccttgttgaaaaaaaaaaaaacnccncccccccccaaaaaaacaaaaacaaaaaaacnaaaaaaaaaaaacccctcnaanncctcctcggctccgctcccttttgccccccncccttctggcnccgccgccgccatccctgcggtcttagatcaaagntttctttttgggtggggcttttatgtgttagttggccaaatttccggcgcgggggtgtgggaaaaacttaggggggaccctttttacacccctctggagaaggaaaccctttcggccccccccttttttatggggggggggacacaccaactctgcccccctcggggagtgttttttccaaggtttcgccacccgggtattggtg

SEQ ID NO: 429815 - DNA, 2779 bp, Homo sapiens
  misc_feature (2)..(2): n is a, c, g, or t
  misc_feature (32)..(32): n is a, c, g, or t
  misc_feature (2439)..(2439): n is a, c, g, or t
  misc_feature (2442)..(2442): n is a, c, g, or t
  misc_feature (2474)..(2474): n is a, c, g, or t
  misc_feature (2493)..(2493): n is a, c, g, or t
  misc_feature (2496)..(2497): n is a, c, g, or t
  misc_feature (2528)..(2528): n is a, c, g, or t
  misc_feature (2539)..(2539): n is a, c, g, or t
  misc_feature (2574)..(2574): n is a, c, g, or t
gnaaataaaagcgatggcgattgggctgccgnttttggcgctcggtccggtcgcgtccgacacccggtgggactcagaaggcagtggagccccggcggcggcggcggcggcgcgcgggggcgacgcgcgggaacaacgcgagtcggcgcgcgggacgaagtgttcggtgaccagtgacttggattttccaacacaagtcatcccattaaagactctgaatgcagttgcttcagtacccataatgtattcttggtctcccctacagcagaattttatggtggaagatgaaactgttttacataacattccttatatgggagatgaagttttagatcaggatggtactttcattgaagaactaataaaaaattatgatgggaaagtacacggggatagagaatgtgggtttataaatgatgaaatttttgtggagttggtgaatgcccttggtcaatataatgatgatgacgatgatgatgatggagacgatcctgaagaaagagaagaaaagcagaaagatctggaggatcaccgagatgataaagaaagccgcccacctcggaaatttccttctgataaaatttttgaagccatttcctcaatgtttccagataagggcacagcagaagaactaaaggaaaaatataaagaactcaccgaacagcagctcccaggcgcacttcctcctgaatgtacccccaacatagatggaccaaatgctaaatctgttcagagagagcaaagcttacactcctttcatacgcttttctgtaggcgatgttttaaatatgactgcttcctacatccttttcatgcaacacccaacacttataagcggaagaacacagaaacagctctagacaacaaaccttgtggaccacagtgttaccagcatttggagggagcaaaggagtttgctgctgctctcaccgctgagcggataaagaccccaccaaaacgtccaggaggccgcagaagaggacggcttcccaataacagtagcaggcccagcacccccaccattaatgtgctggaatcaaaggatacagacagtgatagggaagcagggactgaaacggggggagagaacaatgataaagaagaagaagagaagaaagatgaaacttcgagctcctctgaagcaaattctcggtgtcaaacaccaataaagatgaagccaaatattgaacctcctgagaatgtggagtggagtggtgctgaagcctcaatgtttagagtcctcattggcacttactatgacaatttctgtgccattgctaggttaattgggaccaaaacatgtagacaggtgtatgagtttagagtcaaagaatctagcatcatagctccagctcccgctgaggatgtggatactcctccaaggaaaaagaagaggaaacaccggttgtgggctgcacactgcagaaagatacagctgaaaaaggacggctcctctaaccatgtttacaactatcaaccctgtgatcatccacggcagccttgtgacagttcgtgcccttgtgtgatagcacaaaatttttgtgaaaagttttgtcaatgtagttcagagtgtcaaaaccgctttccgggatgccgctgcaaagcacagtgcaacaccaagcagtgcccgtgctacctggctgtccgagagtgtgaccctgacctctgtcttacttgtggagccgctgaccattgggacagtaaaaatgtgtcctgcaagaactgcagtattcagcggggctccaaaaagcatctattgctggcaccatctgacgtggcaggctgggggatttttatcaaagatcctgtgcagaaaaatgaattcatctcagaatactgtggagagattatttctcaagatgaagctgacagaagagggaaagtgtatgataaatacatgtgcagctttctgttcaacttgaacaatgattttgtggtggatgcaacccgcaagggtaacaaaattcgttttgcaaatcattcggtaaatccaaactgctatgcaaaagttatgatggttaacggtgatcacaggataggtatttttgccaagagagccatccagactggcgaagagctgttttttgattacagatacagccaggctgatgccctgaagtatgtcggcatcgaaagagaaatggaaatcccttgacatctgctacctcctccccctcctctgaaacagctgccttagcttcaggaacctcgagtactgtgggcaatttagaaaaagaacatgcagtttgaaattctgaatttgcaaagtactgtaagaataatttatagtaatgagtttaaaaatcaactttttattgccttctcaccagctgcaaagtgttttgtaccagtgaatttttgcaataatgcagtatggtacatttttcaactttgaataaagaatacttgaacttgtccttgttgaaaaaaaaaaaaacnccncccccccccaaaaaaacaaaaacaaaaaaacnaaaaaaaaaaaacccctcnaanncctcctcggctccgctcccttttgccccccncccttctggcnccgccgccgccatccctgcggtcttagatcaaagntttctttttgggtggggcttttatgtgttagttggccaaatttccggcgcgggggtgtgggaaaaacttaggggggaccctttttacacccctctggagaaggaaaccctttcggccccccccttttttatggggggggggacacaccaactctgcccccctcggggagtgttttttccaaggtttcgccacccgggtattggtg

SEQ ID NO: 429816 - DNA, 3005 bp, Homo sapiens
  misc_feature (2)..(2): n is a, c, g, or t
  misc_feature (32)..(32): n is a, c, g, or t
  misc_feature (2665)..(2665): n is a, c, g, or t
  misc_feature (2668)..(2668): n is a, c, g, or t
  misc_feature (2700)..(2700): n is a, c, g, or t
  misc_feature (2719)..(2719): n is a, c, g, or t
  misc_feature (2722)..(2723): n is a, c, g, or t
  misc_feature (2754)..(2754): n is a, c, g, or t
  misc_feature (2765)..(2765): n is a, c, g, or t
  misc_feature (2800)..(2800): n is a, c, g, or t
gnaaataaaagcgatggcgattgggctgccgnttttggcgctcggtccggtcgcgtccgacacccggtgggactcagaaggcagtggagccccggcggcggcggcggcggcgcgcgggggcgacgcgcgggaacaacgcgagtcggcgcgcgggacgaagaataatcatgggccagactgggaagaaatctgagaagggaccagtttgttggcggaagcgtgtaaaatcagagtacatgcgactgagacagctcaagaggttcagacgagctgatgaagtaaagagtatgtttagttccaatcgtcagaaaattttggaaagaacggaaatcttaaaccaagaatggaaacagcgaaggatacagcctgtgcacatcctgacttcttgttcggtgaccagtgacttggattttccaacacaagtcatcccattaaagactctgaatgcagttgcttcagtacccataatgtattcttggtctcccctacagcagaattttatggtggaagatgaaactgttttacataacattccttatatgggagatgaagttttagatcaggatggtactttcattgaagaactaataaaaaattatgatgggaaagtacacggggatagagaatgtgggtttataaatgatgaaatttttgtggagttggtgaatgcccttggtcaatataatgatgatgacgatgatgatgatggagacgatcctgaagaaagagaagaaaagcagaaagatctggaggatcaccgagatgataaagaaagccgcccacctcggaaatttccttctgataaaatttttgaagccatttcctcaatgtttccagataagggcacagcagaagaactaaaggaaaaatataaagaactcaccgaacagcagctcccaggcgcacttcctcctgaatgtacccccaacatagatggaccaaatgctaaatctgttcagagagagcaaagcttacactcctttcatacgcttttctgtaggcgatgttttaaatatgactgcttcctacatccttttcatgcaacacccaacacttataagcggaagaacacagaaacagctctagacaacaaaccttgtggaccacagtgttaccagcatttggagggagcaaaggagtttgctgctgctctcaccgctgagcggataaagaccccaccaaaacgtccaggaggccgcagaagaggacggcttcccaataacagtagcaggcccagcacccccaccattaatgtgctggaatcaaaggatacagacagtgatagggaagcagggactgaaacggggggagagaacaatgataaagaagaagaagagaagaaagatgaaacttcgagctcctctgaagcaaattctcggtgtcaaacaccaataaagatgaagccaaatattgaacctcctgagaatgtggagtggagtggtgctgaagcctcaatgtttagagtcctcattggcacttactatgacaatttctgtgccattgctaggttaattgggaccaaaacatgtagacaggtgtatgagtttagagtcaaagaatctagcatcatagctccagctcccgctgaggatgtggatactcctccaaggaaaaagaagaggaaacaccggttgtgggctgcacactgcagaaagatacagctgaaaaaggacggctcctctaaccatgtttacaactatcaaccctgtgatcatccacggcagccttgtgacagttcgtgcccttgtgtgatagcacaaaatttttgtgaaaagttttgtcaatgtagttcagagtgtcaaaaccgctttccgggatgccgctgcaaagcacagtgcaacaccaagcagtgcccgtgctacctggctgtccgagagtgtgaccctgacctctgtcttacttgtggagccgctgaccattgggacagtaaaaatgtgtcctgcaagaactgcagtattcagcggggctccaaaaagcatctattgctggcaccatctgacgtggcaggctgggggatttttatcaaagatcctgtgcagaaaaatgaattcatctcagaatactgtggagagattatttctcaagatgaagctgacagaagagggaaagtgtatgataaatacatgtgcagctttctgttcaacttgaacaatgattttgtggtggatgcaacccgcaagggtaacaaaattcgttttgcaaatcattcggtaaatccaaactgctatgcaaaagttatgatggttaacggtgatcacaggataggtatttttgccaagagagccatccagactggcgaagagctgttttttgattacagatacagccaggctgatgccctgaagtatgtcggcatcgaaagagaaatggaaatcccttgacatctgctacctcctccccctcctctgaaacagctgccttagcttcaggaacctcgagtactgtgggcaatttagaaaaagaacatgcagtttgaaattctgaatttgcaaagtactgtaagaataatttatagtaatgagtttaaaaatcaactttttattgccttctcaccagctgcaaagtgttttgtaccagtgaatttttgcaataatgcagtatggtacatttttcaactttgaataaagaatacttgaacttgtccttgttgaaaaaaaaaaaaacnccncccccccccaaaaaaacaaaaacaaaaaaacnaaaaaaaaaaaacccctcnaanncctcctcggctccgctcccttttgccccccncccttctggcnccgccgccgccatccctgcggtcttagatcaaagntttctttttgggtggggcttttatgtgttagttggccaaatttccggcgcgggggtgtgggaaaaacttaggggggaccctttttacacccctctggagaaggaaaccctttcggccccccccttttttatggggggggggacacaccaactctgcccccctcggggagtgttttttccaaggtttcgccacccgggtattggtg

SEQ ID NO: 429817 - DNA, 3114 bp, Homo sapiens
  misc_feature (2)..(2): n is a, c, g, or t
  misc_feature (32)..(32): n is a, c, g, or t
  misc_feature (2774)..(2774): n is a, c, g, or t
  misc_feature (2777)..(2777): n is a, c, g, or t
  misc_feature (2809)..(2809): n is a, c, g, or t
  misc_feature (2828)..(2828): n is a, c, g, or t
  misc_feature (2831)..(2832): n is a, c, g, or t
  misc_feature (2863)..(2863): n is a, c, g, or t
  misc_feature (2874)..(2874): n is a, c, g, or t
  misc_feature (2909)..(2909): n is a, c, g, or t
gnaaataaaagcgatggcgattgggctgccgnttttggcgctcggtccggtcgcgtccgacacccggtgggactcagaaggcagtggagccccggcggcggcggcggcggcgcgcgggggcgacgcgcgggaacaacgcgagtcggcgcgcgggacgaagaataatcatgggccagactgggaagaaatctgagaagggaccagtttgttggcggaagcgtgtaaaatcagagtacatgcgactgagacagctcaagaggttcagacgagctgatgaagtaaagagtatgtttagttccaatcgtcagaaaattttggaaagaacggaaatcttaaaccaagaatggaaacagcgaaggatacagcctgtgcacatcctgacttctgtgagctcattgcgcgggactagggagtgttcggtgaccagtgacttggattttccaacacaagtcatcccattaaagactctgaatgcagttgcttcagtacccataatgtattcttggtctcccctacagcagaattttatggtggaagatgaaactgttttacataacattccttatatgggagatgaagttttagatcaggatggtactttcattgaagaactaataaaaaattatgatgggaaagtacacggggatagagaatgtgggtttataaatgatgaaatttttgtggagttggtgaatgcccttggtcaatataatgatgatgacgatgatgatgatggagacgatcctgaagaaagagaagaaaagcagaaagatctggaggatcaccgagatgataaagaaagccgcccacctcggaaatttccttctgataaaatttttgaagccatttcctcaatgtttccagataagggcacagcagaagaactaaaggaaaaatataaagaactcaccgaacagcagctcccaggcgcacttcctcctgaatgtacccccaacatagatggaccaaatgctaaatctgttcagagagagcaaagcttacactcctttcatacgcttttctgtaggcgatgttttaaatatgactgcttcctacatccttttcatgcaacacccaacacttataagcggaagaacacagaaacagctctagacaacaaaccttgtggaccacagtgttaccagcatttgccactcctacctaggaactaaatgggtatatattgcctgttggattttggacagaagattcattgaatggcacctgcagaaggagggagcaaaggagtttgctgctgctctcaccgctgagcggataaagaccccaccaaaacgtccaggaggccgcagaagaggacggcttcccaataacagtagcaggcccagcacccccaccattaatgtgctggaatcaaaggatacagacagtgatagggaagcagggactgaaacggggggagagaacaatgataaagaagaagaagagaagaaagatgaaacttcgagctcctctgaagcaaattctcggtgtcaaacaccaataaagatgaagccaaatattgaacctcctgagaatgtggagtggagtggtgctgaagcctcaatgtttagagtcctcattggcacttactatgacaatttctgtgccattgctaggttaattgggaccaaaacatgtagacaggtgtatgagtttagagtcaaagaatctagcatcatagctccagctcccgctgaggatgtggatactcctccaaggaaaaagaagaggaaacaccggttgtgggctgcacactgcagaaagatacagctgaaaaaggacggctcctctaaccatgtttacaactatcaaccctgtgatcatccacggcagccttgtgacagttcgtgcccttgtgtgatagcacaaaatttttgtgaaaagttttgtcaatgtagttcagagtgtcaaaaccgctttccgggatgccgctgcaaagcacagtgcaacaccaagcagtgcccgtgctacctggctgtccgagagtgtgaccctgacctctgtcttacttgtggagccgctgaccattgggacagtaaaaatgtgtcctgcaagaactgcagtattcagcggggctccaaaaagcatctattgctggcaccatctgacgtggcaggctgggggatttttatcaaagatcctgtgcagaaaaatgaattcatctcagaatactgtggagagattatttctcaagatgaagctgacagaagagggaaagtgtatgataaatacatgtgcagctttctgttcaacttgaacaatgattttgtggtggatgcaacccgcaagggtaacaaaattcgttttgcaaatcattcggtaaatccaaactgctatgcaaaagttatgatggttaacggtgatcacaggataggtatttttgccaagagagccatccagactggcgaagagctgttttttgattacagatacagccaggctgatgccctgaagtatgtcggcatcgaaagagaaatggaaatcccttgacatctgctacctcctccccctcctctgaaacagctgccttagcttcaggaacctcgagtactgtgggcaatttagaaaaagaacatgcagtttgaaattctgaatttgcaaagtactgtaagaataatttatagtaatgagtttaaaaatcaactttttattgccttctcaccagctgcaaagtgttttgtaccagtgaatttttgcaataatgcagtatggtacatttttcaactttgaataaagaatacttgaacttgtccttgttgaaaaaaaaaaaaacnccncccccccccaaaaaaacaaaaacaaaaaaacnaaaaaaaaaaaacccctcnaanncctcctcggctccgctcccttttgccccccncccttctggcnccgccgccgccatccctgcggtcttagatcaaagntttctttttgggtggggcttttatgtgttagttggccaaatttccggcgcgggggtgtgggaaaaacttaggggggaccctttttacacccctctggagaaggaaaccctttcggccccccccttttttatggggggggggacacaccaactctgcccccctcggggagtgttttttccaaggtttcgccacccgggtattggtg

SEQ ID NO: 429818 - DNA, 3974 bp, Homo sapiens
  misc_feature (2)..(2): n is a, c, g, or t
  misc_feature (32)..(32): n is a, c, g, or t
  misc_feature (3634)..(3634): n is a, c, g, or t
  misc_feature (3637)..(3637): n is a, c, g, or t
  misc_feature (3669)..(3669): n is a, c, g, or t
  misc_feature (3688)..(3688): n is a, c, g, or t
  misc_feature (3691)..(3692): n is a, c, g, or t
  misc_feature (3723)..(3723): n is a, c, g, or t
  misc_feature (3734)..(3734): n is a, c, g, or t
  misc_feature (3769)..(3769): n is a, c, g, or t
gnaaataaaagcgatggcgattgggctgccgnttttggcgctcggtccggtcgcgtccgacacccggtgggactcagaaggcagtggagccccggcggcggcggcggcggcgcgcgggggcgacgcgcgggaacaacgcgagtcggcgcgcgggacgaagaataatcatgggccagactgggaagaaatctgagaagggaccagtttgttggcggaagcgtgtaaaatcagagtacatgcgactgagacagctcaagaggttcagacgagctgatgaagtaaagagtatgtttagttccaatcgtcagaaaattttggaaagaacggaaatcttaaaccaagaatggaaacagcgaaggatacagcctgtgcacatcctgacttctgtgagctcattgcgcgggactagggagtgttcggtgaccagtgacttggattttccaacacaagtcatcccattaaagactctgaatgcagttgcttcagtacccataatgtattcttggtctcccctacagcagaattttatggtggaagatgaaactgttttacataacattccttatatgggagatgaagttttagatcaggatggtactttcattgaagaactaataaaaaattatgatgggaaagtacacggggatagagaatgtgggtttataaatgatgaaatttttgtggagttggtgaatgcccttggtcaatataatgatgatgacgatgatgatgatggagacgatcctgaagaaagagaagaaaagcagaaagatctggaggatcaccgagatgataaagaaagccgcccacctcggaaatttccttctgataaaatttttgaagccatttcctcaatgtttccagataagggcacagcagaagaactaaaggaaaaatataaagaactcaccgaacagcagctcccaggcgcacttcctcctgaatgtacccccaacatagatggaccaaatgctaaatctgttcagagagagcaaagcttacactcctttcatacgcttttctgtaggcgatgttttaaatatgactgcttcctacatccttttcatgcaacacccaacacttataagcggaagaacacagaaacagctctagacaacaaaccttgtggaccacagtgttaccagcatttggagggagcaaaggagtttgctgctgctctcaccgctgagcggataaagaccccaccaaaacgtccaggaggccgcagaagaggacggcttcccaataacagtagcaggcccagcacccccaccattaatgtgctggaatcaaaggatacagacagtgatagggaagcagggactgaaacggggggagagaacaatgataaagaagaagaagagaagaaagatgaaacttcgagctcctctgaagcaaattctcggtgtcaaacaccaataaagatgaagccaaatattgaacctcctgagaatgtggagtggagtggtgctgaagcctcaatgtttagagtcctcattggcacttactatgacaatttctgtgccattgctaggttaattgggaccaaaacatgtagacaggtgtatgagtttagagtcaaagaatctagcatcatagctccagctcccgctgaggatgtggatactcctccaaggaaaaagaagaggaaacaccggttgtgggctgcacactgcagaaagatacagctgaaaaaggacggctcctctaaccatgtttacaactatcaaccctgtgatcatccacggcagccttgtgacagttcgtgcccttgtgtgatagcacaaaatttttgtgaaaagttttgtcaatgtagttcagagtgtcaaaaccgctttccgggatgccgctgcaaagcacagtgcaacaccaagcagtgcccgtgctacctggctgtccgagagtgtgaccctgacctctgtcttacttgtggagccgctgaccattgggacagtaaaaatgtgtcctgcaagaactgcagtattcagcggggctccaaaaagcatctattgctggcaccatctgacgtggcaggctgggggatttttatcaaagatcctgtgcagaaaaatgaattcatctcagaatactgtggagagattatttctcaagatgaagctgacagaagagggaaagtgtatgataaatacatgtgcagctttctgttcaacttgaacaatggtatgtttcagagctgggaggcagtgagttcctgagttgcatgtggcagccttctgccggccgagtgttcagaaacgagggtagaggtcagtgaggtgaccagaaggaggatctccttagaggcatggggggctgcttgcttgaaaggaactggagcaaggaattcctcagggagcagatagactagatgtgcaggaaaccgcctctctggagtcccggctgtctgtgggtggcactatcccagcatctggctgtgaaggggacgttgtgctcttgctgctcacctcacctcttgtgttcaggcagctcagcacacctcctccagtcagtgcctctgagcggggaaggaggggaggagcactgcatttgcaaccatcttccagactcccctggatattctcaaaggactgagaggaaaggcagctgctttcatagctgatgttctggggtagaatgtaaggctgtgtagggatgtttctggtgggattatgtgaaaatggaggtaggcttaacatgtaagatattcagagaaactcttagttggaacaagtagaataggtttttttctatgaatgctttatagacattataatgaaaaaaactaattttaaatgtgaaaatgcctattcgtgatgtttggaagaattttgtcagatttttttttttttttgctatgttttgctcagtaatgtatgtttatagttgataattaatagcttttgagtcagataaccatcttgaattataggtgattaattttaacctggaacaatagtgtgttcttccaaatgtcatttcttactgaatgaagctgcttgatttatttgcttttgcaggcaaaccctgaagaactgtaaccagttgcatttacaaaatcataataacttggtttacttataactgaaattattcactgggctgtgcttacttttttctttttagattttgtggtggatgcaacccgcaagggtaacaaaattcgttttgcaaatcattcggtaaatccaaactgctatgcaaaagttatgatggttaacggtgatcacaggataggtatttttgccaagagagccatccagactggcgaagagctgttttttgattacagatacagccaggctgatgccctgaagtatgtcggcatcgaaagagaaatggaaatcccttgacatctgctacctcctccccctcctctgaaacagctgccttagcttcaggaacctcgagtactgtgggcaatttagaaaaagaacatgcagtttgaaattctgaatttgcaaagtactgtaagaataatttatagtaatgagtttaaaaatcaactttttattgccttctcaccagctgcaaagtgttttgtaccagtgaatttttgcaataatgcagtatggtacatttttcaactttgaataaagaatacttgaacttgtccttgttgaaaaaaaaaaaaacnccncccccccccaaaaaaacaaaaacaaaaaaacnaaaaaaaaaaaacccctcnaanncctcctcggctccgctcccttttgccccccncccttctggcnccgccgccgccatccctgcggtcttagatcaaagntttctttttgggtggggcttttatgtgttagttggccaaatttccggcgcgggggtgtgggaaaaacttaggggggaccctttttacacccctctggagaaggaaaccctttcggccccccccttttttatggggggggggacacaccaactctgcccccctcggggagtgttttttccaaggtttcgccacccgggtattggtg

SEQ ID NO: 429819 - DNA, 4128 bp, Homo sapiens
  misc_feature (2)..(2): n is a, c, g, or t
  misc_feature (32)..(32): n is a, c, g, or t
  misc_feature (3788)..(3788): n is a, c, g, or t
  misc_feature (3791)..(3791): n is a, c, g, or t
  misc_feature (3823)..(3823): n is a, c, g, or t
  misc_feature (3842)..(3842): n is a, c, g, or t
  misc_feature (3845)..(3846): n is a, c, g, or t
  misc_feature (3877)..(3877): n is a, c, g, or t
  misc_feature (3888)..(3888): n is a, c, g, or t
  misc_feature (3923)..(3923): n is a, c, g, or t
gnaaataaaagcgatggcgattgggctgccgnttttggcgctcggtccggtcgcgtccgacacccggtgggactcagaaggcagtggagccccggcggcggcggcggcggcgcgcgggggcgacgcgcgggaacaacgcgagtcggcgcgcgggacgaagaataatcatgggccagactgggaagaaatctgagaagggaccagtttgttggcggaagcgtgtaaaatcagagtacatgcgactgagacagctcaagaggttcagacgagctgatgaagtaaagagtatgtttagttccaatcgtcagaaaattttggaaagaacggaaatcttaaaccaagaatggaaacagcgaaggatacagcctgtgcacatcctgacttctgtgagctcattgcgcgggactagggagtgttcggtgaccagtgacttggattttccaacacaagtcatcccattaaagactctgaatgcagttgcttcagtacccataatgtattcttggtctcccctacagcagaattttatggtggaagatgaaactgttttacataacattccttatatgggagatgaagttttagatcaggatggtactttcattgaagaactaataaaaaattatgatgggaaagtacacggggatagagaatgtgggtttataaatgatgaaatttttgtggagttggtgaatgcccttggtcaatataatgatgatgacgatgatgatgatggagacgatcctgaagaaagagaagaaaagcagaaagatctggaggatcaccgagatgataaagaaagccgcccacctcggaaatttccttctgataaaatttttgaagccatttcctcaatgtttccagataagggcacagcagaagaactaaaggaaaaatataaagaactcaccgaacagcagctcccaggcgcacttcctcctgaatgtacccccaacatagatggaccaaatgctaaatctgttcagagagagcaaagcttacactcctttcatacgcttttctgtaggcgatgttttaaatatgactgcttcctacatccttttcatgcaacacccaacacttataagcggaagaacacagaaacagctctagacaacaaaccttgtggaccacagtgttaccagcatttggagggagcaaaggagtttgctgctgctctcaccgctgagcggataaagaccccaccaaaacgtccaggaggccgcagaagaggacggcttcccaataacagtagcaggcccagcacccccaccattaatgtgctggaatcaaaggatacagacagtgatagggaagcagggactgaaacggggggagagaacaatgataaagaagaagaagagaagaaagatgaaacttcgagctcctctgaagcaaattctcggtgtcaaacaccaataaagatgaagccaaatattgaacctcctgagaatgtggagtggagtggtgctgaagcctcaatgtttagagtcctcattggcacttactatgacaatttctgtgccattgctaggttaattgggaccaaaacatgtagacaggtgtatgagtttagagtcaaagaatctagcatcatagctccagctcccgctgaggatgtggatactcctccaaggaaaaagaagaggaaacaccggttgtgggctgcacactgcagaaagatacagctgaaaaaggacggctcctctaaccatgtttacaactatcaaccctgtgatcatccacggcagccttgtgacagttcgtgcccttgtgtgatagcacaaaatttttgtgaaaagttttgtcaatgtagttcagagtgtcaaaaccgctttccgggatgccgctgcaaagcacagtgcaacaccaagcagtgcccgtgctacctggctgtccgagagtgtgaccctgacctctgtcttacttgtggagccgctgaccattgggacagtaaaaatgtgtcctgcaagaactgcagtattcagcggggctccaaaaagcatctattgctggcaccatctgacgtggcaggctgggggatttttatcaaagatcctgtgcagaaaaatgaattcatctcagaatactgtggagagattatttctcaagatgaagctgacagaagagggaaagtgtatgataaatacatgtgcagctttctgttcaacttgaacaatggtatgtttcagagctgggaggcagtgagttcctgagttgcatgtggcagccttctgccggccgagtgttcagaaacgagggtagaggtcagtgaggtgaccagaaggaggatctccttagaggcatggggggctgcttgcttgaaaggaactggagcaaggaattcctcagggagcagatagactagatgtgcaggaaaccgcctctctggagtcccggctgtctgtgggtggcactatcccagcatctggctgtgaaggggacgttgtgctcttgctgctcacctcacctcttgtgttcaggcagctcagcacacctcctccagtcagtgcctctgagcggggaaggaggggaggagcactgcatttgcaaccatcttccagactcccctggatattctcaaaggactgagaggaaaggcagctgctttcatagctgatgttctggggtagaatgtaaggctgtgtagggatgtttctggtgggattatgtgaaaatggaggtaggcttaacatgtaagatattcagagaaactcttagttggaacaagtagaataggtttttttctatgaatgctttatagacattataatgaaaaaaactaattttaaatgtgaaaatgcctattcgtgatgtttggaagaattttgtcagatttttttttttttttgctatgttttgctcagtaatgtatgtttatagttgataattaatagcttttgagtcagataaccatcttgaattataggtgattaattttaacctggaacaatagtgtgttcttccaaatgtcatttcttactgaatgaagctgcttgatttatttgcttttgcaggcaaaccctgaagaactgtaaccagttgcatttacaaaatcataataacttggtttacttataactgaaattattcactgggctgtgcttacttttttctttttagattttgtggtggatgcaacccgcaagggtaacaaaattcgttttgcaaatcattcggtaaatccaaactgctatgcaaaaggtaggtacctttgacgtgagaattggaactcccttttcagtcctgtgatgatggacttgaatacttctgggatagttgtttgttatgtgaacaagtcagttaaccccccgtggcccgtcttcatgctcactgacaccagtgtgtctctttgcagttatgatggttaacggtgatcacaggataggtatttttgccaagagagccatccagactggcgaagagctgttttttgattacagatacagccaggctgatgccctgaagtatgtcggcatcgaaagagaaatggaaatcccttgacatctgctacctcctccccctcctctgaaacagctgccttagcttcaggaacctcgagtactgtgggcaatttagaaaaagaacatgcagtttgaaattctgaatttgcaaagtactgtaagaataatttatagtaatgagtttaaaaatcaactttttattgccttctcaccagctgcaaagtgttttgtaccagtgaatttttgcaataatgcagtatggtacatttttcaactttgaataaagaatacttgaacttgtccttgttgaaaaaaaaaaaaacnccncccccccccaaaaaaacaaaaacaaaaaaacnaaaaaaaaaaaacccctcnaanncctcctcggctccgctcccttttgccccccncccttctggcnccgccgccgccatccctgcggtcttagatcaaagntttctttttgggtggggcttttatgtgttagttggccaaatttccggcgcgggggtgtgggaaaaacttaggggggaccctttttacacccctctggagaaggaaaccctttcggccccccccttttttatggggggggggacacaccaactctgcccccctcggggagtgttttttccaaggtttcgccacccgggtattggtg

SEQ ID NO: 429820 - DNA, 2389 bp, Homo sapiens
  misc_feature (2)..(2): n is a, c, g, or t
  misc_feature (32)..(32): n is a, c, g, or t
gnaaataaaagcgatggcgattgggctgccgnttttggcgctcggtccggtcgcgtccgacacccggtgggactcagaaggcagtggagccccggcggcggcggcggcggcgcgcgggggcgacgcgcgggaacaacgcgagtcggcgcgcgggacgaagaataatcatgggccagactgggaagaaatctgagaagggaccagtttgttggcggaagcgtgtaaaatcagagtacatgcgactgagacagctcaagaggttcagacgagctgatgaagtaaagagtatgtttagttccaatcgtcagaaaattttggaaagaacggaaatcttaaaccaagaatggaaacagcgaaggatacagcctgtgcacatcctgacttctgtgagctcattgcgcgggactagggagtgttcggtgaccagtgacttggattttccaacacaagtcatcccattaaagactctgaatgcagttgcttcagtacccataatgtattcttggtctcccctacagcagaattttatggtggaagatgaaactgttttacataacattccttatatgggagatgaagttttagatcaggatggtactttcattgaagaactaataaaaaattatgatgggaaagtacacggggatagagaatgtgggtttataaatgatgaaatttttgtggagttggtgaatgcccttggtcaatataatgatgatgacgatgatgatgatggagacgatcctgaagaaagagaagaaaagcagaaagatctggaggatcaccgagatgataaagaaagccgcccacctcggaaatttccttctgataaaatttttgaagccatttcctcaatgtttccagataagggcacagcagaagaactaaaggaaaaatataaagaactcaccgaacagcagctcccaggcgcacttcctcctgaatgtacccccaacatagatggaccaaatgctaaatctgttcagagagagcaaagcttacactcctttcatacgcttttctgtaggcgatgttttaaatatgactgcttcctacatccttttcatgcaacacccaacacttataagcggaagaacacagaaacagctctagacaacaaaccttgtggaccacagtgttaccagcatttggagggagcaaaggagtttgctgctgctctcaccgctgagcggataaagaccccaccaaaacgtccaggaggccgcagaagaggacggcttcccaataacagtagcaggcccagcacccccaccattaatgtgctggaatcaaaggatacagacagtgatagggaagcagggactgaaacggggggagagaacaatgataaagaagaagaagagaagaaagatgaaacttcgagctcctctgaagcaaattctcggtgtcaaacaccaataaagatgaagccaaatattgaacctcctgagaatgtggagtggagtggtgctgaagcctcaatgtttagagtcctcattggcacttactatgacaatttctgtgccattgctaggttaattgggaccaaaacatgtagacaggtgtatgagtttagagtcaaagaatctagcatcatagctccagctcccgctgaggatgtggatactcctccaaggaaaaagaagaggaaacaccggttgtgggctgcacactgcagaaagatacagctgaaaaaggacggctcctctaaccatgtttacaactatcaaccctgtgatcatccacggcagccttgtgacagttcgtgcccttgtgtgatagcacaaaatttttgtgaaaagttttgtcaatgtagttcagagtgtaagtatttgttgctttgatgcaattgcatgagaactaaataggtctttggttagcaatttaaaaaatcaaaaataagaacatgggagcactcccttgtttacttgacgaaactcatcaatttgacaagtatttattgagccccatacctggccctgtgccagtggccagtcagtcgcctgggtgttgtgtgtctgtgtgtgtgaggcaggcaaagttgtattaaaggaacctgaattttatttttttcttctttgatcatttaaattaagttgtattaaagttggcacagattgtaagaggaatctagaaggagctacccaaataatttttgggcaccagaaatcgtcagagttaggagggttttagtcttcagattaaaggaatgtagcataaacatagtagatttttataattgtttaatgagactgcacatgaagcttgggtattaagggagtgtttagaactaggggctattggaatggtcaaggaccatggatattgttccatccagaccctttattcacaccgactttaaatatatacactatttaacaaaaaaaaa

SEQ ID NO: 429821 - DNA, 1205 bp, Homo sapiens
  misc_feature (2)..(2): n is a, c, g, or t
  misc_feature (32)..(32): n is a, c, g, or t
gnaaataaaagcgatggcgattgggctgccgnttttggcgctcggtccggtcgcgtccgacacccggtgggactcagaaggcagtggagccccggcggcggcggcggcggcgcgcgggggcgacgcgcgggaacaacgcgagtcggcgcgcgggacgaagaataatcatgggccagactgggaagaaatctgagaagggaccagtttgttggcggaagcgtgtaaaatcagagtacatgcgactgagacagctcaagaggttcagacgagctgatgaagtaaagagtatgtttagttccaatcgtcagaaaattttggaaagaacggaaatcttaaaccaagaatggaaacagcgaaggatacagcctgtgcacatcctgacttctgtgagctcattgcgcgggactagggagtgttcggtgaccagtgacttggattttccaacacaagtcatcccattaaagactctgaatgcagttgcttcagtacccataatgtattcttggtctcccctacagcagaattttatggtggaagatgaaactgttttacataacattccttatatgggagatgaagttttagatcaggatggtactttcattgaagaactaataaaaaattatgatgggaaagtacacggggatagagaatgtgggtttataaatgatgaaatttttgtggagttggtgaatgcccttggtcaatataatgatgatgacgatgatgatgatggagacgatcctgaagaaagagaagaaaagcagaaagatctggaggatcaccgagatgataaagaaagccgcccacctcggaaatttccttctgataaaatttttgaagccatttcctcaatgtttccagataagggcacagcagaagaactaaaggaaaaatataaagaactcaccgaacagcagctcccaggcgcacttcctcctgaatgtacccccaacatagatggaccaaatgctaaatctgttcagagagagcaaagcttacactcctttcatacgcttttctgtaggcgatgttttaaatatgactgcttcctacatccttttcatgcaacacccaacacttataagcggaagaacacagaaacagctctagacaacaaaccttgtggaccacagtgttaccagcatttgccacattgaggaccaagagttgtgtgtttacgtacggtaaaccacaacgcagag

SEQ ID NO: 429822 - DNA, 787 bp, Homo sapiens
attttttgtaccagcgcgccttgtgttggtcccgggattcggccttatggccgggggcggcctcagatgaatgcggctgttaagacctgcaataatccagaatggctactctgatctatgttgataaggaaaatggagaaccaggcacccgtgtggttgctaaggatgggctgaagctggggtctggaccttcaatcaaagccttagatgggagatctcaagtttcaacaccacgttttggcaaaacgttcgatgccccaccagccttacctaaagctactagaaaggctttgggaactgtcaacagagctacagaaaagtctgtaaagaccaagggacccctcaaacaaaaacagccaagcttttctgccaaaaagatgactgagaagactgttaaagcaaaaagctctgttcctgcctcagatgatgcctatccagaaatagaaaaattctttcccttcaatcctctagactttgagagttttgacctgcctgaagagcaccagattgcgcacctccccttgagtggagtgcctctcatgatccttgacgaggagagagagcttgaaaagctgtttcagctgggccccccttcacctgtgaagatgccctctccaccatgggaatccaatctgttgcagtctccttcaagcattctgtcgaccctggatgttgaattgccacctgtttgctgtgacatagatatttaaatttcttagtgcttcagagtttgtgtgtatttgtattaataaagcattctttaacagaaaaaaaaaaaaaaaaaaaa

SEQ ID NO: 429823 - DNA, 769 bp, Homo sapiens
ttgtggtttaaaccaggagtgcgccgcgtccgttcaccgcggcctcagatgaatgcggctgttaagacctgcaataatccagaatggctactctgatctatgttgataaggaaaatggagaaccaggcacccgtgtggttgctaaggatgggctgaagctggggtctggaccttcaatcaaagccttagatgggagatctcaagtttcaacaccacgttttggcaaaacgttcgatgccccaccagccttacctaaagctactagaaaggctttgggaactgtcaacagagctacagaaaagtctgtaaagaccaagggacccctcaaacaaaaacagccaagcttttctgccaaaaagatgactgagaagactgttaaagcaaaaagctctgttcctgcctcagatgatgcctatccagaaatagaaaaattctttcccttcaatcctctagactttgagagttttgacctgcctgaagagcaccagattgcgcacctccccttgagtggagtgcctctcatgatccttgacgaggagagagagcttgaaaagctgtttcagctgggccccccttcacctgtgaagatgccctctccaccatgggaatccaatctgttgcagtctccttcaagcattctgtcgaccctggatgttgaattgccacctgtttgctgtgacatagatatttaaatttcttagtgcttcagagtttgtgtgtatttgtattaataaagcattctttaacagaaaaaaaaaaaaaaaaaaaa

SEQ ID NO: 429824 - DNA, 745 bp, Homo sapiens
cggacgcgtgggcgacccacgcgtccgaatgcggctgttaagacctgcaataatccagaatggctactctgatctatgttgataaggaaaatggagaaccaggcacccgtgtggttgctaaggatgggctgaagctggggtctggaccttcaatcaaagccttagatgggagatctcaagtttcaacaccacgttttggcaaaacgttcgatgccccaccagccttacctaaagctactagaaaggctttgggaactgtcaacagagctacagaaaagtctgtaaagaccaagggacccctcaaacaaaaacagccaagcttttctgccaaaaagatgactgagaagactgttaaagcaaaaagctctgttcctgcctcagatgatgcctatccagaaatagaaaaattctttcccttcaatcctctagactttgagagttttgacctgcctgaagagcaccagattgcgcacctccccttgagtggagtgcctctcatgatccttgacgaggagagagagcttgaaaagctgtttcagctgggccccccttcacctgtgaagatgccctctccaccatgggaatccaatctgttgcagtctccttcaagcattctgtcgaccctggatgttgaattgccacctgtttgctgtgacatagatatttaaatttcttagtgcttcagagtttgtgtgtatttgtattaataaagcattctttaacagaaaaaaaaaaaaaaaaaaaa

SEQ ID NO: 429825 - DNA, 871 bp, Homo sapiens
  misc_feature (783)..(783): n is a, c, g, or t
  misc_feature (794)..(794): n is a, c, g, or t
  misc_feature (797)..(797): n is a, c, g, or t
  misc_feature (799)..(799): n is a, c, g, or t
ttgtggtttaaaccaggagtgcgccgcgtccgttcaccgcggcctcagatgaatgcggctgttaagacctgcaataatccagaatggctactctgatctatgttgataaggaaaatggagaaccaggcacccgtgtggttgctaaggatgggctgaagctggggtctggaccttcaatcaaagccttagatgggagatctcaagtttcaacaccacgttttggcaaaacgttcgatgccccaccagccttacctaaagctactagaaaggctttgggaactgtcaacagagctacagaaaagtctgtaaagaccaagggacccctcaaacaaaaacagccaagcttttctgccaaaaagatgactgagaagactgttaaagcaaaaagctctgttcctgcctcagatgatgcctatccagaaatagaaaaattctttcccttcaatcctctagactttgagagttttgacctgcctgaagagcaccagattgcgcacctccccttgagtggagtgcctctcatgatccttgacgaggagagagagcttgaaaagctgtttcagctgggccccccttcacctgtgaagatgccctctccaccatgggaatccaatctgttgcagtctccttcaagcattctgtcgaccctggatgttgaattgccacctgtttgctgtgacatagatatttaaatttcttagtgcttcagagtttgtgtgtatttgtattaataaagcattctttaacagaaaaaaaaaaaaaaaaaaaattgggggccggccngaaagtttaanaancntggggggcccaggaagaatgtgcttgtcgcagacccgcaggatggtgtgcccccaaaaccgggcggttaaca

SEQ ID NO: 429826 - DNA, 920 bp, Homo sapiens
tgagtgaatgggagggtcgcgggtggttagttgagccggctccggcggggaaggaggcgggctgcggctgcggctggggctgaagctggggctggggttgggggactgcccggggcttagatggctccgagcccgtttgagcgtggtctcggactgctaactggaccaacggcaactgtctgatgagtgccagccccaaaccgcgcgctgctcgggaccttagagcctctgactcaggctggaagatttgagagctggattaaaataatccagaatggctactctgatctatgttgataaggaaaatggagaaccaggcacccgtgtggttgctaaggatgggctgaagctggggtctggaccttcaatcaaagccttagatgggagatctcaagtttcaacaccacgttttggcaaaacgttcgatgccccaccagccttacctaaagctactagaaaggctttgggaactgtcaacagagctacagaaaagtctgtaaagaccaagggacccctcaaacaaaaacagccaagcttttctgccaaaaagatgactgagaagactgttaaagcaaaaagctctgttcctgcctcagatgatgcctatccagaaatagaaaaattctttcccttcaatcctctagactttgagagttttgacctgcctgaagagcaccagattgcgcacctccccttgagtggagtgcctctcatgatccttgacgaggagagagagcttgaaaagctgtttcagctgggccccccttcacctgtgaagatgccctctccaccatgggaatccaatctgttgcagtctccttcaagcattctgtcgaccctggatggtgattggcccctgttgcggcctgtttttaatttcttcgcctcaatgggggttggttaaaagtttttcaaaaaaa

SEQ ID NO: 429827 - DNA, 507 bp, Homo sapiens
aatatgttcctcgtgccatcctggtggatctagaacctgggaccatggactctgttcgctcaggtccttttggccagatctttagaccagacaactttgtatttggtcagtctggggcaggtacaaagttgtctggtctaaagatgatgcctatccagaaatagaaaaattctttcccttcaatcctctagactttgagagttttgacctgcctgaagagcaccagattgcgcacctccccttgagtggagtgcctctcatgatccttgacgaggagagagagcttgaaaagctgtttcagctgggccccccttcacctgtgaagatgccctctccaccatgggaatccaatctgttgcagtctccttcaagcattctgtcgaccctggatgttgaattgccacctgtttgctgtgacatagatatttaaatttcttagtgcttcagagtttgtgtgtatttgtattaataaagcattctttaacagaaaaaaaaaaaaaaaaaaaa

SEQ ID NO: 429828 - DNA, 735 bp, Homo sapiens
acttgtttcatgatgagctggaagatttttatgacttggatctatagcaaccttgcgtggcgtgtgaactggtctgctgacctcagacagcagctgtcccctgtggtggtgtggcagtgcctgtgttctctcctaggcaggcctctcaactccaggtgctgtcctaagaatttttacccaggcctgtcttctcaacccctcacctttccctgaggagtgtgttgttttccctgttgaaaaaagttacaaaaataaatcttaaagttagttttttgtaacacgaatttaactgtcagacagttagtgtaggtgtgttgcgtcatctgttttcaaccagattgcatttatggacttttcacacactcattttgaggaccccaggttcaaaagtaaaagcagtggccctgctttggggtccaagaataggagtgatgggtgaagggacctaagctggccaatagccctctccaccatgggaatccaatctgttgcagtctccttcaagcattctgtcgaccctggatgttgaattgccacctgtttgctgtgacatagatatttaaatttcttagtgcttcagagtttgtgtgtatttgtattaataaagcattctttaacagaaaaaaaaaaaaaaaaaaaataccaacacgaccacccaccaccacacacacaccacacaaagtcaccaacacccccacgcgccacaccgcacaccacaccagtcagcagacacaa

SEQ ID NO: 429829 - DNA, 1106 bp, Homo sapiens
tgagtgaatgggagggtcgcgggtggttagttgagccggctccggcggggaaggaggcgggctgcggctgcggctggggctgaagctggggctggggttgggggactgcccggggcttagatggctccgagcccgtttgagcgtggtctcggactgctaactggaccaacggcaactgtctgatgagtgccagccccaaaccgcgcgctgctcgggaccttagagcctctgactcaggctggaagatttgagagctggattaagtacttgttggctcacgcccgtgactgttccgctgtttagctcttgttttttgtgtggacactcctaggatagaaagtttggtatgttgctatacctttgcttctcccaccttccccaatatctaatatgtatttctcattcttagaataatccagaatggctactctgatctatgttgataaggaaaatggagaaccaggcacccgtgtggttgctaaggatgggctgaagctggggtctggaccttcaatcaaagccttagatgggagatctcaagtttcaacaccacgttttggcaaaacgttcgatgccccaccagccttacctaaagctactagaaaggctttgggaactgtcaacagagctacagaaaagtctgtaaagaccaagggacccctcaaacaaaaacagccaagcttttctgccaaaaagatgactgagaagactgttaaagcaaaaagctctgttcctgcctcagatgatgcctatccagaaatagaaaaattctttcccttcaatcctctagactttgagagttttgacctgcctgaagagcaccagattgcgcacctccccttgagtggagtgcctctcatgatccttgacgaggagagagagcttgaaaagctgtttcagctgggccccccttcacctgtgaagatgccctctccaccatgggaatccaatctgttgcagtctccttcaagcattctgtcgaccctggatgttgaattgccacctgtttgctgtgacatagatatttaaatttcttagtgcttcagagtttgtgtgtatttgtattaataaagcattctttaacagaaaaaaaaaaaaaaaaaaaa

SEQ ID NO: 429830 - DNA, 960 bp, Homo sapiens
tgagtgaatgggagggtcgcgggtggttagttgagccggctccggcggggaaggaggcgggctgcggctgcggctggggctgaagctggggctggggttgggggactgcccggggcttagatggctccgagcccgtttgagcgtggtctcggactgctaactggaccaacggcaactgtctgatgagtgccagccccaaaccgcgcgctgctcgggaccttagagcctctgactcaggctggaagatttgagagctggattaaaataatccagaatggctactctgatctatgttgataaggaaaatggagaaccaggcacccgtgtggttgctaaggatgggctgaagctggggtctggaccttcaatcaaagccttagatgggagatctcaagtttcaacaccacgttttggcaaaacgttcgatgccccaccagccttacctaaagctactagaaaggctttgggaactgtcaacagagctacagaaaagtctgtaaagaccaagggacccctcaaacaaaaacagccaagcttttctgccaaaaagatgactgagaagactgttaaagcaaaaagctctgttcctgcctcagatgatgcctatccagaaatagaaaaattctttcccttcaatcctctagactttgagagttttgacctgcctgaagagcaccagattgcgcacctccccttgagtggagtgcctctcatgatccttgacgaggagagagagcttgaaaagctgtttcagctgggccccccttcacctgtgaagatgccctctccaccatgggaatccaatctgttgcagtctccttcaagcattctgtcgaccctggatgttgaattgccacctgtttgctgtgacatagatatttaaatttcttagtgcttcagagtttgtgtgtatttgtattaataaagcattctttaacagaaaaaaaaaaaaaaaaaaaa

SEQ ID NO: 429831 - DNA, 1003 bp, Homo sapiens
tgagtgaatgggagggtcgcgggtggttagttgagccggctccggcggggaaggaggcgggctgcggctgcggctggggctgaagctggggctggggttgggggactgcccggggcttagatggctccgagcccgtttgagcgtggtctcggactgctaactggaccaacggcaactgtctgatgagtgccagccccaaaccgcgcgctgctcgggaccttagagcctctgactcaggctggaagatttgagagctggattaagtacttgttggctcacgcccgtgactgttccgctgtttagctcttgttttttgtgtggacactcctaggatagaaagtttggaaaatggagaaccaggcacccgtgtggttgctaaggatgggctgaagctggggtctggaccttcaatcaaagccttagatgggagatctcaagtttcaacaccacgttttggcaaaacgttcgatgccccaccagccttacctaaagctactagaaaggctttgggaactgtcaacagagctacagaaaagtctgtaaagaccaagggacccctcaaacaaaaacagccaagcttttctgccaaaaagatgactgagaagactgttaaagcaaaaagctctgttcctgcctcagatgatgcctatccagaaatagaaaaattctttcccttcaatcctctagactttgagagttttgacctgcctgaagagcaccagattgcgcacctccccttgagtggagtgcctctcatgatccttgacgaggagagagagcttgaaaagctgtttcagctgggccccccttcacctgtgaagatgccctctccaccatgggaatccaatctgttgcagtctccttcaagcattctgtcgaccctggatgttgaattgccacctgtttgctgtgacatagatatttaaatttcttagtgcttcagagtttgtgtgtatttgtattaataaagcattctttaacagaaaaaaaaaaaaaaaaaaaa

SEQ ID NO: 429832 - DNA, 1050 bp, Homo sapiens
cggacgcgtgggcgacccacgcgtccgaatgcggctgttaagacctgcaataatccagaatggctactctgatctatgttgataaggaaaatggagaaccaggcacccgtgtggttgctaaggatgggctgaagctggggtctggaccttgtaagtatacaaggctgcagtcggatacactggtattgtggacgtggcctggagctggacgagacatttagtgtactttttgggcaattggagtcgtttgttattggtcctttttcatttttaatatcttaatgagatgatttaaggaagttactgaatctctgctattaggcctatcatagccatgccactaccaaaagtggggggtgggtttgggggtgagaggtcaagtttatatacacagtatttaagttgtacaggtattttgctgctggaatattcttatggtaagactttttcttcagcaatcaaagccttagatgggagatctcaagtttcaacaccacgttttggcaaaacgttcgatgccccaccagccttacctaaagctactagaaaggctttgggaactgtcaacagagctacagaaaagtctgtaaagaccaagggacccctcaaacaaaaacagccaagcttttctgccaaaaagatgactgagaagactgttaaagcaaaaagctctgttcctgcctcagatgatgcctatccagaaatagaaaaattctttcccttcaatcctctagactttgagagttttgacctgcctgaagagcaccagattgcgcacctccccttgagtggagtgcctctcatgatccttgacgaggagagagagcttgaaaagctgtttcagctgggccccccttcacctgtgaagatgccctctccaccatgggaatccaatctgttgcagtctccttcaagcattctgtcgaccctggatgttgaattgccacctgtttgctgtgacatagatatttaaatttcttagtgcttcagagtttgtgtgtatttgtattaataaagcattctttaacagaaaaaaaaaaaaaaaaaaaa

SEQ ID NO: 429833 - DNA, 636 bp, Homo sapiens
cgaattcgagctccgttcaccaagcttggggtctggaccttcaatcaaagccttagatgggagatctcaagtttcaacaccacgttttggcaaaacgttcgatgccccaccagccttacctaaagctactagaaaggctttgggaactgtcaacagagctacagaaaagtctgtaaagaccaagggacccctcaaacaaaaacagccaagcttttctgccaaaaagatgactgagaagactgttaaagcaaaaagctctgttcctgcctcagatgatgcctatccagaaatagaaaaattctttcccttcaatcctctagactttgagagttttgacctgcctgaagagcaccagattgcgcacctccccttgagtggagtgcctctcatgatccttgacgaggagagagagcttgaaaagctgtttcagctgggccccccttcacctgtgaagatgccctctccaccatgggaatccaatctgttgcagtctccttcaagcattctgtcgaccctggatgttgaattgccacctgtttgctgtgacatagatatttaaatttcttagtgcttcagagtttgtgtgtatttgtattaataaagcattctttaacagaaaaaaaaaaaaaaaaaaaa

SEQ ID NO: 429834 - DNA, 1644 bp, Homo sapiens
  misc_feature (1644)..(1644): n is a, c, g, or t
attttttgtaccagcgcgccttgtgttggtcccgggattcggccttatggccgggggcggcctcagatgaatgcggctgttaagacctgcaataatccagaatggctactctgatctatgttgataaggaaaatggagaaccaggcacccgtgtggttgctaaggatgggctgaagctggggtctggaccttcaatcaaagccttagatgggagatctcaagtttcaacaccacgttttggcaaaacgttcgatgccccaccagccttacctaaagctactagaaaggctttgggaactgtcaacagagctacagaaaagtctgtaaagaccaagggacccctcaaacaaaaacagccaagcttttctgccaaaaagatgactgagaagactgttaaagcaaaaagctctgttcctgcctcagatgatgcctatccagaaatagaaaaattctttcccttcaatcctctagactttgagagttttgacctgcctgaagagcaccagattgcgcacctccccttgagtggagtgcctctcatgatccttgacgaggagagagagcttgaaaagctgtttcagctgggccccccttcacctgtgaagatgccctctccaccatgggaatccaatctgttgcagtctccttcaagcattctgtcgaccctggatgttgaattgccacctgtttgctgtgacatagatatttaaatttcttagtgcttcagagtttgtgtgtatttgtattaataaagcattctttaacagaaaaaaaaaaaaaaaaaaaaaaaaaaaaaaaaaaaaaaaaaaaaaaaggggggggagacacaaaaagaattccccaagagggggccacaagataatcagaggatatcacacaagatctctcggcgcaccaacgacgggggccccaaataagggagagacccagaatcacaacagccaagacacggtggacacgacggaaacaaacacacagcccagacacgggggcaaacacgcgcgcacaccgcggacaccatgggacaaagcagacaccacccacaaaacaacaccgcggagggggaagaacaacaaaacaagtgcgcaaacagaacacaaccacagaaagagaaaaattaaaacggcccccaagacggcgacaacacaacaaaacaaccactacagagcgctcaacagccgagtaaaaacacaacaacggacaactaacacacaaaggaatgaaacaaagcggggccacacaccgacaccggaaatccggcgaacaactcacaccgagcgagggtcccagacaacaaatacacagacaacgaaaccgagaaacaagaccagcaagacgagcaggcaaaagacaaacaagacagaggagacgacgacgaacgcaaaggacaagaggacacaacgacgcgaggagcgagagcgagaggaagagacaacaaaaagacacaaaagaacaacaagcaagcagcgaagaacgacacacaaccacacgagacagcaggagcagaggcggagaaaacacaacgagcaagccaagaccaagagaggagaacaaaataaaaaaatacgagagcaggcggacgagagcacgagacgaacagacaaacgggaatcagaagcataacgatccgcgacgcgaacaacn

SEQ ID NO: 429835 - DNA, 1401 bp, Homo sapiens
attttttgtaccagcgcgccttgtgttggtcccgggattcggccttatggccgggggcggcctcagatgaatgcggctgttaagacctgcaataatccagaatggctactctgatctatgttgataaggaaaatggagaaccaggcacccgtgtggttgctaaggatgggctgaagctggggtctggaccttcaatcaaagccttagatgggagatctcaagtttcaacaccacgttttggcaaaacgttcgatgccccaccagccttacctaaagctactagaaaggctttgggaactgtcaacagagctacagaaaagtctgtaaagaccaagggacccctcaaacaaaaacagccaagcttttctgccaaaaagatgactgagaagactgttaaagcaaaaagctctgttcctgcctcagatgatgcctatccagaaatagaaaaattctttcccttcaatcctctagactttgagagttttgacctgcctgaagagcaccagattgcgcacctccccttgagtggagtgcctctcatgatccttgacgaggagagagagcttgaaaagctgtttcagctgggccccccttcacctgtgaagatgccctctccaccatgggaatccaatctgttgcagtctccttcaagcattctgtcgaccctggatgttgaattgccacctgtttgctgtgacatagatatttaaatttcttagtgcttcagagtttgtgtgtatttgtattaataaagcattctttaacagaaaaaaaaaaaaaaaaaaaaaaaaaaaaaaaaaaaaaaaaaaaaaaagaaaaaaaaaaaaaaaaaaaaaaaaaaaaaaagaaacaaaacaagcagggcggggggcgagcactaattatatactttcctcccgagtgggcggcacaacatttacgccagccccaccattctctagtctcaaacagcggtgcgccccatattgatggtgcgtcgttctattattcaatgagtgtgcagcggggctgcgccatttctttatctctacgtgtgcgtgtgggatgacgccacaatcgcttcttccctcgcagatgttcagttttctctgtgtgatggggcaatccgcccctccccctactctcgacgcgggggcggcgagcacgcaacacgttgagtccgcccgaaccaccacactccccaccccagagttataacctcctacccacttcgacaggaagccaattcataatcaccaatcctcccgcatgatcgctcatgtccatctatcgctgcagtcaccacaaaagccccgtccatcttcgcagctcgcccgacgccgtcggcatcatatatactaatagttgcccctcattccgtgagttatttttccagcgaccgtaaaacccatttttcatcgg

SEQ ID NO: 429836 - DNA, 1261 bp, Homo sapiens
attttttgtaccagcgcgccttgtgttggtcccgggattcggccttatggccgggggcggcctcagatgaatgcggctgttaagacctgcaataatccagaatggctactctgatctatgttgataaggaaaatggagaaccaggcacccgtgtggttgctaaggatgggctgaagctggggtctggaccttcaatcaaagccttagatgggagatctcaagtttcaacaccacgttttggcaaaacgttcgatgccccaccagccttacctaaagctactagaaaggctttgggaactgtcaacagagctacagaaaagtctgtaaagaccaagggacccctcaaacaaaaacagccaagcttttctgccaaaaagatgactgagaagactgttaaagcaaaaagctctgttcctgcctcagatgatgcctatccagaaatagaaaaattctttcccttcaatcctctagactttgagagttttgacctgcctgaagagcaccagattgcgcacctccccttgagtggagtgcctctcatgatccttgacgaggagagagagcttgaaaagctgtttcagctgggccccccttcacctgtgaagatgccctctccaccatgggaatccaatctgttgcagtctccttcaagcattctgtcgaccctggatgttgaattgccacctgtttgctgtgacatagatatttaaatttcttagtgcttcagagtttgtgtgtatttgtattaataaagcattctttaacagaaaaaaaaaaaaaaaaaaaaaaaaaaaaaaaaaaaaaaaaaaaaaaagaaaagaaaaaaaaaaaaaaacaaaagcaaaaagagagaggagccagcagacaaaaaacactaacactcaaaaaagaaacaaaacagaatataaaggcggtgcagccggtcgcactctcgacactacagctgagccggccacacacactcaacgctgcataccacaccatctctgcgtcagcacgcccgcgctgaccgaccaaccataaggggacagcgcggagcaaaaccaacgacgcgagcccaccgcgcgccgcccaccccctggctcaacaaaccaggacaccaacagcaaccaacaggaggcgcaaccaacaccacaacgcgcgcgggaacaaccacccgaacagccccgacacaactcaacgacgcgcgcccggagggcgcacaccacaggcccacaccgaaacggccagacaggcccgcccccacccgccgcggcacccc

SEQ ID NO: 429837 - DNA, 911 bp, Homo sapiens
attttttgtaccagcgcgccttgtgttggtcccgggattcggccttatggccgggggcggcctcagatgaatgcggctgttaagacctgcaataatccagaatggctactctgatctatgttgataaggaaaatggagaaccaggcacccgtgtggttgctaaggatgggctgaagctggggtctggaccttcaatcaaagccttagatgggagatctcaagtttcaacaccacgttttggcaaaacgttcgatgccccaccagccttacctaaagctactagaaaggctttgggaactgtcaacagagctacagaaaagtctgtaaagaccaagggacccctcaaacaaaaacagccaagcttttctgccaaaaagatgactgagaagactgttaaagcaaaaagctctgttcctgcctcagatgatgcctatccagaaatagaaaaattctttcccttcaatcctctagactttgagagttttgacctgcctgaagagcaccagattgcgcacctccccttgagtggagtgcctctcatgatccttgacgaggagagagagcttgaaaagctgtttcagctgggccccccttcacctgtgaagatgccctctccaccatgggaatccaatctgttgcagtctccttcaagcattctgtcgaccctggatgttgaattgccacctgtttgctgtgacatagatatttaaatttcttagtgcttcagagtttgtgtgtatttgtattaataaagcattctttaacagaaaaaaaaaaaaaaaaaaaaaaaaaaaaaatcgggggtttttttggggggggaaagaggttaaaagggcggtaactggttccgggaccatttttgtaaaggggaaatggggggccccaaggaggggataaagaaaggcggtaca

SEQ ID NO: 429838 - DNA, 889 bp, Homo sapiens
  misc_feature (801)..(801): n is a, c, g, or t
  misc_feature (812)..(812): n is a, c, g, or t
  misc_feature (815)..(815): n is a, c, g, or t
  misc_feature (817)..(817): n is a, c, g, or t
attttttgtaccagcgcgccttgtgttggtcccgggattcggccttatggccgggggcggcctcagatgaatgcggctgttaagacctgcaataatccagaatggctactctgatctatgttgataaggaaaatggagaaccaggcacccgtgtggttgctaaggatgggctgaagctggggtctggaccttcaatcaaagccttagatgggagatctcaagtttcaacaccacgttttggcaaaacgttcgatgccccaccagccttacctaaagctactagaaaggctttgggaactgtcaacagagctacagaaaagtctgtaaagaccaagggacccctcaaacaaaaacagccaagcttttctgccaaaaagatgactgagaagactgttaaagcaaaaagctctgttcctgcctcagatgatgcctatccagaaatagaaaaattctttcccttcaatcctctagactttgagagttttgacctgcctgaagagcaccagattgcgcacctccccttgagtggagtgcctctcatgatccttgacgaggagagagagcttgaaaagctgtttcagctgggccccccttcacctgtgaagatgccctctccaccatgggaatccaatctgttgcagtctccttcaagcattctgtcgaccctggatgttgaattgccacctgtttgctgtgacatagatatttaaatttcttagtgcttcagagtttgtgtgtatttgtattaataaagcattctttaacagaaaaaaaaaaaaaaaaaaaattgggggccggccngaaagtttaanaancntggggggcccaggaagaatgtgcttgtcgcagacccgcaggatggtgtgcccccaaaaccgggcggttaaca

SEQ ID NO: 429839 - DNA, 1150 bp, Homo sapiens
attttttgtaccagcgcgccttgtgttggtcccgggattcggccttatggccgggggcggcctcagatgaatgcggctgttaagacctgcaataatccagaatggctactctgatctatgttgataaggaaaatggagaaccaggcacccgtgtggttgctaaggatgggctgaagctggggtctggaccttcaatcaaagccttagatgggagatctcaagtttcaacaccacgttttggcaaaacgttcgatgccccaccagccttacctaaagctactagaaaggctttgggaactgtcaacagagctacagaaaagtctgtaaagaccaagggacccctcaaacaaaaacagccaagcttttctgccaaaaagatgactgagaagactgttaaagcaaaaagctctgttcctgcctcagatgatgcctatccagaaatagaaaaattctttcccttcaatcctctagaacattaaaaagacatctcaaggatggagagctaataaaattaatactttctactgcatatggtgaagtgacagtaagtgaaactggcatttttaaactacaagcgaagaaggatgcagaacagagagactgctaatatggtttactgtcactgccttgatttgtgttgaggcaccagcagctttctccaccgctgccttggtaccatcattacaaatgtcaacccagtggaaaaaggtgtgaatattgtcttgaaaatagttttgacctcatggaccccctcaaagggtctcagaccacaagggatctacagcccacactaagaactgctgccctgacaaaaacgctttctctctgtaacagactttgagagttttgacctgcctgaagagcaccagattgcgcacctccccttgagtggagtgcctctcatgatccttgacgaggagagagagcttgaaaagctgtttcagctgggccccccttcacctgtgaagatgccctctccaccatgggaatccaatctgttgcagtctccttcaagcattctgtcgaccctggatgttgaattgccacctgtttgctgtgacatagatatttaaatttcttagtgcttcagagtttgtgtgtatttgtattaataaagcattctttaacagaaaaaaaaaaaaaaaaaaaa

SEQ ID NO: 429840 - DNA, 871 bp, Homo sapiens
attttttgtaccagcgcgccttgtgttggtcccgggattcggccttatggccgggggcggcctcagatgaatgcggctgttaagacctgcaataatccagaatggctactctgatctatgttgataaggaaaatggagaaccaggcacccgtgtggttgctaaggatgggctgaagctggggtctggaccttcaatcaaagccttagatgggagatctcaagtttcaacaccacgttttggcaaaacgttcgatgccccaccagccttacctaaagctactagaaaggctttgggaactgtcaacagagctacagaaaagtctgtaaagaccaagggacccctcaaacaaaaacagccaagcttttctgccaaaaagatgactgagaagactgttaaagcaaaaagctctgttcctgcctcagatgatgcctatccagaaatagaaaaattctttcccttcaatcctctagatagtatcttttgcaattgcgaaaagtgcttttggcctttagtttcttagtattcagctcagctgtaacttgttatgaatataatatatgaccaaaaactatgatgagactgtctgaatctgggttgctttggacaagtgtacttgttgatggaattatttgcaaggtatcatcttaggtcaggaggggaataggaacaaagatgtagaagacattgttcctgtctgtaaaagcttatcacctagaggaggtaagatgtattcatgaacattgaataagtcccattgtggacagtctttctcacaaggcttttagaagtgagctttatgtcaagttgagcaatgcctgagagtaatttggtaggattatttctttggtttgaaaaatctacataagacag

SEQ ID NO: 429841 - DNA, 570 bp, Homo sapiens
acgtagcggccaagatggcgctagcggttggagcaggggctctgctgcgacctttacggtagtgaggttagggacgatgggagagcagctttgttcctgaagtgccgtcgaggattaggatcgagtttcttcgatcgtgagggcaattattagtggcctctagccccccagatggcatcttgaggagagagaatccacgctacgagaactaacatagtggacatcgcagttgtccgtagccgatttgcgggttacggagttgttgcaagtaaagaaggggaaatccgagcgttctcgcgttggatttcctccacgtgtgaagtgggaatggtagtgatatctcgtgctatctctgtcaagggcaagaaggagaaggaatttatttgaggccctacgacgtggtgcggtggctcacgcctgtaatcccaacactttgggaggccgaggcaggcggatcatctgagatcgagagttcgagaccagcttgaccaacatggggtttccctgtgttgaccaggttggtctcgatctcctgacctcgtgatccgcctcctcggctcccaaagtgtg

SEQ ID NO: 429842 - DNA, 471 bp, Homo sapiens
cgctctctgctacgtgtggcgtcacacgtagcggccaagatggcgctagcggttggagcaggggctctgctgcgacctttacggtagtgaggttagggacgatgggagagcagctttgttcctgaagtgccgtcgaggattaggatcgagtttcttcgatcgtgagggcaattattagtggcctctagccccccagatggcatcttgaggagagagaatccacgctacgagaactaacatagtggacatcgcagttgtccgtagccgatttgcgggttacggagttgttgcaagtaaagaaggggaaatccgagcgttctcgcgttggatttcctccacgtgtgaagtgggaatggtagtgatatctcgtgctatctctgtcaagggcaagaaggagaaggaatttatttgaggccctacgacgtggtaggttcaccctcagcctttgttcttatttcatcttatttgtgg

SEQ ID NO: 429843 - DNA, 1846 bp, Homo sapiens
acgtagcggccaagatggcgctagcggttggagcaggggctctgctgcgacctttacggtagtgaggttagggacgatgggagagcagctttgttcctgaagtgccgtcgaggattaggatcgagtttcttcgatcgtgagggcaattattagtggcctctagccccccagatggcatcttgaggagagagaatccacgctacgagaactaacatagtggacatcgcagttgtccgtagccgatttgcgggttacggagttgttgcaagtaaagaaggggaaatccgagcgttctcgcgttggatttcctccacgtgtgaagtgggaatggtagtgatatctcgtgctatctctgtcaagggcaagaaggagaaggaatttatttgaggccctacgacgtggtgcggtggctcacgcctgtaatcccaacactttgggaggccgaggcaggcggatcatctgagatcgagagttcgagaccagcttgaccaacatggagaaaccccgtctctactaaaagtacaaaattagccaggcatggtggcacatgcccgtaatcccagctactcgggaggctgaggcaggagagtagcttgagcccaggaggcggaggttgtggtgagccgagatcgcgccattgcacagcctgggcaacgagcgaaactccatctcaaaaaaataaataaaaatttttttaaaaaagaaaaaaaaaaactcgaggcaaaactaaccccctaataaaattaattaaccactcattcatcgacctccccaccccatccaacatctccgcatgatgaaacttcggctcactccttggcgcctgcctgatcctccaaatcaccacaggactattcctagccatgcactactcaccagacgcctcaaccgccttttcatcaatcgcccacatcactcgagacgtaaattatggctgaatcatccgctaccttcacgccaatggcgcctcaatattctttatctgcctcttcctacacatcgggcgaggcctatattacggatcatttctctactcagaaacctgaaacatcggcattatcctcctgcttgcaactatagcaacagccttcataggctatgtcctcccgtgaggccaaatatcattctgaggggccacagtaattacaaacttactatccgccatcccatacattgggacagacctagttcaatgaatctgaggaggctactcagtagacagtcccaccctcacacgattctttacctttcacttcatcttgcccttcattattgcagccctagcagcactccacctcctattcttgcacgaaacgggatcaaacaaccccctaggaatcacctcccattccgataaaatcaccttccacccttactacacaatcaaagacgccctcggcttacttctcttccttctctccttaatgacattaacactattctcaccagacctcctaggcgacccagacaattataccctagccaaccccttaaacacccctccccacatcaagcccgaatgatatttcctattcgcctacacaattctccgatccgtccctaacaaactaggaggcgtccttgccctattactatccatcctcatcctagcaataatccccatcctccatatatccaaacaacaaagcataatatttcgcccactaagccaatcactttattgactcctagccgcagacctcctcattctaacctgaatcggaggacaaccagtaagctacccttttaccatcattggacaagtagcatccgtactatacttcacaacaatcctaatcctaataccaactatctccctaattgaaaacaaaatactcaaatgggc

SEQ ID NO: 429844 - DNA, 1942 bp, Homo sapiens
agacggaagcggaagtgccggtggagcgcgagtaggaagtggtgagttcggagtagagatggccgcgcttgcaccgctgcccccgctccccgcacagttcaagagcatacagcatcatctgaggacggctcaggagcatgacaagcgagaccctgtggtggcttattactgtcgtttatacgcaatgcagactggaatgaagatcgatagtaaaactcctgaatgtcgcaaatttttatcaaagttaatggatcagttagaagctctaaagaagcagttgggtgataatgaagctattactcaagaaatagtgggctgtgcccatttggagaattatgctttgaaaatgtttttgtatgcagacaatgaagatcgtgctggacgatttcacaaaaacatgatcaagtccttctatactgcaagtcttttgatagatgtcataacagtatttggagaactcactgatgaaaatgtgaaacacaggaagtatgccagatggaaggcaacatacatccataattgtttaaagaatggggagactcctcaagcaggccctgttggaattgaagaagataatgatattgaagaaaatgaagatgctggagcagcctctctgcccactcagccaactcagccatcatcatcttcaacttatgacccaagcaacatgccatcaggcaactatactggaatacagattcctccgggtgcacacgctccagctaatacaccagcagaagtgcctcacagcacaggtgtagcaagtaatactatccaacctactccacagactatacctgccattgatcccgcacttttcaatacaatttcccagggggatgttcgtctaaccccagaagactttgctagagctcagaagtactgcaaatatgctggcagtgctttgcagtatgaagatgtaagcactgctgtccagaatctacaaaaggctctcaagttactgacgacaggcagagaatgaagcctttgtatgacagacccatgtatttttggcatgaggaactaacagtccattactctatcttcagcctatcaggatcacagttttaaggaagacttggttttgttgaatatgacaatgaaatctgtgtgtatcagatttttattgaagcattcatcagcagcctcaaccagttttcattgtccatttactagattcaatcgtctctgagtatatagggctgatgttagcaagaccctaaaaatgtccattgaaccctgcttcaaaaaatgaaaacacacctctataaaatgtgtactgggaataagctttgtatttacatacattaggggaattttttaaaatctgtaatgtttggacaaacagatgatattactttgctataaaattataaatgtaacttttaataaagatagccagaatattctaaattagaaattacgtttttgtttccctcaagacataaaacaaatataaacattctaaactgctggatgaatctgaaaagacattaagttcaaattttaatttattctcatattaaatataactccattaaaagtttaaaatttcatgggagaaaatataataaggtaaagaggtagaatcactttcagacttaagaataatgttgatttcccaagtgctttaccttatctgttaaagcgtaagatgaattggtatttgcttcataggcagtttgactgcatgtattagagaatgaaaagaagatatttgtagtaatgcctggaaacttggtgctttaaattaaggtactcctctgctgctgtagaatggattccacacagtggatagctatgggtgattcagaatattatgtttagattcccatttgttaagtttataagttttgtggggaattatgaacttactgtgtactacctgcatttgtgctgtgtgaaaaataaatacaaggattcgtttagctaattcaactta

SEQ ID NO: 429845 - DNA, 3115 bp, Homo sapiens
agacggaagcggaagtgccggtggagcgcgagtaggaagtggtgagttcggagtagagatggccgcgcttgcaccgctgcccccgctccccgcacagttcaagagcatacagcatcatctgaggacggctcaggagcatgacaagcgagaccctgtggtggcttattactgtcgtttatacgcaatgcagactggaatgaagatcgatagtaaaactcctgaatgtcgcaaatttttatcaaagttaatggatcagttagaagctctaaagaagcagttgggtgataatgaagctattactcaagaaatagtgggctgtgcccatttggagaattatgctttgaaaatgtttttgtatgcagacaatgaagatcgtgctggacgatttcacaaaaacatgatcaagtccttctatactgcaagtcttttgatagatgtcataacagtatttggagaactcactgatgaaaatgtgaaacacaggaagtatgccagatggaaggcaacatacatccataattgtttaaagaatggggagactcctcaagcaggccctgttggaattgaagaagataatgatattgaagaaaatgaagatgctggagcagcctctctgcccactcagccaactcagccatcatcatcttcaacttatgacccaagcaacatgccatcaggcaactatactggaatacagattcctccgggtgcacacgctccagctaatacaccagcagaagtgcctcacagcacaggtgtagcaagtaatactatccaacctactccacagactatacctgccattgatcccgcacttttcaatacaatttcccagggggatgttcgtctaaccccagaagactttgctagagctcagaagtactgcaaatatgctggcagtgctttgcagtatgaagatgtaagcactgctgtccagaatctacaaaaggctctcaagttactgacgacaggcagagaatgaagcctttgtatgacagacccatgtatttttggcatgaggaactaacagtccattactctatcttcagcctatcaggatcacagttttaaggaagacttggttttgttgaatatgacaatgaaatctgtgtgtatcagatttttattgaagcattcatcagcagcctcaaccagttttcattgtccatttactagattcaatcgtctctgagtatatagggctgatgttagcaagaccctaaaaatgtccattgaaccctgcttcaaaaaatgaaaacacacctctataaaatgtgtactgggaataagctttgtatttacatacattaggggaattttttaaaatctgtaatgtttggacaaacagatgatattactttgctataaaattataaatgtaacttttaataaagatagccagaatattctaaattagaaattacgtttttgtttccctcaagacataaaacaaatataaacattctaaactgctggatgaatctgaaaagacattaagttcaaattttaatttattctcatattaaatataactccattaaaagtttaaaatttcatgggagaaaatataataaggtaaagaggtagaatcactttcagacttaagaataatgttgatttcccaagtgctttaccttatctgttaaagcgtaagatgaattggtatttgcttcataggcagtttgactgcatgtattagagaatgaaaagaagatatttgtagtaatgcctggaaacttggtgctttaaattaaggtactcctctgctgctgtagaatggattccacacagtggatagctatgggtgattcagaatattatgtttagattcccatttgttaagtttataagttttgtggggaattatgaacttactgtgtactacctgcatttgtgctgtgtgaaaaataaatacaaggattcgtttagctaattcaacttactacaaagacaaatgtctgtttttatttgcctgctaggattgtcttttttaaaagtcatttttatttataggaatatgggtgtttctataggaagaaacaggttttttgttttttgttttttaagataaatttgacaaagttaactgaaatttatctggtccattttattcatgctactaagatgggaatctttaaacacaagggtcagcaagctttggcccatggattggccacctgttacgtaaataaagtttctttgaaacaagcctacactcattcatttatgttttgtctgtggttgctttccacaactgcagagttgtatggcttgcaagtctaaaaacatttactatttggccctctaagaaaaagttaagacacctagtctaatggccttttgggaaaaaacaaatcactaactcataatcatttatatccattattttctgcataaatgtaatgctattgtacagggtttggtagaataaatattcagactgactaaactgttctaaatcctcacaaaaaagtccccaaacaacatgcctcctaaaaaacattttcctatcttttacaagaggtatgaacatttgtagggttccacatttgcatctagaaatccaatgctctttagaatgttattacgaatagaaagatggccaggatgacctttagtgttacatgatgttcagcaaattttaattcaaaccttgatatgcctggacactgaaaagtaaacgcatcacctcctattttataccctaccttctggttcccaattgggagagcacatagagggaaggagacaatatagaaactacggagtccgctggtagtgggctgcatggtgtgacagagcccttctctgtaaaatggaaatgacaccactagccatctcaatagttacaagaattaaaagagatacagtacctgaagtgcttagcgcatggtagcatttcataaatgtttagtgtcaatactaatgctctaataatgtaaattgttaataatttatttccctaatatcaggaaatcccagttgtctatgtggcccagtgcttaaaaacgccttcttgcatgaggggattgaactatacaatgtttgttaactttgtatttgtattttttcctataaaatcttaaaataaaattaggagatgtgttctgatgta

SEQ ID NO: 429846 - DNA, 3297 bp, Homo sapiens
agacggaagcggaagtgccggtggagcgcgagtaggaagtggtgagttcggagtagagatggccgcgcttgcaccgctgcccccgctccccgcacagttcaagagcatacagcatcatctgaggacggctcaggagcatgacaagcgagaccctgtggtggcttattactgtcgtttatacgcaatgcagactggaatgaagatcgatagtaaaactcctgaatgtcgcaaatttttatcaaagttaatggatcagttagaagctctaaagaagcagttgggtgataatgaagctattactcaagaaatagtgggctgtgcccatttggagaattatgctttgaaaatgtttttgtatgcagacaatgaagatcgtgctggacgatttcacaaaaacatgatcaagtccttctatactgcaagtcttttgatagatgtcataacagtatttggagaactcactgatgaaaatgtgaaacacaggaagtatgccagatggaaggcaacatacatccataattgtttaaagaatggggagactcctcaagcaggccctgttggaattgaagaagataatgatattgaagaaaatgaagatgctggagcagcctctctgcccactcagccaactcagccatcatcatcttcaacttatgacccaagcaacatgccatcaggcaactatactggaatacagattcctccgggtgcacacgctccagctaatacaccagcagaagtgcctcacagcacaggtgtagcaagtaatactatccaacctactccacagactatacctgccattgatcccgcacttttcaatacaatttcccagggggatgttcgtctaaccccagaagactttgctagagctcagaagtactgcaaatatgctggcagtgctttgcagtatgaagatgtaagcactgctgtccagaatctacaaaaggctctcaagttactgacgacaggcagagaatgaagcctttgtatgacagacccatgtatttttggcatgaggaactaacagtccattactctatcttcagcctatcaggatcacagttttaaggaagacttggttttgttgaatatgacaatgaaatctgtgtgtatcagatttttattgaagcattcatcagcagcctcaaccagttttcattgtccatttactagattcaatcgtctctgagtatatagggctgatgttagcaagaccctaaaaatgtccattgaaccctgcttcaaaaaatgaaaacacacctctataaaatgtgtactgggaataagctttgtatttacatacattaggggaattttttaaaatctgtaatgtttggacaaacagatgatattactttgctataaaattataaatgtaacttttaataaagatagccagaatattctaaattagaaattacgtttttgtttccctcaagacataaaacaaatataaacattctaaactgctggatgaatctgaaaagacattaagttcaaattttaatttattctcatattaaatataactccattaaaagtttaaaatttcatgggagaaaatataataaggtaaagaggtagaatcactttcagacttaagaataatgttgatttcccaagtgctttaccttatctgttaaagcgtaagatgaattggtatttgcttcataggcagtttgactgcatgtattagagaatgaaaagaagatatttgtagtaatgcctggaaacttggtgctttaaattaaggtactcctctgctgctgtagaatggattccacacagtggatagctatgggtgattcagaatattatgtttagattcccatttgttaagtttataagttttgtggggaattatgaacttactgtgtactacctgcatttgtgctgtgtgaaaaataaatacaaggattcgtttagctaattcaacttactacaaagacaaatgtctgtttttatttgcctgctaggattgtcttttttaaaagtcatttttatttataggaatatgggtgtttctataggaagaaacaggttttttgttttttgttttttaagataaatttgacaaagttaactgaaatttatctggtccattttattcatgctactaagatgggaatctttaaacacaagggtcagcaagctttggcccatggattggccacctgttacgtaaataaagtttctttgaaacaagcctacactcattcatttatgttttgtctgtggttgctttccacaactgcagagttgtatggcttgcaagtctaaaaacatttactatttggccctctaagaaaaagttaagacacctagtctaatggccttttgggaaaaaacaaatcactaactcataatcatttatatccattattttctgcataaatgtaatgctattgtacagggtttggtagaataaatattcagactgactaaactgttctaaatcctcacaaaaaagtccccaaacaacatgcctcctaaaaaacattttcctatcttttacaagaggtatgaacatttgtagggttccacatttgcatctagaaatccaatgctctttagaatgttattacgaatagaaagatggccaggatgacctttagtgttacatgatgttcagcaaattttaattcaaaccttgatatgcctggacactgaaaagtaaacgcatcacctcctattttataccctaccttctggttcccaattgggagagcacatagagggaaggagacaatatagaaactacggagtccgctggtagtgggctgcatggtgtgacagagcccttctctgtaaaatggaaatgacaccactagccatctcaatagttacaagaattaaaagagatacagtacctgaagtgcttagcgcatggtagcatttcataaatgtttagtgtcaatactaatgctctaataatgtaaattgttaataatttatttccctaatatcaggaaatcccagttgtctatgtggcccagtgcttaaaaacgccttcttgcatgaggggattgaactatacaatgtttgttaactttgtatttgtattttttcctataaaatcttaaaataaaattaggagatgtgttctgatgtaacagtaggattagcaattttcatttattccttccatatatatttactgaatggctactatatgcctggtattgttctttgaaagcagaaacagcaggaaaaaaagtccctccctcatagagtttacattctaaaagggaggaaatagataataaaatatacattacatttaaaaagtggctc

SEQ ID NO: 429847 - DNA, 1858 bp, Homo sapiens
agacggaagcggaagtgccggtggagcgcgagtaggaagtggtgagttcggagtagagatggccgcgcttgcaccgctgcccccgctccccgcacagttcaagagcatacagcatcatctgaggacggctcaggagcatgacaagcgagaccctgtggtggcttattactgtcgtttatacgcaatgcagactggaatgaagatcgatagtaaaactcctgaatgtcgcaaatttttatcaaagttaatggatcagttagaagctctaaagaagcagttgggtgataatgaagctattactcaagaaatagtgggctgtgcccatttggagaattatgctttgaaaatgtttttgtatgcagacaatgaagatcgtgctggacgatttcacaaaaacatgatcaagtccttctatactgcaagtcttttgatagatgtcataacagtatttggagaactcactgatgaaaatgtgaaacacaggaagtatgccagatggaaggcaacatacatccataattgtttaaagaatggggagactcctcaagcaggccctgttggaattgaagaagataatgatattgaagaaaatgaagatgctggagcagcctctctgcccactcagccaactcagccatcatcatcttcaacttatgacccaagcaacatgccatcaggcaactatactggaatacagattcctccgggtgcacacgctccagctaatacaccagcagaagtgcctcacagcacaggtgtagcaagtaatactatccaacctactccacagactatacctgccattgatcccgcacttttcaatacaatttcccagggggatgttcgtctaaccccagaagactttgctagagctcagaagtactgcaaatatgctggcagtgctttgcagtatgaagatgtaagcactgctgtccagaatctacaaaaggctctcaagttactgacgacaggcagagaatgaagcctttgtatgacagacccatgtatttttggcatgaggaactaacagtccattactctatcttcagcctatcaggatcacagttttaattttcattgtccatttactagattcaatcgtctctgagtatatagggctgatgttagcaagaccctaaaaatgtccattgaaccctgcttcaaaaaatgaaaacacacctctataaaatgtgtactgggaataagctttgtatttacatacattaggggaattttttaaaatctgtaatgtttggacaaacagatgatattactttgctataaaattataaatgtaacttttaataaagatagccagaatattctaaattagaaattacgtttttgtttccctcaagacataaaacaaatataaacattctaaactgctggatgaatctgaaaagacattaagttcaaattttaatttattctcatattaaatataactccattaaaagtttaaaatttcatgggagaaaatataataaggtaaagaggtagaatcactttcagacttaagaataatgttgatttcccaagtgctttaccttatctgttaaagcgtaagatgaattggtatttgcttcataggcagtttgactgcatgtattagagaatgaaaagaagatatttgtagtaatgcctggaaacttggtgctttaaattaaggtactcctctgctgctgtagaatggattccacacagtggatagctatgggtgattcagaatattatgtttagattcccatttgttaagtttataagttttgtggggaattatgaacttactgtgtactacctgcatttgtgctgtgtgaaaaataaatacaaggattcgtttagctaattcaactta

SEQ ID NO: 429848 - DNA, 445 bp, Homo sapiens
agacggaagcggaagtgccggtggagcgcgagtaggaagtggtgagttcggagtagagatggccgcgcttgcaccgctgcccccgctccccgcacagttcaagagcatacagcatcatctgaggacggctcaggagcatgacaagcgagaccctgtggtggcttattactgtcgtttatacgcaatgcagactggaatgaagatcgatagtaaaactcctgaatgtcgcaaatttttatcaaagttaatggatcagttagaagctctaaagaagcagttgggtgataatgaagctattactcaagaaatagtgggctgtgcccatttggagaattatgctttgaaaatgtttttgtatgcagacaatgaagatcgtgctggacgatttcacaatatttggagaactcactgatgaaagtgagtgtacattctttattgtcttatt

SEQ ID NO: 429849 - DNA, 675 bp, Homo sapiens
taagtcagctgactattttgtgagatacatttatctcctgttttgggttgctgttttgtaattttaccttgacagtaccatatatttaaatgttgttactgaaatttgaatttctaggtaatttgaaataaatttccttgaatgcttatgttcactagattctcaaatgagccaggattgtttgactttaaaaataccaacatccaaagctgtccccttttgttacagttctttttttcatgcactaccggatattgaagaacaaacatggagccaaggctaccatggaagcctatgctagattatattaatttagttcgagattaccatgagttctgattgtgacttttcttatctacactgttattaaattatctaaaaagaaaggaactgaccattattaaaaataaaaatctctgaggttactttggttggttggtttataggctaagtgattggtttaagtataatctttactacttttctgatttctctgtttttttagcccaaatcaggcattgtgtttattttggtctttctcattcagacttttgttttcttcatatgtcagatgatatttaatccttttatatttggattttttagacagttgtgaatgcagtggcccaattttagttaactgaacctctgccttccggttcaagtatcttctct

SEQ ID NO: 429850 - DNA, 267 bp, Homo sapiens
tacctcttctccgaaaggcaacatcatatactggaatacagattcctccgggtgcacacgctccagctaatacaccagcagaagtgcctcacagcacaggtgggaaactgtaactgaatgatttatttaattccccttttataaagaagaactgcatttcttatcacatatgtgcctcataatgatggtcatgaaaacatgacaagttccttgaattccatttgaacccacaagaaacattaaattattttcattaaaattttaata

SEQ ID NO: 429851 - DNA, 3060 bp, Homo sapiens
agacggaagcggaagtgccggtggagcgcgagtaggaagtggtgagttcggagtagagatggccgcgcttgcaccgctgcccccgctccccgcacagttcaagagcatacagcatcatctgaggacggctcaggagcatgacaagcgagaccctgtggtggcttattactgtcgtttatacgcaatgcagactggaatgaagatcgatagtaaaactcctgaatgtcgcaaatttttatcaaagttaatggatcagttagaagctctaaagaagcagttgggtgataatgaagctattactcaagaaatagtgggctgtgcccatttggagaattatgctttgaaaatgtttttgtatgcagacaatgaagatcgtgctggacgatttcacaaaaacatgatcaagtccttctatactgcaagtcttttgatagatgtcataacagtatttggagaactcactgatgaaaatgtgaaacacaggaagtatgccagatggaaggcaacatacatccataattgtttaaagaatggggagactcctcaagcaggccctgttggaattgaagaagataatgatattgaagaaaatgaagatgctggagcagcctctctgcccactcagccaactcagccatcatcatcttcaacttatgacccaagcaacatgccatcaggcaactatactggaatacagattcctccgggtgcacacgctccagctaatacaccagcagaagtgcctcacagcacaggtgtagcaagtaatactatccaacctactccacagactatacctgccattgatcccgcacttttcaatacaatttcccagggggatgttcgtctaaccccagaagactttgctagagctcagaagtactgcaaatatgctggcagtgctttgcagtatgaagatgtaagcactgctgtccagaatctacaaaaggctctcaagttactgacgacaggcagagaatgaagcctttgtatgacagacccatgtatttttggcatgaggaactaacagtccattactctatcttcagcctatcaggatcacagttttaaggaagacttggttttgttgaatatgacaatgaaatctgtgtgtatcagatttttattgaagcattcatcagcagcctcaaccagttttcattgtccatttactagattcaatcgtctctgagtatatagggctgatgttagcaagaccctaaaaatgtccattgaaccctgcttcaaaaaatgaaaacacacctctataaaatgtgtactgggaataagctttgtatttacatacattaggggaattttttaaaatctgtaatgtttggacaaacagatgatattactttgctataaaattataaatgtaacttttaataaagatagccagaatattctaaattagaaattacgtttttgtttccctcaagacataaaacaaatataaacattctaaactgctggatgaatctgaaaagacattaagttcaaattttaatttattctcatattaaatataactccattaaaagtttaaaatttcatgggagaaaatataataaggtaaagaggtagaatcactttcagacttaagaataatgttgatttcccaagtgctttaccttatctgttaaagcgtaagatgaattggtatttgcttcataggcagtttgactgcatgtattagagaatgaaaagaagatatttgtagtaatgcctggaaacttggtgctttaaattaaggtactcctctgctgctgtagaatggattccacacagtggatagctatgggtgattcagaatattatgtttagattcccatttgttaagtttataagttttgtggggaattatgaacttactgtgtactacctgcatttgtgctgtgtgaaaaataaatacaaggattcgtttagctaattcaacttactacaaagacaaatgtctgtttttatttgcctgctaggattgtcttttttaaaagtcatttttatttataggaatatgggtgtttctataggaagaaacaggttttttgttttttgttttttaagataaatttgacaaagttaactgaaatttatctggtccattttattcatgctactaagatgggaatctttaaacacaagggtcagcaagctttggcccatggattggccacctgttacgtaaataaagtttctttgaaacaagcctacactcattcatttatgttttgtctgtggttgctttccacaactgcagagttgtatggcttgcaagtctaaaaacatttactatttggccctctaagaaaaagttaagacacctagtctaatggccttttgggaaaaaacaaatcactaactcataatcatttatatccattattttctgcataaatgtaatgctattgtacagggtttggtagaataaatattcagactgactaaactgttctaaatcctcacaaaaaagtccccaaacaacatgcctcctaagcatctagaaatccaatgctctttagaatgttattacgaatagaaagatggccaggatgacctttagtgttacatgatgttcagcaaattttaattcaaaccttgatatgcctggacactgaaaagtaaacgcatcacctcctattttataccctaccttctggttcccaattgggagagcacatagagggaaggagacaatatagaaactacggagtccgctggtagtgggctgcatggtgtgacagagcccttctctgtaaaatggaaatgacaccactagccatctcaatagttacaagaattaaaagagatacagtacctgaagtgcttagcgcatggtagcatttcataaatgtttagtgtcaatactaatgctctaataatgtaaattgttaataatttatttccctaatatcaggaaatcccagttgtctatgtggcccagtgcttaaaaacgccttcttgcatgaggggattgaactatacaatgtttgttaactttgtatttgtattttttcctataaaatcttaaaataaaattaggagatgtgttctgatgta

SEQ ID NO: 429852 - DNA, 2483 bp, Homo sapiens
agacggaagcggaagtgccggtggagcgcgagtaggaagtggtgagttcggagtagagatggccgcgcttgcaccgctgcccccgctccccgcacagttcaagagcatacagcatcatctgaggacggctcaggagcatgacaagcgagaccctgtggtggcttattactgtcgtttatacgcaatgcagactggaatgaagatcgatagtaaaactcctgaatgtcgcaaatttttatcaaagttaatggatcagttagaagctctaaagaagcagttgggtgataatgaagctattactcaagaaatagtgggctgtgcccatttggagaattatgctttgaaaatgtttttgtatgcagacaatgaagatcgtgctggacgatttcacaaaaacatgatcaagtccttctatactgcaagtcttttgatagatgtcataacagtatttggagaactcactgatgaaaatgtgaaacacaggaagtatgccagatggaaggcaacatacatccataattgtttaaagaatggggagactcctcaagcaggccctgttggaattgaagaagataatgatattgaagaaaatgaagatgctggagcagcctctctgcccactcagccaactcagccatcatcatcttcaacttatgacccaagcaacatgccatcaggcaactatactggaatacagattcctccgggtgcacacgctccagctaatacaccagcagaagtgcctcacagcacaggtgtagcaagtaatactatccaacctactccacagactatacctgccattgatcccgcacttttcaatacaatttcccagggggatgttcgtctaaccccagaagactttgctagagctcagaagtactgcaaatatgctggcagtgctttgcagtatgaagatgtaagcactgctgtccagaatctacaaaaggctctcaagttactgacgacaggcagagaatgaagcctttgtatgacagacccatgtatttttggcatgaggaactaacagtccattactctatcttcagcctatcaggatcacagttttaaggaagacttggttttgttgaatatgacaatgaaatctgtgtgtatcagatttttattgaagcattcatcagcagcctcaaccagttttcattgtccatttactagattcaatcgtctctgagtatatagggctgatgttagcaagaccctaaaaatgtccattgaaccctgcttcaaaaaatgaaaacacacctctataaaatgtgtactgggaataagctttgtatttacatacattaggggaattttttaaaatctgtaatgtttggacaaacagatgatattactttgctataaaattataaatgtaacttttaataaagatagccagaatattctaaattagaaattacgtttttgtttccctcaagacataaaacaaatataaacattctaaactgctggatgaatctgaaaagacattaagttcaaattttaatttattctcatattaaatataactccattaaaagtttaaaatttcatgggagaaaatataataaggtaaagaggtagaatcactttcagacttaagaataatgttgatttcccaagtgctttaccttatctgttaaagcgtaagatgaattggtatttgcttcataggcagtttgactgcatgtattagagaatgaaaagaagatatttgtagtaatgcctggaaacttggtgctttaaattaaggtactcctctgctgctgtagaatggattccacacagtggatagctatgggtgattcagaatattatgtttagattcccatttgttaagtttataagttttgtggggaattatgaacttactgtgtactacctgcatttgtgctgtgtgaaaaataaatacaaggattcgtttagctaattcaacttactacaaagacaaatgtctgtttttatttgcctgctaggattgtcttttttaaaagtcatttttatttataggaatatgggtgtttctataggaagaaacaggttttttgttttttgttttttaagataaatttgacaaagttaactgaaatttatctggtccattttattcatgctactaagatgggaatctttaaacacaagggtcagcaagctttggcccatggattggccacctgttacgtaaataaagtttctttgaaacaaaaaaaaaaaaaaaaaagcattgcggcctcgtgccgaattcggcacgaggggccgcaatgcttttttttttttttttttttttttttttgttccaaaaagtggttttggatggaaccggaacatggaacaggacacacagcaggatgcggagcagtgtcagatgaggccaaaaaggtgggtgggactggtcttcaggggctccagatgaggctgaggggctgggcctaggtcctggagtgggtcagctttggacccttctgggatctgggaagggc

SEQ ID NO: 429853 - DNA, 2409 bp, Homo sapiens
agacggaagcggaagtgccggtggagcgcgagtaggaagtggtgagttcggagtagagatggccgcgcttgcaccgctgcccccgctccccgcacagttcaagagcatacagcatcatctgaggacggctcaggagcatgacaagcgagaccctgtggtggcttattactgtcgtttatacgcaatgcagactggaatgaagatcgatagtaaaactcctgaatgtcgcaaatttttatcaaagttaatggatcagttagaagctctaaagaagcagttgggtgataatgaagctattactcaagaaatagtgggctgtgcccatttggagaattatgctttgaaaatgtttttgtatgcagacaatgaagatcgtgctggacgatttcacaaaaacatgatcaagtccttctatactgcaagtcttttgatagatgtcataacagtatttggagaactcactgatgaaaatgtgaaacacaggaagtatgccagatggaaggcaacatacatccataattgtttaaagaatggggagactcctcaagcaggccctgttggaattgaagaagataatgatattgaagaaaatgaagatgctggagcagcctctctgcccactcagccaactcagccatcatcatcttcaacttatgacccaagcaacatgccatcaggcaactatactggaatacagattcctccgggtgcacacgctccagctaatacaccagcagaagtgcctcacagcacaggtgtagcaagtaatactatccaacctactccacagactatacctgccattgatcccgcacttttcaatacaatttcccagggggatgttcgtctaaccccagaagactttgctagagctcagaagtactgcaaatatgctggcagtgctttgcagtatgaagatgtaagcactgctgtccagaatctacaaaaggctctcaagttactgacgacaggcagagaatgaagcctttgtatgacagacccatgtatttttggcatgaggaactaacagtccattactctatcttcagcctatcaggatcacagttttaaggaagacttggttttgttgaatatgacaatgaaatctgtgtgtatcagatttttattgaagcattcatcagcagcctcaaccagttttcattgtccatttactagattcaatcgtctctgagtatatagggctgatgttagcaagaccctaaaaatgtccattgaaccctgcttcaaaaaatgaaaacacacctctataaaatgtgtactgggaataagctttgtatttacatacattaggggaattttttaaaatctgtaatgtttggacaaacagatgatattactttgctataaaattataaatgtaacttttaataaagatagccagaatattctaaattagaaattacgtttttgtttccctcaagacataaaacaaatataaacattctaaactgctggatgaatctgaaaagacattaagttcaaattttaatttattctcatattaaatataactccattaaaagtttaaaatttcatgggagaaaatataataaggtaaagaggtagaatcactttcagacttaagaataatgttgatttcccaagtgctttaccttatctgttaaagcgtaagatgaattggtatttgcttcataggcagtttgactgcatgtattagagaatgaaaagaagatatttgtagtaatgcctggaaacttggtgctttaaattaaggtactcctctgctgctgtagaatggattccacacagtggatagctatgggtgattcagaatattatgtttagattcccatttgttaagtttataagttttgtggggaattatgaacttactgtgtactacctgcatttgtgctgtgtgaaaaataaatacaaggattcgtttagctaattcaacttaaaaaaaaaaaaaaaaaaaaaaaaaaaaaaaaaaaaaaaaaaaaaaaaaaaaaaaaaaaaaaaaaaagaggggggggggcggaaaaaagatatccccggggggggccacaaatacaggaaacacccagtttagggaacaaaggggggccccacataagagggagcgaaatataaaccaaaacaccgggggacacgtattaacaacgcgaggagggggagaacaagcggaaacggagaaccatggggaaaagacacacacaaagggagggagaggacaaccaacgggggcaaacacacccacccagaaaagtaacaagccactagagggggaaataactcaacactgtcagggggaaaaggtggttgtaacaacagggggaaaatagcggagggatgcaaagaatggtcgcaacaggggaatattatgatagagagaatcttacgggggggataagattaataaaaggg

SEQ ID NO: 429854 - DNA, 3034 bp, Homo sapiens
agacggaagcggaagtgccggtggagcgcgagtaggaagtggtgagttcggagtagagatggccgcgcttgcaccgctgcccccgctccccgcacagttcaagagcatacagcatcatctgaggacggctcaggagcatgacaagcgagaccctgtggtggcttattactgtcgtttatacgcaatgcagactggaatgaagatcgatagtaaaactcctgaatgtcgcaaatttttatcaaagttaatggatcagttagaagctctaaagaagcagttgggtgataatgaagctattactcaagaaatagtgggctgtgcccatttggagaattatgctttgaaaatgtttttgtatgcagacaatgaagatcgtgctggacgatttcacaaaaacatgatcaagtccttctatactgcaagtcttttgatagatgtcataacagtatttggagaactcactgatgaaaatgtgaaacacaggaagtatgccagatggaaggcaacatacatccataattgtttaaagaatggggagactcctcaagcaggccctgttggaattgaagaagataatgatattgaagaaaatgaagatgctggagcagcctctctgcccactcagccaactcagccatcatcatcttcaacttatgacccaagcaacatgccatcaggcaactatactggaatacagattcctccgggtgcacacgctccagctaatacaccagcagaagtgcctcacagcacaggggatgttcgtctaaccccagaagactttgctagagctcagaagtactgcaaatatgctggcagtgctttgcagtatgaagatgtaagcactgctgtccagaatctacaaaaggctctcaagttactgacgacaggcagagaatgaagcctttgtatgacagacccatgtatttttggcatgaggaactaacagtccattactctatcttcagcctatcaggatcacagttttaaggaagacttggttttgttgaatatgacaatgaaatctgtgtgtatcagatttttattgaagcattcatcagcagcctcaaccagttttcattgtccatttactagattcaatcgtctctgagtatatagggctgatgttagcaagaccctaaaaatgtccattgaaccctgcttcaaaaaatgaaaacacacctctataaaatgtgtactgggaataagctttgtatttacatacattaggggaattttttaaaatctgtaatgtttggacaaacagatgatattactttgctataaaattataaatgtaacttttaataaagatagccagaatattctaaattagaaattacgtttttgtttccctcaagacataaaacaaatataaacattctaaactgctggatgaatctgaaaagacattaagttcaaattttaatttattctcatattaaatataactccattaaaagtttaaaatttcatgggagaaaatataataaggtaaagaggtagaatcactttcagacttaagaataatgttgatttcccaagtgctttaccttatctgttaaagcgtaagatgaattggtatttgcttcataggcagtttgactgcatgtattagagaatgaaaagaagatatttgtagtaatgcctggaaacttggtgctttaaattaaggtactcctctgctgctgtagaatggattccacacagtggatagctatgggtgattcagaatattatgtttagattcccatttgttaagtttataagttttgtggggaattatgaacttactgtgtactacctgcatttgtgctgtgtgaaaaataaatacaaggattcgtttagctaattcaacttactacaaagacaaatgtctgtttttatttgcctgctaggattgtcttttttaaaagtcatttttatttataggaatatgggtgtttctataggaagaaacaggttttttgttttttgttttttaagataaatttgacaaagttaactgaaatttatctggtccattttattcatgctactaagatgggaatctttaaacacaagggtcagcaagctttggcccatggattggccacctgttacgtaaataaagtttctttgaaacaagcctacactcattcatttatgttttgtctgtggttgctttccacaactgcagagttgtatggcttgcaagtctaaaaacatttactatttggccctctaagaaaaagttaagacacctagtctaatggccttttgggaaaaaacaaatcactaactcataatcatttatatccattattttctgcataaatgtaatgctattgtacagggtttggtagaataaatattcagactgactaaactgttctaaatcctcacaaaaaagtccccaaacaacatgcctcctaaaaaacattttcctatcttttacaagaggtatgaacatttgtagggttccacatttgcatctagaaatccaatgctctttagaatgttattacgaatagaaagatggccaggatgacctttagtgttacatgatgttcagcaaattttaattcaaaccttgatatgcctggacactgaaaagtaaacgcatcacctcctattttataccctaccttctggttcccaattgggagagcacatagagggaaggagacaatatagaaactacggagtccgctggtagtgggctgcatggtgtgacagagcccttctctgtaaaatggaaatgacaccactagccatctcaatagttacaagaattaaaagagatacagtacctgaagtgcttagcgcatggtagcatttcataaatgtttagtgtcaatactaatgctctaataatgtaaattgttaataatttatttccctaatatcaggaaatcccagttgtctatgtggcccagtgcttaaaaacgccttcttgcatgaggggattgaactatacaatgtttgttaactttgtatttgtattttttcctataaaatcttaaaataaaattaggagatgtgttctgatgta

SEQ ID NO: 429855 - DNA, 1411 bp, Homo sapiens
agacggaagcggaagtgccggtggagcgcgagtaggaagtggtgagttcggagtagagatggccgcgcttgcaccgctgcccccgctccccgcacagttcaagagcatacagcatcatctgaggacggctcaggagcatgacaagcgagaccctgtggtggcttattactgtcgtttatacgcaatgcagactggaatgaagatcgatagtaaaactcctgaatgtcgcaaatttttatcaaagttaatggatcagttagaagctctaaagaagcagttgggtgataatgaagctattactcaagaaatagtgggctgtgcccatttggagaattatgctttgaaaatgtttttgtatgcagacaatgaagatcgtgctggacgatttcacaaaaacatgatcaagtccttctatactgcaagtcttttgatagatgtcataacagtatttggagaactcactgatgaaaatgtgaaacacaggaagtatgccagatggaaggcaacatacatccataattgtttaaagaatggggagactcctcaagcaggccctgttggaattgaagaagataatgatattgaagaaaatgaagatgctggagcagcctctctgcccactcagccaactcagccatcatcatcttcaacttatgacccaagcaacatgccatcaggcaactatactggaatacagattcctccgggtgcacacgctccagctaatacaccagcagaagtgcctcacagcacaggtgtagcaagtaatactatccaacctactccacagactatacctgccattgatcccgcacttttcaatacaatttcccagggggatgttcgtctaaccccagaagactttgctagagctcagaagtactgcaaatatgctggcagtgctttgcagtatgaagatgtaagcactgctgtccagaatctacaaaaggctctcaagttactgacgacaggcagagaatgaagcctttgtatgacagacccatgtatttttggcatgaggaactaacagtccattactctatcttcagcctatcaggatcacagttttaaggaagacttggttttgttgaatatgacaatgaaatctgtgtgtatcagatttttattgaagcattcatcagcagcctcaaccagttttcattgtccatttactagattcaatcgtctctgagtatatagggctgatgttagcaagaccctaaaaatgtccattgaaccctgcttcaaaaaatgaaaacacacctctataaaatgtgtactgggaataagctttgtatttacatacattaggggaattttttaaaatctgtaatgtttggacaaacagatgatattactttgctataaaattataaatgtaacttttaataaagatagccagaatattcta

SEQ ID NO: 429856 - DNA, 1272 bp, Homo sapiens
agacggaagcggaagtgccggtggagcgcgagtaggaagtggtgagttcggagtagagatggccgcgcttgcaccgctgcccccgctccccgcacagttcaagagcatacagcatcatctgaggacggctcaggagcatgacaagcgagaccctgtggtggcttattactgtcgtttatacgcaatgcagactggaatgaagatcgatagtaaaactcctgaatgtcgcaaatttttatcaaagttaatggatcagttagaagctctaaagaagcagttgggtgataatgaagctattactcaagaaatagtgggctgtgcccatttggagaattatgctttgaaaatgtttttgtatgcagacaatgaagatcgtgctggacgatttcacaaaaacatgatcaagtccttctatactgcaagtcttttgatagatgtcataacagtatttggagaactcactgatgaaaatgtgaaacacaggaagtatgccagatggaaggcaacatacatccataattgtttaaagaatggggagactcctcaagcaggccctgttggaattgaagaagataatgatattgaagaaaatgaagatgctggagcagcctctctgcccactcagccaactcagccatcatcatcttcaacttatgacccaagcaacatgccatcaggcaactatactggaatacagattcctccgggtgcacacgctccagctaatacaccagcagaagtgcctcacagcacaggtgtagcaagtaatactatccaacctactccacagactatacctgccattgatcccgcacttttcaatacaatttcccagggggatgttcgtctaaccccagaagactttgctagagctcagaagtactgcaaatatgctggcagtgctttgcagtatgaagatgtaagcactgctgtccagaatctacaaaaggctctcaagttactgacgacaggcagagaatgaagcctttgtatgacagacccatgtatttttggcatgaggaactaacagtccattactctatcttcagcctatcaggatcacagttttaaggaagacttggttttgttgaatatgacaatgaaatctgtgtgtatcagatttttattgaagcattcatcagcagcctcaaccagttttcattgtccatttactagattcaatcgtctctgagtatatagggctgatgttagcaagatgtcttgctcccatcaggatagtggtactcttcatcctgacagatggggtaacga

SEQ ID NO: 429857 - DNA, 3056 bp, Homo sapiens
agacggaagcggaagtgccggtggagcgcgagtaggaagtggtgagttcggagtagagatggccgcgcttgcaccgctgcccccgctccccgcacagttcaagagcatacagcatcatctgaggacggctcaggagcatgacaagcgagaccctgtggtggcttattactgtcgtttatacgcaatgcagactggaatgaagatcgatagtaaaactcctgaatgtcgcaaatttttatcaaagttaatggatcagttagaagctctaaagaagcagttgggtgataatgaagctattactcaagaaatagtgggctgtgcccatttggagaattatgctttgaaaatgtttttgtatgcagacaatgaagatcgtgctggacgatttcacaaaaacatgatcaagtccttctatactgcaagtcttttgatagatgtcataacagtatttggagaactcactgatgaaaatgtgaaacacaggaagtatgccagatggaaggcaacatacatccataattgtttaaagaatggggagactcctcaagcaggccctgttggaattgaagaagataatgtcatcatcttcaacttatgacccaagcaacatgccatcaggcaactatactggaatacagattcctccgggtgcacacgctccagctaatacaccagcagaagtgcctcacagcacaggtgtagcaagtaatactatccaacctactccacagactatacctgccattgatcccgcacttttcaatacaatttcccagggggatgttcgtctaaccccagaagactttgctagagctcagaagtactgcaaatatgctggcagtgctttgcagtatgaagatgtaagcactgctgtccagaatctacaaaaggctctcaagttactgacgacaggcagagaatgaagcctttgtatgacagacccatgtatttttggcatgaggaactaacagtccattactctatcttcagcctatcaggatcacagttttaaggaagacttggttttgttgaatatgacaatgaaatctgtgtgtatcagatttttattgaagcattcatcagcagcctcaaccagttttcattgtccatttactagattcaatcgtctctgagtatatagggctgatgttagcaagaccctaaaaatgtccattgaaccctgcttcaaaaaatgaaaacacacctctataaaatgtgtactgggaataagctttgtatttacatacattaggggaattttttaaaatctgtaatgtttggacaaacagatgatattactttgctataaaattataaatgtaacttttaataaagatagccagaatattctaaattagaaattacgtttttgtttccctcaagacataaaacaaatataaacattctaaactgctggatgaatctgaaaagacattaagttcaaattttaatttattctcatattaaatataactccattaaaagtttaaaatttcatgggagaaaatataataaggtaaagaggtagaatcactttcagacttaagaataatgttgatttcccaagtgctttaccttatctgttaaagcgtaagatgaattggtatttgcttcataggcagtttgactgcatgtattagagaatgaaaagaagatatttgtagtaatgcctggaaacttggtgctttaaattaaggtactcctctgctgctgtagaatggattccacacagtggatagctatgggtgattcagaatattatgtttagattcccatttgttaagtttataagttttgtggggaattatgaacttactgtgtactacctgcatttgtgctgtgtgaaaaataaatacaaggattcgtttagctaattcaacttactacaaagacaaatgtctgtttttatttgcctgctaggattgtcttttttaaaagtcatttttatttataggaatatgggtgtttctataggaagaaacaggttttttgttttttgttttttaagataaatttgacaaagttaactgaaatttatctggtccattttattcatgctactaagatgggaatctttaaacacaagggtcagcaagctttggcccatggattggccacctgttacgtaaataaagtttctttgaaacaagcctacactcattcatttatgttttgtctgtggttgctttccacaactgcagagttgtatggcttgcaagtctaaaaacatttactatttggccctctaagaaaaagttaagacacctagtctaatggccttttgggaaaaaacaaatcactaactcataatcatttatatccattattttctgcataaatgtaatgctattgtacagggtttggtagaataaatattcagactgactaaactgttctaaatcctcacaaaaaagtccccaaacaacatgcctcctaaaaaacattttcctatcttttacaagaggtatgaacatttgtagggttccacatttgcatctagaaatccaatgctctttagaatgttattacgaatagaaagatggccaggatgacctttagtgttacatgatgttcagcaaattttaattcaaaccttgatatgcctggacactgaaaagtaaacgcatcacctcctattttataccctaccttctggttcccaattgggagagcacatagagggaaggagacaatatagaaactacggagtccgctggtagtgggctgcatggtgtgacagagcccttctctgtaaaatggaaatgacaccactagccatctcaatagttacaagaattaaaagagatacagtacctgaagtgcttagcgcatggtagcatttcataaatgtttagtgtcaatactaatgctctaataatgtaaattgttaataatttatttccctaatatcaggaaatcccagttgtctatgtggcccagtgcttaaaaacgccttcttgcatgaggggattgaactatacaatgtttgttaactttgtatttgtattttttcctataaaatcttaaaataaaattaggagatgtgttctgatgta

SEQ ID NO: 429858 - DNA, 3063 bp, Homo sapiens
agacggaagcggaagtgccggtggagcgcgagtaggaagtggtgagttcggagtagagatggccgcgcttgcaccgctgcccccgctccccgcacagttcaagagcatacagcatcatctgaggacggctcaggagcatgacaagcgagaccctgtggtggcttattactgtcgtttatacgcaatgcagactggaatgaagatcgatagtaaaactcctgaatgtcgcaaatttttatcaaagttaatggatcagttagaagctctaaagaagcagttgggtgataatgaagctattactcaagaaatagtgggctgtgcccatttggagaattatgctttgaaaatgtttttgtatgcagacaatgaagatcgtgctggacgatttcacaaaaacatgatcaagtccttctatactgcaagtcttttgatagatgtcataacagtatttggagaactcactgatgaagtttaaagaatggggagactcctcaagcaggccctgttggaattgaagaagataatgatattgaagaaaatgaagatgctggagcagcctctctgcccactcagccaactcagccatcatcatcttcaacttatgacccaagcaacatgccatcaggcaactatactggaatacagattcctccgggtgcacacgctccagctaatacaccagcagaagtgcctcacagcacaggtgtagcaagtaatactatccaacctactccacagactatacctgccattgatcccgcacttttcaatacaatttcccagggggatgttcgtctaaccccagaagactttgctagagctcagaagtactgcaaatatgctggcagtgctttgcagtatgaagatgtaagcactgctgtccagaatctacaaaaggctctcaagttactgacgacaggcagagaatgaagcctttgtatgacagacccatgtatttttggcatgaggaactaacagtccattactctatcttcagcctatcaggatcacagttttaaggaagacttggttttgttgaatatgacaatgaaatctgtgtgtatcagatttttattgaagcattcatcagcagcctcaaccagttttcattgtccatttactagattcaatcgtctctgagtatatagggctgatgttagcaagaccctaaaaatgtccattgaaccctgcttcaaaaaatgaaaacacacctctataaaatgtgtactgggaataagctttgtatttacatacattaggggaattttttaaaatctgtaatgtttggacaaacagatgatattactttgctataaaattataaatgtaacttttaataaagatagccagaatattctaaattagaaattacgtttttgtttccctcaagacataaaacaaatataaacattctaaactgctggatgaatctgaaaagacattaagttcaaattttaatttattctcatattaaatataactccattaaaagtttaaaatttcatgggagaaaatataataaggtaaagaggtagaatcactttcagacttaagaataatgttgatttcccaagtgctttaccttatctgttaaagcgtaagatgaattggtatttgcttcataggcagtttgactgcatgtattagagaatgaaaagaagatatttgtagtaatgcctggaaacttggtgctttaaattaaggtactcctctgctgctgtagaatggattccacacagtggatagctatgggtgattcagaatattatgtttagattcccatttgttaagtttataagttttgtggggaattatgaacttactgtgtactacctgcatttgtgctgtgtgaaaaataaatacaaggattcgtttagctaattcaacttactacaaagacaaatgtctgtttttatttgcctgctaggattgtcttttttaaaagtcatttttatttataggaatatgggtgtttctataggaagaaacaggttttttgttttttgttttttaagataaatttgacaaagttaactgaaatttatctggtccattttattcatgctactaagatgggaatctttaaacacaagggtcagcaagctttggcccatggattggccacctgttacgtaaataaagtttctttgaaacaagcctacactcattcatttatgttttgtctgtggttgctttccacaactgcagagttgtatggcttgcaagtctaaaaacatttactatttggccctctaagaaaaagttaagacacctagtctaatggccttttgggaaaaaacaaatcactaactcataatcatttatatccattattttctgcataaatgtaatgctattgtacagggtttggtagaataaatattcagactgactaaactgttctaaatcctcacaaaaaagtccccaaacaacatgcctcctaaaaaacattttcctatcttttacaagaggtatgaacatttgtagggttccacatttgcatctagaaatccaatgctctttagaatgttattacgaatagaaagatggccaggatgacctttagtgttacatgatgttcagcaaattttaattcaaaccttgatatgcctggacactgaaaagtaaacgcatcacctcctattttataccctaccttctggttcccaattgggagagcacatagagggaaggagacaatatagaaactacggagtccgctggtagtgggctgcatggtgtgacagagcccttctctgtaaaatggaaatgacaccactagccatctcaatagttacaagaattaaaagagatacagtacctgaagtgcttagcgcatggtagcatttcataaatgtttagtgtcaatactaatgctctaataatgtaaattgttaataatttatttccctaatatcaggaaatcccagttgtctatgtggcccagtgcttaaaaacgccttcttgcatgaggggattgaactatacaatgtttgttaactttgtatttgtattttttcctataaaatcttaaaataaaattaggagatgtgttctgatgta

SEQ ID NO: 429859 - DNA, 2302 bp, Homo sapiens
gtaccctacctaaatggctgtaggggatgttcgtctaaccccagaagactttgctagagctcagaagtactgcaaatatgctggcagtgctttgcagtatgaagatgtaagcactgctgtccagaatctacaaaaggctctcaagttactgacgacaggcagagaatgaagcctttgtatgacagacccatgtatttttggcatgaggaactaacagtccattactctatcttcagcctatcaggatcacagttttaaggaagacttggttttgttgaatatgacaatgaaatctgtgtgtatcagatttttattgaagcattcatcagcagcctcaaccagttttcattgtccatttactagattcaatcgtctctgagtatatagggctgatgttagcaagaccctaaaaatgtccattgaaccctgcttcaaaaaatgaaaacacacctctataaaatgtgtactgggaataagctttgtatttacatacattaggggaattttttaaaatctgtaatgtttggacaaacagatgatattactttgctataaaattataaatgtaacttttaataaagatagccagaatattctaaattagaaattacgtttttgtttccctcaagacataaaacaaatataaacattctaaactgctggatgaatctgaaaagacattaagttcaaattttaatttattctcatattaaatataactccattaaaagtttaaaatttcatgggagaaaatataataaggtaaagaggtagaatcactttcagacttaagaataatgttgatttcccaagtgctttaccttatctgttaaagcgtaagatgaattggtatttgcttcataggcagtttgactgcatgtattagagaatgaaaagaagatatttgtagtaatgcctggaaacttggtgctttaaattaaggtactcctctgctgctgtagaatggattccacacagtggatagctatgggtgattcagaatattatgtttagattcccatttgttaagtttataagttttgtggggaattatgaacttactgtgtactacctgcatttgtgctgtgtgaaaaataaatacaaggattcgtttagctaattcaacttactacaaagacaaatgtctgtttttatttgcctgctaggattgtcttttttaaaagtcatttttatttataggaatatgggtgtttctataggaagaaacaggttttttgttttttgttttttaagataaatttgacaaagttaactgaaatttatctggtccattttattcatgctactaagatgggaatctttaaacacaagggtcagcaagctttggcccatggattggccacctgttacgtaaataaagtttctttgaaacaagcctacactcattcatttatgttttgtctgtggttgctttccacaactgcagagttgtatggcttgcaagtctaaaaacatttactatttggccctctaagaaaaagttaagacacctagtctaatggccttttgggaaaaaacaaatcactaactcataatcatttatatccattattttctgcataaatgtaatgctattgtacagggtttggtagaataaatattcagactgactaaactgttctaaatcctcacaaaaaagtccccaaacaacatgcctcctaaaaaacattttcctatcttttacaagaggtatgaacatttgtagggttccacatttgcatctagaaatccaatgctctttagaatgttattacgaatagaaagatggccaggatgacctttagtgttacatgatgttcagcaaattttaattcaaaccttgatatgcctggacactgaaaagtaaacgcatcacctcctattttataccctaccttctggttcccaattgggagagcacatagagggaaggagacaatatagaaactacggagtccgctggtagtgggctgcatggtgtgacagagcccttctctgtaaaatggaaatgacaccactagccatctcaatagttacaagaattaaaagagatacagtacctgaagtgcttagcgcatggtagcatttcataaatgtttagtgtcaatactaatgctctaataatgtaaattgttaataatttatttccctaatatcaggaaatcccagttgtctatgtggcccagtgcttaaaaacgccttcttgcatgaggggattgaactatacaatgtttgttaactttgtatttgtattttttcctataaaatcttaaaataaaattaggagatgtgttctgatgta

SEQ ID NO: 429860 - DNA, 923 bp, Homo sapiens
agacggaagcggaagtgccggtggagcgcgagtaggaagtggtgagttcggagtagagatggccgcgcttgcaccgctgcccccgctccccgcacagttcaagagcatacagcatcatctgaggacggctcaggagcatgacaagcgagaccctgtggtggcttattactgtcgtttatacgcaatgcagactggaatgaagatcgatagtaaaactcctgaatgtcgcaaatttttatcaaagttaatggatcagttagaagctctaaagaagcagttgggtgataatgaagctattactcaagaaatagtgggctgtgcccatttggagaattatgctttgaaaatgtttttgtatgcagacaatgaagatcgtgctggacgatttcacaaaaacatgatcaagtccttctatactgcaagtcttttgatagatgtcataacagtatttggagaactcactgatgaaaatgtgaaacacaggaagtatgccagatggaaggcaacatacatccataattgtttaaagaatggggagactcctcaagcaggccctgttggaattgaagaagataatgatattgaagaaaatgaagatgctggagcagcctctctgcccactcagccaactcagccatcatcatcttcaacttatgacccaagcaacatgccatcaggcaactatactggaatacagattcctccgggtgcacacgctccagctaatacaccagcagaagtgcctcacagcacaggtgggaaactgtaactgaatgatttatttaattccccttttataaagaagaactgcatttcttatcacatatgtgcctcataatgatggtcatgaaaacatgacaagttccttgaattccatttgaacccacaagaaacattaaattattttcattaaaattttaata

SEQ ID NO: 429861 - DNA, 3388 bp, Homo sapiens
cctggtgaactcagagattccattcagtattaagaatgggattgttgaattttactcacagagaaatcactgtttcttcatgttgtaagatgttttctgtttgtgtatttgtatcatggttactcatcaaaagctctcattctgcctttgtagaattcagttcccttcctttcatcatagctaaagtgacttttttccctactattaacgtgatcctacatccttaaatctcatcgattacctcacttaggccttggaaccttggcccttggtcggtgtccttggtgtcttctaagcaaggctgtgcgttgttcagaaacgtggccagaccgcatttcctgctgctcccatgccgcatgccaggtggcctgagacagagctccccatacggctgcaaggtgctttacctgtgggctttggcagtaacccaagagaggatcagaaggtggagaaggtgccacgagtgatttaacaggcctgccacagggagtgccccccgcccagctcgttctcagcacaggttttctctttgggagtacccaggtgatttctagtgacccaattttgtgtcatctccctgttttagccccacttgcctagagacaactgtttccgatgccttttctgcttatcatactagtttctaaccacgcagatttctcaaaatcatttattcaatgtattttatttgagcacttagtgtattgagctaggcaggatatagggtgccggagatacagcgatgaacaagacaggcaaaacttctgctttcctaaaacttgtgatgagagagaacaataaaaaagtgttgctgccacaaagaaaccaaagtgtgtggggaagggcgcgtgtttgcggttacatctcttctgtcccagaatcacagggatctggtccggtcacctctggtctttcctcttagtcgcctttaggagccctggttcccgtccatcctctggggggtttgtttgaagagatctcgtgtgggtacttgtcatgaaaacaccttgggcatcatctggtgtatccagttctagtctcgagaattctggtttcccactgtgctcagcaagtggaaagttcttttcaggccagaacagctctgcaccatcacatatcgtgttgcggcttagctgtttggtctgtagttcaggttatgggacttctccaatcctggaaggctgttgagctttttagaagtactgtacgctatcttcaagatggagcttggtcacatctgttaggaatccaaaggacactatgacttatttaaatcttgtcttactaaacctctcttgggcacgtgtgccagaatttctcttgttgcttcttgagtctttttaatttcagtgttttttcgtttgttttttgtttttttgagacagagtctcgctctgtcacccaggctggagtgcagtggcacgacctcagctcactgcaacctccgcctccttggttcaagcaattctcctgcctcagcctcccgagtagctgggattacaggtgtgtgccaccacgctcggctaattttttatattttttttagtagagacggggtttccccatgttaggcaggatggtctcgatctcctaacctcgtgatccgcctgcctcagcctcccaaagtgctgggattacaggcttgagccaccgcacccggcctaatctcagtttttgaagtgctccacaagtcattaggcaccaaaacattttcacctggggaacactggcatttccctgattagctgtgaagcaatctagtggctaagtgtgaaatcctgggtgcgcaggtgttctcactcccgccgtgttctcagtgcagtggtggtcagaggcccttccaaggagacatcactctgatcagttacagatagatgttctggaagatctgcaggtgagtagatccagcagagtttcttcccaccaactctagaagaaagggccttatcagagttgaccctgagcctttggtaaggttttgtgtgcatgcgattcagttatctttggcaattcttttcttgctgcagtgagagattaattggttgctgatcaaaccgttcatgcagatggggggacctttggattgtacggctttctcctcttggctgctttcttttcaggaagttggactttggccaggtttggctttcccagagccgttcctttctctgtcctttccttgggtcctcatggtgtgcccattggatccttggccttgtgatcctctgggaactgggggccagttccacttttgcagccttctgtgctggaagagaagcccagcgccctggaaggagcctctttaagtcccccatgtcgctttctctctctgctcttttagtgtctgagattgcctttctttgaatttcccagtgtttcttttccttgtcccttccctcaccaacctggagttattttggttgactatgtcctggctttggcttctcctggcaggaagtcatcaggcatcctctccaggtgagccgaaattccaccctcccaggttggacatcatcttttaaacccaatggtctactcccctccttctttatgaaacagtgatttcccgtgagtaactctggttctgattttttgtaccggcgcttaaattctttctgtagacgttggaaagccacaaagaacgtgactgcagtgagcctcccactggagcagccttaaccaacactttggccaaagcccccccacctcccctgtgtactgtgtgtgtgtttggtggatacagtattccttttcagtgtccctaaagctgtgatggggagtccccacttacctagaaagcattaccagtcacctactctgcattctcagatgtaaaccttgtgtagtgttctttttgcaatgacctatttatttaacctatttatatttatttaatttttactctgaaatgtatccagttacaattgtacttgcttaaagcacatcagatttgttttggacaacacccttgaccattttaaaactggaaaagtgatactgtatccttccatgggatggatgctttacagtagtcttattattaaagggtgattaatttggtcggggtaaaatgttaatttttaggtgatttttaagaattctgtgccattatgtcttctgtgtggatggttaattgtttaattagtacgtgttaattgtgtgatacagtcttctttgtggaacccaaaatcctctttttagctttatattttataaactgccagattgtacaacttttatgtgcatttttaaagcttgaagacatgagggtcattatctaagttaaacagcctatttttgtgcctcctgtacagttttataattctgctgatggcggcatcttatgtcgagccaaccacaataaaggtagttttagaaaaaaaaaaaa

SEQ ID NO: 429862 - DNA, 2804 bp, Homo sapiens
cctggtgaactcagagattccattcagtattaagaatgggattgttgaattttactcacagagaaatcactgtttcttcatgttgtaagatgttttctgtttgtgtatttgtatcatggttactcatcaaaagctctcattctgcctttgtagaattcagttcccttcctttcatcatagctaaagtgacttttttccctactattaacgtgatcctacatccttaaatctcatcgattacctcacttaggccttggaaccttggcccttggtcggtgtccttggtgtcttctaagcaaggctgtgcgttgttcagaaacgtggccagaccgcatttcctgctgctcccatgccgcatgccaggtggcctgagacagagctccccatacggctgcaaggtgctttacctgtgggctttggcagtaacccaagagaggatcagaaggtggagaaggtgccacgagtgatttaacaggcctgccacagggagtgccccccgcccagctcgttctcagcacaggttttctctttgggagtacccaggtgatttctagtgacccaattttgtgtcatctccctgttttagccccacttgcctagagacaactgtttccgatgccttttctgcttatcatactagtttctaaccacgcagatttctcaaaatcatttattcaatgtattttatttgagcacttagtgtattgagctaggcaggatatagggtgccggagatacagcgatgaacaagacaggcaaaacttctgctttcctaaaacttgtgatgagagagaacaataaaaaagtgttgctgccacaaagaaaccaaagtgtgtggggaagggcgcgtgtttgcggttacatctcttctgtcccagaatcacagggatctggtccggtcacctctggtctttcctcttagtcgcctttaggagccctggttcccgtccatcctctggggggtttgtttgaagagatctcgtgtgggtacttgtcatgaaaacaccttgggcatcatctggtgtatccagttctagtctcgagaattctggtttcccactgtgctcagcaagtggaaagttcttttcaggccagaacagctctgcaccatcacatatcgtgttgcggcttagctgtttggtctgtagttcaggttatgggacttctccaatcctggaaggctgttgagctttttagaagtactgtacgctatcttcaagatggagcttggtcacatctgttaggaatccaaaggacactatgacttatttaaatcttgtcttactaaacctctcttgggcacgtgtgccagaatttctcttgttgcttcttgagtctttttaatttcagtgttttttcgtttgttttttgtttttttgagacagagtctcgctctgtcacccaggctggagtgcagtggcacgacctcagctcactgcaacctccgcctccttggttcaagcaattctcctgcctcagcctcccgagtagctgggattacaggtgtgtgccaccacgctcggctaattttttatattttttttagtagagacggggtttccccatgttaggcaggatggtctcgatctcctaacctcgtgatccgcctgcctcagcctcccaaagtgctgggattacaggcttgagccaccgcacccggcctaatctcagtttttgaagtgctccacaagtcattaggcaccaaaacattttcacctggggaacactggcatttccctgattagctgtgaagcaatctagtggctaagtgtgaaatcctgggtgcgcaggtgttctcactcccgccgtgttctcagtgcagtggtggtcagaggcccttccaaggagacatcactctgatcagttacagatagatgttctggaagatctgcaggtgagtagatccagcagagtttcttcccaccaactctagaagaaagggccttatcagagttgaccctgagcctttggtaaggttttgtgtgcatgcgattcagttatctttggcaattcttttcttgctgcagtgagagattaattggttgctgatcaaaccgttcatgcagatggggggacctttggattgtacggctttctcctcttggctgctttcttttcaggaagttggactttggccaggtttggctttcccagagccgttcctttctctgtcctttccttgggtcctcatggtgtgcccattggatccttggccttgtgatcctctgggaactgggggccagttccacttttgcagccttctgtgctggaagagaagcccagcgccctggaaggagcctctttaagtcccccatgtcgctttctctctctgctcttttagtgtctgagattgcctttctttgaatttcccagtgtttcttttccttgtcccttccctcaccaacctggagttattttggttgactatgtcctggctttggcttctcctggcaggaagtcatcaggcatcctctccaggtgagccgaaattccaccctcccaggttggacatcatcttttaaacccaatggtctactcccctccttctttatgaaacagtgatttcccgtgagtaactctggttctgattttttgtaccggcgcttaaattctttctgtagacgttggaaagccacaaagaacgtgactgcagtgagcctcccactggagcagccttaaccaacacttggcatccagagacactttgcatccagagacactttgcatccagagacactttgcatccagagacattttgcatccagagacactttgcatccagagacactttgcatccagaggac

SEQ ID NO: 429863 - DNA, 783 bp, Homo sapiens
  misc_feature (31)..(32): n is a, c, g, or t
  misc_feature (230)..(230): n is a, c, g, or t
gtagcccagaggtcctttatttttttttttnngcacctattatgccatgaattcatagggaataggttccagcagctcaggctccttcccattggttctcacaaagtgtgcttctctgggtggagcaggctggcgctttagttgaacccaggtacctttctctttggcttctttctttttctgatcattttccttcacacgtttcaggaagctatctcggctcttagagngcttaatgtgctcaatacgcacattaattctcttggcaagaatcttgcccttaacttgtttgtttacaacaatgccaacagcatgctgggtaaccttgcttaaagcacatcagatttgttttggacaacacccttgaccattttaaaactggaaaagtgatactgtatccttccatgggatggatgctttacagtagtcttattattaaagggtgattaatttggtcggggtaaaatgttaatttttaggtgatttttaagaattctgtgccattatgtcttctgtgtggatggttaattgtttaattagtacgtgttaattgtgtgatacagtcttctttgtggaacccaaaatcctctttttagctttatattttataaactgccagattgtacaacttttatgtgcatttttaaagcttgaagacatgagggtcattatctaagttaaacagcctatttttgtgcctcctgtacagttttataattctgctgatggcggcatcttatgtcgagccaaccacaataaaggtagttttagaaaaaaaaaaaa

SEQ ID NO: 429864 - DNA, 1496 bp, Homo sapiens
gaaaacaatcaggccaggtgcggtggttcctacctataatcccagcacttcaggaggtcaaggtgggtggatcacttgagcccaagagtttgagaccagcctgggcaacatagtaagaccctgcctgtactaaaaattttaaaaagcattagctgggcatggtggctggtacctgtagtcccaggctgacgtaggaggatagctcgagcctgggaggtggaggttgcagtgaaccatgatagtgccactgcactgaagcctgagcaacagagcgagaccctgtctccaaaaaaaaaaaaaaaaaaaaggacgtacgaggaagaggttgtgaagctatacataagacaattggcaatcttgtatttcacaagaatctaattagagaatttgggtggccaatcccctcagcatagtaagggagtcaaggaagcttttaagaacctcatcagttttctaccttccctgaacaagtgtctcttatttgtaactaaatttgtcagcttaacagtaagcagtaactggtattagactcaatttttcaactagatttgtaatttggcacagtaatgaaatcttaagcccatgcacctattctgggcttcttgtttgtttgttttgagacggagctaggctgcatgcagctgggaatggagtggcacaatcttggctcactgcaacctctgcctcccgggttcaggcggttctcttgcctcagcctcccgaatagctgggattgcgggcacacaccgccatgcccagctaatttttgtatttttagtagagatggggtttcgccgtgttggccaggctggtctccaactcctgacctcaagtgatccgcctgcctcggcctcccaaagtgctgggattacaggcgtgagccacttgtgccttgccacctattctgttttgaacttcattttcctaacaacatcctgaattactgagcttttgtatcacttcatgttaaagttttcattcttatgtaccaaagtactaatttgaatttgtaatgagtctgatggtatatttcaattttttgctttgagggactggctgctacattgcagaatatcttatatccctgactgctttccactaaatgtcagtggtgaccccaatccaattattatgacaactgaacatgcttatgcatccctcatgcctttattttttattttgggaaatctttcagcttcagtttttgctgatatttatgtgattctttgttctgcaattcaaatttctgggagccaaacagtctccttggttcagattactgttttttgactagagcttctcacttcagattctgtcataagattatggcttaacctatggttgtcctttgatttggtgccatatgaaataaaacattattttctatggctatgtattaagaattttgtgcaattctgtttttcttagaaggctgagggtgtgttgtcagacaccatgactgatgtgacaggtgtattttattatgcggccgccag

SEQ ID NO: 429865 - DNA, 874 bp, Homo sapiens
gcttgggaatctattcaacttggcattataccaaagcagtggcatactggcattccctagaggttctggaatagtatagaatgtgttaacgaaataaagacttaacgttttctgattaaaattactactattgatccctaaatttatagcagtgtgtactgttcttatatttaagtatatactgtgcttaatatttttgtcgtgtttaaattgatgaaggccagttgtggctcacgcgtgctgggattacaggcgtgagccacttgtgccttgccacctattctgttttgaacttcattttcctaacaacatcctgaattactgagcttttgtatcacttcatgttaaagttttcattcttatgtaccaaagtactaatttgaatttgtaatgagtctgatggtatatttcaattttttgctttgagggactggctgctacattgcagaatatcttatatccctgactgctttccactaaatgtcagtggtgaccccaatccaattattatgacaactgaacatgcttatgcatccctcatgcctttattttttattttgggaaatctttcagcttcagtttttgctgatatttatgtgattctttgttctgcaattcaaatttctgggagccaaacagtctccttggttcagattactgttttttgactagagcttctcacttcagattctgtcataagattatggcttaacctatggttgtcctttgatttggtgccatatgaaataaaacattattttctatggctatgtattaagaattttgtgcaattctgtttttcttagaaggctgagggtgtgttgtcagacaccatgactgatgtgacaggtgtattttattatgcggccgccag

SEQ ID NO: 429866 - DNA, 711 bp, Homo sapiens
agaatgaaaatactccacctccggcctcaattttttccttactaatccagcactgtcttaatgggggactttatcgatgccttaaaggaacccccgccacttgtgccttgccacctattctgttttgaacttcattttcctaacaacatcctgaattactgagcttttgtatcacttcatgttaaagttttcattcttatgtaccaaagtactaatttgaatttgtaatgagtctgatggtatatttcaattttttgctttgagggactggctgctacattgcagaatatcttatatccctgactgctttccactaaatgtcagtggtgaccccaatccaattattatgacaactgaacatgcttatgcatccctcatgcctttattttttattttgggaaatctttcagcttcagtttttgctgatatttatgtgattctttgttctgcaattcaaatttctgggagccaaacagtctccttggttcagattactgttttttgactagagcttctcacttcagattctgtcataagattatggcttaacctatggttgtcctttgatttggtgccatatgaaataaaacattattttctatggctatgtattaagaattttgtgcaattctgtttttcttagaaggctgagggtgtgttgtcagacaccatgactgatgtgacaggtgtattttattatgcggccgccag

SEQ ID NO: 429867 - DNA, 717 bp, Homo sapiens
tgtcctgctcatgccttccttggggatggccgtccaaccctccccacctggacatccatttttgttgatgaagatgacacctgctgggattacaggcgtgagccacttgtgccttgccacctattctgttttgaacttcattttcctaacaacatcctgaattactgagcttttgtatcacttcatgttaaagttttcattcttatgtaccaaagtactaatttgaatttgtaatgagtctgatggtatatttcaattttttgctttgagggactggctgctacattgcagaatatcttatatccctgactgctttccactaaatgtcagtggtgaccccaatccaattattatgacaactgaacatgcttatgcatccctcatgcctttattttttattttgggaaatctttcagcttcagtttttgctgatatttatgtgattctttgttctgcaattcaaatttctgggagccaaacagtctccttggttcagattactgttttttgactagagcttctcacttcagattctgtcataagattatggcttaacctatggttgtcctttgatttggtgccatatgaaataaaacattattttctatggctatgtattaagaattttgtgcaattctgtttttcttagaaggctgagggtgtgttgtcagacaccatgactgatgtgacaggtgtattttattatgcggccgccag

SEQ ID NO: 429868 - DNA, 388 bp, Homo sapiens
cactccaccctcattataaggctttcagaaatcagactgtaaggcccaataccatggctctcaactacgtgatactaactccattctctgatgtttgaacactttgtcaaaatgctgggtttccaatgatgatcgtataatttgaggaaaatgctattacccttttagcgcttcatttgctccattgttgactcaatcacagtggcacctcctcacacaagtcctctatttccaccctgtgaaacaaacacaatttgatttagatcgaagcatgataggcaaagttgagaaagttggttgaggtgcatgccttcttggggcaggtgcgattgcatccctgggacattatatgtctttacatctcccagctccatatagggcttagcca

SEQ ID NO: 429869 - DNA, 2084 bp, Homo sapiens
gttaacatcatatgatctatatggtagaaggaagaataacaaatgatgaatatagtgaatcatacctctagcagggtatagggacagaaccatccaagcataattattttcttggtgtgtttgaaacagttttttgaagcaaagtatatcaatatatagggatatattcaatattatgtatttcagatgcttaagtataaagctgtgtatgaaagtgtgtttgtcaggggaacaatattattattaacatacacttgaagatacattttgaaaataattgcaatctgcataattatttatctccagtgtacactgccatgggggacgctatctagtctaaaattacagagtcgaaaagatagtgatgatggtcccatcatgtgggttcgtccaggagaacaaatgatccctgtggctgatatgccaaagtcacctttcaaaaggaaaagaactaccaatgaaataaaaaatcttcagtacctacctcgaacaagtgagccccgtgagatgctctttgaagacaggacaagagctcatgcagatcatataggacaaggttttgaacgacagactacagctgctgttggagtgctgaaggctgtgcactgtggagagtggcctgatcaaccccgtataaccaaagatgtaatttgttttcatgctgaagatttcttagaagtagttcaacgaatgcagttagatttacatgaacctccactgtcccagtgtgtccaatgggttgatgatgcaaaactgaatcaactgaggagggaaggcattcgctatgccaggattcagctatatgataatgacatttattttattccaaggaatgttgttcatcagttcaagacagtttcagctgtatgcagtttagcatggcatattcggctcaaattatatcactcagaggaggacacttctcagaatacagctactcatgaaacaggcacatcatcagattccacatcatctgttcttggacctcacactgacaacatgatttgtgctgtaagcaaagcctccttggattctgttttttcagataaacttcattctaaatatgaattacagcagattaaacatgaacctattgcatctgtaagaatcaaggaagaacctgtgaatgttaatattcctgaaaagactacagcactgaataatatggatggcaagaatgttaaagcaaaattggatcatgttcaatttgcagaatttaagattgacatggattctaaatttgaaaatagcaacaaagatttaaaggaagaattgtgccctggaaatctaagtctagttgatacaaggcaacacagttcagcacattcaaatcaagataaaaaagacgatgacattttgtgctaaatttgcatataccatctaaaatccttttttaaaaaaatttaatgtaataaagattcatgaattctgaaagcaagccaaggacttgctcctatgtctgttacaaaacatagtttatgtagctttgtaacattcctcagtgcctgtccataactgtgaagtattaagcacttagggccagatgcactgtaaacattgcaggtttaaacataaaggagtctttaaaaaaaaatcatttacgttggaattttaggttttagaatagagctgacattaacatatatatatatatataaatatatatatatattttgtaatatgagccagaattctttttcaacaatttaaagcttttccatagagcttatttatatccttttttttcattttaaatgtgtcagcactgtagtgtaaatagcttttaaatatctttttagtgtgatttatactgaaatgtgagccacttaataaaggttcatatgttcatattaataaatatgttttctgttgagtctgtaaagacaaactgacaattcatttaagtcatttgataatgattctctgctggtatatctatttagtgtggtattgtagtgcaaatgtacgtaattcaaatctagtaaatatttaagttcctcacactgtgcaggcttttttttttttttctttttttcttttttttgatacggagtttcattctgtcaccaggctggagttcagtg

SEQ ID NO: 429870 - DNA, 2060 bp, Homo sapiens
cagaattgaatcaacagcttctgctcccacccccctcaattctttggctctaataatgatcctgtttttgtattttcttcacattggtgctgatacaagctaaaaatatctgtatctccatatttatggtggatcactatgaaggtaaaaagaacgtattctcatggtacttacagagctggcccaatgagacaaataagcttggtgggagcagttgatgaagaagtaggagattatttccctgagttccttgacatgttggaagagtcaccatttttaaaatgtacactgccatgggggacgctatctagtctaaaattacagagtcgaaaagatagtgatgatggtcccatcatgtgggttcgtccaggagaacaaatgatccctgtggctgatatgccaaagtcacctttcaaaaggaaaagaactaccaatgaaataaaaaatcttcagtacctacctcgaacaagtgagccccgtgagatgctctttgaagacaggacaagagctcatgcagatcatataggacaaggttttgaacgacagactacagctgctgttggagtgctgaaggctgtgcactgtggagagtggcctgatcaaccccgtataaccaaagatgtaatttgttttcatgctgaagatttcttagaagtagttcaacgaatgcagttagatttacatgaacctccactgtcccagtgtgtccaatgggttgatgatgcaaaactgaatcaactgaggagggaaggcattcgctatgccaggattcagctatatgataatgacatttattttattccaaggaatgttgttcatcagttcaagacagtttcagctgtatgcagtttagcatggcatattcggctcaaattatatcactcagaggaggacacttctcagaatacagctactcatgaaacaggcacatcatcagattccacatcatctgttcttggacctcacactgacaacatgatttgtgctgtaagcaaagcctccttggattctgttttttcagataaacttcattctaaatatgaattacagcagattaaacatgaacctattgcatctgtaagaatcaaggaagaacctgtgaatgttaatattcctgaaaagactacagcactgaataatatggatggcaagaatgttaaagcaaaattggatcatgttcaatttgcagaatttaagattgacatggattctaaatttgaaaatagcaacaaagatttaaaggaagaattgtgccctggaaatctaagtctagttgatacaaggcaacacagttcagcacattcaaatcaagataaaaaagacgatgacattttgtgctaaatttgcatataccatctaaaatccttttttaaaaaaatttaatgtaataaagattcatgaattctgaaagcaagccaaggacttgctcctatgtctgttacaaaacatagtttatgtagctttgtaacattcctcagtgcctgtccataactgtgaagtattaagcacttagggccagatgcactgtaaacattgcaggtttaaacataaaggagtctttaaaaaaaaatcatttacgttggaattttaggttttagaatagagctgacattaacatatatatatatatataaatatatatatatattttgtaatatgagccagaattctttttcaacaatttaaagcttttccatagagcttatttatatccttttttttcattttaaatgtgtcagcactgtagtgtaaatagcttttaaatatctttttagtgtgatttatactgaaatgtgagccacttaataaaggttcatatgttcatattaataaatatgttttctgttgagtctgtaaagacaaactgacaattcatttaagtcatttgataatgattctctgctggtatatctatttagtgtggtattgtagtgcaaatgtacgtaattcaaatctagtaaatatttaagttcctcacactgtgcaggcttttttttttttttctttttttcttttttttgatacggagtttcattctgtcaccaggctggagttcagtg

SEQ ID NO: 429871 - DNA, 1826 bp, Homo sapiens
  misc_feature (13)..(13): n is a, c, g, or t
ctcggtaccgganttcctggtgtgttggaagagtcaccatttttaaaatgtacactgccatgggggacgctatctagtctaaaattacagagtcgaaaagatagtgatgatggtcccatcatgtgggttcgtccaggagaacaaatgatccctgtggctgatatgccaaagtcacctttcaaaaggaaaagaactaccaatgaaataaaaaatcttcagtacctacctcgaacaagtgagccccgtgagatgctctttgaagacaggacaagagctcatgcagatcatataggacaaggttttgaacgacagactacagctgctgttggagtgctgaaggctgtgcactgtggagagtggcctgatcaaccccgtataaccaaagatgtaatttgttttcatgctgaagatttcttagaagtagttcaacgaatgcagttagatttacatgaacctccactgtcccagtgtgtccaatgggttgatgatgcaaaactgaatcaactgaggagggaaggcattcgctatgccaggattcagctatatgataatgacatttattttattccaaggaatgttgttcatcagttcaagacagtttcagctgtatgcagtttagcatggcatattcggctcaaattatatcactcagaggaggacacttctcagaatacagctactcatgaaacaggcacatcatcagattccacatcatctgttcttggacctcacactgacaacatgatttgtgctgtaagcaaagcctccttggattctgttttttcagataaacttcattctaaatatgaattacagcagattaaacatgaacctattgcatctgtaagaatcaaggaagaacctgtgaatgttaatattcctgaaaagactacagcactgaataatatggatggcaagaatgttaaagcaaaattggatcatgttcaatttgcagaatttaagattgacatggattctaaatttgaaaatagcaacaaagatttaaaggaagaattgtgccctggaaatctaagtctagttgatacaaggcaacacagttcagcacattcaaatcaagataaaaaagacgatgacattttgtgctaaatttgcatataccatctaaaatccttttttaaaaaaatttaatgtaataaagattcatgaattctgaaagcaagccaaggacttgctcctatgtctgttacaaaacatagtttatgtagctttgtaacattcctcagtgcctgtccataactgtgaagtattaagcacttagggccagatgcactgtaaacattgcaggtttaaacataaaggagtctttaaaaaaaaatcatttacgttggaattttaggttttagaatagagctgacattaacatatatatatatatataaatatatatatatattttgtaatatgagccagaattctttttcaacaatttaaagcttttccatagagcttatttatatccttttttttcattttaaatgtgtcagcactgtagtgtaaatagcttttaaatatctttttagtgtgatttatactgaaatgtgagccacttaataaaggttcatatgttcatattaataaatatgttttctgttgagtctgtaaagacaaactgacaattcatttaagtcatttgataatgattctctgctggtatatctatttagtgtggtattgtagtgcaaatgtacgtaattcaaatctagtaaatatttaagttcctcacactgtgcaggcttttttttttttttctttttttcttttttttgatacggagtttcattctgtcaccaggctggagttcagtg

SEQ ID NO: 429872 - DNA, 1853 bp, Homo sapiens
gttaacatcatatgatctatatggtagaaggaagaataacaaatgatgaatatagtgaatcatacctctagcagggtatagggacagaaccatccaagcataattattttcttggtgtgtttgaaacagttttttgaagcaaagtatatcaatatatagggatatattcaatattatgtatttcagatgcttaagtataaagctgtgtatgaaagtgtgtttgtcaggggaacaatattattattaacatacacttgaagatacattttgaaaataattgcaatctgcataattatttatctccagtgtacactgccatgggggacgctatctagtctaaaattacagagtcgaaaagatagtgatgatggtcccatcatgtgggttcgtccaggagaacaaatgatccctgtggctgatatgccaaagtcacctttcaaaaggaaaagaactaccaatgaaataaaaaatcttcagtacctacctcgaacaagtgagccccgtgagatgctctttgaagacaggacaagagctcatgcagatcatataggacaaggttttgaacgacagactacagctgctgttggagtgctgaaggctgtgcactgtggagagtggcctgatcaaccccgtataaccaaagatgtaatttgttttcatgctgaagatttcttagaagtagttcaacgaatgcagttagatttacatgaacctccactgtcccagtgtgtccaatgggttgatgatgcaaaactgaatcaactgaggagggaaggcattcgctatgccaggattcagctatatgataatgacatttattttattccaaggaatgttgttcatcagttcaagacagtttcagctgtatgcagtttagcatggcatattcggctcaaattatatcactcagaggaggacacttctcagaatacagctactcatgaaacaggcacatcatcagattccacatcatctgttcttggacctcacactgacaacatgatttgtgctgtaagcaaagcctccttggattctgttttttcagataaacttcattctaaatatgaattacagcagattaaacatgaacctattgcatctgtaagaatcaaggaagaacctgtgaatgttaatattcctgaaaagactacagcactgaataatatggatggcaagaatgttaaagcaaaattggatcatgttcaatttgcagaatttaagattgacatggattctaaatttgaaaatagcaacaaagatttaaaggaagaattgtgccctggaaatctaagtctagttgatacaaggcaacacagttcagcacattcaaatcaagataaaaaagacgatgacattttgtgctaaatttgcatataccatctaaaatccttttttaaaaaaatttaatgtaataaagattcatgaattctgaaagcaagccaaggacttgctcctatgtctgttacaaaacatagtttatgtagctttgtaacattcctcagtgcctgtccataactgtgaagtattaagcacttagggccagatgcactgtaaacattgcaggtttaaacataaaggagtctttaaaaaaaaatcatttacgttggaattttaggttttagaatagagctgacattaacatatatatatatatataaatatatatatatattttgtaatatgagccagaattctttttcaacaatttaaagcttttccatagagcttatttatatccttttttttcattttaaatgtgtcagcactgtagtgtaaatagcttttaaatatctttttagtgtgatttatactgaaatgtgagccacttaataaaggttcatatgttcatatta

SEQ ID NO: 429873 - DNA, 344 bp, Homo sapiens
atattagaaaaatgagggtatcgtatttgtgtttttgtttgttcgtgttcattttaaagatagaatttgatttgagagcaaatttcatatatttttgtctgaattatgtgattattgaatgtttgatagcaattaagtgtcactatataaatgtaattttctttttttaaaaaacagaactaccaatgaaataaaaaatcttcagtacctacctcgaacaagtgagccccgtgagatgctctttgaagacaggacaagagctcatgcagatcatataggacaaggttttgaacgacagactacagctgctgttggagtgctgaaggctgtgcactgtggagagt

SEQ ID NO: 429874 - DNA, 516 bp, Homo sapiens
gcctgatcaaccccgtataaccaaagatgtaatttgttttcatgctgaagatttcttagaagtagttcaacgaatgcagttagatttacatgaacctccactgtcccaggtatttttaatacacttactgtctttggtttagtttttattatgaagagagttatttgtatttcttgttttattattttttagtgtgtccaatgggttgatgatgcaaaactgaatcaactgaggagggaaggcattcgctatgccaggattcagctatatgataatgacatttattttattccaaggaatgttgttcatcagttcaagacagtttcagctgtatgcagtttagcatggcatattcggctcaaattatatcactcagaggaggacacttctcagaatacagctactcatgaaacaggcacatcatcagattccacatcatctgttcttggacctcacactgacaacatgatttgtgctgtaagcaaagcctccttggattctgttttttcagataaa

SEQ ID NO: 429875 - DNA, 2064 bp, Homo sapiens
gccggaggtgtccggcgggctgagttccggtttatcgctggtctgcccacacctatacggcagtgtaccaccacggggctagagggtgcgggggagcgcatcgcgaaaaagtatctgtatctccatattatggtggatcactatgaaggtaaaaagaacgtattctcatggtacttacagagctggcccaatgagacaaataagcttggtgggagcagttgatgaagaagtaggagattatttccctgagttccttgacatgttggaagagtcaccatttttaaaatgtacactgccatgggggacgctatctagtctaaaattacagagtcgaaaagatagtgatgatggtcccatcatgtgggttcgtccaggagaacaaatgatccctgtggctgatatgccaaagtcacctttcaaaaggaaaagaactaccaatgaaataaaaaatcttcagtacctacctcgaacaagtgagccccgtgagatgctctttgaagacaggacaagagctcatgcagatcatataggacaaggttttgaacgacagactacagctgctgttggagtgctgaaggctgtgcactgtggagagtggcctgatcaaccccgtataaccaaagatgtaatttgttttcatgctgaagatttcttagaagtagttcaacgaatgcagttagatttacatgaacctccactgtcccagtgtgtccaatgggttgatgatgcaaaactgaatcaactgaggagggaaggcattcgctatgccaggattcagctatatgataatgacatttattttattccaaggaatgttgttcatcagttcaagacagtttcagctgtatgcagtttagcatggcatattcggctcaaattatatcactcagaggaggacacttctcagaatacagctactcatgaaacaggcacatcatcagattccacatcatctgttcttggacctcacactgacaacatgatttgtgctgtaagcaaagcctccttggattctgttttttcagataaacttcattctaaatatgaattacagcagattaaacatgaacctattgcatctgtaagaatcaaggaagaacctgtgaatgttaatattcctgaaaagactacagcactgaataatatggatggcaagaatgttaaagcaaaattggatcatgttcaatttgcagaatttaagattgacatggattctaaatttgaaaatagcaacaaagatttaaaggaagaattgtgccctggaaatctaagtctagttgatacaaggcaacacagttcagcacattcaaatcaagataaaaaagacgatgacattttgtgctaaatttgcatataccatctaaaatccttttttaaaaaaatttaatgtaataaagattcatgaattctgaaagcaagccaaggacttgctcctatgtctgttacaaaacatagtttatgtagctttgtaacattcctcagtgcctgtccataactgtgaagtattaagcacttagggccagatgcactgtaaacattgcaggtttaaacataaaggagtctttaaaaaaaaatcatttacgttggaattttaggttttagaatagagctgacattaacatatatatatatatataaatatatatatatattttgtaatatgagccagaattctttttcaacaatttaaagcttttccatagagcttatttatatccttttttttcattttaaatgtgtcagcactgtagtgtaaatagcttttaaatatctttttagtgtgatttatactgaaatgtgagccacttaataaaggttcatatgttcatattaataaatatgttttctgttgagtctgtaaagacaaactgacaattcatttaagtcatttgataatgattctctgctggtatatctatttagtgtggtattgtagtgcaaatgtacgtaattcaaatctagtaaatatttaagttcctcacactgtgcaggcttttttttttttttctttttttcttttttttgatacggagtttcattctgtcaccaggctggagttcagtg

SEQ ID NO: 429876 - DNA, 1722 bp, Homo sapiens
  misc_feature (13)..(13): n is a, c, g, or t
ctcggtaccgganttcctggtgtgttggaagagtcaccatttttaaaatgtacactgccatgggggacgctatctagtctaaaattacagagtcgaaaagatagtgatgatggtcccatcatgtgggttcgtccaggagaacaaatgatccctgtggctgatatgccaaagtcacctttcaaaaggaaaagaactaccaatgaaataaaaaatcttcagtacctacctcgaacaagtgagccccgtgagatgctctttgaagacaggacaagagctcatgcagatcatataggacaaggttttgaacgacagactacagctgctgttggagtgctgaaggctgtgcactgtggagagtggcctgatcaaccccgtataaccaaagatgtaatttgttttcatgctgaagatttcttagaagtagttcaacgaatgcagttagatttacatgaacctccactgtcccaggaatgttgttcatcagttcaagacagtttcagctgtatgcagtttagcatggcatattcggctcaaattatatcactcagaggaggacacttctcagaatacagctactcatgaaacaggcacatcatcagattccacatcatctgttcttggacctcacactgacaacatgatttgtgctgtaagcaaagcctccttggattctgttttttcagataaacttcattctaaatatgaattacagcagattaaacatgaacctattgcatctgtaagaatcaaggaagaacctgtgaatgttaatattcctgaaaagactacagcactgaataatatggatggcaagaatgttaaagcaaaattggatcatgttcaatttgcagaatttaagattgacatggattctaaatttgaaaatagcaacaaagatttaaaggaagaattgtgccctggaaatctaagtctagttgatacaaggcaacacagttcagcacattcaaatcaagataaaaaagacgatgacattttgtgctaaatttgcatataccatctaaaatccttttttaaaaaaatttaatgtaataaagattcatgaattctgaaagcaagccaaggacttgctcctatgtctgttacaaaacatagtttatgtagctttgtaacattcctcagtgcctgtccataactgtgaagtattaagcacttagggccagatgcactgtaaacattgcaggtttaaacataaaggagtctttaaaaaaaaatcatttacgttggaattttaggttttagaatagagctgacattaacatatatatatatatataaatatatatatatattttgtaatatgagccagaattctttttcaacaatttaaagcttttccatagagcttatttatatccttttttttcattttaaatgtgtcagcactgtagtgtaaatagcttttaaatatctttttagtgtgatttatactgaaatgtgagccacttaataaaggttcatatgttcatattaataaatatgttttctgttgagtctgtaaagacaaactgacaattcatttaagtcatttgataatgattctctgctggtatatctatttagtgtggtattgtagtgcaaatgtacgtaattcaaatctagtaaatatttaagttcctcacactgtgcaggcttttttttttttttctttttttcttttttttgatacggagtttcattctgtcaccaggctggagttcagtg

SEQ ID NO: 429877 - DNA, 924 bp, Homo sapiens
gagatctcttttgtaatatggatattgaaattaccttgtttcttggttttgttttttgtttcctcttgcctagatacacagtactgtttgacagttcatcacttcaccagccacggaagaagcacatccatcaccaaaaagtgtgcctccagaagtgaatgtcattttgtcggttgccaccacagccgagattctgaacatacggagtgtaggtcttgctgtgaaggaatgatctgcaatgtagaattacccaccaatcacactaatgcagtgtttgccgtaatgcacgctcagagaacatctggcagcagtgcccccacactctacctaccagtgcttgcctgggtctttgtgcttccattgctgtgatgccaccattcctaggagaggcagagaccagcctctaaagcacaagccaaaaactgtgtgaacggtgaactttggagtgaagatcaatcttgcacttggtgaagagtgcacattggacctcaaggcgaaagccagtggtttgcttggataaaatgttcccgcatgaggccacaggactgaggatgggaatttggcagggcctgagaagatggtctgacttccaggcttcctggtcaaagagagctacgtttgggcagttctgcagagaggatcctggcaactagtcccacctgactaggcctttagctgaaaggatttcttgacctccttgactgcctcagaggctgccaggtcaaaccctcttgtttatgtgattagctcagagcatctctatgaaatctaacccttcccctcatgagaaagcagttttccccaccaacagcatagtcaatgagaaaggcaactgtacgaagaaaacttccagtggaactaatatgaaatctatttgcaaattatggggggaaataaagcttttaaattatacaatgtaaaaaa

SEQ ID NO: 429878 - DNA, 491 bp, Homo sapiens
cggctacatagctgtgactaccagggggtgcagtctctggggaccaccactaccgaggctgggtaccatgattatcgcggaacacctgcccattaatcttgaccctgttaaaacaataactgcctatccagatatgccacacttctgcctgctgttggcaaccctcctggactaggctgctcttgttaatcacatggatgttgctgattactctgagtgcaaaccttttcactgttccagagaggagcctgacaaccacattctccttctcaagatgtgaaaggcattgtacagaagaagatgagaatcacagtaaaccaaacaaaggaaatgcagaagagatattttcagctgaatattggaaagtaagattccctgcgagcaggatctcaggcaacgtcaatgaacaacatgaagcctgacacattgtaggtgccccgtaaatattggttgagtaactgaataaacgtatttagtaacttaaaaaagct

SEQ ID NO: 429879 - DNA, 1308 bp, Homo sapiens
ctctgctggagcaggacttcagagtgtttgttttcagcctgcttttaaagtgatttgaagagagcggctttgaagattatcgcggaacacctgcccattaatcttgaccctgttaaaacaataactgcctatccagatatgccacacttctgcctgctgttggcaaccctcctggactaggctgctcttgttaatcacatggatgttatataaagttcggaccgcccagcacacaaggtcagcatgctgctcctctgtcacgctctcgctatagctgttgtccagatcgttatcttctcagaaagctgggcatttgccaagaacatcaacttctataatgtgaggcctcctctcgaccctacaccatttccaaatagcttcaagtgctttacttgtgaaaacgcaggggataattataactgcaatcgatgggcagaagacaaatggtgtccacaaaatacacagtactgtttgacagttcatcacttcaccagccacggaagaagcacatccatcaccaaaaagtgtgcctccagaagtgaatgtcattttgtcggttgccaccacagccgagattctgaacatacggagtgtaggtcttgctgtgaaggaatgatctgcaatgtagaattacccaccaatcacactaatgcagtgtttgccgtaatgcacgctcagagaacatctggcagcagtgcccccacactctacctaccagtgcttgcctgggtctttgtgcttccattgctgtgatgccaccattcctaggagaggcagagaccagcctctaaagcacaagccaaaaactgtgtgaacggtgaactttggagtgaagatcaatcttgcacttggtgaagagtgcacattggacctcaaggcgaaagccagtggtttgcttggataaaatgttcccgcatgaggccacaggactgaggatgggaatttggcagggcctgagaagatggtctgacttccaggcttcctggtcaaagagagctacgtttgggcagttctgcagagaggatcctggcaactagtcccacctgactaggcctttagctgaaaggatttcttgacctccttgactgcctcagaggctgccaggtcaaaccctcttgtttatgtgattagctcagagcatctctatgaaatctaacccttcccctcatgagaaagcagttttccccaccaacagcatagtcaatgagaaaggcaactgtacgaagaaaacttccagtggaactaatatgaaatctatttgcaaattatggggggaaataaagcttttaaattatacaatgtaaaaaa

SEQ ID NO: 429880 - DNA, 1510 bp, Homo sapiens
ttcacttcctgagccgggctggctgggtgggaacaggctccttgccgcctccccagcgctggccactaccacactgccgcccgcctgggcctcctttcaacctcgtggtggagccctgcggtttcccagcggagccgggcccggggctgctccctcgcgggcgaggctcacctgtcccggcccggccccctcccgcgccccaggtggttcagggcagggaggagccgcgccccgccccgcgcggtagcagccaacgccggccccaggcgggtgcgctgggagcctgggccgggagccgggtgagggcgccgagaggctcggtgggcgcgggcggcgagatatgccacacttctgcctgctgttggcaaccctcctggactaggctgctcttgttaatcacatggatgttatataaagttcggaccgcccagcacacaaggtcagcatgctgctcctctgtcacgctctcgctatagctgttgtccagatcgttatcttctcagaaagctgggcatttgccaagaacatcaacttctataatgtgaggcctcctctcgaccctacaccatttccaaatagcttcaagtgctttacttgtgaaaacgcaggggataattataactgcaatcgatgggcagaagacaaatggtgtccacaaaatacacagtactgtttgacagttcatcacttcaccagccacggaagaagcacatccatcaccaaaaagtgtgcctccagaagtgaatgtcattttgtcggttgccaccacagccgagattctgaacatacggagtgtaggtcttgctgtgaaggaatgatctgcaatgtagaattacccaccaatcacactaatgcagtgtttgccgtaatgcacgctcagagaacatctggcagcagtgcccccacactctacctaccagtgcttgcctgggtctttgtgcttccattgctgtgatgccaccattcctaggagaggcagagaccagcctctaaagcacaagccaaaaactgtgtgaacggtgaactttggagtgaagatcaatcttgcacttggtgaagagtgcacattggacctcaaggcgaaagccagtggtttgcttggataaaatgttcccgcatgaggccacaggactgaggatgggaatttggcagggcctgagaagatggtctgacttccaggcttcctggtcaaagagagctacgtttgggcagttctgcagagaggatcctggcaactagtcccacctgactaggcctttagctgaaaggatttcttgacctccttgactgcctcagaggctgccaggtcaaaccctcttgtttatgtgattagctcagagcatctctatgaaatctaacccttcccctcatgagaaagcagttttccccaccaacagcatagtcaatgagaaaggcaactgtacgaagaaaacttccagtggaactaatatgaaatctatttgcaaattatggggggaaataaagcttttaaattatacaatgtaaaaaa

SEQ ID NO: 429881 - DNA, 1165 bp, Homo sapiens
  misc_feature (56)..(56): n is a, c, g, or t
tagatcttttatatacaatttcgtccgcggccggagaagaacaaaaaaaggctgantataaagcatataaagttcggaccgcccagcacacaaggtcagcatgctgctcctctgtcacgctctcgctatagctgttgtccagatcgttatcttctcagaaagctgggcatttgccaagaacatcaacttctataatgtgaggcctcctctcgaccctacaccatttccaaatagcttcaagtgctttacttgtgaaaacgcaggggataattataactgcaatcgatgggcagaagacaaatggtgtccacaaaatacacagtactgtttgacagttcatcacttcaccagccacggaagaagcacatccatcaccaaaaagtgtgcctccagaagtgaatgtcattttgtcggttgccaccacagccgagattctgaacatacggagtgtaggtcttgctgtgaaggaatgatctgcaatgtagaattacccaccaatcacactaatgcagtgtttgccgtaatgcacgctcagagaacatctggcagcagtgcccccacactctacctaccagtgcttgcctgggtctttgtgcttccattgctgtgatgccaccattcctaggagaggcagagaccagcctctaaagcacaagccaaaaactgtgtgaacggtgaactttggagtgaagatcaatcttgcacttggtgaagagtgcacattggacctcaaggcgaaagccagtggtttgcttggataaaatgttcccgcatgaggccacaggactgaggatgggaatttggcagggcctgagaagatggtctgacttccaggcttcctggtcaaagagagctacgtttgggcagttctgcagagaggatcctggcaactagtcccacctgactaggcctttagctgaaaggatttcttgacctccttgactgcctcagaggctgccaggtcaaaccctcttgtttatgtgattagctcagagcatctctatgaaatctaacccttcccctcatgagaaagcagttttccccaccaacagcatagtcaatgagaaaggcaactgtacgaagaaaacttccagtggaactaatatgaaatctatttgcaaattatggggggaaataaagcttttaaattatacaatgtaaaaaa

SEQ ID NO: 429882 - DNA, 1582 bp, Homo sapiens
ttcacttcctgagccgggctggctgggtgggaacaggctccttgccgcctccccagcgctggccactaccacactgccgcccgcctgggcctcctttcaacctcgtggtggagccctgcggtttcccagcggagccgggcccggggctgctccctcgcgggcgaggctcacctgtcccggcccggccccctcccgcgccccaggtggttcagggcagggaggagccgcgccccgccccgcgcggtagcagccaacgccggccccaggcgggtgcgctgggagcctgggccgggagccgggtgagggcgccgagaggctcggtgggcgcgggcggcgagatatgccacacttctgcctgctgttggcaaccctcctggactaggctgctcttgttaatcacatggatgttgctgattactctgagtgcaaaccttttcactgttccagagaggagcctgacaaccacattctccttctcaagatataaagttcggaccgcccagcacacaaggtcagcatgctgctcctctgtcacgctctcgctatagctgttgtccagatcgttatcttctcagaaagctgggcatttgccaagaacatcaacttctataatgtgaggcctcctctcgaccctacaccatttccaaatagcttcaagtgctttacttgtgaaaacgcaggggataattataactgcaatcgatgggcagaagacaaatggtgtccacaaaatacacagtactgtttgacagttcatcacttcaccagccacggaagaagcacatccatcaccaaaaagtgtgcctccagaagtgaatgtcattttgtcggttgccaccacagccgagattctgaacatacggagtgtaggtcttgctgtgaaggaatgatctgcaatgtagaattacccaccaatcacactaatgcagtgtttgccgtaatgcacgctcagagaacatctggcagcagtgcccccacactctacctaccagtgcttgcctgggtctttgtgcttccattgctgtgatgccaccattcctaggagaggcagagaccagcctctaaagcacaagccaaaaactgtgtgaacggtgaactttggagtgaagatcaatcttgcacttggtgaagagtgcacattggacctcaaggcgaaagccagtggtttgcttggataaaatgttcccgcatgaggccacaggactgaggatgggaatttggcagggcctgagaagatggtctgacttccaggcttcctggtcaaagagagctacgtttgggcagttctgcagagaggatcctggcaactagtcccacctgactaggcctttagctgaaaggatttcttgacctccttgactgcctcagaggctgccaggtcaaaccctcttgtttatgtgattagctcagagcatctctatgaaatctaacccttcccctcatgagaaagcagttttccccaccaacagcatagtcaatgagaaaggcaactgtacgaagaaaacttccagtggaactaatatgaaatctatttgcaaattatggggggaaataaagcttttaaattatacaatgtaaaaaa

SEQ ID NO: 429883 - DNA, 1759 bp, Homo sapiens
ttcacttcctgagccgggctggctgggtgggaacaggctccttgccgcctccccagcgctggccactaccacactgccgcccgcctgggcctcctttcaacctcgtggtggagccctgcggtttcccagcggagccgggcccggggctgctccctcgcgggcgaggctcacctgtcccggcccggccccctcccgcgccccaggtggttcagggcagggaggagccgcgccccgccccgcgcggtagcagccaacgccggccccaggcgggtgcgctgggagcctgggccgggagccgggtgagggcgccgagaggctcggtgggcgcgggcggcgagatatgccacacttctgcctgctgttggcaaccctcctggactaggctgctcttgttaatcacatggatgttgctgattactctgagtgcaaaccttttcactgttccagagaggagcctgacaaccacattctccttctcaagatataaagttcggaccgcccagcacacaaggtcagcatgctgctcctctgtcacgctctcgctatagctgttgtccagatcgttatcttctcagaaagctgggcatttgccaagaacatcaacttctataatgtgaggcctcctctcgaccacaagtaaaacgtctttgatatactttattagagagtgattcttataaataaaaaattatttggtatacatgtgggtacctgtagttcccacgcctggaagagtatcagaatcatgatgaaaggatttttaactgcatatccctaatcacttctccagagatttaacagtcaagaggctacaccatttccaaatagcttcaagtgctttacttgtgaaaacgcaggggataattataactgcaatcgatgggcagaagacaaatggtgtccacaaaatacacagtactgtttgacagttcatcacttcaccagccacggaagaagcacatccatcaccaaaaagtgtgcctccagaagtgaatgtcattttgtcggttgccaccacagccgagattctgaacatacggagtgtaggtcttgctgtgaaggaatgatctgcaatgtagaattacccaccaatcacactaatgcagtgtttgccgtaatgcacgctcagagaacatctggcagcagtgcccccacactctacctaccagtgcttgcctgggtctttgtgcttccattgctgtgatgccaccattcctaggagaggcagagaccagcctctaaagcacaagccaaaaactgtgtgaacggtgaactttggagtgaagatcaatcttgcacttggtgaagagtgcacattggacctcaaggcgaaagccagtggtttgcttggataaaatgttcccgcatgaggccacaggactgaggatgggaatttggcagggcctgagaagatggtctgacttccaggcttcctggtcaaagagagctacgtttgggcagttctgcagagaggatcctggcaactagtcccacctgactaggcctttagctgaaaggatttcttgacctccttgactgcctcagaggctgccaggtcaaaccctcttgtttatgtgattagctcagagcatctctatgaaatctaacccttcccctcatgagaaagcagttttccccaccaacagcatagtcaatgagaaaggcaactgtacgaagaaaacttccagtggaactaatatgaaatctatttgcaaattatggggggaaataaagcttttaaattatacaatgtaaaaaa

SEQ ID NO: 429884 - DNA, 545 bp, Homo sapiens
ccagaacattaaaaataaggaaaataacacactttgggcttattttcttatagagttatcaattaataaaaggcgattggaattacatggtattttattttcaattacagcttgccacagctaccttggatggtaaactccagctctttctagctgagtaaccactgacctgtgagctgggtccaggaatgctgtgaggaacaacttaaaagtaagaagtagtggttcatccatcagggggccagaagcagcaactgtttttcatattttgagacttgcctcagatttcccccgtttgcaagctcctcccctctgtgtgtgccatgtcagagttttatgtctttctgctcctcaaaagggatccccttcattgggaaaatggaaatggcgtccagtacttctgcacagaatttggtaaagttaaaacaaaatatctttcaataaaacataatatagtatttgtttgataattagagttggaagaaaaaagagagaatttcttttgggcagtgaaaataaagcagttaacagtcctaaaaaaaaat

SEQ ID NO: 429885 - DNA, 478 bp, Homo sapiens
gtccacctgctcttgccaacacctggagtcagatggggtggggctggactggactcaggacttttcctgcggcatttcagaaattcttaactagtcatccattcatgagtcttctaatattccaaagtttttattagtaaaagagagggaactgtcccttccccatgggtaagagtgttgagaagagctccctaactggattatcgcagacatcgtactcgcagctggccggaacaggaccgtggaagtgtttgacctcaacgccggctgcagtgcacggtgatagcggaagcccactcacggcctgtccatcaaatctgccaaaataaagtgagtaagtttttggataacatgtatcatctgtaaaactatgtgcttaaagcatttaacagatacaaatgtatgatgccattttataagtgtttgctaccaaattcaatgttaatttttattgatcattaaattattcgaagccttg

SEQ ID NO: 429886 - DNA, 1075 bp, Homo sapiens
gtcacgacggggcagtgaatgccgtgtgctggagccaggaccggagtggctgctctctgcggcccgggacggacccatgcgaatgtggtcggctcgtggggcagagctcgcactgcttctgatataaacagaagagcaagtccaagctgatttgcaggctctccacgacgggtgcagtagacatgaccagtttatcggcagtcaacgacttttattcccacatcgtactcgcagctggccggaacaggaccgtggaagtgtttgacctcaacgccggctgcagtgcacggtgatagcggaagcccactcacggcctgtccatcaaatctgccaaaataaaggttcatcatttacaacccaacagcctcaggcttataaccttttcctgaccacggccattggcgatgggatgagactgtgggacctgagaaccctgaggtgtgagcgccactttgaagggcatccaacccgcggctatccatgtggaatcgctttcagtccttgtggacgattcgcggcttgtggggccgaggacagacacgcttacgtgtatgaaatgggctcaagcacgttttctcaccggctggctgggcacacagacactgtcactggagtggccttcaacccatcagcgccccagcttgccacagctaccttggatggtaaactccagctctttctagctgagtaaccactgacctgtgagctgggtccaggaatgctgtgaggaacaacttaaaagtaagaagtagtggttcatccatcagggggccagaagcagcaactgtttttcatattttgagacttgcctcagatttcccccgtttgcaagctcctcccctctgtgtgtgccatgtcagagttttatgtctttctgctcctcaaaagggatccccttcattgggaaaatggaaatggcgtccagtacttctgcacagaatttggtaaagttaaaacaaaatatctttcaataaaacataatatagtatttgtttgataattagagttggaagaaaaaagagagaatttcttttgggcagtgaaaataaagcagttaacagtcctaaaaaaaaat

SEQ ID NO: 429887 - DNA, 826 bp, Homo sapiens
agcaacctccagcatgggtgtcatagccatcacgagcatgtcacagtgccgcagagattttgtttatgggcagtttctcatggcctgtttatgtccaaatttggggggcctgttctgagcacattttcctgtaagcactcaggaagaatgaagcttcctgtgtcctttaacactttaagtacagatcttagtgatacataaccagttttatctctctcaagctctaccttccgcaaagtgctagaatacagttctgccaagttcttcactacttcgtatcaagggttgtattttctttatttcccaatagcatgttcctcattccccaatgacacctcaccaggatcacccttaccaaccttacttccagcttgcacatcagaatttttccagcctcatttgtcagtttcaaatctgcttcacatttttagtttttttgtttgtttgtttttaatctgccttaatgagctcaggccactatcacaaaataccacagaccaaatggcttacaaatttgttaattttaaataaatgaggttaaaaacaaatttatattctcacatttctcgaggctggaagtctgagatcagagtgccagcatggtcaacttctggcgagagctctcttcctggtatgtaaatgcccacttcctcatgtcttcacaggaaggaaaccaacaaataggtctctctctcctctctcctttctcctctctcctctctcctctttctctctctctccccaccatctctctccttcccctccctccccctccctccccctacccatctcttgacatcatttcacgatacttctaaagagccta

SEQ ID NO: 429888 - DNA, 2369 bp, Homo sapiens
  misc_feature (2347)..(2347): n is a, c, g, or t
gggccggaaagcggaagcggcgtgcaacacgtgggggcggtgccggtcggagggctcctagtgcgccaggttgtgggaagtgaggctggcggtggcgacaaccgaggaggaggggcgggacgccgtggagcacggcgaccggctgagcgtcatggagggctcaggggagcagccgggcccacaaccacagcatcccggagaccaccgcatccgcgacggcgacttcgtggtgctgaaacgtgaagatgtgtttaaagcagtacaagtccagcggagaaaaaaagtaactttcgaaaaacagtggttctacctggataacgtcattggccatagttatggaactgcatttgaagtgaccagtggaggaagtctacagcccaagaagaagagggaagagcctactgcagagactaaagaagcgggcactgataatcgaaatatagttgatgatgggaaatctcagaaacttactcaagatgacataaaagctttgaaggacaagggcattaaaggagaggaaatagttcagcagttaattgaaaatagtacaacattccgagacaagacagaatttgcccaagataaatatattaaaaagaagaaaaaaaaatatgaagccatcattactgttgtgaagccatccacccgtattctttcaattatgtattatgcaagagaacctggaaaaattaaccacatgagatacgatacactagcccagatgttgacgttgggaaatatccgtgctggcaacaaaatgattgtgatggaaacgtgtgcaggcttggtgctgggtgcaatgatggaacgaatgggaggttttggctccattattcagctataccctggaggaggacctgttcgggcagcaacagcatgttttggatttcccaaatcttttctcagtggtctttatgaattccctctcaacaaagtggacagtcttctacatggaacattttctgccaagatgttatcttcagagccaaaagacagtgctttggttgaagaaagtaatggcacactggaggaaaaacaggcttctgaacaagagaatgaagacagcatggcagaggccccagagagcaaccacccagaagaccaggaaacaatggaaacaatttctcaagatccagaacataaggggcctaaagagagaggaagcaaaaaagattatattcaggaaaaacagaggagacaagaagagcagaggaaaagacatttagaggctgccgctctgctgagtgaaagaaacgcagatggtttaattgtagctagtcgtttccaccccactcccctgctgctgtctttgctggactttgtggccccttcaaggccgtttgtggtctactgtcagtacaaagagcctctgttggaatgctacacaaaactgcgggagaggggaggggtcatcaacctcaggctgtctgaaacctggctcagaaattatcaggttttgccagatcgaagtcatcctaaactgctgatgagtggaggtgggggttatcttctctccggcttcaccgttgccatggacaaccttaaagcagacaccagcctcaaatctaatgcaagcactttagaatcacacgagactgaggagcctgcagctaaaaaacgaaaatgcccagagtctgactcttaacccttttgagaattgctctgaattttgttctcaggcattatacagttagtaattaaactttaaatgccattactacttgttttttcatatcccaagaataagaacatgtctatgtacccgtttctaggaaggaggagtatatgccttttgtctatttctgacacagatgcatttggtctgtcaaaactgcaaccatggggtatgtagtatgaccaactgcatttaacaaaactcctctaagtacttctaaatattctgtgcaaatatcttgagaacttcaacatcctaaaaatgtgtttctacaagactttatattttaagctaagtggaataatacaacgtaactaaaacatggcgggtaccgaaaggagggcaattcatggaagaaatttcctctgttcattccgttctcttcaacctaagcaatatggatgtgtgagtgtgtgatttattatggtaccaaaaatgtccaccttctttcctgcagcggaataagcttttttgaaatgctgaggttttattttaatagttgacaacctgggaaagttctgagtatttattttactgctcttttttgtgcatagaaaggtttagtagggtacttttttgcattaatttgccaatactcttattctttgttctaaataaagtgactagaatttttgtgtactattcaattaaaggaaacaaatgtcttttaanaaaaaaaaatgcctttggctaa

SEQ ID NO: 429889 - DNA, 2259 bp, Homo sapiens
  misc_feature (2237)..(2237): n is a, c, g, or t
gggccggaaagcggaagcggcgtgcaacacgtgggggcggtgccggtcggagggctcctagtgcgccaggttgtgggaagtgaggctggcggtggcgacaaccgaggaggaggggcgggacgccgtggagcacggcgaccggctgagcgtcatggagggctcaggggagcagccgggcccacaaccacagcatcccggagaccaccgcatccgcgacggcgacttcgtggtgctgaaacgtgaagatgtgtttaaagcagtacaagtccagcggagaaaaaaagtaactttcgaaaaacagtggttctacctggataacgtcattggccatagttatggaactgcatttgaagtgaccagtggaggaagtctacagcccaagaagaagagggaagagcctactgcaggaaatagttcagcagttaattgaaaatagtacaacattccgagacaagacagaatttgcccaagataaatatattaaaaagaagaaaaaaaaatatgaagccatcattactgttgtgaagccatccacccgtattctttcaattatgtattatgcaagagaacctggaaaaattaaccacatgagatacgatacactagcccagatgttgacgttgggaaatatccgtgctggcaacaaaatgattgtgatggaaacgtgtgcaggcttggtgctgggtgcaatgatggaacgaatgggaggttttggctccattattcagctataccctggaggaggacctgttcgggcagcaacagcatgttttggatttcccaaatcttttctcagtggtctttatgaattccctctcaacaaagtggacagtcttctacatggaacattttctgccaagatgttatcttcagagccaaaagacagtgctttggttgaagaaagtaatggcacactggaggaaaaacaggcttctgaacaagagaatgaagacagcatggcagaggccccagagagcaaccacccagaagaccaggaaacaatggaaacaatttctcaagatccagaacataaggggcctaaagagagaggaagcaaaaaagattatattcaggaaaaacagaggagacaagaagagcagaggaaaagacatttagaggctgccgctctgctgagtgaaagaaacgcagatggtttaattgtagctagtcgtttccaccccactcccctgctgctgtctttgctggactttgtggccccttcaaggccgtttgtggtctactgtcagtacaaagagcctctgttggaatgctacacaaaactgcgggagaggggaggggtcatcaacctcaggctgtctgaaacctggctcagaaattatcaggttttgccagatcgaagtcatcctaaactgctgatgagtggaggtgggggttatcttctctccggcttcaccgttgccatggacaaccttaaagcagacaccagcctcaaatctaatgcaagcactttagaatcacacgagactgaggagcctgcagctaaaaaacgaaaatgcccagagtctgactcttaacccttttgagaattgctctgaattttgttctcaggcattatacagttagtaattaaactttaaatgccattactacttgttttttcatatcccaagaataagaacatgtctatgtacccgtttctaggaaggaggagtatatgccttttgtctatttctgacacagatgcatttggtctgtcaaaactgcaaccatggggtatgtagtatgaccaactgcatttaacaaaactcctctaagtacttctaaatattctgtgcaaatatcttgagaacttcaacatcctaaaaatgtgtttctacaagactttatattttaagctaagtggaataatacaacgtaactaaaacatggcgggtaccgaaaggagggcaattcatggaagaaatttcctctgttcattccgttctcttcaacctaagcaatatggatgtgtgagtgtgtgatttattatggtaccaaaaatgtccaccttctttcctgcagcggaataagcttttttgaaatgctgaggttttattttaatagttgacaacctgggaaagttctgagtatttattttactgctcttttttgtgcatagaaaggtttagtagggtacttttttgcattaatttgccaatactcttattctttgttctaaataaagtgactagaatttttgtgtactattcaattaaaggaaacaaatgtcttttaanaaaaaaaaatgcctttggctaa

SEQ ID NO: 429890 - DNA, 3076 bp, Homo sapiens
  misc_feature (3054)..(3054): n is a, c, g, or t
gggccggaaagcggaagcggcgtgcaacacgtgggggcggtgccggtcggagggctcctagtgcgccaggttgtgggaagtgaggctggcggtggcgacaaccgaggaggaggggcgggacgccgtggagcacggcgaccggctgagcgtcatggagggctcaggggagcagccgggcccacaaccacagcatcccggagaccaccgcatccgcgacggcgacttcgtggtgctgaaacgtgaagatgtgtttaaagcagtacaagtccagcggagaaaaaaagtaactttcgaaaaacagtggttctacctggataacgtcattggccatagttatggaactgcatttgaagtgaccagtggaggaagtctacagcccaagaagaagagggaagagcctactgcagagactaaagaagcgggcactgataatcgaaatatagttgatgatgggaaatctcagaaacttactcaagatgacataaaagctttgaaggacaagggcattaaaggagaggaaatagttcagcagttaattgaaaatagtacaacattccgagacaagacagaatttgcccaagataaatatattaaaaagaagaaaaaaaaatatgaagccatcattactgttgtgaagccatccacccgtattctttcaattatgtattatgcaagagaacctggaaaaattaaccacatgagatacgatacactagcccagatgttgacgttgggaaatatccgtgctggcaacaaaatgattgtgatggaaacgtgtgcaggcttggtgctgggtgcaatgatggaacgaatgggaggttttggctccattattcagctataccctggaggaggacctgttcgggcagcaacagcatgttttggatttcccaaatcttttctcagtggtctttatgaattccctctcaacaaagtggacagtcttctacatggaacattttctgccaagatgttatcttcagagccaaaagacagtgctttggttgaagaaagtaatggcacactggaggaaaaacaggcttctgaacaagagaatgaagacagcatggcagaggccccagagagcaaccacccagaagaccaggaaacaatggaaacaatttctcaagatccagaacataaggggcctaaagagagaggaagcaaaaaagattatattcaggaaaaacagaggagacaagaagagcagaggaaaagacatttagaggctgccgctctgctgagtgaaagaaacgcagatgggtgcgttgatggaagaaggcaggagactcctcagtgcatgtgggctctgcttcagacagattggcattctctttctccttgtctgctttgactctagtgggacccgagatgaggatttgtcttgggggtttttttaaagaaaggaggctgaggctggcaggggtggggaattgatgatgctggtttcagggtttcagaagaaattgaatcttctccatcactgcatcaagatgggccctgtggtcccactggatgcaggggatggggcactcaaatgctgcgatacaggctataacagatatccacaaagcagcttatgcagtgttggatttgtttccaggtgattttttttaaaaaatcaagaatgtcattaaatgcgacttagagttgccaagtaccacaagagcttctaacctagttcgcgtttcctagaaagaaatagctcatgattgtattctgttttggatttctagaatgttatatttaaatctcttctctttgtgagtcatgcaaattaaatacatgatcattttaaatgcattttaaaacctgtgctccactttgagggtgtagagaaataatttgtctggcattttccttacagtttaattgtagctagtcgtttccaccccactcccctgctgctgtctttgctggactttgtggccccttcaaggccgtttgtggtctactgtcagtacaaagaggtaatactggaatggaatgggcaggaattcttatgtctgaatgttgattcttaaactgcatcccaggaagtagttcttaacagaattctgttgttgtctgcagcctctgttggaatgctacacaaaactgcgggagaggggaggggtcatcaacctcaggctgtctgaaacctggctcagaaattatcaggttttgccagatcgaagtcatcctaaactgctgatgagtggaggtgggggttatcttctctccggcttcaccgttgccatggacaaccttaaagcagacaccagcctcaaatctaatgcaagcactttagaatcacacgagactgaggagcctgcagctaaaaaacgaaaatgcccagagtctgactcttaacccttttgagaattgctctgaattttgttctcaggcattatacagttagtaattaaactttaaatgccattactacttgttttttcatatcccaagaataagaacatgtctatgtacccgtttctaggaaggaggagtatatgccttttgtctatttctgacacagatgcatttggtctgtcaaaactgcaaccatggggtatgtagtatgaccaactgcatttaacaaaactcctctaagtacttctaaatattctgtgcaaatatcttgagaacttcaacatcctaaaaatgtgtttctacaagactttatattttaagctaagtggaataatacaacgtaactaaaacatggcgggtaccgaaaggagggcaattcatggaagaaatttcctctgttcattccgttctcttcaacctaagcaatatggatgtgtgagtgtgtgatttattatggtaccaaaaatgtccaccttctttcctgcagcggaataagcttttttgaaatgctgaggttttattttaatagttgacaacctgggaaagttctgagtatttattttactgctcttttttgtgcatagaaaggtttagtagggtacttttttgcattaatttgccaatactcttattctttgttctaaataaagtgactagaatttttgtgtactattcaattaaaggaaacaaatgtcttttaanaaaaaaaaatgcctttggctaa

SEQ ID NO: 429891 - DNA, 986 bp, Homo sapiens
ccctacatccgggtaccgactccagccgcctagacgctggcactatggtcatggcggaggggacggcagtgctgaggcggaacaggccgggcaccaaggcgcaggatttctataattggcctgatgaatcctttgatgaaatggacagtacactagctgttcaacagtatattcaacagaacataagagcagattgctccaatattgacaaaattcttgaaccacctgaaggccaagatgaaggtgtgtggaagtatgaacatttaaggcagttctgccttgagctaaatggacttgctgtcaaacttcagagtgaatgccatccagatacttgcactcaaatgacagcaactgaacaatggatttttctttgtgcagctcataaaactccaaaagagtgtcctgctatagactatactagacacacacttgatggtgctgcatgtcttctgaatagcaataaatattttcccagcagggttagcataaaggaatcatctgtagcgaaactaggatcagtatgccgtaggatttacagaatattttcacatgcttattttcatcatcggcagatatttgatgaatatgaaaatgaaacatttttgtgtcatcggtttactaagtttgtgatgaaatacaatttgatgtccaaggataacctgattgtaccaattttagaagaggaagtacagaattcagtttctggggaaagtgaagcatgaagggaatcataggaaaaatgtactgatcatataattaacattatgtactgtatatatcattttagacacatcaatcatgtatccatattatagcttctttgtttagtataggtttttgtatgctgggtttgccttttaaaatgggaaatactttttaagttattcataagctgtatattcaccagtgtggcactcatggtttttaaataagattagtattatctgtttataatgcctgttaataaaagaatttacagtttggta

SEQ ID NO: 429892 - DNA, 2704 bp, Homo sapiens
ccctacatccgggtaccgactccagccgcctagacgctggcactatggtcatggcggaggggacggcagtgctgaggcggaacaggccgggcaccaaggcgcaggatttctataattggcctgatgaatcctttgatgaaatggacagtacactagctgttcaacagtatattcaacagaacataagagcagattgctccaatattgacaaaattcttgaaccacctgaaggccaagatgaaggtgtgtggaagtatgaacatttaaggcagttctgccttgagctaaatggacttgctgtcaaacttcagagtgaatgccatccagatacttgcactcaaatgacagcaactgaacaatggatttttctttgtgcagctcataaaactccaaaagagtgtcctgctatagactatactagacacacacttgatggtgctgcatgtcttctgaatagcaataaatattttcccagcagggttagcataaaggaatcatctgtagcgaaactaggatcagtatgccgtaggatttacagaatattttcacatgcttattttcatcatcggcagatatttgatgaatatgaaaatgaaacatttttgtgtcatcggtttactaagtttgtgatgaaatacaatttgatgtccaaggataacctgattgtaccaattttagaagaggaagtacagaattcagtttctggggaaagtgaagcatgaagggaatcataggaaaaatgtactgatcatataattaacattatgtactgtatatatcattttagacacatcaatcatgtatccatattatagcttctttgtttagtataggtttttgtatgctgggtttgccttttaaaatgggaaatactttttaagttattcataagctgtatattcaccagtgtggcactcatggtttttaaataagattagtattatctgtttataatgcctgttaataaaagaatttacagtttggtaaaattgctgctaaacaatcattggatcacaatcctcatcagacaaacccatctgtaaaaaaaatgagggagagcttgaggtttcacacaagccatttactaaagaggtagaaatgttttctattggttttaccttgagtttagatatcctaaaaaattctgtagtacgtagttttgtcttacctgttaactttccccaattgagataaaagtgttttaaaattctgtttatagtttttgatatgcatatataattatgtgtatatctaaatacaaatgcaaatgaagcattagtaatacttaaataattttactgtgctacataaagtataacatacttggaaaggatttaccgttctgcaacaacggactggtacatacaggatgatcacaatggtaaggcacataaattattttcccactggaaacctgccctgtccaccccttctcatttcccttaaccttatcttcaaactactttagctgagaagcttttcaccagactgagttagtggtggcttatacctatttatatttgtattaattgcttacagattatacctcatattagcaattacattacactacaagaaaatgtatttgcataggctcttgcttatctttgttttgcaaaattgttctacttagaaaacagtccttaaaatagtttgactcttcctgttagtaatatattaatctttcatttaaccagctaggcagcattaaatagaattgaagaaataccatagtatttattttacaccccctctcccacgaagtttatgtttggattacatgcacgtgtgagattatttgcaataattcataggttccaagggtgttgatgaatagtcatacatttttttggactttgttataattcattgtggtaagaatgattgaaatgcagatttaacaatcttataatctattgaatgccatttttgataaagcactggaggtcttattgccaaactgattgtaatgaggcagtaagggtgaaaacattgtacatgttgtgaagaaagtatttaaatccaacttttgaacagatttaacaaacatgaggaacttttttatttagaaggataattttgaaatgaagatgaaaatgtattcatcttaattgttttttcaaatttaagggaataatttataccatcttttcagacaagaatgtacagcaaaaataaggggaacagtagtatactgagagtgtgtgtatgtatagtgtatgcctttccaagcttgccagtctttttggctttgaacactgcccatcagctacagtcattactgttccccaacccacaactatcttttaagaagtcttagttcacagtgaaaggaatgatgactttgaaattatggatttatattaatggcactataaaccaatggtaatggtaatttttaaacttgctaaatattgagaaactaaactactaagttaataaattatatatagcagtgtagctgttctctctagatggtgtctcacaatggatttctgttgcttgactattttcttagtgaatatttatactaaggtagtgactgagatttggtgatctggctgagtattttgaaacacattttgaataatatggcttagtgttaacggggacttaaatatgatttttttttcttactcatttcaccttccctgtactgtatgtttggaattgatcataaaacatctccaaaagaaaataatca

SEQ ID NO: 429893 - DNA, 986 bp, Homo sapiens
cgcaggttctatagaatttgccaagactgctggcctgttttctaccctgattccttaggtggcttctgggacagaattacggttctctaagtatttgcttgcaggatttctataattggcctgatgaatcctttgatgaaatggacagtacactagctgttcaacagtatattcaacagaacataagagcagattgctccaatattgacaaaattcttgaaccacctgaaggccaagatgaaggtgtgtggaagtatgaacatttaaggcagttctgccttgagctaaatggacttgctgtcaaacttcagagtgaatgccatccagatacttgcactcaaatgacagcaactgaacaatggatttttctttgtgcagctcataaaactccaaaagagtgtcctgctatagactatactagacacacacttgatggtgctgcatgtcttctgaatagcaataaatattttcccagcagggttagcataaaggaatcatctgtagcgaaactaggatcagtatgccgtaggatttacagaatattttcacatgcttattttcatcatcggcagatatttgatgaatatgaaaatgaaacatttttgtgtcatcggtttactaagtttgtgatgaaatacaatttgatgtccaaggataacctgattgtaccaattttagaagaggaagtacagaattcagtttctggggaaagtgaagcatgaagggaatcataggaaaaatgtactgatcatataattaacattatgtactgtatatatcattttagacacatcaatcatgtatccatattatagcttctttgtttagtataggtttttgtatgctgggtttgccttttaaaatgggaaatactttttaagttattcataagctgtatattcaccagtgtggcactcatggtttttaaataagattagtattatctgtttataatgcctgttaataaaagaatttacagtttggta

SEQ ID NO: 429894 - DNA, 2646 bp, Homo sapiens
ccctacatccgggtaccgactccagccgcctagacgctggcactatggtcatggcggaggggacggcagtgctgaggcggaacaggccgggcaccaaggcgcaggatttctataattggcctgatgaatcctttgatgaaatggacagtacactagctgttcaacagtatattcaacagaacataagagcagattgctccaatattgacaaaattcttgaaccacctgaaggccaagatgaaggtgtgtggaagtatgaacatttaaggcagttctgccttgagctaaatggacttgctgtcaaacttcagagtgaatgccatccagatacttgcactcaaatgacagcaactgaacaatggatttttctttgtgcagctcataaaactccaaaagagtgtcctgctatagactatactagacacacacttgatggtgctgcatgtcttctgaatagcaataaatattttcccagcagggttagcataaaggaatcatctgtagcgaaactaggatcagtatgccgtaggatttacagaatattttcacatgcttattttcatcatcggcagatatttgatgaatatgaaaatgaaacatttttgtgtcatcggtttactaagtttgtgatgaaatacaatttgatgtccaaggataacctgattgtaccaattttagaagaggaagtacagaattcagtttctggggaaagtgaagcatgaagggaatcataggaaaaatgtactgatcatataattaacattatgtactgtatatatcattttagacacatcaatcatgtatccatattatagcttctttgtttagtataggtttttgtatgctgggtttgccttttaaaatgggaaatactttttaagttattcataagctgtatattcaccagtgtggcactcatggtttttaaataagattagtattatctgtttataatgcctgttaataaaagaatttacagtttggtaaaattgctgctaaacaatcattggatcacaatcctcatcagacaaacccatctgtaaaaaaaatgagggagagcttgaggtttcacacaagccatttactaaagaggtagaaatgttttctattggttttaccttgagtttagatatcctaaaaaattctgtagtacgtagttttgtcttacctgttaactttccccaattgagataaaagtgttttaaaattctgtttatagtttttgatatgcatatataattatgtgtatatctaaatacaaatgcaaatgaagcattagtaatacttaaataattttactgtgctacataaagtataacatacttggaaaggatttaccgttctgcaacaacggactggtacatacaggatgatcacaatggtaaggcacataaattattttcccactggaaacctgccctgtccaccccttctcatttcccttaaccttatcttcaaactactttagctgagaagcttttcaccagactgagttagtggtggcttatacctatttatatttgtattaattgcttacagattatacctcatattagcaattacattacactacaagaaaatgtatttgcataggctcttgcttatctttgttttgcaaaattgttctacttagaaaacactaggcagcattaaatagaattgaagaaataccatagtatttattttacaccccctctcccacgaagtttatgtttggattacatgcacgtgtgagattatttgcaataattcataggttccaagggtgttgatgaatagtcatacatttttttggactttgttataattcattgtggtaagaatgattgaaatgcagatttaacaatcttataatctattgaatgccatttttgataaagcactggaggtcttattgccaaactgattgtaatgaggcagtaagggtgaaaacattgtacatgttgtgaagaaagtatttaaatccaacttttgaacagatttaacaaacatgaggaacttttttatttagaaggataattttgaaatgaagatgaaaatgtattcatcttaattgttttttcaaatttaagggaataatttataccatcttttcagacaagaatgtacagcaaaaataaggggaacagtagtatactgagagtgtgtgtatgtatagtgtatgcctttccaagcttgccagtctttttggctttgaacactgcccatcagctacagtcattactgttccccaacccacaactatcttttaagaagtcttagttcacagtgaaaggaatgatgactttgaaattatggatttatattaatggcactataaaccaatggtaatggtaatttttaaacttgctaaatattgagaaactaaactactaagttaataaattatatatagcagtgtagctgttctctctagatggtgtctcacaatggatttctgttgcttgactattttcttagtgaatatttatactaaggtagtgactgagatttggtgatctggctgagtattttgaaacacattttgaataatatggcttagtgttaacggggacttaaatatgatttttttttcttactcatttcaccttccctgtactgtatgtttggaattgatcataaaacatctccaaaagaaaataatca

SEQ ID NO: 429895 - DNA, 3508 bp, Homo sapiens
ccctacatccgggtaccgactccagccgcctagacgctggcactatggtcatggcggaggggacggcagtgctgaggcggaacaggccgggcaccaaggcgcaggatttctataattggcctgatgaatcctttgatgaaatggacagtacactagctgttcaacagtatattcaacagaacataagagcagattgctccaatattgacaaaattcttgaaccacctgaaggccaagatgaaggtgtgtggaagtatgaacatttaaggcagttctgccttgagctaaatggacttgctgtcaaacttcagagtgaatgccatccagatacttgcactcaaatgacagcaactgaacaatggatttttctttgtgcagctcataaaactccaaaagagtgtcctgctatagactatactagacacacacttgatggtgctgcatgtcttctgaatagcaataaatattttcccagcagggttagcataaaggaatcatctgtagcgaaactaggatcagtatgccgtaggatttacagaatattttcacatgcttattttcatcatcggcagatatttgatgaatatgaaaatgaaacatttttgtgtcatcggtttactaagtttgtgatgaaatacaatttgatgtccaaggataacctgattgtaccaattttagaagaggaagtacagaattcagtttctggggaaagtgaagcatgaagggaatcataggaaaaatgtactgatcatataattaacattatgtactgtatatatcattttagacacatcaatcatgtatccatattatagcttctttgtttagtataggtttttgtatgctgggtttgccttttaaaatgggaaatactttttaagttattcataagctgtatattcaccagtgtggcactcatggtttttaaataagattagtattatctgtttataatgcctgttaataaaagaatttacagtttggtaaaattgctgctaaacaatcattggatcacaatcctcatcagacaaacccatctgtaaaaaaaatgagggagagcttgaggtttcacacaagccatttactaaagaggtagaaatgttttctattggttttaccttgagtttagatatcctaaaaaattctgtagtacgtagttttgtcttacctgttaactttccccaattgagataaaagtgttttaaaattctgtttatagtttttgatatgcatatataattatgtgtatatctaaatacaaatgcaaatgaagcattagtaatacttaaataattttactgtgctacataaagtataacatacttggaaaggatttaccgttctgcaacaacggactggtacatacaggatgatcacaatggtaaggcacataaattattttcccactggaaacctgccctgtccaccccttctcatttcccttaaccttatcttcaaactactttagctgagaagcttttcaccagactgagttagtggtggcttatacctatttatatttgtattaattgcttacagattatacctcatattagcaattacattacactacaagaaaatgtatttgcataggctcttgcttatctttgttttgcaaaattgttctacttagaaaacagtccttaaaatagtttgactcttcctgttagtaatatattaatctttcatttaaccagctaggcagcattaaatagaattgaagaaataccatagtatttattttacaccccctctcccacgaagtttatgtttggattacatgcacgtgtgagattatttgcaataattcataggttccaagggtgttgatgaatagtcatacatttttttggactttgttataattcattgtggtaagaatgattgaaatgcagatttaacaatcttataatctattgaatgccatttttgataaagcactggaggtcttattgccaaactgattgtaatgaggcagtaagggtgaaaacattgtacatgttgtgaagaaagtatttaaatccaacttttgaacagatttaacaaacatgaggaacttttttatttagaaggataattttgaaatgaagatgaaaatgtattcatcttaattgttttttcaaatttaagggaataatttataccatcttttcagacaagaatgtacagcaaaaataaggggaacagtagtatactgagagtgtgtgtatgtatagtgtatgcctttccaagcttgccagtctttttggctttgaacactgcccatcagctacagtcattactgttccccaacccacaactatcttttaagaagtcttagttcacagtgaaaggaatgatgactttgaaattatggatttatattaatggcactataaaccaatggtaatggtaatttttaaacttgctaaatattgagaaactaaactactaagttaataaattatatatagcagtgtagctgttctctctagatggtgtctcacaatggatttctgttgcttgactattttcttagtgaatatttatactaaggtagtgactgagatttggtgatctggctgagtattttgaaacacattttgaataatatggcttagtgttaacggggacttaaatatgatttttttttcttactcatttcaccttccctgtactgtatgtttggaattgatcataaaacatctccaaaagaaaataatcagtttgtagtcttgcttttgtattcatgttgataatcttactaattgtgaagttgattcactactatactaggtaagacctaagtgaaacagttcctgtttttccttaatactgttttcagaattttgaaaatgtacttatatatacataaatactactaaaaaattaatgagcctggcaaaccattgatttataaaagtaagtgttctaagaggggaacaagacagttctgtgtgataaggaagttaggctccactttttgtttgaattaccctatgtatatccgaaggtaaacttaggcttttctttccaaaagatcgtatagtcaattcattctttttctcctatcacatctgggaaagtagctaacttttaactatttatgttcccataagtaacccttcttttgtgtgtatacatttccttttctctgacttgagatgtcaaatttggatttctagaacagtttctcagttaaattcttgatgacttaacaacttttactatcagaatacaattagaaatccttggtcaggcacaggggctcacgcctgtaatcccagcactttgggaagccaaggcagacagatcacctgaggtcaggagttcgagaccagcctgaccaacatggagaaaccctgtctctactaaaaatacaaaaattagccgggcgtggtgctactcgtgaggctgaggcaggagaatcgcttgaacccgggaggtggaggttgcggtgagctgagatcgtgccattgcactccagcctgggtaacgagcaaaactccgtctcaaaaactccgtctca

SEQ ID NO: 429896 - DNA, 3021 bp, Homo sapiens
ccctacatccgggtaccgactccagccgcctagacgctggcactatggtcatggcggaggggacggcagtgctgaggcggaacaggccgggcaccaaggcgcaggatttctataattggcctgatgaatcctttgatgaaatggacagtacactagctgttcaacagtatattcaacagaacataagagcagattgctccaatattgacaaaattcttgaaccacctgaaggccaagatgaaggtgtgtggaagtatgaacatttaaggcagttctgccttgagctaaatggacttgctgtcaaacttcagagtgaatgccatccagatacttgcactcaaatgacagcaactgaacaatggatttttctttgtgcagctcataaaactccaaaagagtgtcctgctatagactatactagacacacacttgatggtgctgcatgtcttctgaatagcaataaatattttcccagcagggttagcataaaggaatcatctgtagcgaaactaggatcagtatgccgtaggatttacagaatattttcacatgcttattttcatcatcggcagatatttgatgaatatgaaaatgaaacatttttgtgtcatcggtttactaagtttgtgatgaaatacaatttgatgtccaaggataacctgattgtaccaattttagaagaggaagtacagaattcagtttctggggaaagtgaagcatgaagggaatcataggaaaaatgtactgatcatataattaacattatgtactgtatatatcattttagacacatcaatcatgtatccatattatagcttctttgtttagtataggtttttgtatgctgggtttgccttttaaaatgggaaatactttttaagttattcataagctgtatattcaccagtgtggcactcatggtttttaaataagattagtattatctgtttataatgcctgttaataaaagaatttacagtttggtaaaattgctgctaaacaatcattggatcacaatcctcatcagacaaacccatctgtaaaaaaaatgagggagagcttgaggtttcacacaagccatttactaaagaggtagaaatgttttctattggttttaccttgagtttagatatcctaaaaaattctgtagtacgtagttttgtcttacctgttaactttccccaattgagataaaagtgttttaaaattctgtttatagtttttgatatgcatatataattatgtgtatatctaaatacaaatgcaaatgaagcattagtaatacttaaataattttactgtgctacataaagtataacatacttggaaaggatttaccgttctgcaacaacggactggtacatacaggatgatcacaatggtaaggcacataaattattttcccactggaaacctgccctgtccaccccttctcatttcccttaaccttatcttcaaactactttagctgagaagcttttcaccagactgagttagtggtggcttatacctatttatatttgtattaattgcttacagattatacctcatattagcaattacattacactacaagaaaatgtatttgcataggctcttgcttatctttgttttgcaaaattgttctacttagaaaacagtccttaaaatagtttgactcttcctgttagtaatatattaatctttcatttaaccagctaggcagcattaaatagaattgaagaaataccatagtatttattttacaccccctctcccacgaagtttatgtttggattacatgcacgtgtgagattatttgcaataattcataggttccaagggtgttgatgaatagtcatacatttttttggactttgttataattcattgtggtaagaatgattgaaatgcagatttaacaatcttataatctattgaatgccatttttgataaagcactggaggtcttattgccaaactgattgtaatgaggcagtaagggtgaaaacattgtacatgttgtgaagaaagtatttaaatccaacttttgaacagatttaacaaacatgaggaacttttttatttagaaggataattttgaaatgaagatgaaaatgtattcatcttaattgttttttcaaatttaagggaataatttataccatcttttcagacaagaatgtacagcaaaaataaggggaacagtagtatactgagagtgtgtgtatgtatagtgtatgcctttccaagcttgccagtctttttggctttgaacactgcccatcagctacagtcattactgttccccaacccacaactatcttttaagaagtcttagttcacagtgaaaggaatgatgactttgaaattatggatttatattaatggcactataaaccaatggtaatggtaatttttaaacttgctaaatattgagaaactaaactactaagttaataaattatatatagcagtgtagctgttctctctagatggtgtctcacaatggatttctgttgcttgactattttcttagtgaatatttatactaaggtagtgactgagatttggtgatctggctgagtattttgaaacacattttgaataatatggcttagtgttaacggggacttaaatatgatttttttttcttactcatttcaccttccctgtactgtatgtttggaattgatcataaaacatctccaaaagaaaataatcaaaaaaaaaaaaaaaacgaacaccttgtgttggggcgcgacattggaccctcggagaaaaagtttctttctaaaaccccatttccggtgggggggccgcggggcgcccatgtgtatgttatctgtgaaacactggcgtcaaaacggtgggtacccaggaaaaacccgggcgcaccagcactactgctctggggtctccccccgtattaaaaaaacccgcggggggacacccccactgtttctggacaattaccaagtggggtctcgacgcgcctaccggtccttctcacacagcgttccccgcaggcagattaatacg

SEQ ID NO: 429897 - DNA, 2641 bp, Homo sapiens
ccctacatccgggtaccgactccagccgcctagacgctggcactatggtcatggcggaggggacggcagtgctgaggcggaacaggccgggcaccaaggcgcagtatattcaacagaacataagagcagattgctccaatattgacaaaattcttgaaccacctgaaggccaagatgaaggtgtgtggaagtatgaacatttaaggcagttctgccttgagctaaatggacttgctgtcaaacttcagagtgaatgccatccagatacttgcactcaaatgacagcaactgaacaatggatttttctttgtgcagctcataaaactccaaaagagtgtcctgctatagactatactagacacacacttgatggtgctgcatgtcttctgaatagcaataaatattttcccagcagggttagcataaaggaatcatctgtagcgaaactaggatcagtatgccgtaggatttacagaatattttcacatgcttattttcatcatcggcagatatttgatgaatatgaaaatgaaacatttttgtgtcatcggtttactaagtttgtgatgaaatacaatttgatgtccaaggataacctgattgtaccaattttagaagaggaagtacagaattcagtttctggggaaagtgaagcatgaagggaatcataggaaaaatgtactgatcatataattaacattatgtactgtatatatcattttagacacatcaatcatgtatccatattatagcttctttgtttagtataggtttttgtatgctgggtttgccttttaaaatgggaaatactttttaagttattcataagctgtatattcaccagtgtggcactcatggtttttaaataagattagtattatctgtttataatgcctgttaataaaagaatttacagtttggtaaaattgctgctaaacaatcattggatcacaatcctcatcagacaaacccatctgtaaaaaaaatgagggagagcttgaggtttcacacaagccatttactaaagaggtagaaatgttttctattggttttaccttgagtttagatatcctaaaaaattctgtagtacgtagttttgtcttacctgttaactttccccaattgagataaaagtgttttaaaattctgtttatagtttttgatatgcatatataattatgtgtatatctaaatacaaatgcaaatgaagcattagtaatacttaaataattttactgtgctacataaagtataacatacttggaaaggatttaccgttctgcaacaacggactggtacatacaggatgatcacaatggtaaggcacataaattattttcccactggaaacctgccctgtccaccccttctcatttcccttaaccttatcttcaaactactttagctgagaagcttttcaccagactgagttagtggtggcttatacctatttatatttgtattaattgcttacagattatacctcatattagcaattacattacactacaagaaaatgtatttgcataggctcttgcttatctttgttttgcaaaattgttctacttagaaaacagtccttaaaatagtttgactcttcctgttagtaatatattaatctttcatttaaccagctaggcagcattaaatagaattgaagaaataccatagtatttattttacaccccctctcccacgaagtttatgtttggattacatgcacgtgtgagattatttgcaataattcataggttccaagggtgttgatgaatagtcatacatttttttggactttgttataattcattgtggtaagaatgattgaaatgcagatttaacaatcttataatctattgaatgccatttttgataaagcactggaggtcttattgccaaactgattgtaatgaggcagtaagggtgaaaacattgtacatgttgtgaagaaagtatttaaatccaacttttgaacagatttaacaaacatgaggaacttttttatttagaaggataattttgaaatgaagatgaaaatgtattcatcttaattgttttttcaaatttaagggaataatttataccatcttttcagacaagaatgtacagcaaaaataaggggaacagtagtatactgagagtgtgtgtatgtatagtgtatgcctttccaagcttgccagtctttttggctttgaacactgcccatcagctacagtcattactgttccccaacccacaactatcttttaagaagtcttagttcacagtgaaaggaatgatgactttgaaattatggatttatattaatggcactataaaccaatggtaatggtaatttttaaacttgctaaatattgagaaactaaactactaagttaataaattatatatagcagtgtagctgttctctctagatggtgtctcacaatggatttctgttgcttgactattttcttagtgaatatttatactaaggtagtgactgagatttggtgatctggctgagtattttgaaacacattttgaataatatggcttagtgttaacggggacttaaatatgatttttttttcttactcatttcaccttccctgtactgtatgtttggaattgatcataaaacatctccaaaagaaaataatca

SEQ ID NO: 429898 - DNA, 2704 bp, Homo sapiens
cgcaggttctatagaatttgccaagactgctggcctgttttctaccctgattccttaggtggcttctgggacagaattacggttctctaagtatttgcttgcaggatttctataattggcctgatgaatcctttgatgaaatggacagtacactagctgttcaacagtatattcaacagaacataagagcagattgctccaatattgacaaaattcttgaaccacctgaaggccaagatgaaggtgtgtggaagtatgaacatttaaggcagttctgccttgagctaaatggacttgctgtcaaacttcagagtgaatgccatccagatacttgcactcaaatgacagcaactgaacaatggatttttctttgtgcagctcataaaactccaaaagagtgtcctgctatagactatactagacacacacttgatggtgctgcatgtcttctgaatagcaataaatattttcccagcagggttagcataaaggaatcatctgtagcgaaactaggatcagtatgccgtaggatttacagaatattttcacatgcttattttcatcatcggcagatatttgatgaatatgaaaatgaaacatttttgtgtcatcggtttactaagtttgtgatgaaatacaatttgatgtccaaggataacctgattgtaccaattttagaagaggaagtacagaattcagtttctggggaaagtgaagcatgaagggaatcataggaaaaatgtactgatcatataattaacattatgtactgtatatatcattttagacacatcaatcatgtatccatattatagcttctttgtttagtataggtttttgtatgctgggtttgccttttaaaatgggaaatactttttaagttattcataagctgtatattcaccagtgtggcactcatggtttttaaataagattagtattatctgtttataatgcctgttaataaaagaatttacagtttggtaaaattgctgctaaacaatcattggatcacaatcctcatcagacaaacccatctgtaaaaaaaatgagggagagcttgaggtttcacacaagccatttactaaagaggtagaaatgttttctattggttttaccttgagtttagatatcctaaaaaattctgtagtacgtagttttgtcttacctgttaactttccccaattgagataaaagtgttttaaaattctgtttatagtttttgatatgcatatataattatgtgtatatctaaatacaaatgcaaatgaagcattagtaatacttaaataattttactgtgctacataaagtataacatacttggaaaggatttaccgttctgcaacaacggactggtacatacaggatgatcacaatggtaaggcacataaattattttcccactggaaacctgccctgtccaccccttctcatttcccttaaccttatcttcaaactactttagctgagaagcttttcaccagactgagttagtggtggcttatacctatttatatttgtattaattgcttacagattatacctcatattagcaattacattacactacaagaaaatgtatttgcataggctcttgcttatctttgttttgcaaaattgttctacttagaaaacagtccttaaaatagtttgactcttcctgttagtaatatattaatctttcatttaaccagctaggcagcattaaatagaattgaagaaataccatagtatttattttacaccccctctcccacgaagtttatgtttggattacatgcacgtgtgagattatttgcaataattcataggttccaagggtgttgatgaatagtcatacatttttttggactttgttataattcattgtggtaagaatgattgaaatgcagatttaacaatcttataatctattgaatgccatttttgataaagcactggaggtcttattgccaaactgattgtaatgaggcagtaagggtgaaaacattgtacatgttgtgaagaaagtatttaaatccaacttttgaacagatttaacaaacatgaggaacttttttatttagaaggataattttgaaatgaagatgaaaatgtattcatcttaattgttttttcaaatttaagggaataatttataccatcttttcagacaagaatgtacagcaaaaataaggggaacagtagtatactgagagtgtgtgtatgtatagtgtatgcctttccaagcttgccagtctttttggctttgaacactgcccatcagctacagtcattactgttccccaacccacaactatcttttaagaagtcttagttcacagtgaaaggaatgatgactttgaaattatggatttatattaatggcactataaaccaatggtaatggtaatttttaaacttgctaaatattgagaaactaaactactaagttaataaattatatatagcagtgtagctgttctctctagatggtgtctcacaatggatttctgttgcttgactattttcttagtgaatatttatactaaggtagtgactgagatttggtgatctggctgagtattttgaaacacattttgaataatatggcttagtgttaacggggacttaaatatgatttttttttcttactcatttcaccttccctgtactgtatgtttggaattgatcataaaacatctccaaaagaaaataatca

SEQ ID NO: 429899 - DNA, 2641 bp, Homo sapiens
cgcaggttctatagaatttgccaagactgctggcctgttttctaccctgattccttaggtggcttctgggacagaattacggttctctaagtatttgcttgcagtatattcaacagaacataagagcagattgctccaatattgacaaaattcttgaaccacctgaaggccaagatgaaggtgtgtggaagtatgaacatttaaggcagttctgccttgagctaaatggacttgctgtcaaacttcagagtgaatgccatccagatacttgcactcaaatgacagcaactgaacaatggatttttctttgtgcagctcataaaactccaaaagagtgtcctgctatagactatactagacacacacttgatggtgctgcatgtcttctgaatagcaataaatattttcccagcagggttagcataaaggaatcatctgtagcgaaactaggatcagtatgccgtaggatttacagaatattttcacatgcttattttcatcatcggcagatatttgatgaatatgaaaatgaaacatttttgtgtcatcggtttactaagtttgtgatgaaatacaatttgatgtccaaggataacctgattgtaccaattttagaagaggaagtacagaattcagtttctggggaaagtgaagcatgaagggaatcataggaaaaatgtactgatcatataattaacattatgtactgtatatatcattttagacacatcaatcatgtatccatattatagcttctttgtttagtataggtttttgtatgctgggtttgccttttaaaatgggaaatactttttaagttattcataagctgtatattcaccagtgtggcactcatggtttttaaataagattagtattatctgtttataatgcctgttaataaaagaatttacagtttggtaaaattgctgctaaacaatcattggatcacaatcctcatcagacaaacccatctgtaaaaaaaatgagggagagcttgaggtttcacacaagccatttactaaagaggtagaaatgttttctattggttttaccttgagtttagatatcctaaaaaattctgtagtacgtagttttgtcttacctgttaactttccccaattgagataaaagtgttttaaaattctgtttatagtttttgatatgcatatataattatgtgtatatctaaatacaaatgcaaatgaagcattagtaatacttaaataattttactgtgctacataaagtataacatacttggaaaggatttaccgttctgcaacaacggactggtacatacaggatgatcacaatggtaaggcacataaattattttcccactggaaacctgccctgtccaccccttctcatttcccttaaccttatcttcaaactactttagctgagaagcttttcaccagactgagttagtggtggcttatacctatttatatttgtattaattgcttacagattatacctcatattagcaattacattacactacaagaaaatgtatttgcataggctcttgcttatctttgttttgcaaaattgttctacttagaaaacagtccttaaaatagtttgactcttcctgttagtaatatattaatctttcatttaaccagctaggcagcattaaatagaattgaagaaataccatagtatttattttacaccccctctcccacgaagtttatgtttggattacatgcacgtgtgagattatttgcaataattcataggttccaagggtgttgatgaatagtcatacatttttttggactttgttataattcattgtggtaagaatgattgaaatgcagatttaacaatcttataatctattgaatgccatttttgataaagcactggaggtcttattgccaaactgattgtaatgaggcagtaagggtgaaaacattgtacatgttgtgaagaaagtatttaaatccaacttttgaacagatttaacaaacatgaggaacttttttatttagaaggataattttgaaatgaagatgaaaatgtattcatcttaattgttttttcaaatttaagggaataatttataccatcttttcagacaagaatgtacagcaaaaataaggggaacagtagtatactgagagtgtgtgtatgtatagtgtatgcctttccaagcttgccagtctttttggctttgaacactgcccatcagctacagtcattactgttccccaacccacaactatcttttaagaagtcttagttcacagtgaaaggaatgatgactttgaaattatggatttatattaatggcactataaaccaatggtaatggtaatttttaaacttgctaaatattgagaaactaaactactaagttaataaattatatatagcagtgtagctgttctctctagatggtgtctcacaatggatttctgttgcttgactattttcttagtgaatatttatactaaggtagtgactgagatttggtgatctggctgagtattttgaaacacattttgaataatatggcttagtgttaacggggacttaaatatgatttttttttcttactcatttcaccttccctgtactgtatgtttggaattgatcataaaacatctccaaaagaaaataatca

SEQ ID NO: 429900 - DNA, 2490 bp, Homo sapiens
ttttgggggcccctttggggtttccccccaaaaaaaaaaaccccttttttttcccaaaggggaaagggttgggaaaaatgggcccccccaatcccagagtgaatgccatccagatacttgcactcaaatgacagcaactgaacaatggatttttctttgtgcagctcataaaactccaaaagagtgtcctgctatagactatactagacacacacttgatggtgctgcatgtcttctgaatagcaataaatattttcccagcagggttagcataaaggaatcatctgtagcgaaactaggatcagtatgccgtaggatttacagaatattttcacatgcttattttcatcatcggcagatatttgatgaatatgaaaatgaaacatttttgtgtcatcggtttactaagtttgtgatgaaatacaatttgatgtccaaggataacctgattgtaccaattttagaagaggaagtacagaattcagtttctggggaaagtgaagcatgaagggaatcataggaaaaatgtactgatcatataattaacattatgtactgtatatatcattttagacacatcaatcatgtatccatattatagcttctttgtttagtataggtttttgtatgctgggtttgccttttaaaatgggaaatactttttaagttattcataagctgtatattcaccagtgtggcactcatggtttttaaataagattagtattatctgtttataatgcctgttaataaaagaatttacagtttggtaaaattgctgctaaacaatcattggatcacaatcctcatcagacaaacccatctgtaaaaaaaatgagggagagcttgaggtttcacacaagccatttactaaagaggtagaaatgttttctattggttttaccttgagtttagatatcctaaaaaattctgtagtacgtagttttgtcttacctgttaactttccccaattgagataaaagtgttttaaaattctgtttatagtttttgatatgcatatataattatgtgtatatctaaatacaaatgcaaatgaagcattagtaatacttaaataattttactgtgctacataaagtataacatacttggaaaggatttaccgttctgcaacaacggactggtacatacaggatgatcacaatggtaaggcacataaattattttcccactggaaacctgccctgtccaccccttctcatttcccttaaccttatcttcaaactactttagctgagaagcttttcaccagactgagttagtggtggcttatacctatttatatttgtattaattgcttacagattatacctcatattagcaattacattacactacaagaaaatgtatttgcataggctcttgcttatctttgttttgcaaaattgttctacttagaaaacagtccttaaaatagtttgactcttcctgttagtaatatattaatctttcatttaaccagctaggcagcattaaatagaattgaagaaataccatagtatttattttacaccccctctcccacgaagtttatgtttggattacatgcacgtgtgagattatttgcaataattcataggttccaagggtgttgatgaatagtcatacatttttttggactttgttataattcattgtggtaagaatgattgaaatgcagatttaacaatcttataatctattgaatgccatttttgataaagcactggaggtcttattgccaaactgattgtaatgaggcagtaagggtgaaaacattgtacatgttgtgaagaaagtatttaaatccaacttttgaacagatttaacaaacatgaggaacttttttatttagaaggataattttgaaatgaagatgaaaatgtattcatcttaattgttttttcaaatttaagggaataatttataccatcttttcagacaagaatgtacagcaaaaataaggggaacagtagtatactgagagtgtgtgtatgtatagtgtatgcctttccaagcttgccagtctttttggctttgaacactgcccatcagctacagtcattactgttccccaacccacaactatcttttaagaagtcttagttcacagtgaaaggaatgatgactttgaaattatggatttatattaatggcactataaaccaatggtaatggtaatttttaaacttgctaaatattgagaaactaaactactaagttaataaattatatatagcagtgtagctgttctctctagatggtgtctcacaatggatttctgttgcttgactattttcttagtgaatatttatactaaggtagtgactgagatttggtgatctggctgagtattttgaaacacattttgaataatatggcttagtgttaacggggacttaaatatgatttttttttcttactcatttcaccttccctgtactgtatgtttggaattgatcataaaacatctccaaaagaaaataatca

SEQ ID NO: 429901 - DNA, 394 bp, Homo sapiens
cgcaggttctatagaatttgccaagactgctggcctgttttctaccctgattccttaggtggcttctgggacagaattacggttctctaagtatttgcttgcaggatttctataattggcctgatgaatcctttgatgaaatggacagtacactagctgttcaacagtatattcaacagaacataagagcagattgctccaatattgacaaaattcttgaaccacctgaaggccaagatgaaggtgtgtggaagtatgaacatttaaggtaggaccttacatcaaaatactaatagtacctctcacaaaactagctttcatattaatgataattatgaattgtaaaatttactatgtaactgcagactaagaagccaaattttaaagctttggc

SEQ ID NO: 429902 - DNA, 175 bp, Homo sapiens
gcagttctgccttgagctaaatggacttgctgtcaaacttcaggtaatattttctttaagtcaaagttataattgaaagttctgatttttttttctctgtttttataacttaatgtgcttacaaaaacgtatccacatttctaactttcttctagaatttattatggaaatatag

SEQ ID NO: 429903 - DNA, 2849 bp, Homo sapiens
cggatcagcgtgcgcctgcgcactgtggaggccggaggagtcttaccctaatgtaagatggtggcccgtctggctgtggaacccaccgaaagctgagagtctctctctcagccgtaaaggtcggactcgctgaagcaatcaggcccggttctgaagagttttttccccgacgctcgttcggtggtttcttgtgaggacgcggcagcccgtggagtcggctgagggaaaagcgaggcaaggcaggcgggtcgtcaaagtcctacattttagctttcagtgctgaacttccttctcccttaaattattataaacttttgctgctgtttaataaacgtgaagatgtctcgcagtcctgatgcgaaggaagaccctgtggagtgccctctttgcatggagcccttggagatagatgatatcaactttttcccttgcacctgtggctaccagatttgccgattttgttggcatcgaattcgcactgatgaaaatgggctttgtcctgcatgtagaaagccatatccagaagacccagcagtttataaaccactctcccaggaagagctgcaaaggataaagaatgagaaaaaacagaaacaaaatgagagaaaacagaaaatatcagaaaatcgcaaacatttggctagtgtacgtgtcgtacaaaaaaacctcgtctttgttgtaggtttatctcagcgcctagcagacccagaggttttaaaacgaccagaatattttgggaagtttggtaaaatacataaagttgtcatcaataatagcacatcatatgcaggctcacagggtccaagtgccagtgcttatgtaacctatatccggtcagaagacgctctcagagccatacagtgtgtcaacaatgtggtagtagatggcagaacacttaaggcatctctaggtacaacaaaatactgcagttacttcttaaagaatatgcagtgtccaaaacctgactgcatgtatcttcatgaattgggggatgaggcggccagcttcacaaaagaggaaatgcaggcgggtaaacaccaagaatatgaacagaagctacttcaagaattatataaattaaatcccaattttcttcagctatctacgggttcagttgataaaaataagaacaaagtgacaccactgcagaggtacgatacccccattgacaaaccttcagattctctcagtatagggaacggtgataattcccagcagatatctaacagtgatacgccttcaccaccacctggtttgtcaaaatccaatccagtcatccccatcagttcatccaatcacagtgcacggtccccttttgaaggggcagtaacagagtcacagtcgttattctcagacaattttcgccatcccaaccctatcccaagtgggcttcctcctttccccagctccccacagacatccagtgactggcctacagcaccagaaccacagagcctcttcacatcagaaacaatcccagtatcatcctctacagactggcaagcagcttttggctttggttcttctaaacaaccagaggatgacttgggttttgatcccttcgatgtcactcgaaaagccttagcagacctgattgagaaggaactgtccgttcaagaccaaccttccctttcgcccacatctcttcagaactcctcttcacacactacaaccgccaaaggtccaggctctggattcctgcatcctgctgcagctacaaatgccaattctctcaatagtaccttttcagtcttgccccagaggttccctcaatttcagcagcaccgagcggtttataattcattcagttttccaggccaggcagcccgctatccttggatggcctttccacgcaatagcatcatgcacttgaaccacacagcaaaccccacctcaaatagtaatttcttggacttgaatctcccgccacagcacaacacaggtctgggagggatccctgtagcaggggaagaagaggtgaaggtttcgaccatgccactgtcaacctcttcccattcattacaacaaggacagcagcctacaagtctccacactactgtggcctgacaacagaactgagaggagaggattagactctggggtgcttgcatgggcaactggatttttgcatgattcctttatgattttgcttttaatgtatacacccagaagagccaatataaacgttcctcatgcctacagctagcgtgttacctcatagttgttgaagtatttcttcattaggcctttaacataatttattagtgtaataattttggcattgtttctcatgagtgatactatttctaactcataaaaataaacttgtagtactaagatcccaggtgagattagctagaattgttgttattttggctctattattgaaaaattatacaaaggtaatggtagtatcttgttttctggtttgtgaaaaaataatatcctaatctcctgaaaaatttgcaaattaacaagataatgtctattgcattctttgaatacttgagaagaaagaatacatataaaacaaaattggtggtgtcatttaatgctcagaaggatattgttggcgattgtttttagttgtctagatttatatcctataatatgcattacatgtgtagaaactgttttgttctctctcttttgcacttttgcactttctttttgaatggttgttaattatgcatagatggttaaaagataattattgtagcctaaatgcaatataatctcttttctaatgcactgcctagtataccaggaaatgcctcaaaaacagaacttcagtttatagttgacttatctgaaacttgaatacggagtaaacattgtatgtgaaaagc

SEQ ID NO: 429904 - DNA, 4936 bp, Homo sapiens
cggatcagcgtgcgcctgcgcactgtggaggccggaggagtcttaccctaatgtaagatggtggcccgtctggctgtggaacccaccgaaagctgagagtctctctctcagccgtaaaggtcggactcgctgaagcaatcaggcccggttctgaagagttttttccccgacgctcgttcggtggtttcttgtgaggacgcggcagcccgtggagtcggctgagggaaaagcgaggcaaggcaggcgggtcgtcaaagtcctacattttagctttcagtgctgaacttccttctcccttaaattattataaacttttgctgctgtttaataaacgtgaagatgtctcgcagtcctgatgcgaaggaagaccctgtggagtgccctctttgcatggagcccttggagatagatgatatcaactttttcccttgcacctgtggctaccagatttgccgattttgttggcatcgaattcgcactgatgaaaatgggctttgtcctgcatgtagaaagccatatccagaagacccagcagtttataaaccactctcccaggaagagctgcaaaggataaagaatgagaaaaaacagaaacaaaatgagagaaaacagaaaatatcagaaaatcgcaaacatttggctagtgtacgtgtcgtacaaaaaaacctcgtctttgttgtaggtttatctcagcgcctagcagacccagaggttttaaaacgaccagaatattttgggaagtttggtaaaatacataaagttgtcatcaataatagcacatcatatgcaggctcacagggtccaagtgccagtgcttatgtaacctatatccggtcagaagacgctctcagagccatacagtgtgtcaacaatgtggtagtagatggcagaacacttaaggcatctctaggtacaacaaaatactgcagttacttcttaaagaatatgcagtgtccaaaacctgactgcatgtatcttcatgaattgggggatgaggcggccagcttcacaaaagaggaaatgcaggcgggtaaacaccaagaatatgaacagaagctacttcaagaattatataaattaaatcccaattttcttcagctatctacgggttcagttgataaaaataagaacaaagtgacaccactgcagaggtacgatacccccattgacaaaccttcagattctctcagtatagggaacggtgataattcccagcagatatctaacagtgatacgccttcaccaccacctggtttgtcaaaatccaatccagtcatccccatcagttcatccaatcacagtgcacggtccccttttgaaggggcagtaacagagtcacagtcgttattctcagacaattttcgccatcccaaccctatcccaagtgggcttcctcctttccccagctccccacagacatccagtgactggcctacagcaccagaaccacagagcctcttcacatcagaaacaatcccagtatcatcctctacagactggcaagcagcttttggctttggttcttctaaacaaccagaggatgacttgggttttgatcccttcgatgtcactcgaaaagccttagcagacctgattgagaaggaactgtccgttcaagaccaaccttccctttcgcccacatctcttcagaactcctcttcacacactacaaccgccaaaggtccaggctctggattcctgcatcctgctgcagctacaaatgccaattctctcaatagtaccttttcagtcttgccccagaggttccctcaatttcagcagcaccgagcggtttataattcattcagttttccaggccaggcagcccgctatccttggatggcctttccacgcaatagcatcatgcacttgaaccacacagcaaaccccacctcaaatagtaatttcttggacttgaatctcccgccacagcacaacacaggtctgggagggatccctgtagcaggggaagaagaggtgaaggtttcgaccatgccactgtcaacctcttcccattcattacaacaaggacagcagcctacaagtctccacactactgtggcctgacaacagaactgagaggagaggattagactctggggtgcttgcatgggcaactggatttttgcatgattcctttatgattttgcttttaatgtatacacccagaagagccaatataaacgttcctcatgcctacagctagcgtgttacctcatagttgttgaagtatttcttcattaggcctttaacataatttattagtgtaataattttggcattgtttctcatgagtgatactatttctaactcataaaaataaacttgtagtactaagatcccaggtgagattagctagaattgttgttattttggctctattattgaaaaattatacaaaggtaatggtagtatcttgttttctggtttgtgaaaaaataatatcctaatctcctgaaaaatttgcaaattaacaagataatgtctattgcattctttgaatacttgagaagaaagaatacatataaaacaaaattggtggtgtcatttaatgctcagaaggatattgttggcgattgtttttagttgtctagatttatatcctataatatgcattacatgtgtagaaactgttttgttctctctcttttgcacttttgcactttctttttgaatggttgttaattatgcatagatggttaaaagataattattgtagcctaaatgcaatataatctcttttctaatgcactgcctagtataccaggaaatgcctcaaaaacagaacttcagtttatagttgacttatctgaaacttgaatacggagtaaacattgtatgtgaaaagcaaccatagtagtgtaacattgttactgaacaaacagtaattctgtgggatattgttttggaaatttcattgtttaataattaaaatgtgataataagataatattataagtacctgaccagaatgagactaaggcagaagagaagagattggatgtcctctaaaattaggccacctaaattgtaacagataattttaatcaagagaatagtggagtactttattaggacataatgtgaagtgatatttctgaaaacacatttcttgaaatagttttaaaactgataataaaggaaaagaaactgtacttagtttggagcagtggacaaaagctgattcagaaaacatgaccatattctgcctacatgaagcatctgggaagaaagggaaagtcacacctcctcttgagattttaaccattatgataaaagacaacagcagttctgtagagagtttaaatatgaaggaatggcaggacgggctaagggcacttctacccaacattaacatcaactttggtggactgcccaattcttcttccccctccaacgccaaccacagtgcaccaacgtccaacactgccaccaccgacagcctgagttgggacagccctggcagctggacagacccagccatcatcacaggtattccagcgtcttcaggaaacagtttagactctcttcaagatgacaatcctccacactggctaaaatcccttcaggccctcacagagatggacggccccagcgctgctccatcacagacccaccacagcgcccccttcagcacacagatcccgctgcacagagccagttggaatccctaccctcctccttcaaacccttccagcttccactccccacccccaggctttcagacggccttcagaccccccagcaaaacccccacagatttactacagagttcaacactggaccgccattaggcaaagaggagcaaccattagaaaatgcaggatttgtcccactctgttttctccctctcagcccaccacccacagctcccttctcatctcttatgttctgaagaatccagtacctgatcaattttttttctccctaaccccagatgcaatgcgatcacagggtcattaccatctctttattaattgtaaaaatttttgttgatccagcatttgagtgacactgttgaatgtttctaaaaatgcctttttaaggagagaaaaaaaaatcaaagggcagtctcaatacttagaaaattattgtttgtctgttgcgcataataatgacataatctgcttagcagaaaatgacgattaatctataggaaagctcaagtaaatgcattatcaactgcagaagtttgaaaaccaggttcatttacgtgagattgctaaatgcatgggggaaagcagtggtcctagcatccatcttgtattcagcttatcattattgcagggaaaatgcttttaatttaaattaatttttaattcttttggcaagttgatggcaaggacttgattgtgtcattaagcaaaagaatgtattggaagttgatggaaagacaaattcatctgtagtagtaactggccgattgctaaagagttcataaggaggtgagaagtaatttttttaaaggagaaaaattttttggctttagatttaaagtaaattgaaatgttttaaagaaaaaagtattcacagatttaatacctattaataatataagagctgaaatgtaagtcatttcttcagtccttctcctctgtcggaatcttttttgttttaccataaattcacctgacgagggcactctgagatagcactgctctggggccatctgatcaccatcgggagcaaatctctgacctccttgcctgcagcttttacttaaccctgtagtttctggacgtttgtgcagtattgaaaagacaggagaaaagaaaacagaaacctggttataacctgacgctaaaactaaaaacaaggaaatgtacctctttcttcagaattaaaactaaaatcttaaataaaacagaaaacttgatgatgacaaaaacaacacaacaaaaaaaacaaaacttgttcggggcgcggggcccaaaaa

SEQ ID NO: 429905 - DNA, 3782 bp, Homo sapiens
gaaaagggagcgggtcagaaggcagcgcggcggcaagcagcgactctccttcgagaatttctttaattggggagccgaggcggcttttggtctccagcttttccccctgcattttcaccggggcaggattcttaggtctcagccctccttgtttccccaatcccctgttccctgtctgacgtcctttccctctggcccccgtctcccaagaccaaagccatcacttccactctgatccgtgttggctgctgctgctcattaatcccactgctcattgcccactcgtcctgctgcttgtttttttgctccactgctaccactctggagttagcctttgcccccctctggtgcttgcaatcagcccacagtgtatctgccacactagagctgcttccgatttgcagtctttccttccaccacatctgtcatcttaaagctgccccttaagtatctagattatgctcctcctgctaacccacctgtttctcagccttcttgagaattgtccgttccttccctctttcctgtacagatcctttcaatatacacttccagaaaaagggaagccccgtggtggcccttgaaaagtaaaaggaagttgggaagtgaatgaagtgaggtcgtcaaagtcctacattttagctttcagtgctgaacttccttctcccttaaattattataaacttttgctgctgtttaataaacgtgaagatgtctcgcagtcctgatgcgaaggaagaccctgtggagtgccctctttgcatggagcccttggagatagatgatatcaactttttcccttgcacctgtggctaccagatttgccgattttgttggcatcgaattcgcactgatgaaaatgggctttgtcctgcatgtagaaagccatatccagaagacccagcagtttataaaccactctcccaggaagagctgcaaaggataaagaatgagaaaaaacagaaacaaaatgagagaaaacagaaaatatcagaaaatcgcaaacatttggctagtgtacgtgtcgtacaaaaaaacctcgtctttgttgtaggtttatctcagcgcctagcagacccagaggttttaaaacgaccagaatattttgggaagtttggtaaaatacataaagttgtcatcaataatagcacatcatatgcaggctcacagggtccaagtgccagtgcttatgtaacctatatccggtcagaagacgctctcagagccatacagtgtgtcaacaatgtggtagtagatggcagaacacttaaggcatctctaggtacaacaaaatactgcagttacttcttaaagaatatgcagtgtccaaaacctgactgcatgtatcttcatgaattgggggatgaggcggccagcttcacaaaagaggaaatgcaggcgggtaaacaccaagaatatgaacagaagctacttcaagaattatataaattaaatcccaattttcttcagctatctacgggttcagttgataaaaataagaacaaagtgacaccactgcagaggtacgatacccccattgacaaaccttcagattctctcagtatagggaacggtgataattcccagcagatatctaacagtgatacgccttcaccaccacctggtttgtcaaaatccaatccagtcatccccatcagttcatccaatcacagtgcacggtccccttttgaaggggcagtaacagagtcacagtcgttattctcagacaattttcgccatcccaaccctatcccaagtgggcttcctcctttccccagctccccacagacatccagtgactggcctacagcaccagaaccacagagcctcttcacatcagaaacaatcccagtatcatcctctacagactggcaagcagcttttggctttggttcttctaaacaaccagaggatgacttgggttttgatcccttcgatgtcactcgaaaagccttagcagacctgattgagaaggaactgtccgttcaagaccaaccttccctttcgcccacatctcttcagaactcctcttcacacactacaaccgccaaaggtccaggctctggattcctgcatcctgctgcagctacaaatgccaattctctcaatagtaccttttcagtcttgccccagaggttccctcaatttcagcagcaccgagcggtttataattcattcagttttccaggccaggcagcccgctatccttggatggcctttccacgcaatagcatcatgcacttgaaccacacagcaaaccccacctcaaatagtaatttcttggacttgaatctcccgccacagcacaacacaggtctgggagggatccctgtagcaggtattccagcgtcttcaggaaacagtttagactctcttcaagatgacaatcctccacactggctaaaatcccttcaggccctcacagagatggacggccccagcgctgctccatcacagacccaccacagcgcccccttcagcacacagatcccgctgcacagagccagttggaatccctaccctcctccttcaaacccttccagcttccactccccacccccaggctttcagacggccttcagaccccccagcaaaacccccacagatttactacagagttcaacactggaccgccattaggcaaagaggagcaaccattagaaaatgcaggatttgtcccactctgttttctccctctcagcccaccacccacagctcccttctcatctcttatgttctgaagaatccagtacctgatcaattttttttctccctaaccccagatgcaatgcgatcacagggtcattaccatctctttattaattgtaaaaatttttgttgatccagcatttgagtgacactgttgaatgtttctaaaaatgcctttttaaggagagaaaaaaaaatcaaagggcagtctcaatacttagaaaattattgtttgtctgttgcgcataataatgacataatctgcttagcagaaaatgacgattaatctataggaaagctcaagtaaatgcattatcaactgcagaagtttgaaaaccaggttcatttacgtgagattgctaaatgcatgggggaaagcagtggtcctagcatccatcttgtattcagcttatcattattgcagggaaaatgcttttaatttaaattaatttttaattcttttggcaagttgatggcaaggacttgattgtgtcattaagcaaaagaatgtattggaagttgatggaaagacaaattcatctgtagtagtaactggccgattgctaaagagttcataaggaggtgagaagtaatttttttaaaggagaaaaattttttggctttagatttaaagtaaattgaaatgttttaaagaaaaaagtattcacagatttaatacctattaataatataagagctgaaatgtaagtcatttcttcagtccttctcctctgtcggaatcttttttgttttaccataaattcacctgacgagggcactctgagatagcactgctctggggccatctgatcaccatcgggagcaaatctctgacctccttgcctgcagcttttacttaaccctgtagtttctggacgtttgtgcagtattgaaaagacaggagaaaagaaaacagaaacctggttataacctgacgctaaaactaaaaacaaggaaatgtacctctttcttcagaattaaaactaaaatcttaaataaaacagaaaacttgatgatgacaaaaacaacacaacaaaaaaaacaaaacttgttcggggcgcggggcccaaaaa

SEQ ID NO: 429906 - DNA, 4670 bp, Homo sapiens
cggatcagcgtgcgcctgcgcactgtggaggccggaggagtcttaccctaatgtaagatggtggcccgtctggctgtggaacccaccgaaagctgagagtctctctctcagccgtaaaggtcggactcgctgaagcaatcaggcccggttctgaagagttttttccccgacgctcgttcggtggtttcttgtgaggacgcggcagcccgtggagtcggctgagggaaaagcgaggcaaggcaggcgggtcgtcaaagtcctacattttagctttcagtgctgaacttccttctcccttaaattattataaacttttgctgctgtttaataaacgtgaagatgtctcgcagtcctgatgcgaaggaagaccctgtggagtgccctctttgcatggagcccttggagatagatgatatcaactttttcccttgcacctgtggctaccagatttgccgattttgttggcatcgaattcgcactgatgaaaatgggctttgtcctgcatgtagaaagccatatccagaagacccagcagtttataaaccactctcccaggaagagctgcaaaggataaagaatgagaaaaaacagaaacaaaatgagagaaaacagaaaatatcagaaaatcgcaaacatttggctagtgtacgtgtcgtacaaaaaaacctcgtctttgttgtaggtttatctcagcgcctagcagacccagaggttttaaaacgaccagaatattttgggaagtttggtaaaatacataaagttgtcatcaataatagcacatcatatgcaggctcacagggtccaagtgccagtgcttatgtaacctatatccggtcagaagacgctctcagagccatacagtgtgtcaacaatgtggtagtagatggcagaacacttaaggcatctctaggtacaacaaaatactgcagttacttcttaaagaatatgcagtgtccaaaacctgactgcatgtatcttcatgaattgggggatgaggcggccagcttcacaaaagaggaaatgcaggcgggtaaacaccaagaatatgaacagaagctacttcaagaattatataaattaaatcccaattttcttcagctatctacgggttcagttgataaaaataagaacaaagtgacaccactgcagaggtacgatacccccattgacaaaccttcagattctctcagtatagggaacggtgataattcccagcagatatctaacagtgatacgccttcaccaccacctggtttgtcaaaatccaatccagtcatccccatcagttcatccaatcacagtgcacggtccccttttgaaggggcagtaacagagtcacagtcgttattctcagacaattttcgccatcccaaccctatcccaagtgggcttcctcctttccccagctccccacagacatccagtgactggcctacagcaccagaaccacagagcctcttcacatcagaaacaatcccagtatcatcctctacagactggcaagcagcttttggctttggttcttctaaacaaccagaggatgacttgggttttgatcccttcgatgtcactcgaaaagccttagcagacctgattgagaaggaactgtccgttcaagaccaaccttccctttcgcccacatctcttcagaactcctcttcacacactacaaccgccaaaggtccaggctctggattcctgcatcctgctgcagctacaaatgccaattctctcaatagtaccttttcagtcttgccccagaggttccctcaatttcagcagcaccgagcggtttataattcattcagttttccaggccaggcagcccgctatccttggatggcctttccacgcaatagcatcatgcacttgaaccacacagcaaaccccacctcaaatagtaatttcttggacttgaatctcccgccacagcacaacacaggtctgggagggatccctgtagcaggggaagaagaggtgaaggtttcgaccatgccactgtcaacctcttcccattcattacaacaaggacagcagcctacaagtctccacactactgtggcctgacaacagaactgagaggagaggattagactctggggtgcttgcatgggcaactggatttttgcatgattcctttatgattttgcttttaatgtatacacccagaagagccaatataaacgttcctcatgcctacagctagcgtgttacctcatagttgttgaagtatttcttcattaggcctttaacataatttattagtgtaataattttggcattgtttctcatgagtgatactatttctaactcataaaaataaacttgtagtactaagatcccaggtgagattagctagaattgttgttattttggctctattattgaaaaattatacaaaggtaatggtagtatcttgttttctggtttgtgaaaaaataatatcctaatctcctgaaaaatttgcaaattaacaagataatgtctattgcattctttgaatacttgagaagaaagaatacatataaaacaaaattggtggtgtcatttaatgctcagaaggatattgttggcgattgtttttagttgtctagatttatatcctataatatgcattacatgtgtagaaactgttttgttctctctcttttgcacttttgcactttctttttgaatggttgttaattatgcatagatggttaaaagataattattgtagcctaaatgcaatataatctcttttctaatgcactgcctagtataccaggaaatgcctcaaaaacagaacttcagtttatagttgacttatctgaaacttgaatacggagtaaacattgtatgtgaaaagcaaccatagtagtgtaacattgttactgaacaaacagtaattctgtgggatattgttttggaaatttcattgtttaataattaaaatgtgataataagataatattataagtacctgaccagaatgagactaaggcagaagagaagagattggatgtcctctaaaattaggccacctaaattgtaacagataattttaatcaagagaatagtggagtactttattaggacataatgtgaagtgatatttctgaaaacacatttcttgaaatagttttaaaactgataataaaggaaaagaaactgtacttagtttggagcagtggacaaaagctgattcagaaaacatgaccatattctgcctacatgaagcatctgggaagaaagggaaagtcacacctcctcttgagattttaaccattatgataaaagacaacagcagttctgtagagagtttaaatatgaaggaatggcaggacgggctaagggcacttctacccaacattaacatcaactttggtggactgcccaattcttcttccccctccaacgccaaccacagtgcaccaacgtccaacactgccaccaccgacagcctgagttgggacagccctggcagctggacagacccagccatcatcacaggtattccagcgtcttcaggaaacagtttagactctcttcaagatgacaatcctccacactggctaaaatcccttcaggccctcacagagatggacggccccagcgctgctccatcacagacccaccacagcgcccccttcagcacacagatcccgctgcacagagccagttggaatccctaccctcctccttcaaacccttccagcttccactccccacccccaggctttcagacggccttcagaccccccagcaaaacccccacagatttactacagagttcaacactggaccgccattaggcaaagaggagcaaccattagaaaatgcaggatttgtcccactctgttttctccctctcagcccaccacccacagctcccttctcatctcttatgttctgaagaatccagtacctgatcaattttttttctccctaaccccagatgcaatgcgatcacagggtcattaccatctctttattaattgtaaaaatttttgttgatccagcatttgagtgacactgttgaatgtttctaaaaatgcctttttaaggagagaaaaaaaaatcaaagggcagtctcaatacttagaaaattattgtttgtctgttgcgcataataatgacataatctgcttagcagaaaatgacgattaatctataggaaagctcaagtaaatgcattatcaactgcagaagtttgaaaaccaggttcatttacgtgagattgctaaatgcatgggggaaagcagtggtcctagcatccatcttgtattcagcttatcattattgcagggaaaatgcttttaatttaaattaatttttaattcttttggcaagttgatggcaaggacttgattgtgtcattaagcaaaagaatgtattggaagttgatggaaagacaaattcatctgatcaccatcgggagcaaatctctgacctccttgcctgcagcttttacttaaccctgtagtttctggacgtttgtgcagtattgaaaagacaggagaaaagaaaacagaaacctggttataacctgacgctaaaactaaaaacaaggaaatgtacctctttcttcagaattaaaactaaaatcttaaataaaacagaaaacttgatgatgacaaaaacaacacaacaaaaaaaacaaaacttgttcggggcgcggggcccaaaaa

SEQ ID NO: 429907 - DNA, 1927 bp, Homo sapiens
attgatttacaaacccataatggtgaagaggctatagagagacaagaacctccctctcctgatccttgagcaagtttttcctcacttcaggggctctgagctcacgagcaaaatcctaaccaagtttatcttgctaggacaacccattttaaatgctcaataaagaaagaataattcttctcccgcttaaccactaaagaacaacatatgtttctaacgtagctttttatttttttttatctttcatttttttgttggtaaatctcccagacaacagcagttctgtagagagtttaaatatgaaggaatggcaggacgggctaagggcacttctacccaacattaacatcaactttggtggactgcccaattcttcttccccctccaacgccaaccacagtgcaccaacgtccaacactgccaccaccgacagcctgagttgggacagccctggcagctggacagacccagccatcatcacaggtattccagcgtcttcaggaaacagtttagactctcttcaagatgacaatcctccacactggctaaaatcccttcaggccctcacagagatggacggccccagcgctgctccatcacagacccaccacagcgcccccttcagcacacagatcccgctgcacagagccagttggaatccctaccctcctccttcaaacccttccagcttccactccccacccccaggctttcagacggccttcagaccccccagcaaaacccccacagatttactacagagttcaacactggaccgccattaggcaaagaggagcaaccattagaaaatgcaggatttgtcccactctgttttctccctctcagcccaccacccacagctcccttctcatctcttatgttctgaagaatccagtacctgatcaattttttttctccctaaccccagatgcaatgcgatcacagggtcattaccatctctttattaattgtaaaaatttttgttgatccagcatttgagtgacactgttgaatgtttctaaaaatgcctttttaaggagagaaaaaaaaatcaaagggcagtctcaatacttagaaaattattgtttgtctgttgcgcataataatgacataatctgcttagcagaaaatgacgattaatctataggaaagctcaagtaaatgcattatcaactgcagaagtttgaaaaccaggttcatttacgtgagattgctaaatgcatgggggaaagcagtggtcctagcatccatcttgtattcagcttatcattattgcagggaaaatgcttttaatttaaattaatttttaattcttttggcaagttgatggcaaggacttgattgtgtcattaagcaaaagaatgtattggaagttgatggaaagacaaattcatctgtagtagtaactggccgattgctaaagagttcataaggaggtgagaagtaatttttttaaaggagaaaaattttttggctttagatttaaagtaaattgaaatgttttaaagaaaaaagtattcacagatttaatacctattaataatataagagctgaaatgtaagtcatttcttcagtccttctcctctgtcggaatcttttttgttttaccataaattcacctgacgagggcactctgagatagcactgctctggggccatctgatcaccatcgggagcaaatctctgacctccttgcctgcagcttttacttaaccctgtagtttctggacgtttgtgcagtattgaaaagacaggagaaaagaaaacagaaacctggttataacctgacgctaaaactaaaaacaaggaaatgtacctctttcttcagaattaaaactaaaatcttaaataaaacagaaaacttgatgatgacaaaaacaacacaacaaaaaaaacaaaacttgttcggggcgcggggcccaaaaa

SEQ ID NO: 429908 - DNA, 1531 bp, Homo sapiens
attgatttacaaacccataatggtgaagaggctatagagagacaagaacctccctctcctgatccttgagcaagtttttcctcacttcaggggctctgagctcacgagcaaaatcctaaccaagtttatcttgctaggacaacccattttaaatgctcaataaagaaagaataattcttctcccgcttaaccactaaagaacaacatatgtttctaacgtagctttttatttttttttatctttcatttttttgttggtaaatctcccagacaacagcagttctgtagagagtttaaatatgaaggaatggcaggacgggctaagggcacttctacccaacattaacatcaactttggtggactgcccaattcttcttccccctccaacgccaaccacagtgcaccaacgtccaacactgccaccaccgactctgttttctccctctcagcccaccacccacagctcccttctcatctcttatgttctgaagaatccagtacctgatcaattttttttctccctaaccccagatgcaatgcgatcacagggtcattaccatctctttattaattgtaaaaatttttgttgatccagcatttgagtgacactgttgaatgtttctaaaaatgcctttttaaggagagaaaaaaaaatcaaagggcagtctcaatacttagaaaattattgtttgtctgttgcgcataataatgacataatctgcttagcagaaaatgacgattaatctataggaaagctcaagtaaatgcattatcaactgcagaagtttgaaaaccaggttcatttacgtgagattgctaaatgcatgggggaaagcagtggtcctagcatccatcttgtattcagcttatcattattgcagggaaaatgcttttaatttaaattaatttttaattcttttggcaagttgatggcaaggacttgattgtgtcattaagcaaaagaatgtattggaagttgatggaaagacaaattcatctgtagtagtaactggccgattgctaaagagttcataaggaggtgagaagtaatttttttaaaggagaaaaattttttggctttagatttaaagtaaattgaaatgttttaaagaaaaaagtattcacagatttaatacctattaataatataagagctgaaatgtaagtcatttcttcagtccttctcctctgtcggaatcttttttgttttaccataaattcacctgacgagggcactctgagatagcactgctctggggccatctgatcaccatcgggagcaaatctctgacctccttgcctgcagcttttacttaaccctgtagtttctggacgtttgtgcagtattgaaaagacaggagaaaagaaaacagaaacctggttataacctgacgctaaaactaaaaacaaggaaatgtacctctttcttcagaattaaaactaaaatcttaaataaaacagaaaacttgatgatgacaaaaacaacacaacaaaaaaaacaaaacttgttcggggcgcggggcccaaaaa

SEQ ID NO: 429909 - DNA, 3722 bp, Homo sapiens
cggatcagcgtgcgcctgcgcactgtggaggccggaggagtcttaccctaatgtaagatggtggcccgtctggctgtggaacccaccgaaagctgagagtctctctctcagccgtaaaggtcggactcgctgaagcaatcaggcccggttctgaagagttttttccccgacgctcgttcggtggtttcttgtgaggacgcggcagcccgtggagtcggctgagggaaaagcgaggcaaggcaggcgggtcgtcaaagtcctacattttagctttcagtgctgaacttccttctcccttaaattattataaacttttgctgctgtttaataaacgtgaagatgtctcgcagtcctgatgcgaaggaagaccctgtggagtgccctctttgcatggagcccttggagatagatgatatcaactttttcccttgcacctgtggctaccagatttgccgattttgttggcatcgaattcgcactgatgaaaatgggctttgtcctgcatgtagaaagccatatccagaagacccagcagtttataaaccactctcccaggaagagctgcaaaggataaagaatgagaaaaaacagaaacaaaatgagagaaaacagaaaatatcagaaaatcgcaaacatttggctagtgtacgtgtcgtacaaaaaaacctcgtctttgttgtaggtttatctcagcgcctagcagacccagaggttttaaaacgaccagaatattttgggaagtttggtaaaatacataaagttgtcatcaataatagcacatcatatgcaggctcacagggtccaagtgccagtgcttatgtaacctatatccggtcagaagacgctctcagagccatacagtgtgtcaacaatgtggtagtagatggcagaacacttaaggcatctctaggtacaacaaaatactgcagttacttcttaaagaatatgcagtgtccaaaacctgactgcatgtatcttcatgaattgggggatgaggcggccagcttcacaaaagaggaaatgcaggcgggtaaacaccaagaatatgaacagaagctacttcaagaattatataaattaaatcccaattttcttcagctatctacgggttcagttgataaaaataagaacaaagtgacaccactgcagaggtacgatacccccattgacaaaccttcagattctctcagtatagggaacggtgataattcccagcagatatctaacagtgatacgccttcaccaccacctggtttgtcaaaatccaatccagtcatccccatcagttcatccaatcacagtgcacggtccccttttgaaggggcagtaacagagtcacagtcgttattctcagacaattttcgccatcccaaccctatcccaagtgggcttcctcctttccccagctccccacagacatccagtgactggcctacagcaccagaaccacagagcctcttcacatcagaaacaatcccagtatcatcctctacagactggcaagcagcttttggctttggttcttctaaacaaccagaggatgacttgggttttgatcccttcgatgtcactcgaaaagccttagcagacctgattgagaaggaactgtccgttcaagaccaaccttccctttcgcccacatctcttcagaactcctcttcacacactacaaccgccaaaggtccaggctctggattcctgcatcctgctgcagctacaaatgccaattctctcaatagtaccttttcagtcttgccccagaggttccctcaatttcagcagcaccgagcggtttataattcattcagttttccaggccaggcagcccgctatccttggatggcctttccacgcaatagcatcatgcacttgaaccacacagcaaaccccacctcaaatagtaatttcttggacttgaatctcccgccacagcacaacacaggtctgggagggatccctgtagcaggggaagaagaggtgaaggtttcgaccatgccactgtcaacctcttcccattcattacaacaaggacagcagcctacaagtctccacactactgtggcctgacaacagaactgagaggagaggattagactctggggtgcttgcatgggcaactggatttttgcatgattcctttatgattttgcttttaatgtatacacccagaagagccaatataaacgttcctcatgcctacagctagcgtgttacctcatagttgttgaagtatttcttcattaggcctttaacataatttattagtgtaataattttggcattgtttctcatgagtgatactatttctaactcataaaaataaacttgtagtactaagatcccaggtgagattagctagaattgttgttattttggctctattattgaaaaattatacaaaggtaatggtagtatcttgttttctggtttgtgaaaaaataatatcctaatctcctgaaaaatttgcaaattaacaagataatgtctattgcattctttgaatacttgagaagaaagaatacatataaaacaaaattggtggtgtcatttaatgctcagaaggatattgttggcgattgtttttagttgtctagatttatatcctataatatgcattacatgtgtagaaactgttttgttctctctcttttgcacttttgcactttctttttgaatggttgttaattatgcatagatggttaaaagataattattgtagcctaaatgcaatataatctcttttctaatgcactgcctagtataccaggaaatgcctcaaaaacagaacttcagtttatagttgacttatctgaaacttgaatacggagtaaacattgtatgtgaaaagcaaccatagtagtgtaacattgttactgaacaaacagtaattctgtgggatattgttttggaaatttcattgtttaataattaaaatgtgataataagataatattataagtacctgaccagaatgagactaaggcagaagagaagagattggatgtcctctaaaattaggccacctaaattgtaacagataattttaatcaagagaatagtggagtactttattaggacataatgtgaagtgatatttctgaaaacacatttcttgaaatagttttaaaactgataataaaggaaaagaaactgtacttagtttggagcagtggacaaaagctgattcagaaaacatgaccatattctgcctacatgaagcatctgggaagaaagggaaagtcacacctcctcttgagattttaaccattatgataaaagacaacagcagttctgtagagagtttaaatatgaaggaatggcaggacgggctaagggcacttctacccaacattaacatcaactttggtggactgcccaattcttcttccccctccaacgccaaccacagtgcaccaacgtccaacactgccaccaccgacagcctgagttgggacagccctggcagctggacagacccagccatcatcacaggtattccagcgtcttcaggaaacagtttagactctcttcaagatgacaatcctccacactggctaaaatcccttcaggccctcacagagatggacggccccagcgctgctccatcacagacccaccacagcgcccccttcagcacacagatcccgctgcacagagccagttggaatccctaccctcctccttcaaacacatttcaactcgggatcctcaagaataccatc

SEQ ID NO: 429910 - DNA, 2244 bp, Homo sapiens
cggatcagcgtgcgcctgcgcactgtggaggccggaggagtcttaccctaatgtaagatggtggcccgtctggctgtggaacccaccgaaagctgagagtctctctctcagccgtaaaggtcggactcgctgaagcaatcaggcccggttctgaagagttttttccccgacgctcgttcggtggtttcttgtgaggacgcggcagcccgtggagtcggctgagggaaaagcgaggcaaggcaggcgggtcgtcaaagtcctacattttagctttcagtgctgaacttccttctcccttaaattattataaacttttgctgctgtttaataaacgtgaagatgtctcgcagtcctgatgcgaaggaagaccctgtggagtgccctctttgcatggagcccttggagatagatgatatcaactttttcccttgcacctgtggctaccagatttgccgattttgttggcatcgaattcgcactgatgaaaatgggctttgtcctgcatgtagaaagccatatccagaagacccagcagtttataaaccactctcccaggaagagctgcaaaggataaagaatgagaaaaaacagaaacaaaatgagagaaaacagaaaatatcagaaaatcgcaaacatttggctagtgtacgtgtcgtacaaaaaaacctcgtctttgttgtaggtttatctcagcgcctagcagacccagaggttttaaaacgaccagaatattttgggaagtttggtaaaatacataaagttgtcatcaataatagcacatcatatgcaggctcacagggtccaagtgccagtgcttatgtaacctatatccggtcagaagacgctctcagagccatacagtgtgtcaacaatgtggtagtagatggcagaacacttaaggcatctctaggtacaacaaaatactgcagttacttcttaaagaatatgcagtgtccaaaacctgactgcatgtatcttcatgaattgggggatgaggcggccagcttcacaaaagaggaaatgcaggcgggtaaacaccaagaatatgaacagaagctacttcaagaattatataaattaaatcccaattttcttcagctatctacgggttcagttgataaaaataagaacaaagtgacaccactgcagaggtacgatacccccattgacaaaccttcagattctctcagtatagggaacggtgataattcccagcagatatctaacagtgatacgccttcaccaccacctggtttgtcaaaatccaatccagtcatccccatcagttcatccaatcacagtgcacggtccccttttgaaggggcagtaacagagtcacagtcgttattctcagacaattttcgccatcccaaccctatcccaagtgggcttcctcctttccccagctccccacagacatccagtgactggcctacagcaccagaaccacagagcctcttcacatcagaaacaatcccagtatcatcctctacagactggcaagcagcttttggctttggttcttctaaacaaccagaggatgacttgggttttgatcccttcgatgtcactcgaaaagccttagcagacctgattgagaaggaactgtccgttcaagaccaaccttccctttcgcccacatctcttcagaactcctcttcacacactacaaccgccaaaggtccaggctctggattcctgcatcctgctgcagctacaaatgccaattctctcaatagtaccttttcagtcttgccccagaggttccctcaatttcagcagcaccgagcggtttataattcattcagttttccaggccaggcagcccgctatccttggatggcctttccacgcaatagcatcatgcacttgaaccacacagcaaaccccacctcaaatagtaatttcttggacttgaatctcccgccacagcacaacacaggtctgggagggatccctgtagcaggtaggttcatttaaaacctttgagaatttttgaataactcatattttcaggttgttgggtggatagggaagtaactgttgaataacagagtactaatatcttggaaatgtctatgaaagattagtctttatcataatctaaaatatatttttcattagatggatgccttgtaatattgagctttataaggatggtggagtattatacttagttattgtttggaagcattttacttaataggataattaccaaactttcatatggtatacaaatgcaaa

SEQ ID NO: 429911 - DNA, 618 bp, Homo sapiens
cactctgatccgtgttggctgctgctgctcattaatcccactgctcattgcccactcgtcctgctgcttgtttttttgctccactgctaccactctggagttagcctttgcccccctctggtgcttgcaatcagcccacagtgtatctgccacactagagctgcttccgatttgcagtctttccttccaccacatctgtcatcttaaagctgccccttaagtatctagattatgctcctcctgctaacccacctgtttctcagccttcttgagaattgtccgttccttccctctttcctgtacagatcctttcaatatacacttccagaaaaagggaagccccgtggtggcccttgaaaagtaaaaggaagttgggaagtgaatgaagtgaggtaggatactattaaacgttatgagtgaagatcttttattcaggctactccggagaggaccgttttcgttttgctttctgtgatctatttgtcgcttattcgctctgttgtgttaggacttggctttttttcttttttttcgttttggaccggttttatcatgctactaagcgttctttggattgcctctccccaggacacttagtgtgggccctgatttatacca

SEQ ID NO: 429912 - DNA, 3410 bp, Homo sapiens
cggatcagcgtgcgcctgcgcactgtggaggccggaggagtcttaccctaatgtaagatggtggcccgtctggctgtggaacccaccgaaagctgagagtctctctctcagccgtaaaggtcggactcgctgaagcaatcaggcccggttctgaagagttttttccccgacgctcgttcggtggtttcttgtgaggacgcggcagcccgtggagtcggctgagggaaaagcgaggcaaggcaggcgggtcgtcaaagtcctacattttagctttcagtgctgaacttccttctcccttaaattattataaacttttgctgctgtttaataaacgtgaagatgtctcgcagtcctgatgcgaaggaagaccctgtggagtgccctctttgcatggagcccttggagatagatgatatcaactttttcccttgcacctgtggctaccagatttgccgattttgttggcatcgaattcgcactgatgaaaatgggctttgtcctgcatgtagaaagccatatccagaagacccagcagtttataaaccactctcccaggaagagctgcaaaggataaagaatgagaaaaaacagaaacaaaatgagagaaaacagaaaatatcagaaaatcgcaaacatttggctagtgtacgtgtcgtacaaaaaaacctcgtctttgttgtaggtttatctcagcgcctagcagacccagaggttttaaaacgaccagaatattttgggaagtttggtaaaatacataaagttgtcatcaataatagcacatcatatgcaggctcacagggtccaagtgccagtgcttatgtaacctatatccggtcagaagacgctctcagagccatacagtgtgtcaacaatgtggtagtagatggcagaacacttaaggcatctctaggtacaacaaaatactgcagttacttcttaaagaatatgcagtgtccaaaacctgactgcatgtatcttcatgaattgggggatgaggcggccagcttcacaaaagaggaaatgcaggcgggtaaacaccaagaatatgaacagaagctacttcaagaattatataaattaaatcccaattttcttcagctatctacgggttcagttgataaaaataagaacaaagtgacaccactgcagaggtacgatacccccattgacaaaccttcagattctctcagtatagggaacggtgataattcccagcagatatctaacagtgatacgccttcaccaccacctggtttgtcaaaatccaatccagtcatccccatcagttcatccaatcacagtgcacggtccccttttgaaggggcagtaacagagtcacagtcgttattctcagacaattttcgccatcccaaccctatcccaagtgggcttcctcctttccccagctccccacagacatccagtgactggcctacagcaccagaaccacagagcctcttcacatcagaaacaatcccagtatcatcctctacagactggcaagcagcttttggctttggttcttctaaacaaccagaggatgacttgggttttgatcccttcgatgtcactcgaaaagccttagcagacctgattgagaaggaactgtccgttcaagaccaaccttccctttcgcccacatctcttcagaactcctcttcacacactacaaccgccaaaggtccaggctctggattcctgcatcctgctgcagctacaaatgccaattctctcaatagtaccttttcagtcttgccccagaggttccctcaatttcagcagcaccgagcggtttataattcattcagttttccaggccaggcagcccgctatccttggatggcctttccacgcaatagcatcatgcacttgaaccacacagcaaaccccacctcaaatagtaatttcttggacttgaatctcccgccacagcacaacacaggtctgggagggatccctgtagcaggtattccagcgtcttcaggaaacagtttagactctcttcaagatgacaatcctccacactggctaaaatcccttcaggccctcacagagatggacggccccagcgctgctccatcacagacccaccacagcgcccccttcagcacacagatcccgctgcacagagccagttggaatccctaccctcctccttcaaacccttccagcttccactccccacccccaggctttcagacggccttcagaccccccagcaaaacccccacagatttactacagagttcaacactggaccgccattaggcaaagaggagcaaccattagaaaatgcaggatttgtcccactctgttttctccctctcagcccaccacccacagctcccttctcatctcttatgttctgaagaatccagtacctgatcaattttttttctccctaaccccagatgcaatgcgatcacagggtcattaccatctctttattaattgtaaaaatttttgttgatccagcatttgagtgacactgttgaatgtttctaaaaatgcctttttaaggagagaaaaaaaaatcaaagggcagtctcaatacttagaaaattattgtttgtctgttgcgcataataatgacataatctgcttagcagaaaatgacgattaatctataggaaagctcaagtaaatgcattatcaactgcagaagtttgaaaaccaggttcatttacgtgagattgctaaatgcatgggggaaagcagtggtcctagcatccatcttgtattcagcttatcattattgcagggaaaatgcttttaatttaaattaatttttaattcttttggcaagttgatggcaaggacttgattgtgtcattaagcaaaagaatgtattggaagttgatggaaagacaaattcatctgtagtagtaactggccgattgctaaagagttcataaggaggtgagaagtaatttttttaaaggagaaaaattttttggctttagatttaaagtaaattgaaatgttttaaagaaaaaagtattcacagatttaatacctattaataatataagagctgaaatgtaagtcatttcttcagtccttctcctctgtcggaatcttttttgttttaccataaattcacctgacgagggcactctgagatagcactgctctggggccatctgatcaccatcgggagcaaatctctgacctccttgcctgcagcttttacttaaccctgtagtttctggacgtttgtgcagtattgaaaagacaggagaaaagaaaacagaaacctggttataacctgacgctaaaactaaaaacaaggaaatgtacctctttcttcagaattaaaactaaaatcttaaataaaacagaaaacttgatgatgacaaaaacaacacaacaaaaaaaacaaaacttgttcggggcgcggggcccaaaaa

SEQ ID NO: 429913 - DNA, 3497 bp, Homo sapiens
cggatcagcgtgcgcctgcgcactgtggaggccggaggagtcttaccctaatgtaagatggtggcccgtctggctgtggaacccaccgaaagctgagagtctctctctcagccgtaaaggtcggactcgctgaagcaatcaggcccggttctgaagagttttttccccgacgctcgttcggtggtttcttgtgaggacgcggcagcccgtggagtcggctgagggaaaagcgaggcaaggcaggcggatcctttcaatatacacttccagaaaaagggaagccccgtggtggcccttgaaaagtaaaaggaagttgggaagtgaatgaagtgaggtcgtcaaagtcctacattttagctttcagtgctgaacttccttctcccttaaattattataaacttttgctgctgtttaataaacgtgaagatgtctcgcagtcctgatgcgaaggaagaccctgtggagtgccctctttgcatggagcccttggagatagatgatatcaactttttcccttgcacctgtggctaccagatttgccgattttgttggcatcgaattcgcactgatgaaaatgggctttgtcctgcatgtagaaagccatatccagaagacccagcagtttataaaccactctcccaggaagagctgcaaaggataaagaatgagaaaaaacagaaacaaaatgagagaaaacagaaaatatcagaaaatcgcaaacatttggctagtgtacgtgtcgtacaaaaaaacctcgtctttgttgtaggtttatctcagcgcctagcagacccagaggttttaaaacgaccagaatattttgggaagtttggtaaaatacataaagttgtcatcaataatagcacatcatatgcaggctcacagggtccaagtgccagtgcttatgtaacctatatccggtcagaagacgctctcagagccatacagtgtgtcaacaatgtggtagtagatggcagaacacttaaggcatctctaggtacaacaaaatactgcagttacttcttaaagaatatgcagtgtccaaaacctgactgcatgtatcttcatgaattgggggatgaggcggccagcttcacaaaagaggaaatgcaggcgggtaaacaccaagaatatgaacagaagctacttcaagaattatataaattaaatcccaattttcttcagctatctacgggttcagttgataaaaataagaacaaagtgacaccactgcagaggtacgatacccccattgacaaaccttcagattctctcagtatagggaacggtgataattcccagcagatatctaacagtgatacgccttcaccaccacctggtttgtcaaaatccaatccagtcatccccatcagttcatccaatcacagtgcacggtccccttttgaaggggcagtaacagagtcacagtcgttattctcagacaattttcgccatcccaaccctatcccaagtgggcttcctcctttccccagctccccacagacatccagtgactggcctacagcaccagaaccacagagcctcttcacatcagaaacaatcccagtatcatcctctacagactggcaagcagcttttggctttggttcttctaaacaaccagaggatgacttgggttttgatcccttcgatgtcactcgaaaagccttagcagacctgattgagaaggaactgtccgttcaagaccaaccttccctttcgcccacatctcttcagaactcctcttcacacactacaaccgccaaaggtccaggctctggattcctgcatcctgctgcagctacaaatgccaattctctcaatagtaccttttcagtcttgccccagaggttccctcaatttcagcagcaccgagcggtttataattcattcagttttccaggccaggcagcccgctatccttggatggcctttccacgcaatagcatcatgcacttgaaccacacagcaaaccccacctcaaatagtaatttcttggacttgaatctcccgccacagcacaacacaggtctgggagggatccctgtagcaggtattccagcgtcttcaggaaacagtttagactctcttcaagatgacaatcctccacactggctaaaatcccttcaggccctcacagagatggacggccccagcgctgctccatcacagacccaccacagcgcccccttcagcacacagatcccgctgcacagagccagttggaatccctaccctcctccttcaaacccttccagcttccactccccacccccaggctttcagacggccttcagaccccccagcaaaacccccacagatttactacagagttcaacactggaccgccattaggcaaagaggagcaaccattagaaaatgcaggatttgtcccactctgttttctccctctcagcccaccacccacagctcccttctcatctcttatgttctgaagaatccagtacctgatcaattttttttctccctaaccccagatgcaatgcgatcacagggtcattaccatctctttattaattgtaaaaatttttgttgatccagcatttgagtgacactgttgaatgtttctaaaaatgcctttttaaggagagaaaaaaaaatcaaagggcagtctcaatacttagaaaattattgtttgtctgttgcgcataataatgacataatctgcttagcagaaaatgacgattaatctataggaaagctcaagtaaatgcattatcaactgcagaagtttgaaaaccaggttcatttacgtgagattgctaaatgcatgggggaaagcagtggtcctagcatccatcttgtattcagcttatcattattgcagggaaaatgcttttaatttaaattaatttttaattcttttggcaagttgatggcaaggacttgattgtgtcattaagcaaaagaatgtattggaagttgatggaaagacaaattcatctgtagtagtaactggccgattgctaaagagttcataaggaggtgagaagtaatttttttaaaggagaaaaattttttggctttagatttaaagtaaattgaaatgttttaaagaaaaaagtattcacagatttaatacctattaataatataagagctgaaatgtaagtcatttcttcagtccttctcctctgtcggaatcttttttgttttaccataaattcacctgacgagggcactctgagatagcactgctctggggccatctgatcaccatcgggagcaaatctctgacctccttgcctgcagcttttacttaaccctgtagtttctggacgtttgtgcagtattgaaaagacaggagaaaagaaaacagaaacctggttataacctgacgctaaaactaaaaacaaggaaatgtacctctttcttcagaattaaaactaaaatcttaaataaaacagaaaacttgatgatgacaaaaacaacacaacaaaaaaaacaaaacttgttcggggcgcggggcccaaaaa

SEQ ID NO: 429914 - DNA, 3623 bp, Homo sapiens
cggatcagcgtgcgcctgcgcactgtggaggccggaggagtcttaccctaatgtaagatggtggcccgtctggctgtggaacccaccgaaagctgagagtctctctctcagccgtaaaggtcggactcgctgaagcaatcaggcccggttctgaagagttttttccccgacgctcgttcggtggtttcttgtgaggacgcggcagcccgtggagtcggctgagggaaaagcgaggcaaggcaggcgggtcgtcaaagtcctacattttagctttcagtgctgaacttccttctcccttaaattattataaacttttgctgctgtttaataaacgtgaagatgtctcgcagtcctgatgcgaaggaagaccctgtggagtgccctctttgcatggagcccttggagatagatgatatcaactttttcccttgcacctgtggctaccagatttgccgattttgttggcatcgaattcgcactgatgaaaatgggctttgtcctgcatgtagaaagccatatccagaagacccagcagtttataaaccactctcccaggaagagctgcaaaggataaagaatgagaaaaaacagaaacaaaatgagagaaaacagaaaatatcagaaaatcgcaaacatttggctagtgtacgtgtcgtacaaaaaaacctcgtctttgttgtaggtttatctcagcgcctagcagacccagaggttttaaaacgaccagaatattttgggaagtttggtaaaatacataaagttgtcatcaataatagcacatcatatgcaggctcacagggtccaagtgccagtgcttatgtaacctatatccggtcagaagacgctctcagagccatacagtgtgtcaacaatgtggtagtagatggcagaacacttaaggcatctctaggtacaacaaaatactgcagttacttcttaaagaatatgcagtgtccaaaacctgactgcatgtatcttcatgaattgggggatgaggcggccagcttcacaaaagaggaaatgcaggcgggtaaacaccaagaatatgaacagaagctacttcaagaattatataaattaaatcccaattttcttcagctatctacgggttcagttgataaaaataagaacaaagtgacaccactgcagaggtacgatacccccattgacaaaccttcagattctctcagtatagggaacggtgataattcccagcagatatctaacagtgatacgccttcaccaccacctggtttgtcaaaatccaatccagtcatccccatcagttcatccaatcacagtgcacggtccccttttgaaggggcagtaacagagtcacagtcgttattctcagacaattttcgccatcccaaccctatcccaagtgggcttcctcctttccccagctccccacagacatccagtgactggcctacagcaccagaaccacagagcctcttcacatcagaaacaatcccagtatcatcctctacagactggcaagcagcttttggctttggttcttctaaacaaccagaggatgacttgggttttgatcccttcgatgtcactcgaaaagccttagcagacctgattgagaaggaactgtccgttcaagaccaaccttccctttcgcccacatctcttcagaactcctcttcacacactacaaccgccaaaggtccaggctctggattcctgcatcctgctgcagctacaaatgccaattctctcaatagtaccttttcagtcttgccccagaggttccctcaatttcagcagcaccgagcggtttataattcattcagttttccaggccaggcagcccgctatccttggatggcctttccacgcaatagcatcatgcacttgaaccacacagcaaaccccacctcaaatagtaatttcttggacttgaatctcccgccacagcacaacacaggtctgggagggatccctgtagcagacaacagcagttctgtagagagtttaaatatgaaggaatggcaggacgggctaagggcacttctacccaacattaacatcaactttggtggactgcccaattcttcttccccctccaacgccaaccacagtgcaccaacgtccaacactgccaccaccgacagcctgagttgggacagccctggcagctggacagacccagccatcatcacaggtattccagcgtcttcaggaaacagtttagactctcttcaagatgacaatcctccacactggctaaaatcccttcaggccctcacagagatggacggccccagcgctgctccatcacagacccaccacagcgcccccttcagcacacagatcccgctgcacagagccagttggaatccctaccctcctccttcaaacccttccagcttccactccccacccccaggctttcagacggccttcagaccccccagcaaaacccccacagatttactacagagttcaacactggaccgccattaggcaaagaggagcaaccattagaaaatgcaggatttgtcccactctgttttctccctctcagcccaccacccacagctcccttctcatctcttatgttctgaagaatccagtacctgatcaattttttttctccctaaccccagatgcaatgcgatcacagggtcattaccatctctttattaattgtaaaaatttttgttgatccagcatttgagtgacactgttgaatgtttctaaaaatgcctttttaaggagagaaaaaaaaatcaaagggcagtctcaatacttagaaaattattgtttgtctgttgcgcataataatgacataatctgcttagcagaaaatgacgattaatctataggaaagctcaagtaaatgcattatcaactgcagaagtttgaaaaccaggttcatttacgtgagattgctaaatgcatgggggaaagcagtggtcctagcatccatcttgtattcagcttatcattattgcagggaaaatgcttttaatttaaattaatttttaattcttttggcaagttgatggcaaggacttgattgtgtcattaagcaaaagaatgtattggaagttgatggaaagacaaattcatctgtagtagtaactggccgattgctaaagagttcataaggaggtgagaagtaatttttttaaaggagaaaaattttttggctttagatttaaagtaaattgaaatgttttaaagaaaaaagtattcacagatttaatacctattaataatataagagctgaaatgtaagtcatttcttcagtccttctcctctgtcggaatcttttttgttttaccataaattcacctgacgagggcactctgagatagcactgctctggggccatctgatcaccatcgggagcaaatctctgacctccttgcctgcagcttttacttaaccctgtagtttctggacgtttgtgcagtattgaaaagacaggagaaaagaaaacagaaacctggttataacctgacgctaaaactaaaaacaaggaaatgtacctctttcttcagaattaaaactaaaatcttaaataaaacagaaaacttgatgatgacaaaaacaacacaacaaaaaaaacaaaacttgttcggggcgcggggcccaaaaa

SEQ ID NO: 429915 - DNA, 3791 bp, Homo sapiens
cggatcagcgtgcgcctgcgcactgtggaggccggaggagtcttaccctaatgtaagatggtggcccgtctggctgtggaacccaccgaaagctgagagtctctctctcagccgtaaaggtcggactcgctgaagcaatcaggcccggttctgaagagttttttccccgacgctcgttcggtggtttcttgtgaggacgcggcagcccgtggagtcggctgagggaaaagcgaggcaaggcaggcgggtcgtcaaagtcctacattttagctttcagtgctgaacttccttctcccttaaattattataaacttttgctgctgtttaataaacgtgaagatgtctcgcagtcctgatgcgaaggaagaccctgtggagtgccctctttgcatggagcccttggagatagatgatatcaactttttcccttgcacctgtggctaccagatttgccgattttgttggcatcgaattcgcactgatgaaaatgggctttgtcctgcatgtagaaagccatatccagaagacccagcagtttataaaccactctcccaggaagagctgcaaaggataaagaatgagaaaaaacagaaacaaaatgagagaaaacagaaaatatcagaaaatcgcaaacatttggctagtgtacgtgtcgtacaaaaaaacctcgtctttgttgtaggtttatctcagcgcctagcagacccagaggttttaaaacgaccagaatattttgggaagtttggtaaaatacataaagttgtcatcaataatagcacatcatatgcaggctcacagggtccaagtgccagtgcttatgtaacctatatccggtcagaagacgctctcagagccatacagtgtgtcaacaatgtggtagtagatggcagaacacttaaggcatctctaggtacaacaaaatactgcagttacttcttaaagaatatgcagtgtccaaaacctgactgcatgtatcttcatgaattgggggatgaggcggccagcttcacaaaagaggaaatgcaggcgggtaaacaccaagaatatgaacagaagctacttcaagaattatataaattaaatcccaattttcttcagctatctacgggttcagttgataaaaataagaacaaagtgacaccactgcagaggtacgatacccccattgacaaaccttcagattctctcagtatagggaacggtgataattcccagcagatatctaacagtgatacgccttcaccaccacctggtttgtcaaaatccaatccagtcatccccatcagttcatccaatcacagtgcacggtccccttttgaaggggcagtaacagagtcacagtcgttattctcagacaattttcgccatcccaaccctatcccaagtgggcttcctcctttccccagctccccacagacatccagtgactggcctacagcaccagaaccacagagcctcttcacatcagaaacaatcccagtatcatcctctacagactggcaagcagcttttggctttggttcttctaaacaaccagaggatgacttgggttttgatcccttcgatgtcactcgaaaagccttagcagacctgattgagaaggaactgtccgttcaagaccaaccttccctttcgcccacatctcttcagaactcctcttcacacactacaaccgccaaaggtccaggctctggattcctgcatcctgctgcagctacaaatgccaattctctcaatagtaccttttcagtcttgccccagaggttccctcaatttcagcagcaccgagcggtttataattcattcagttttccaggccaggcagcccgctatccttggatggcctttccacgcaatagcatcatgcacttgaaccacacagcaaaccccacctcaaatagtaatttcttggacttgaatctcccgccacagcacaacacaggtctgggagggatccctgtagcaggggaagaagaggtgaaggtttcgaccatgccactgtcaacctcttcccattcattacaacaaggacagcagcctacaagtctccacactactgtggcctgacaacagaactgagaggagaggattagactctggggtgcttgcatgggcaactggatttttgcatgattcctttatgattttgcttttaatgtatacacccagaagagccaatataaacgttcctcatgcctacagctagcgtgttacctcatagttgttgaagtatttcttcattaggcctttaacataatttattagtgtaataattttggcattgtttctcatgagtgatactatttctaactcataaaaataaacttgtagtactaagatcccaggtgagattagctagaattgttgttattttggctctattattgaaaaattatacaaaggtaatggtagtatcttgttttctggtttgtgaaaaaataatatcctaatctcctgaaaaatttgcaaattaacaagataatgtctattgcattctttgaatacttgagaagaaagaatacatataaaacaaaattggtggtgtcatttaatgctcagaaggatattgttggcgattgtttttagttgtctagatttatatcctataatatgcattacatgtgtagaaactgttttgttctctctcttttgcacttttgcactttctttttgaatggttgttaattatgcatagatggttaaaagataattattgtagcctaaatgcaatataatctcttttctaatgcactgcctagtataccaggaaatgcctcaaaaacagaacttcagtttatagttgacttatctgaaacttgaatacggagtaaacattgtatgtgaaaagcaaccatagtagtgtaacattgttactgaacaaacagtaattctgtgggatattgttttggaaatttcattgtttaataattaaaatgtgataataagataatattataagtacctgaccagaatgagactaaggcagaagagaagagattggatgtcctctaaaattaggccacctaaattgtaacagataattttaatcaagagaatagtggagtactttattaggacataatgtgaagtgatatttctgaaaacacatttcttgaaatagttttaaaactgataataaaggaaaagaaactgtacttagtttggagcagtggacaaaagctgattcagaaaacatgaccatattctgcctacatgaagcatctgggaagaaagggaaagtcacacctcctcttgagattttaaccattatgataaaaggtatgctttaatttgttaaaaaaaaaagtatgaaaggggataatgtgaatacaaaaaagaagcctagagattgaaaataataataatagaacatgttattaggagatggtacttaatgtcatgttggagttggagttttcaaggttacctctatataaaattggattattttctgttagatataatgtgacaaattaaatgactttatcccaaggtacagtgaggtaaacaaaaatctattcttagatatccttagatttggttaactgaggctgtagaagcagcgaattgtctagccatttaagttatttttgtaaaattcagcataaacatcaatctctaatttctatctagaagtgactttaagacattacaagaacattgccaatttggaaaatgccaataaaatactgtagacttattaatattgtagacttattatcagtcttttactatagcttaatttaattatggttttcatttttactgtaagaggccaagacttcacttat

SEQ ID NO: 429916 - DNA, 2012 bp, Homo sapiens
  misc_feature (2000)..(2000): n is a, c, g, or t
cggatcagcgtgcgcctgcgcactgtggaggccggaggagtcttaccctaatgtaagatggtggcccgtctggctgtggaacccaccgaaagctgagagtctctctctcagccgtaaaggtcggactcgctgaagcaatcaggcccggttctgaagagttttttccccgacgctcgttcggtggtttcttgtgaggacgcggcagcccgtggagtcggctgagggaaaagcgaggcaaggcaggcgggtcgtcaaagtcctacattttagctttcagtgctgaacttccttctcccttaaattattataaacttttgctgctgtttaataaacgtgaagatgtctcgcagtcctgatgcgaaggaagaccctgtggagtgccctctttgcatggagcccttggagatagatgatatcaactttttcccttgcacctgtggctaccagatttgccgattttgttggcatcgaattcgcactgatgaaaatgggctttgtcctgcatgtagaaagccatatccagaagacccagcagtttataaaccactctcccaggaagagctgcaaaggataaagaatgagaaaaaacagaaacaaaatgagagaaaacagaaaatatcagaaaatcgcaaacatttggctagtgtacgtgtcgtacaaaaaaacctcgtctttgttgtaggtttatctcagcgcctagcagacccagaggttttaaaacgaccagaatattttgggaagtttggtaaaatacataaagttgtcatcaataatagcacatcatatgcaggctcacagggtccaagtgccagtgcttatgtaacctatatccggtcagaagacgctctcagagccatacagtgtgtcaacaatgtggtagtagatggcagaacacttaaggcatctctaggtacaacaaaatactgcagttacttcttaaagaatatgcagtgtccaaaacctgactgcatgtatcttcatgaattgggggatgaggcggccagcttcacaaaagaggaaatgcaggcgggtaaacaccaagaatatgaacagaagctacttcaagaattatataaattaaatcccaattttcttcagctatctacgggttcagttgataaaaataagaacaaagtgacaccactgcagaggtacgatacccccattgacaaaccttcagattctctcagtatagggaacggtgataattcccagcagatatctaacagtgatacgccttcaccaccacctggtttgtcaaaatccaatccagtcatccccatcagttcatccaatcacagtgcacggtccccttttgaaggggcagtaacagagtcacagtcgttattctcagacaattttcgccatcccaaccctatcccaagtgggcttcctcctttccccagctccccacagacatccagtgactggcctacagcaccagaaccacagagcctcttcacatcagaaacaatcccagtatcatcctctacagactggcaagcagcttttggctttggttcttctaaacaaccagaggatgacttgggttttgatcccttcgatgtcactcgaaaagccttagcagaccttacagagccaattgagaggaagagactggcagtgctgaagagaagataggctcattcagtaggataatagatgtcgttgggtggtgggaagagataagctcctgagacgagcatgtggtatagcttaagagaggtgggtggccaggcgcggtggctcacgcctgtaatcccaacactttgggaggccaaggcaggcagatcacaaggtcaggagatcgagaccatcctggctaacacggtgaaaccccgtctctactaaaaatacaaaaaaattagctgggcgtggtggcgggcacctgtagccccagctactcgggaggctgaggcaggagaatggcgcgaacccaggaggtggagcttgcagtgagccgagatggtgccactgtgctccagcctgggcaacagagngagactccgtct

SEQ ID NO: 429917 - DNA, 1173 bp, Homo sapiens
gaaaagggagcgggtcagaaggcagcgcggcggcaagcagcgactctccttcgagaatttctttaattggggagccgaggcggcttttggtctccagcttttccccctgcattttcaccggggcaggattcttaggtctcagccctccttgtttccccaatcccctgttccctgtctgacgtcctttccctctggcccccgtctcccaagaccaaagccatcacttccactctgatccgtgttggctgctgctgctcattaatcccactgctcattgcccactcgtcctgctgcttgtttttttgctccactgctaccactctggagttagcctttgcccccctctggtgcttgcaatcagcccacagtgtatctgccacactagagctgcttccgatttgcagtctttccttccaccacatctgtcatcttaaagctgccccttaagtatctagattatgctcctcctgctaacccacctgtttctcagccttcttgagaattgtccgttccttccctctttcctgtacagatcctttcaatatacacttccagaaaaagggaagccccgtggtggcccttgaaaagtaaaaggaagttgggaagtgaatgaagtgaggtaggatactattaaacgttatgagtgaagatcttttattcaggctactccggagaggaccgttttcgttttgctttctgtgatctatttgtcgcttattcgctctgttgtgttaggacttggctttttttcttttttttcgttttggaccggttttatcatgctactaagcgttctttggattgcctctccccaggacacttagtgtgggccctgatttataccaataaatattaaccccagcattacaaaataagataaatctggcgcacatacagaattcatctgtgaactccgctagcaaatataagtgatattttgattacatgtgggttatgtgtgggttctgtattgaggcttgatttttgactgagttttattgatgttcagcttaattgatgacattttatttatgatttgagtggaaatttcctctccagttaatatcagattttcttcttatttttggatttgggaagttctcttgacatttctaggatgatagttatcagaataaattgtcttgtcttgaaaatccattagttatgtatgca

SEQ ID NO: 429918 - DNA, 550 bp, Homo sapiens
tcccctgaagagcaatgggctacagatgttctctctgaggttccctctcatgcctataatcccagcactttgagaggctgaggccaggagttagaaaccagcctgggcaacacagtgagattctgcttgtacaaaaaactagccaggcatggtagtgcgcacttgtagtcccaactactcaggactaattaatccaaatttatccaattttgtctcctggagtaaagatcacttgagcccaggaattcaagactacaatgagctatgatcatgccattgcactccagcctgggcgacagagcaaaaccctgtcgctaaaggagaaaaaaaaattctctctgaaatactcaaactacctccaccaaagaccaaaaggttggcagtcaggatacccccacctcacatatccccaaccccaagaattacttcctagatatattctcacattatcatataagtctccaatataagagaaaacaagaattccagggaaggctttataaactaaatttgtgatccttttgtgactttgtaaactaaagtcaaggtg

SEQ ID NO: 429919 - DNA, 1115 bp, Homo sapiens
ctcagcctcccgagtagctgggattacaggcgcccgccaccatgcccaaataatttttgtatttctagtagaaatgaggtttcaccatgttggccaggtgaactcctgacctcaagtgatccactcaccttagcttcccaaagtactgggattataggcatgagccaccgcgcccagctgaaagtatatatactttctagtttgtgatatattctaaagtatatctaaaggttggtattttggcattttgaggtcccagaactgaaaacataaatagttttttttttcatatgaatgtaggtcctatgaatcacttttattaccgcagtgtggtgcataatcaaacaaggaggacttagttgtcttaaaaaattatttttgctttcatgttcagattggtatccagttgaaagtatttttcaacttcaaaaatgggaagtctgggcaacaaatgagatatttgtgggttgtaatacagtataaaattgtgattccatcttttaatcttacaaataacaattgttctatagatatgtgagtctttttaaaaaaaaatttttagcatcacttctcaaaaatgtgagcataccacattttgtttttatttttcttttgctctatgataaatttccacattgaaagacaactcttaagaaataggagctcatagtttctctgtgtgatggaatataagttaaatcctgtttttatctttctgtcttaagtttttaattttatttgggggaaataagactgttaggaattaagtgttagcatcactaacaatctagggttaaagctatagctagaaacagcccagtttttaactggaaactagtggtagaaaagttctttgctattacttgccagtttccaaaaactgtcttgatacatgcataaaaacagcatattttagaaactcttataaccggtgattatcatttatctgtaggttatccttgagaactcagcctgaaagatagataaccagagagattggttataaggaaattatatagaaaataagtggtaattttctgctcagtaattcaatcatacagctatcttttgaatgcccatttacaagtagattttctgctagacacagttacatt

SEQ ID NO: 429920 - DNA, 4152 bp, Homo sapiens
  misc_feature (2970)..(2970): n is a, c, g, or t
tgtcgtcctcttgatgggtcagtcactctgatgtcctgcttctgaatcagcctgttttacttcaatagcaaagaaaaggaaaaccatctgtattagtctgttctcacgcggctaataaagacacacctgagactgggtaatttataaaggaaagaggtttaatggactcatagttctgcatggctggggaggcctcacaatcatggaagaaggtgaaggaggagcaaagggaagtctatcatggcagcaggcgagacagtgtgtgtaagggaactcccatgtacaaaaccatcaaatctcttgagacttatttactatcatgagtacagcatgggaaaacctgtccccatcattcagttacctcccaccaggtcccttccaggatatctggggattatgggagctacaattcaagatgagatttgggtggggacacagccaaaccacgtcaccatctggtttgacttctccttagaggccacatcatgggcctgtcagccaccataattctgggactcttttcccaagttcatgtccataacccctcttccgtctgcaactgggaggtcagctttcatgaacattcccaggagaaagcgaggtggggaggaggtggagctggaaaactgccaaccctaaagagaaaggagtacctttgggcagttacctagggtagaagagctgttcgcacaaagaacccacagtactaaaatgactttcacagactccactcataggcaaggctgctattgagctgatgaacactggcacagccatgccagttgctaaaatacagaaattcttttgtgtaaattgataaagagcaaccaccctggacactctaagtctagtccaactgcccaaagtcaccctgacccaaagtcaaccatttaagatgatcccatgagccagcaagtaaagggttaatgtttggcggggctggggcaccaggactctctttcacaccccctcccaaggcgtgatgcccagtgcttggtcatggtctgtcagtattccaaatatcattcctgcgctgggagatcagaaatatttgcagatatgactgtctggtccacttggtgctgcacttctaagacccattttagagttgagtcaagggaaaaggaaaagtggctgcaggccgggcgcagtggctcatgcctgtaatcccagcactttgggaggccgaggcgggtggatcatttgagatcaggagtttgagaccagcctgaccaacatggtgaaaccccatctctactaaaataaaaaaattggccgggtgtggtggcgggcacctgtaatctcagctactcaagaggctgaggcagtagaatcacttgaacccaggaggcagagattgcaatgagccaagattgtgccactctattgcagcctgggtgacagtgagactgcctctcaaagaaaaaaaagtgggtgcaaatatctggggtgtttcagagggccaaatgtcaaggaacaaacctactacttggatctgtcactttaagtgaatgtttgttttctggtttgtagggaagaaggtattttatccagttcttttcagtcagtacaatcctggcataatatacggccaccatgatgcagtccctcccttggaacagcagctggtgagtaattaccctgcagatggctctgtgtggctctgtttagtgtctgtcattaccaggggtacctgaccatgagcaaaggtgagtagaaatctgtgcaatgattcccttagtagtttttacgtttggcagatgtgctggcctctgctcccggcgcctcgttgattaaaagtgcttgcaatatttaaagtggaaaataaatggaagcagtactttacagagaggtaatttcacaccttcatagtttccatcactggtttttggaaactggtattgttgcattatggatgcagtacagtttctcttgatttttgcaaaatcctacaaggtaacaaaggtgagatttatgttcccatttgacagaaatcagaatggggtggctcaccccagagagggccagagcaattccctggaccttgcaggcaaataaggtctttgtgaatttgaagtggaaactcccagtgtgctcccagtgcccttcccgtcatgccaccgttcccttcccatcatgccactgttcccacacatcacagtgtttgggtagacgttagcattaaaggtgtcactggcaaggtggctctcaaaggaatattggaaggacttctctgctaagatcctggctgcacaggtgatggatagtggatgcacacagcccccaagggtccctgtagggtgagatgtctctgttgtcacaggcagttagtccactttgcagagaagcaatgcaagcagcaggaggaaaggcaagccagaagaggatctctgtgtcttctgggcatggcccccatggatggaatttcccggtattgttgacagcattggcagagagggaaaaggcccttctcccacctcaagttgggctgtgattttttcctgcggggagatgagccaggtttgtctgaagctgtgttctggcccaggctgtatctcatggtggccttcccatctgagggacgtctgttcttctttgctgtgggtagctctgcctcttgctaaagaaaatccatgcttcttcccactgaggaccccttagggtggaggaaggacatctgctgtgggaacctgaagacacgatagcaccaggcctctgatgcttccgtacaatgggagagtaaactgatttccatccaaaacccatgttctggatgcgtttgaggattgactttgtgtgtaagcttctagaaatagcaaacctgttgtttccagccccatcctgtgcctttcatcctctctccccaagttaacctctggcaactgatattatgatattttccagaaagtttcaactttggggccctcaggttggacaatgtcatgtcttatatcctagcatggcttcatnttggggtgcaccaggtttactaataatacagttctcttttcccctagtggaattgcaataccacagatatactgtgtatctgtttttgtagtgtatctgtatctgtgctttatacataaaaacagtaagagtttttcacgtcttaagaatcagttttcagctgggtttggtggctcatgtctttaatgccagcactttgggaggccgagatgggcagatcacttgaggccaggagtttgagaccagcctagccaatgtgtcaaaacccatctctactaaaaaataaaaaattaggcgtgcatagtggcacacacctacagtcccagctactaggcaggttgaaaatcgcttgagcctgggaggcagaggctgtagtgagctgagatcgcaccactgcactccatcctgggtgatggagtgagaccctgtctcaaagaaaaaaaaaaagtgagttttcatctatagtcatgtgttacttaacaatagagagatgtcatgtatcgtcaggcaatttcatcattgtgcaaacatcatacagcgcacttatgcaatcctacataacatagccaactacacacgtaggctgtatggtacaggctgttgctcctaggttacaaacctgtacagcatgtgactgtcctgaatactacaggcaattgaagcacgatggtattcagtatctaaacatagaaatggcacaggaaaaatatggtataaaagattttaaaaatggttcccatgagtggagcttgtaatacaggactagaatttgctctgggtgagtaaatgagtggatggtgagtgaatgtgaaggcctgtgacattactgtccactactgtggactttataaccactgtagacttaggtgacactaaacttattttttaaaagttttccttggccgggtgtggtggcccacacctgtaatcccagcactttgggaggccgaagcaggtgaatcatgaggtcaggagttcgagaccagcctggctaacatgatgaaaccccatctctactaaaaattcaaaaattagctgggcatggtggtatgcgcctgtaatcccaactactccacaggctgaggcaggagaatcacttaaacccgggaggcagaggttgcagtgagccgagatcgtgccactgcactccagcctgggcaacagagcaagactctgtctcag

SEQ ID NO: 429921 - DNA, 489 bp, Homo sapiens
attgtgtgtgtgtgtgtgtgtgtgtgtgtgttttcatatctatgccctagaaacattccagccagaggtgccaaaaatcacaagaccttgttttgggactggtgtgtgtactgtattcctgactgtctgcaaggactcaaatccatctgcgtttcctgcaccagtggaggctgtttatcagtgatgggatgggctccacactccacggtggctcacaggagtttgtgaacactctatttttgtccaccctaaactttcccctcaaatgacagtgcttttcttgcaggtcataaagaaggaaactggattttggagagactttggatttgggatgacgtgtcagtatcggtcagacttcatcaatataggtaggacaaatctgcatctctactgccacccagaggccacgggcccatgtaggccttgaaggaatcaagtagggtttccaaggagtctggttgggaaggtggtaccattgccttcaaaaaa

SEQ ID NO: 429922 - DNA, 2956 bp, Homo sapiens
aatcagccttggagaccctgaacagtcctgcagagaacagccccaatcaccgtccttacacggcctctgatttcatagaagggatctaccgaacagaaagggacaaagggacattgtatgagctcaccttcaaaggggaccacaaacatgaattcaaacggctcatcttatttcgaccattcggccccatcatgaaagtgaaaaatgaaaagctcaacatggccaacacgcttatcaatgttatcgtgcctctagcaaaaagggtggacaagttccggcagttcatgcagaatttcaggcctgctgatgaagtttttagatgtgtgcctttaagcccttgattgtgcggtgttggatcttagaagctgtgatggctcagatgcacatattggctgaggataaccagctaagtgatttcaccagcttgttttaaacatagaaaatcctactgtctaattataaatcttgaaagatcaagctgattttttatttctttttttttgagatggagtcttactctgtcacccaggctggagtgcagtggcacgaactctgctcactgcaaccttcacctcccaggttcagggagatgtgcattgagcaggatgggagagtccatctcactgttgtttactttgggaaagaagaaataaatgaagtcaaaggagtacttgaaaacacttccaaagctgccaacttcaggaactttaccttcatccagctgaatggagaattttctcggggaaagggacttgatgttggagcccgcttctggaagggaagcaacgtccttctctttttctgtgatgtggacatctacttcacatctgaattcctcaatacgtgtaggctgaatacacagccagggaagaaggtattttatccagttcttttcagtcagtacaatcctggcataatatacggccaccatgatgcagtccctcccttggaacagcagctggtcataaagaaggaaactggattttggagagactttggatttgggatgacgtgtcagtatcggtcagacttcatcaatataggtgggtttgatctggacatcaaaggctggggcggagaggatgtgcacctttatcgcaagtatctccacagcaacctcatagtggtacggacgcctgtgcgaggactcttccacctctggcatgagaagcgctgcatggacgagctgacccccgagcagtacaagatgtgcatgcagtccaaggccatgaacgaggcatcccacggccagctgggcatgctggtgttcaggcacgagatagaggctcaccttcgcaaacagaaacagaagacaagtagcaaaaaaacatgaactcccagagaaggattgtgggagacactttttctttccttttgcaattactgaaagtggctgcaacagagaaaagacttccataaaggacgacaaaagaattggactgatgggtcagagatgagaaagcctccgatttctctctgttgggctttttacaacagaaatcaaaatctccgctttgcctgcaaaagtaacccagttgcaccctgtgaagtgtctgacaaaggcagaatgcttgtgagattataagcctaatggtgtggaggttttgatggtgtttacaatacactgagacctgttgttttgtgtgctcattgaaatattcatgatttaagagcagttttgtaaaaaattcattagcatgaaaggcaagcatatttctcctcatatgaatgagcctatcagcagggctctagtttctaggaatgctaaaatatcagaaggcaggagaggagataggcttattatgatactagtgagtacattaagtaaaataaaatggaccagaaaagaaaagaaaccataaatatcgtgtcatattttccccaagattaaccaaaaataatctgcttatctttttggttgtccttttaactgtctccgtttttttcttttatttaaaaatgcactttttttcccttgtgagttatagtctgcttatttaattaccactttgcaagccttacaagagagcacaagttggcctacatttttatattttttaagaagatactttgagatgcattatgagaactttcagttcaaagcatcaaattgatgccatatccaaggacatgccaaatgctgattctgtcaggcactgaatgtcaggcattgagacatagggaaggaatggtttgtactaatacagacgtacagatactttctctgaagagtattttcgaagaggagcaactgaacactggaggaaaagaaaatgacactttctgctttacagaaaaggaaactcattcagactggtgatatcgtgatgtacctaaaagtcagaaaccacattttctcctcagaagtagggaccgctttcttacctgtttaaataaaccaaagtataccgtgtgaaccaaacaatctcttttcaaaacagggtgctcctcctggcttctggcttccataagaagaaatggagaaaaatatatatatatatatatatattgtgaaagatcaatccatctgccagaatctagtgggatggaagtttttgctacatgttatccaccccaggccaggtggaagtaactgaattattttttaaattaagcagttctactcgatcaccaagatgcttctgaaaattgcattttattaccatttcaaactattttttaaaaataaatacagttaacatagagtggtttcttcattcatgtgaaaattattagccagcaccagatgcatgagctaattatctctttgagtccttgcttctgtttgctcacagtaaactcattgtttaaaagcttcaagaacattcaagctgttggtgtgttaaaaaatgcattgtattgatttgtactggtagtttatgaaatttaattaaaacacaggccatgaatggaaggtggtattgcacagctaataaaatatgatttgtggatatga

SEQ ID NO: 429923 - DNA, 3101 bp, Homo sapiens
aatcagccttggagaccctgaacagtcctgcagagaacagccccaatcaccgtccttacacggcctctgatttcatagaagggatctaccgaacagaaagggacaaagggacattgtatgagctcaccttcaaaggggaccacaaacatgaattcaaacggctcatcttatttcgaccattcggccccatcatgaaagtgaaaaatgaaaagctcaacatggccaacacgcttatcaatgttatcgtgcctctagcaaaaagggtggacaagttccggcagttcatgcagaatttcaggcctgctgatgaagtttttagatgtgtgcctttaagcccttgattgtgcggtgttggatcttagaagctgtgatggctcagatgcacatattggctgaggataaccagctaagtgatttcaccagcttgttttaaacatagaaaatcctactgtctaattataaatcttgaaagatcaagctgattttttatttctttttttttgagatggagtcttactctgtcacccaggctggagtgcagtggcacgaactctgctcactgcaaccttcacctcccaggttcagggagatgtgcattgagcaggatgggagagtccatctcactgttgtttactttgggaaagaagaaataaatgaagtcaaaggagtacttgaaaacacttccaaagctgccaacttcaggaactttaccttcatccagctgaatggagaattttctcggggaaagggacttgatgttggagcccgcttctggaagggaagcaacgtccttctctttttctgtgatgtggacatctacttcacatctgaattcctcaatacgtgtaggctgaatacacagccagggaagaaggtattttatccagttcttttcagtcagtacaatcctggcataatatacggccaccatgatgcagtccctcccttggaacagcagctggtcataaagaaggaaactggattttggagagactttggatttgggatgacgtgtcagtatcggtcagacttcatcaatataggtgggtttgatctggacatcaaaggctggggcggagaggatgtgcacctttatcgcaagtatctccacagcaacctcatagtggtacggacgcctgtgcgaggactcttccacctctggcatgagaagcgctgcatggacgagctgacccccgagcagtacaagatgtgcatgcagtccaaggccatgaacgaggcatcccacggccagctgggcatgctggtgttcaggcacgagatagaggctcaccttcgcaaacagaaacagaagacaagtagcaaaaaaacatgaactcccagagaaggattgtgggagacactttttctttccttttgcaattactgaaagtggctgcaacagagaaaagacttccataaaggacgacaaaagaattggactgatgggtcagagatgagaaagcctccgatttctctctgttgggctttttacaacagaaatcaaaatctccgctttgcctgcaaaagtaacccagttgcaccctgtgaagtgtctgacaaaggcagaatgcttgtgagattataagcctaatggtgtggaggttttgatggtgtttacaatacactgagacctgttgttttgtgtgctcattgaaatattcatgatttaagagcagttttgtaaaaaattcattagcatgaaaggcaagcatatttctcctcatatgaatgagcctatcagcagggctctagtttctaggaatgctaaaatatcagaaggcaggagaggagataggcttattatgatactagtgagtacattaagtaaaataaaatggaccagaaaagaaaagaaaccataaatatcgtgtcatattttccccaagattaaccaaaaataatctgcttatctttttggttgtccttttaactgtctccgtttttttcttttatttaaaaatgcactttttttcccttgtgagttatagtctgcttatttaattaccactttgcaagccttacaagagagcacaagttggcctacatttttatattttttaagaagatactttgagatgcattatgagaactttcagttcaaagcatcaaattgatgccatatccaaggacatgccaaatgctgattctgtcaggcactgaatgtcaggcattgagacatagggaaggaatggtttgtactaatacagacgtacagatactttctctgaagagtattttcgaagaggagcaactgaacactggaggaaaagaaaatgacactttctgctttacagaaaaggaaactcattcagactggtgatatcgtgatgtacctaaaagtcagaaaccacattttctcctcagaagtagggaccgctttcttacctgtttaaataaaccaaagtataccgtgtgaaccaaacaatctcttttcaaaacagggtgctcctcctggcttctggcttccataagaagaaatggagaaaaatatatatatatatatatatattgtgaaagatcaatccatctgccagaatctagtgggatggaagtttttgctacatgttatccaccccaggccaggtggaagtaactgaattattttttaaattaagcagttctactcgatcaccaagatgcttctgaaaattgcattttattaccatttcaaactattttttaaaaataaatacagttaacatagagtggtttcttcattcatgtgaaaattattagccagcaccagatgcatgagctaattatctctttgagtccttgcttctgtttgctcacagtaaactcattgtttaaaagcttcaagaacattcaagctgttggtgtgttaaaaaatgcattgtattgatttgtactggtagtttatgaaatttaattaaaacacaggccatgaatggaaggtggtattgcacagctaataaaatatgatttgtggatatgaaaaacaacacactctacccacacaacaaaaaacacctttttgcggcccgccctcggccccgaaaaacttttccaaaccccctcctttgggcggcgggccccaagtttagttgaaacttggccccacgccgttccccacgaggaac

SEQ ID NO: 429924 - DNA, 2669 bp, Homo sapiens
aatcagccttggagaccctgaacagtcctgcagagaacagccccaatcaccgtccttacacggcctctgatttcatagaagggatctaccgaacagaaagggacaaagggacattgtatgagctcaccttcaaaggggaccacaaacatgaattcaaacggctcatcttatttcgaccattcggccccatcatgaaagtgaaaaatgaaaagctcaacatggccaacacgcttatcaatgttatcgtgcctctagcaaaaagggtggacaagttccggcagttcatgcagaatttcagggagatgtgcattgagcaggatgggagagtccatctcactgttgtttactttgggaaagaagaaataaatgaagtcaaaggagtacttgaaaacacttccaaagctgccaacttcaggaactttaccttcatccagctgaatggagaattttctcggggaaagggacttgatgttggagcccgcttctggaagggaagcaacgtccttctctttttctgtgatgtggacatctacttcacatctgaattcctcaatacgtgtaggctgaatacacagccagggaagaaggtattttatccagttcttttcagtcagtacaatcctggcataatatacggccaccatgatgcagtccctcccttggaacagcagctggtcataaagaaggaaactggattttggagagactttggatttgggatgacgtgtcagtatcggtcagacttcatcaatataggtgggtttgatctggacatcaaaggctggggcggagaggatgtgcacctttatcgcaagtatctccacagcaacctcatagtggtacggacgcctgtgcgaggactcttccacctctggcatgagaagcgctgcatggacgagctgacccccgagcagtacaagatgtgcatgcagtccaaggccatgaacgaggcatcccacggccagctgggcatgctggtgttcaggcacgagatagaggctcaccttcgcaaacagaaacagaagacaagtagcaaaaaaacatgaactcccagagaaggattgtgggagacactttttctttccttttgcaattactgaaagtggctgcaacagagaaaagacttccataaaggacgacaaaagaattggactgatgggtcagagatgagaaagcctccgatttctctctgttgggctttttacaacagaaatcaaaatctccgctttgcctgcaaaagtaacccagttgcaccctgtgaagtgtctgacaaaggcagaatgcttgtgagattataagcctaatggtgtggaggttttgatggtgtttacaatacactgagacctgttgttttgtgtgctcattgaaatattcatgatttaagagcagttttgtaaaaaattcattagcatgaaaggcaagcatatttctcctcatatgaatgagcctatcagcagggctctagtttctaggaatgctaaaatatcagaaggcaggagaggagataggcttattatgatactagtgagtacattaagtaaaataaaatggaccagaaaagaaaagaaaccataaatatcgtgtcatattttccccaagattaaccaaaaataatctgcttatctttttggttgtccttttaactgtctccgtttttttcttttatttaaaaatgcactttttttcccttgtgagttatagtctgcttatttaattaccactttgcaagccttacaagagagcacaagttggcctacatttttatattttttaagaagatactttgagatgcattatgagaactttcagttcaaagcatcaaattgatgccatatccaaggacatgccaaatgctgattctgtcaggcactgaatgtcaggcattgagacatagggaaggaatggtttgtactaatacagacgtacagatactttctctgaagagtattttcgaagaggagcaactgaacactggaggaaaagaaaatgacactttctgctttacagaaaaggaaactcattcagactggtgatatcgtgatgtacctaaaagtcagaaaccacattttctcctcagaagtagggaccgctttcttacctgtttaaataaaccaaagtataccgtgtgaaccaaacaatctcttttcaaaacagggtgctcctcctggcttctggcttccataagaagaaatggagaaaaatatatatatatatatatatattgtgaaagatcaatccatctgccagaatctagtgggatggaagtttttgctacatgttatccaccccaggccaggtggaagtaactgaattattttttaaattaagcagttctactcgatcaccaagatgcttctgaaaattgcattttattaccatttcaaactattttttaaaaataaatacagttaacatagagtggtttcttcattcatgtgaaaattattagccagcaccagatgcatgagctaattatctctttgagtccttgcttctgtttgctcacagtaaactcattgtttaaaagcttcaagaacattcaagctgttggtgtgttaaaaaatgcattgtattgatttgtactggtagtttatgaaatttaattaaaacacaggccatgaatggaaggtggtattgcacagctaataaaatatgatttgtggatatga

SEQ ID NO: 429925 - DNA, 3623 bp, Homo sapiens
tgtcgtcctcttgatgggtcagtcactctgatgtcctgcttctgaatcagcctgttttacttcaatagcaaagaaaaggaaaaccatctgtattagtctgttctcacgcggctaataaagacacacctgagactgggtaatttataaaggaaagaggtttaatggactcatagttctgcatggctggggaggcctcacaatcatggaagaaggtgaaggaggagcaaagggaagtctatcatggcagcaggcgagacagtgtgtgtaagggaactcccatgtacaaaaccatcaaatctcttgagacttatttactatcatgagtacagcatgggaaaacctgtccccatcattcagttacctcccaccaggtcccttccaggatatctggggattatgggagctacaattcaagatgagatttgggtggggacacagccaaaccacgtcaccatctggtttgacttctccttagaggccacatcatgggcctgtcagccaccataattctgggactcttttcccaagttcatgtccataacccctcttccgtctgcaactgggaggtcagctttcatgaacattcccaggagaaagcgaggtggggaggaggtggagctggaaaactgccaaccctaaagagaaaggagtacctttgggcagttacctagggtagaagagctgttcgcacaaagaacccacagtactaaaatgactttcacagactccactcataggcaaggctgctattgagctgatgaacactggcacagccatgccagttgctaaaatacagaaattcttttgtgtaaattgataaagagcaaccaccctggacactctaagtctagtccaactgcccaaagtcaccctgacccaaagtcaaccatttaagatgatcccatgagccagcaagtaaagggttaatgtttggcggggctggggcaccaggactctctttcacaccccctcccaaggcgtgatgcccagtgcttggtcatggtctgtcagtattccaaatatcattcctgcgctgggagatcagaaatatttgcagatatgactgtctggtccacttggtgctgcacttctaagacccattttagagttgagtcaagggaaaaggaaaagtggctgcaggccgggcgcagtggctcatgcctgtaatcccagcactttgggaggccgaggcgggtggatcatttgagatcaggagtttgagaccagcctgaccaacatggtgaaaccccatctctactaaaataaaaaaattggccgggtgtggtggcgggcacctgtaatctcagctactcaagaggctgaggcagtagaatcacttgaacccaggaggcagagattgcaatgagccaagattgtgccactctattgcagcctgggtgacagtgagactgcctctcaaagaaaaaaaagtgggtgcaaatatctggggtgtttcagagggccaaatgtcaaggaacaaacctactacttggatctgtcactttaagtgaatgtttgttttctggtttgtagggaagaaggtattttatccagttcttttcagtcagtacaatcctggcataatatacggccaccatgatgcagtccctcccttggaacagcagctggtcataaagaaggaaactggattttggagagactttggatttgggatgacgtgtcagtatcggtcagacttcatcaatataggtgggtttgatctggacatcaaaggctggggcggagaggatgtgcacctttatcgcaagtatctccacagcaacctcatagtggtacggacgcctgtgcgaggactcttccacctctggcatgagaagcgctgcatggacgagctgacccccgagcagtacaagatgtgcatgcagtccaaggccatgaacgaggcatcccacggccagctgggcatgctggtgttcaggcacgagatagaggctcaccttcgcaaacagaaacagaagacaagtagcaaaaaaacatgaactcccagagaaggattgtgggagacactttttctttccttttgcaattactgaaagtggctgcaacagagaaaagacttccataaaggacgacaaaagaattggactgatgggtcagagatgagaaagcctccgatttctctctgttgggctttttacaacagaaatcaaaatctccgctttgcctgcaaaagtaacccagttgcaccctgtgaagtgtctgacaaaggcagaatgcttgtgagattataagcctaatggtgtggaggttttgatggtgtttacaatacactgagacctgttgttttgtgtgctcattgaaatattcatgatttaagagcagttttgtaaaaaattcattagcatgaaaggcaagcatatttctcctcatatgaatgagcctatcagcagggctctagtttctaggaatgctaaaatatcagaaggcaggagaggagataggcttattatgatactagtgagtacattaagtaaaataaaatggaccagaaaagaaaagaaaccataaatatcgtgtcatattttccccaagattaaccaaaaataatctgcttatctttttggttgtccttttaactgtctccgtttttttcttttatttaaaaatgcactttttttcccttgtgagttatagtctgcttatttaattaccactttgcaagccttacaagagagcacaagttggcctacatttttatattttttaagaagatactttgagatgcattatgagaactttcagttcaaagcatcaaattgatgccatatccaaggacatgccaaatgctgattctgtcaggcactgaatgtcaggcattgagacatagggaaggaatggtttgtactaatacagacgtacagatactttctctgaagagtattttcgaagaggagcaactgaacactggaggaaaagaaaatgacactttctgctttacagaaaaggaaactcattcagactggtgatatcgtgatgtacctaaaagtcagaaaccacattttctcctcagaagtagggaccgctttcttacctgtttaaataaaccaaagtataccgtgtgaaccaaacaatctcttttcaaaacagggtgctcctcctggcttctggcttccataagaagaaatggagaaaaatatatatatatatatatatattgtgaaagatcaatccatctgccagaatctagtgggatggaagtttttgctacatgttatccaccccaggccaggtggaagtaactgaattattttttaaattaagcagttctactcgatcaccaagatgcttctgaaaattgcattttattaccatttcaaactattttttaaaaataaatacagttaacatagagtggtttcttcattcatgtgaaaattattagccagcaccagatgcatgagctaattatctctttgagtccttgcttctgtttgctcacagtaaactcattgtttaaaagcttcaagaacattcaagctgttggtgtgttaaaaaatgcattgtattgatttgtactggtagtttatgaaatttaattaaaacacaggccatgaatggaaggtggtattgcacagctaataaaatatgatttgtggatatga

SEQ ID NO: 429926 - DNA, 2471 bp, Homo sapiens
ttttacgaaacctctatttttaattattatgcgcatgtttatggggtacatgtgatgttttgatacaggcatacaatgtgtaatcatcacatcagggtcatgggaggtatccatcatttcaattatttatcatatttatcagtcttctagctatttttaaatatacaataaattgttaacaatagctaattcataatcacaataagtctgtcagtaataatgctaccgaatactagatcttatttttgtacccattaaccacgaggctggggctgttcattagcattgctgataactcttgaatgcaggcaaatgcttggaattttcttggaggtcctgtcatctgaagaagtcggtgctgtctgccataaaagtcgtctttgttggggaattctcggggcttctgacccaggtggacactctcgtaccttggaggggtggtggtgaagcacgcatcccccccagtcatgtcttaatgaaaagtttgtgcttgttgcaactcagggaagcaaaacagatcagtgcagtgtgattcaacagtgtgttctgtcccgacaggtgggtttgatctggacatcaaaggctggggcggagaggatgtgcacctttatcgcaagtatctccacagcaacctcatagtggtacggacgcctgtgcgaggactcttccacctctggcatgagaagcgctgcatggacgagctgacccccgagcagtacaagatgtgcatgcagtccaaggccatgaacgaggcatcccacggccagctgggcatgctggtgttcaggcacgagatagaggctcaccttcgcaaacagaaacagaagacaagtagcaaaaaaacatgaactcccagagaaggattgtgggagacactttttctttccttttgcaattactgaaagtggctgcaacagagaaaagacttccataaaggacgacaaaagaattggactgatgggtcagagatgagaaagcctccgatttctctctgttgggctttttacaacagaaatcaaaatctccgctttgcctgcaaaagtaacccagttgcaccctgtgaagtgtctgacaaaggcagaatgcttgtgagattataagcctaatggtgtggaggttttgatggtgtttacaatacactgagacctgttgttttgtgtgctcattgaaatattcatgatttaagagcagttttgtaaaaaattcattagcatgaaaggcaagcatatttctcctcatatgaatgagcctatcagcagggctctagtttctaggaatgctaaaatatcagaaggcaggagaggagataggcttattatgatactagtgagtacattaagtaaaataaaatggaccagaaaagaaaagaaaccataaatatcgtgtcatattttccccaagattaaccaaaaataatctgcttatctttttggttgtccttttaactgtctccgtttttttcttttatttaaaaatgcactttttttcccttgtgagttatagtctgcttatttaattaccactttgcaagccttacaagagagcacaagttggcctacatttttatattttttaagaagatactttgagatgcattatgagaactttcagttcaaagcatcaaattgatgccatatccaaggacatgccaaatgctgattctgtcaggcactgaatgtcaggcattgagacatagggaaggaatggtttgtactaatacagacgtacagatactttctctgaagagtattttcgaagaggagcaactgaacactggaggaaaagaaaatgacactttctgctttacagaaaaggaaactcattcagactggtgatatcgtgatgtacctaaaagtcagaaaccacattttctcctcagaagtagggaccgctttcttacctgtttaaataaaccaaagtataccgtgtgaaccaaacaatctcttttcaaaacagggtgctcctcctggcttctggcttccataagaagaaatggagaaaaatatatatatatatatatatattgtgaaagatcaatccatctgccagaatctagtgggatggaagtttttgctacatgttatccaccccaggccaggtggaagtaactgaattattttttaaattaagcagttctactcgatcaccaagatgcttctgaaaattgcattttattaccatttcaaactattttttaaaaataaatacagttaacatagagtggtttcttcattcatgtgaaaattattagccagcaccagatgcatgagctaattatctctttgagtccttgcttctgtttgctcacagtaaactcattgtttaaaagcttcaagaacattcaagctgttggtgtgttaaaaaatgcattgtattgatttgtactggtagtttatgaaatttaattaaaacacaggccatgaatggaaggtggtattgcacagctaataaaatatgatttgtggatatga

SEQ ID NO: 429927 - DNA, 1737 bp, Homo sapiens
aatcagccttggagaccctgaacagtcctgcagagaacagccccaatcaccgtccttacacggcctctgatttcatagaagggatctaccgaacagaaagggacaaagggacattgtatgagctcaccttcaaaggggaccacaaacatgaattcaaacggctcatcttatttcgaccattcggccccatcatgaaagtgaaaaatgaaaagctcaacatggccaacacgcttatcaatgttatcgtgcctctagcaaaaagggtggacaagttccggcagttcatgcagaatttcaggcctgctgatgaagtttttagatgtgtgcctttaagcccttgattgtgcggtgttggatcttagaagctgtgatggctcagatgcacatattggctgaggataaccagctaagtgatttcaccagcttgttttaaacatagaaaatcctactgtctaattataaatcttgaaagatcaagctgattttttatttctttttttttgagatggagtcttactctgtcacccaggctggagtgcagtggcacgaactctgctcactgcaaccttcacctcccaggttcagggagatgtgcattgagcaggatgggagagtccatctcactgttgtttactttgggaaagaagaaataaatgaagtcaaaggagtacttgaaaacacttccaaagctgccaacttcaggaactttaccttcatccagctgaatggagaattttctcggggaaagggacttgatgttggagcccgcttctggaagggaagcaacgtccttctctttttctgtgatgtggacatctacttcacatctgaattcctcaatacgtgtaggctgaatacacagccagggaagaaggtattttatccagttcttttcagtcagtacaatcctggcataatatacggccaccatgatgcagtccctcccttggaacagcagctggtcataaagaaggaaactggattttggagagactttggatttgggatgacgtgtcagtatcggtcagacttcatcaatataggtgggtttgatctggacatcaaaggctggggcggagaggatgtgcacctttatcgcaagtatctccacagcaacctcatagtggtacggacgcctgtgcgaggactcttccacctctggcatgagaagcgctgcatggacgagctgacccccgagcagtacaagatgtgcatgcagtccaaggccatgaacgaggcatcccacggccagctgggcatgctggtgttcaggcacgagatagaggctcaccttcgcaaacagaaacagaagacaagtagcaattactgaaagtggctgcaacagagaaaagacttccataaaggacgacaaaagaattggactgatgggtcagagatgagaaagcctccgatttctctctgttgggctttttacaacagaaatcaaaatctccgctttgcctgcaaaagtaacccagttgcaccctgtgaagtgtctgacaaaggcagaatgcttgtgagattataagcctaatggtgtggaggttttgatggtgtttacaatacactgagacctgttgttttgtgtgctcattgaaatattcatgccttgagtcgttctgccattctttatccgtacgcgccgcacctttatactcatatgactcagcccattagccaggctctagtttctacgatgctcacatactatacagcacgacaggcctgggtctcccg

SEQ ID NO: 429928 - DNA, 254 bp, Homo sapiens
ctgcagcggggctgaacagagcgctcgaggggcggcgcagcagctgcgctagcttcagttgacgcgtccagactagtgcgtgccagcagagcacgcgcggtccaccggcagagcgccgctgcacaggagcgtgaaggacttagccgactgcgctgctttttcaaaacggatccgggcaatgcttcgttttctaaaggatgctgctgttgaagctttgaattttacaataaactttttgaaacaaaaaaaaaatc

SEQ ID NO: 429929 - DNA, 1203 bp, Homo sapiens
cacagttgcccccaaactgcctgtgctcctcgatggtgtctctccctccagaaaacgcatgcttattgaccttggttttgatctgcttggccgtgtcggtgaggaagatggaggagttggggtcgctggcactcgctggtggtgggcgcgccgtgctgagctctggctgtcagtgtgttcgcccgcgtcccctccgcgctctccgcttgtggataactagctgctggttgatcgcactatgactctggaagaagtccgcggccaggacacagttccggaaagcacagccaggatgcagggtgccgggaaagcgctgcatgagttgctgctgtcggcgcagcgtcagggctgcctcactgccggcgtctacgagtcagccaaagtcttgaacgtggaccccgacaatgtgaccttctgtgtgctggctgcgggtgaggaggacgagggcgacatcgcgctgcagatccattttacgctgatccaggctttctgctgcgagaacgacatcgacatagtgcgcgtgggcgatgtgcagcggctggcggctatcgtgggcgccggcgaggaggcgggtgcgccgggcgacctgcactgcatcctcatttcgaaccccaacgaggacgcctggaaggatcccgccttggagaagctcagcctgttttgcgaggagagccgcagcgttaacgactgggtgcccagcatcaccctccccgagtgacagcccggcggggaccttggtctgatcgacgtggtgacgccccggggcgcctagagcgcggctggctctgtggaggggccctccgagggtgcccgagtgcggcgtggagactggcaggcggggggggcgcctggagagcgaggaggcgcggcctcccgaggaggggcccggtggcggcagggccaggctggtccgagctgaggactctgcaagtgtctggagcggctgctcgcccaggaaggcctaggctaggacgttggcctcagggccaggaaggacagactggccgggcaggcgtgactcagcagcctgcgctcggcaggaaggagcggcgccctggacttggtacagttgcaggagcgtgaaggacttagccgactgcgctgctttttcaaaacggatccgggcaatgcttcgttttctaaaggatgctgctgttgaagctttgaattttacaataaactttttgaaacaaaaaaaaaatc

SEQ ID NO: 429930 - DNA, 1460 bp, Homo sapiens
cacagttgcccccaaactgcctgtgctcctcgatggtgtctctccctccagaaaacgcatgcttattgaccttggttttgatctgcttggccgtgtcggtgaggaagatggaggagttggggtcgctggcactcgctggtggtgggcgcgccgtgctgagctctggctgtcagtgtgttcgcccgcgtcccctccgcgctctccgcttgtggataactagctgctggttgatcgcactatgactctggaagaagtccgcggccaggacacagttccggaaagcacagccaggtgggtttcagggcgctgagaaagccgctggtcggtcggcgaccgtcagggttttccagggtgggaatccgcggggtaggaggggagcgcgggggtccgggcgccagatcccggttggagagccggggtgcaggcgctgagccgggattggagtgtggttggagttggggagccaagggtgtgtgccggtggccggggctggggtctccgccgcgccctccggccggctcccgctcactgcgctggctcctccgcaggatgcagggtgccgggaaagcgctgcatgagttgctgctgtcggcgcagcgtcagggctgcctcactgccggcgtctacgagtcagccaaagtcttgaacgtggaccccgacaatgtgaccttctgtgtgctggctgcgggtgaggaggacgagggcgacatcgcgctgcagatccattttacgctgatccaggctttctgctgcgagaacgacatcgacatagtgcgcgtgggcgatgtgcagcggctggcggctatcgtgggcgccggcgaggaggcgggtgcgccgggcgacctgcactgcatcctcatttcgaaccccaacgaggacgcctggaaggatcccgccttggagaagctcagcctgttttgcgaggagagccgcagcgttaacgactgggtgcccagcatcaccctccccgagtgacagcccggcggggaccttggtctgatcgacgtggtgacgccccggggcgcctagagcgcggctggctctgtggaggggccctccgagggtgcccgagtgcggcgtggagactggcaggcggggggggcgcctggagagcgaggaggcgcggcctcccgaggaggggcccggtggcggcagggccaggctggtccgagctgaggactctgcaagtgtctggagcggctgctcgcccaggaaggcctaggctaggacgttggcctcagggccaggaaggacagactggccgggcaggcgtgactcagcagcctgcgctcggcaggaaggagcggcgccctggacttggtacagttgcaggagcgtgaaggacttagccgactgcgctgctttttcaaaacggatccgggcaatgcttcgttttctaaaggatgctgctgttgaagctttgaattttacaataaactttttgaaacaaaaaaaaaatc

SEQ ID NO: 429931 - DNA, 3153 bp, Homo sapiens
ccggggccacgccgattggcgcgaagttttcttttctccttccaccttcttttcatttctagtgagacacacgctttggtcctggctttcggcccgtagttgtagaaggagccctgctggtgcaggttagaggtgccgcatcccccggagctctcgaagtggaggcggtaggaaacggagggcttgcggctagccggaggaagctttggagccggaagccatggcacactaccccacaaggctgaagaccagaaaaacttattcatgggttggcaggcccttgttggatcgaaaactgcactaccaaacctatagagaaatgtgtgtgaaaacagaaggttgttccaccgagattcacatccagattggacagtttgtgttgattgaaggggatgatgatgaaaacccgtatgttgctaaattgcttgagttgttcgaagatgactctgatcctcctcctaagaaacgtgctcgagtacagtggtttgtccgattctgtgaagtccctgcctgtaaacggcatttgttgggccggaagcctggtgcacaggaaatattctggtatgattacccggcctgtgacagcaacattaatgcggagaccatcattggccttgttcgggtgatacctttagccccaaaggatgtggtaccgacgaatctgaaaaatgagaagacactctttgtgaaactatcctggaatgagaagaaattcaggccactttcctcagaactatttgcggagttgaataaaccacaagagagtgcagccaagtgccagaaacccgtgagagccaagagtaagagtgcagagagcccttcttggaccccagcagaacatgtggccaaaaggattgaatcaaggcactccgcctccaaatctcgccaaactcctacccatcctcttaccccaagagccagaaagaggctggagcttggcaacttaggtaaccctcagatgtcccagcagacttcatgtgcctccttggattctccaggaagaataaaacggaaagtggccttctcggagatcacctcaccttctaagagatctcagcctgataaacttcaaaccttgtctccagctctgaaagccccagagaaaaccagagagactggactctcttatactgaggatgacaagaaggcttcacctgaacatcgcataatcctgagaacccgaattgcagcttcgaaaaccatagacattagagaggagagaacacttacccctatcagtgggggacagagatcttcagtggtgccatccgtgattctgaaaccagaaaacatcaaaaagagggatgcaaaagaagcaaaagcccagaatgaagcgacctctactccccatcgtatccgcagaaagagttctgtcttgactatgaatcggattaggcagcagcttcggtttctaggtaatagtaaaagtgaccaagaagagaaagagattctgccagcagcagagatttcagactctagcagtgacgaagaagaggcttccacaccgccccttccaaggagagcacccagaactgtgtccaggaacctgcgatcttccttgaagtcatccttacataccctcacgaaggtgccaaagaagagtctcaagcctagaacgccacgttgtgccgctcctcagatccgtagtcgaagcctggctgcccaggagccagccagtgtgctggaggaagcccgactgaggctgcatgtttctgctgtacctgagtctcttccctgtcgggaacaggaattccaagacatctacaattttgtggaaagcaaactccttgaccataccggagggtgcatgtacatctccggtgtccctgggacagggaagactgccactgttcatgaagtgatacgctgcctgcagcaggcagcccaagccaatgatgttcctccctttcaatacattgaggtcaatggcatgaagctgacggagccccaccaagtctatgtgcaaatcttgcagaagctaacaggccaaaaagcaacagccaaccatgcggcagaactgctggcaaagcaattctgcacccgagggtcacctcaggaaaccaccgtcctgcttgtggatgagctcgaccttctgtggactcacaaacaagacataatgtacaatctctttgactggcccactcataaggaggcccggcttgtggtcctggcaattgccaacacaatggacctgccagagcgaatcatgatgaaccgggtgtccagccgactgggtcttaccaggatgtgcttccagccctatacatatagccagctgcagcagatcctaaggtcccggctcaagcatctaaaggcctttgaagatgatgccatccagctggtagccaggaaggtagcagcactgtctggagatgcacgacggtgcctggacatctgcaggcgtgccacagagatctgtgagttctcccagcagaagcctgactcccctggcctggtcaccatagcccactcaatggaagctgtggatgagatgttttcatcatcatacatcacggccatcaaaaattcctctgttctggaacagagcttcctgagagccatcctcgcagagttccgtcgatcaggactggaggaagccacgtttcaacagatatatagtcaacatgtggcactgtgcagaatggagggactgccgtaccccaccatgtcagagaccatggccgtgtgttctcacctgggctcctgtcgcctcctgcttgtggagcccagcaggaacgatctgctccttcgggtgcggctcaacgtcagccaggatgatgtgctgtatgcgctgaaagacgagtaaaggggcttcacaagttaaaagactggggtcttgctgggttttgttttttgagacagggtcttgctctgtcgcccaggctggagtgcagtggcacgatcatggctcactgcagccttgacttctcaggcttaggtgaccccccaacctcatcctcccaggtggctgaaactacaggcacatgccaccatgcccagctgattttttgtagagacagggcttcaccatgttgccaagctagtctacaaagcatctgattttggaagtacatggaattgttgtaacaaagtatattgaatggaaatggctctcatgtattttggaattttccattaaataatttgcttttt

SEQ ID NO: 429932 - DNA, 3173 bp, Homo sapiens
ccggggccacgccgattggcgcgaagttttcttttctccttccaccttcttttcatttctagtgagacacacgctttggtcctggctttcggcccgtagttgtagaaggagccctgctggtgcaggttagaggtgccgcatcccccggagctctcgaagtggaggcggtaggaaacggagggcttgcggctagccggaggaagctttggagccggaagccatggcacactaccccacaaggctgaagaccagaaaaacttattcatgggttggcaggcccttgttggatcgaaaactgcactaccaaacctatagagaaatgtgtgtgaaaacagaaggttgttccaccgagattcacatccagattggacagtttgtgttgattgaaggggatgatgatgaaaacccgtatgttgctaaattgcttgagttgttcgaagatgactctgatcctcctcctaagaaacgtgctcgagtacagtggtttgtccgattctgtgaagtccctgcctgtaaacggcatttgttgggccggaagcctggtgcacaggaaatattctggtatgattacccggcctgtgacagcaacattaatgcggagaccatcattggccttgttcgggtgatacctttagccccaaaggatgtggtaccgacgaatctgaaaaatgagaagacactctttgtgaaactatcctggaatgagaagaaattcaggccactttcctcagaactatttgcggagttgaataaaccacaagagagtgcagccaagtgccagaaacccgtgagagccaagagtaagagtgcagagagcccttcttggaccccagcagaacatgtggccaaaaggattgaatcaaggcactccgcctccaaatctcgccaaactcctacccatcctcttaccccaagagccagaaagaggctggagcttggcaacttaggtaaccctcagatgtcccagcagacttcatgtgcctccttggattctccaggaagaataaaacggaaagtggccttctcggagatcacctcaccttctaagagatctcagcctgataaacttcaaaccttgtctccagctctgaaagccccagagaaaaccagagagactggactctcttatactgaggatgacaagaaggcttcacctgaacatcgcataatcctgagaacccgaattgcagcttcgaaaaccatagacattagagaggagagaacacttacccctatcagtgggggacagagatcttcagtggtgccatccgtgattctgaaaccagaaaacatcaaaaagagggatgcaaaagaagcaaaagcccagaatgaagcgacctctactccccatcgtatccgcagaaagagttctgtcttgactatgaatcggattaggcagcagcttcggtttctaggtaatagtaaaagtgaccaagaagagaaagagattctgccagcagcagagatttcagactctagcagtgacgaagaagaggcttccacaccgccccttccaaggagagcacccagaactgtgtccaggaacctgcgatcttccttgaagtcatccttacataccctcacgaaggtgccaaagaagagtctcaagcctagaacgccacgttgtgccgctcctcagatccgtagtcgaagcctggctgcccaggagccagccagtgtgctggaggaagcccgactgaggctgcatgtttctgctgtacctgagtctcttccctgtcgggaacaggaattccaagacatctacaattttgtggaaagcaaactccttgaccataccggagggtgcatgtacatctccggtgtccctgggacagggaagactgccactgttcatgaagtgatacgctgcctgcagcaggcagcccaagccaatgatgttcctccctttcaatacattgaggtcaatggcatgaagctgacggagccccaccaagtctatgtgcaaatcttgcagaagctaacaggccaaaaagcaacagccaaccatgcggcagaactgctggcaaagcaattctgcacccgagggtcacctcaggaaaccaccgtcctgcttgtggatgagctcgaccttctgtggactcacaaacaagacataatgtacaatctctttgactggcccactcataaggaggcccggcttgtggtcctggcaattgccaacacaatggacctgccagagcgaatcatgatgaaccgggtgtccagccgactgggtcttaccaggatgtgcttccagccctatacatatagccagctgcagcagatcctaaggtcccggctcaagcatctaaaggcctttgaagatgatgccatccagctggtagccaggaaggtagcagcactgtctggagatgcacgacggtgcctggacatctgcaggcgtgccacagagatctgtgagttctcccagcagaagcctgactcccctggcctggtcaccatagcccactcaatggaagctgtggatgagatgttttcatcatcatacatcacggccatcaaaaattcctctgttctggaacagagcttcctgagagccatcctcgcagagttccgtcgatcaggactggaggaagccacgtttcaacagatatatagtcaacatgtggcactgtgcagaatggagggactgccgtaccccaccatgtcagagaccatggccgtgtgttctcacctgggctcctgtcgcctcctgcttgtggagcccagcaggaacgatctgctccttcgggtgcggctcaacgtcagccaggatgatgtgctgtatgcgctgaaagacgagtaaaggggcttcacaagttaaaagactggggtcttgctgggttttgttttttgagacagggtcttgctctgtcgcccaggctggagtgcagtggcacgatcatggctcactgcagccttgacttctcaggcttaggtgaccccccaacctcatcctcccaggtggctgaaactacaggcacatgccaccatgcccagctgattttttgtagagacagggcttcaccatgttgccaagctagtctacaaagcatctgattttggaagtacatggaattgttgtaacaaagtatattgaatggaaatggctctcatgtattttggaattttccattaaataatttgctttttaacacacaaaaaaaaacaca

SEQ ID NO: 429933 - DNA, 1674 bp, Homo sapiens
ccggggccacgccgattggcgcgaagttttcttttctccttccaccttcttttcatttctagtgagacacacgctttggtcctggctttcggcccgtagttgtagaaggagccctgctggtgcaggttagaggtgccgcatcccccggagctctcgaagtggaggcggtaggaaacggagggcttgcggctagccggaggaagctttggagccggaagccatggcacactaccccacaaggctgaagaccagaaaaacttattcatgggttggcaggcccttgttggatcgaaaactgcactaccaaacctatagagaaatgtgtgtgaaaacagaaggttgttccaccgagattcacatccagattggacagtttgtgttgattgaaggggatgatgatgaaaacccgtatgttgctaaattgcttgagttgttcgaagatgactctgatcctcctcctaagaaacgtgctcgagtacagtggtttgtccgattctgtgaagtccctgcctgtaaacggcatttgttgggccggaagcctggtgcacaggaaatattctggtatgattacccggcctgtgacagcaacattaatgcggagaccatcattggccttgttcgggtgatacctttagccccaaaggatgtggtaccgacgaatctgaaaaatgagaagacactctttgtgaaactatcctggaatgagaagaaattcaggccactttcctcagaactatttgcggagttgaataaaccacaagagagtgcagccaagtgccagaaacccgtgagagccaagagtaagagtgcagagagcccttcttggaccccagcagaacatgtggccaaaaggattgaatcaaggcactccgcctccaaatctcgccaaactcctacccatcctcttaccccaagagccagaaagaggctggagcttggcaacttaggtaaccctcagatgtcccagcagacttcatgtgcctccttggattctccaggaagaataaaacggaaagtggccttctcggagatcacctcaccttctaagagatctcagcctgataaacttcaaaccttgtctccagctctgaaagccccagagaaaaccagagagactggactctcttatactgaggatgacaagaaggcttcacctgaacatcgcataatcctgagaacccgaattgcagcttcgaaaaccatagacattagagaggagagaacacttacccctatcagtgggggacagagatcttcagtggtgccatccgtgattctgaaaccagaaaacatcaaaaagaggtgaccagggacattacccacagagcaaattgaaatccttcacatcacgtgaagtatgtgagtcatagtcaaaaaagttagaacagtagttgaaaaacctatgtcacagaagtattggggagctttcttaaaatacagatttctaggcctcttcccacacctagtgagtcagactccaagcactggccctaggaatctgtatttggaaatgctcttcagatggttccagtataccgagctgttatttggggatcattgctatagaagataacttcccaaacctgcattgctatccagtttgggatttcattagttcctgtggctttttgccacactttaacagtcattttttaaagcagtttttcattgtta

SEQ ID NO: 429934 - DNA, 578 bp, Homo sapiens
aaatatgttctttgttttcaatacagctcaagcctagaacgccacgttgtgccgctcctcagatccgtagtcgaagcctggctgcccaggagccagccagtgtgctggaggaagcccgactgaggtactgctgctgttgattccccttcagagaggcaggaaccatggggcctctgctttcattcacataaaattagcagtcactggtctacctaataaaggtagatacactgtgtgtctatacttttacctatctaggtaaagtgagtgtatgtttagaaaaaagaaacctctcaggcagcatctgggttagccagtgtggacaggccctgggaggactggccttcccgtctactgccatcatttccgcagggatggaagatgattagtcaggacagtgcctctttgttttgatgccctttagaaccatatggagactttcatataagtctggatcctgtcagaaatcaagcaaaatctgaatctcctgtgggatgaggtccacccatgtgatttgggtggagaaacggaggccaaggattatgaggccaaatggagggatttgagaatgaagggat

SEQ ID NO: 429935 - DNA, 2624 bp, Homo sapiens
ccggggccacgccgattggcgcgaagttttcttttctccttccaccttcttttcatttctagtgagacacacgctttggtcctggctttcggcccgtagttgtagaaggagccctgctggtgcaggttagaggtgccgcatcccccggagctctcgaagtggaggcggtaggaaacggagggcttgcggctagccggaggaagctttggagccggaagccatggcacactaccccacaaggctgaagaccagaaaaacttattcatgggttggcaggcccttgttggatcgaaaactgcactaccaaacctatagagaaatgtgtgtgaaaacagaaggttgttccaccgagattcacatccagattggacagtttgtgttgattgaaggggatgatgatgaaaacccgtatgttgctaaattgcttgagttgttcgaagatgactctgatcctcctcctaagaaacgtgctcgagtacagtggtttgtccgattctgtgaagtccctgcctgtaaacggcatttgttgggccggaagcctggtgcacaggaaatattctggtatgattacccggcctgtgacagcaacattaatgcggagaccatcattggccttgttcgggtgatacctttagccccaaaggatgtggtaccgacgaatctgaaaaatgagaagacactctttgtgaaactatcctggaatgagaagaaattcaggccactttcctcagaactatttgcggagttgaataaaccacaagagagtgcagccaagtgccagaaacccgtgagagccaagagtaagagtgcagagagcccttcttggaccccagcagaacatgtggccaaaaggattgaatcaaggcactccgcctccaaatctcgccaaactcctacccatcctcttaccccaagagccagaaagaggctggagcttggcaacttaggtaaccctcagatgtcccagcagacttcatgtgcctccttggattctccaggaagaataaaacggaaagtggccttctcggagatcacctcaccttctaagagatctcagcctgataaacttcaaaccttgtctccagctctgaaagccccagagaaaaccagagagactggactctcttatactgaggatgacaagaaggcttcacctgaacatcgcataatcctgagaacccgaattgcagcttcgaaaaccatagacattagagaggagagaacacttacccctatcagtgggggacagagatcttcagtggtgccatccgtgattctgaaaccagaaaacatcaaaaagagggatgcaaaagaagcaaaagcccagaatgaagcgacctctactccccatcgtatccgcagaaagagttctgtcttgactatgaatcggattaggcagcagcttcggtttctaggtaatagtaaaagtgaccaagaagagaaagagattctgccagcagcagagatttcagactctagcagtgacgaagaagaggcttccacaccgccccttccaaggagagcacccagaactgtgtccaggaacctgcgatcttccttgaagtcatccttacataccctcacgaaggtgccaaagaagagtctcaagcctagaacgccacgttgtgccgctcctcagatccgtagtcgaagcctggctgcccaggagccagccagtgtgctggaggaagcccgactgaggctgcatgtttctgctgtacctgagtctcttccctgtcgggaacaggaattccaagacatctacaattttgtggaaagcaaactccttgaccataccggagggtgcatgtacatctccggtgtccctgggacagggaagactgccactgttcatgaagtgatacgctgcctgcagcaggcagcccaagccaatgatgttcctccctttcaatacattgaggtcaatggcatgaagctgacggagccccaccaagtctatgtgcaaatcttgcagaagctaacaggccaaaaagcaacagccaaccatgcggcagaactgctggcaaagcaattctgcacccgagggtcacctcaggaaaccaccgtcctgcttgtggatgagctcgaccttctgtggactcacaaacaagacataatgtacaatctctttgactggcccactcataaggaggcccggcttgtggtcctggcaattgccaacacaatggacctgccagagcgaatcatgatgaaccgggtgtccagccgactgggtcttaccaggatgtgcttccagccctatacatatagccagctgcagcagatcctaaggtcccggctcaagcatctaaaggcctttgaagatgatgccatccagctggtagccaggaaggctggagtgcagtggcacgatcatggctcactgcagccttgacttctcaggcttaggtgaccccccaacctcatcctcccaggtggctgaaactacaggcacatgccaccatgcccagctgattttttgtagagacagggcttcaccatgttgccaagctagtctacaaagcatctgattttggaagtacatggaattgttgtaacaaagtatattgaatggaaatggctctcatgtattttggaattttccattaaataatttgcttttt

SEQ ID NO: 429936 - DNA, 1751 bp, Homo sapiens
gccagcagggaattttgttacactggaggaaggaaaaggagaccttgaggaatatggtcaggatcttctccatactgtcttcaagaatggcaaggtgacaaaaagctattcatttgatgaaataagaaaaaatgcacagctgaatattgaactggaagcagcacatcattaggctttatgactgggtgtgtgttgtgtgtatgtaatacataatgtttattgtacagatgtgtggggtttgtgttttatgatacattacagccaaattatttgttggtttatggacatactgccctttcattttttttcttttccagtgtttaggtgatctcaaattaggaaatgcatttaaccatgtaaaagatgagtgctaaagtaagctttttagggccctttgccaataggtagtcattcaatctggtattgatcttttcacaaataacagaactgagaaacttttatatataactgatgatcacataaaacagatttgcataaaattaccatgattgctttatgtttatatttaacttgtatttttgtacaaacaagattgtgtaagatatatttgaagtttcagtgatttaacagtctttccaacttttcatgatttttatgagcacagactttcaagaaaatacttgaaaataaattacattgccttttgtccattaatcagcaaataaaacatggccttaacaaaaaaaaaaaaaaaaaaaaaaaaaaaaaaaaaaaaaaaaaaaaaaaaaaaaaaaaaaaaaaaaaaaaaaagggggggcggcgccggcctaacaacacccagccggggggacaccagtcgtacaccacggccccacgagtctgctgtgaagcaagagggagggcacacatgagggggcagctactaatatattaaacacacagaggcgaggagcacctattataacaaaacacacgcgcagatcggggagaaaaaagccgcgcatcacccgagcggcaataaattcatgggaggagaagcagagcacccccacacacacacggcgcgggcgggcgcaccaaaaccaccgacgtgcggggcacacacacacccctcgaaacgataatcaataaccacccacgccacagcgacaacaaaataacaaacaaataagagacgagcacattgggagcgtgaccaaaacacacaccaccagcaagacaccccgcgacgaggaaggagaaaaaaaacacgctaggcggacccaaggaggcgagcacaacacctcaccaagggacaaaacatcccatacaacaccgggggcgctgctgcacacacaacaccccaaccaaagaaaccagaaaacagaaagcaccaacaaaaacacaaaacaaaccagccgaccacaaaagcaacaccacacacacccacgaaacgcaacacagcaaccgaaagagaagagaagcagagtacaaaagggcaagagacaaaaataaaaaagaaaaagagaaaaacaaacagaagagaacaacacgagcaacaacacagacacaacaaaacacaaaacagacagacaaaagacagacaagagacaaggcaaaagacacagccagaaacacaaagaaaaacaagaaacacgagaagaggacaaaagacagaaacacgcaacaaaagagtcccaaaacaagaacaacgcaataaccactacacgaaaaaaaaacacagagagacgaaaggtaggacaaacaacaaaaaacagaaaaagaacacaaagctacaaagaccacaaaag

SEQ ID NO: 429937 - DNA, 867 bp, Homo sapiens
gccagcagggaattttgttacactggaggaaggaaaaggagaccttgaggaatatggtcaggatcttctccatactgtcttcaagaatggcaaggtgacaaaaagctattcatttgatgaaataagaaaaaatgcacagctgaatattgaactggaagcagcacatcattaggctttatgactgggtgtgtgttgtgtgtatgtaatacataatgtttattgtacagatgtgtggggtttgtgttttatgatacattacagccaaattatttgttggtttatggacatactgccctttcattttttttcttttccagtgtttaggtgatctcaaattaggaaatgcatttaaccatgtaaaagatgagtgctaaagtaagctttttagggccctttgccaataggtagtcattcaatctggtattgatcttttcacaaataacagaactgagaaacttttatatataactgatgatcacataaaacagatttgcataaaattaccatgattgctttatgtttatatttaacttgtatttttgtacaaacaagattgtgtaagatatatttgaagtttcagtgatttaacagtctttccaacttttcatgatttttatgagcacagactttcaagaaaatacttgaaaataaattacattgccttttgtccattaatcagcaaataaaacatggccttaacaaaagttgtttgtgttattgcacaatttgaaaattatgtcgggacataccctatagaattactaaccttactgccccttgtagaatatgtattaatcattctacattaaagaaaataatggttcttactggaatgtctaggcactgtacagttattatatgtcttgg

SEQ ID NO: 429938 - DNA, 493 bp, Homo sapiens
gcgcgcgggaaatcccgagtgcatctggaatacgcagagtcagtaagaccatggctacgtcctcgatgtctaagggttgctttgtttttaagccaaactccaaaaagagaaagatctctctgccaatagcatttatgttccaaggcattggtcaaagagataagaggacaccccagggctctaattgaaaagagaatccaattacaccttccaaagtaattctacctgctagagcacaaagttatggaatcacctggactataagtaaaggaattggagtgtgatcctgagcctgaccagctctatggctttggccctgctgtttaacctttccctaagtctcttcatctgtaaaatgagcaactatactcacttatcactaagatttctccctattctcattctatctctctaagagctaacatgtagtgctttgtaagactatcataaataccatgtgaataaatttgtgttattatggattgttaaaaac

SEQ ID NO: 429939 - DNA, 2694 bp, Homo sapiens
gcgcgcgggaaatcccgagtgcatctggaatacgcagagtcagtaagaccatggctacgtcctcgatgtctaagggttgctttgtttttaagccaaactccaaaaagagaaagatctctctgccaatagaggactattttaacaaagggaaaaatgagcctgaggacagtaagcttcgattcgaaacttatcagttgatatggcagcagatgaaatctgaaaatgagcgactacaagaggaattaaataaaaacttgtttgacaatctgattgaatttctgcaaaaatcacattctggattccagaagaattcaagagacttgggcggtcaaataaaactcagagaaattccaactgctgctcttgttcttggtgtgaatgtcacagatcatgatttgacattcggaagtctaacagaggcccttcagaataatgtcacaccatatgtagtctcattgcaagctaaagattgtccagatatgaaacattttttgcaaaagttgatctcacagttgatggactgctgtgtagatataaaatccaaagaggaggaaagtgttcacgtcacccaaagaaagacacattattcaatggattcactttccagttggtatatgactgtcacacagaagacggacccaaaaatgctaagcaaaaaaaggactacttctagccaatggcagtctcctcctgttgtcgttatcttgaaggatatggaaagctttgccacaaaagtactacaagacttcataattatcagcagtcaacatctccatgaatttccactaatactcatttttggaatagccacatctcctattatcatccaccgattgcttcctcatgcagtatcatctctattgtgcatagaactgttccaatctttgtcttgtaaggagcacctgactacggtactcgataagctacttcttacaactcagtttccctttaaaataaatgaaaaagtattacaggttctgaccaacatctttttgtatcatgatttctcagttcaaaactttataaaaggacttcagctttctctattagagcatttctattcccagcccttaagtgtcctgtgctgtaatcttccagaagccaaaagaagaataaattttttatcaaataatcaatgtgaaaacatccgacgtctaccatcttttaggaggtacgtggaaaagcaagcttcagaaaagcaagttgcgctcttgaccaatgagagatatttgaaggaggaaacacaattattactagaaaacctgcatgtttatcatatgaattacttcctggttttgagatgtcttcataagttcacctcttctcttcccaagtatccactaggtcgacagatcagagagttgtactgtacatgtttagaaaagaacatatgggattcagaggagtatgcatcagtcttgcagctgctgaggatgttggcaaaggatgaactgatgaccatacttgagaaatgtttcaaggtttttaagtcttattgtgaaaaccaccttggcagcacagctaagagaatagaggagttcctggcccagtttcagagcctcgatgaaaccaaagaggaagaagatgcttctgggtcacagccaaaggggcttcagaagacagacctctatcatcttcagaagtccttattggaaatgaaggagttaagaagaagtaagaagcaaaccaaatttgaagtactcagagaaaatgttgtgaacttcattgactgtctagtgagagaataccttctgcctcctgagacacagcctctccatgaggtggtgtacttcagtgctgcccatgcccttcgtgagcatttaaatgctgctccgcgaattgccctccatactgcactcaacaatccttactattatctcaagaatgaagcactgaaaagcgaagaaggctgcattccgaatatcgccccagacatctgcatagcatacaaactgcacctagagtgtagcaggctcatcaacctcgtggactggtcagaggcttttgcaacagttgtgacagctgctgaaaaaatggatgcaaattctgcaacctcagaagaaatgaatgaaattatccatgctcggtttattagagctgtttctgaactagaacttttaggatttataaaacctaccaaacagaagactgaccatgtggcaagactaacatggggaggctgctagaaagcaaataagcaaagccagaactatcacatttagcttaagagaaaaaggtgaccagtcatatttacatatattagaggagcctgttttgttgagaagataaatgtgtaacccccattgatgtttaaccagaaaagtacattgctaaccccaaacaggcatgtatcaaaacacctgtggagtactttagactccaacaaataataatgtaactaaaactgctcacacattttactgtactttccaaagtcattactaaattgtgagtaaatcattcttgaacttagagtatgtaaatgtaataaattccgttatccaggagtataaattatttgcagttgctttagcaatcctcattcctcctctcccaattccctgcattggcattcctcactttagtgtagtaggcagtaagtaacatgaatatcttacaggttgtttctcctggtgactacataggttccaaaactgtctctgcctctccatttcctgtagtcttacaacttta

SEQ ID NO: 429940 - DNA, 2144 bp, Homo sapiens
gcgcgcgggaaatcccgagtgcatctggaatacgcagagtcagtaagaccatggctacgtcctcgatgtctaagggttgctttgtttttaagccaaactccaaaaagagaaagatctctctgccaatagaggactattttaacaaagggaaaaatgagcctgaggacagtaagcttcgattcgaaacttatcagttgatatggcagcagatgaaatctgaaaatgagcgactacaagaggaattaaataaaaacttgtttgacaatctgattgaatttctgcaaaaatcacattctggattccagaagaattcaagagacttgggcggtcaaataaaactcagagaaattccaactgctgctcttgttcttggtgtgaatgtcacagatcatgatttgacattcggaagtctaacagaggcccttcagaataatgtcacaccatatgtagtctcattgcaagctaaagattgtccagatatgaaacattttttgcaaaagttgatctcacagttgatggactgctgtgtagatataaaatccaaagaggaggaaagtgttcacgtcacccaaagaaagacacattattcaatggattcactttccagttggtatatgactgtcacacagaagacggacccaaaaatgctaagcaaaaaaaggactacttctagccaatggcagtctcctcctgttgtcgttatcttgaaggatatggaaagctttgccacaaaagtactacaagacttcataattatcagcagtcaacatctccatgaatttccactaatactcatttttggaatagccacatctcctattatcatccaccgattgcttcctcatgcagtatcatctctattgtgcatagaactgttccaatctttgtcttgtaaggagcacctgactacggtactcgataagctacttcttacaactcagtttccctttaaaataaatgaaaaagtattacaggttctgaccaacatctttttgtatcatgatttctcagttcaaaactttataaaaggacttcagctttctctattagagcatttctattcccagcccttaagtgtcctgtgctgtaatcttccagaagccaaaagaagaataaattttttatcaaataatcaatgtgaaaacatccgacgtctaccatcttttaggaggtacgtggaaaagcaagcttcagaaaagcaagttgcgctcttgaccaatgagagatatttgaaggaggaaacacaattattactagaaaacctgcatgtttatcatatgaattacttcctggttttgagatgtcttcataagttcacctcttctcttcccaagtatccactaggtcgacagatcagagagttgtactgtacatgtttagaaaagaacatatgggattcagaggagtatgcatcagtcttgcagctgctgaggatgttggcaaaggatgaactgatgaccatacttgagaaatgtttcaaggtttttaagtcttattgtgaaaaccaccttggcagcacagctaagagaatagaggagttcctggcccagtttcagagcctcgatgaaaccaaagaggaagaagatgcttctgggtcacagccaaaggggcttcagaagacagacctctatcatcttcagaagtccttattggaaatgaaggagttaagaagaagtaagaagcaaaccaaatttgaagtactcagagaaaatgttgtgaacttcattgactgtctagtgagagaataccttctgcctcctgagacacagcctctccatgaggtggtgtacttcagtgctgcccatgcccttcgtgagcatttaaatgctgctccgcgaattgccctccatactgcactcaacaatccttactattatctcaagaatgaagcactgaaaagcgaagaaggctgcattccgaatatcgccccagacatctgcatagcatacaaactgcacctagagtgtagcaggctcatcaacctcgtggactggtcagaggcttttgcaacagttgtgacagctgctgaaaaaatggatgcaaattctgcaacctcagaagaaatgaatgaaattagtatccttttaaaaccatttctacaatgtccaactacacataaaatataagtttataatttctccagg

SEQ ID NO: 429941 - DNA, 1911 bp, Homo sapiens
actctttctttctgcaatggcttaaaagaagacggacccaaaaatgctaagcaaaaaaaggactacttctagccaatggcagtctcctcctgttgtcgttatcttgaaggatatggaaagctttgccacaaaagtactacaagacttcataattatcagcagtcaacatctccatgaatttccactaatactcatttttggaatagccacatctcctattatcatccaccgattgcttcctcatgcagtatcatctctattgtgcatagaactgttccaatctttgtcttgtaaggagcacctgactacggtactcgataagctacttcttacaactcagtttccctttaaaataaatgaaaaagtattacaggttctgaccaacatctttttgtatcatgatttctcagttcaaaactttataaaaggacttcagctttctctattagagcatttctattcccagcccttaagtgtcctgtgctgtaatcttccagaagccaaaagaagaataaattttttatcaaataatcaatgtgaaaacatccgacgtctaccatcttttaggaggtacgtggaaaagcaagcttcagaaaagcaagttgcgctcttgaccaatgagagatatttgaaggaggaaacacaattattactagaaaacctgcatgtttatcatatgaattacttcctggttttgagatgtcttcataagttcacctcttctcttcccaagtatccactaggtcgacagatcagagagttgtactgtacatgtttagaaaagaacatatgggattcagaggagtatgcatcagtcttgcagctgctgaggatgttggcaaaggatgaactgatgaccatacttgagaaatgtttcaaggtttttaagtcttattgtgaaaaccaccttggcagcacagctaagagaatagaggagttcctggcccagtttcagagcctcgatgaaaccaaagaggaagaagatgcttctgggtcacagccaaaggggcttcagaagacagacctctatcatcttcagaagtccttattggaaatgaaggagttaagaagaagtaagaagcaaaccaaatttgaagtactcagagaaaatgttgtgaacttcattgactgtctagtgagagaataccttctgcctcctgagacacagcctctccatgaggtggtgtacttcagtgctgcccatgcccttcgtgagcatttaaatgctgctccgcgaattgccctccatactgcactcaacaatccttactattatctcaagaatgaagcactgaaaagcgaagaaggctgcattccgaatatcgccccagacatctgcatagcatacaaactgcacctagagtgtagcaggctcatcaacctcgtggactggtcagaggcttttgcaacagttgtgacagctgctgaaaaaatggatgcaaattctgcaacctcagaagaaatgaatgaaattatccatgctcggtttattagagctgtttctgaactagaacttttaggatttataaaacctaccaaacagaagactgaccatgtggcaagactaacatggggaggctgctagaaagcaaataagcaaagccagaactatcacatttagcttaagagaaaaaggtgaccagtcatatttacatatattagaggagcctgttttgttgagaagataaatgtgtaacccccattgatgtttaaccagaaaagtacattgctaaccccaaacaggcatgtatcaaaacacctgtggagtactttagactccaacaaataataatgtaactaaaactgctcacacattttactgtactttccaaagtcattactaaattgtgagtaaatcattcttgaacttagagtatgtaaatgtaataaattccgttatccaggagtata

SEQ ID NO: 429942 - DNA, 1892 bp, Homo sapiens
tattggggttggttaagttattatttctaatcagccttatctcaagtcttgtcattttacattaaacaagagaatacttgagaaagtgtaagatctttctgctctgggagcaaaacataatctttggctaagaataagaggactagactgggtgcagtggctcacgcctataatcccagcactttgggaagccgaggtgggcggatcacctgaggtcaggagttcgagactagcctgaccaatatggtgaaaccctgcctctactaaaaatacaaaattagccgggcatggtggtgcatgcctgtaatcacagctactcgggaggttgaggcaggagaatcgcttggacctgggaggcagaggttgcggtgagccgagatcacgccattgcaccctagcctgagcaacaagagcaaaactgcgtctcaaagaaaaaacaaaaaaagaataagaggactaataactatttgaatccctggcagtttacatctgagtaccttctccaagtgacacattaagagttatgactaatgaagtttgcttccaaagttatatgaaataatgccctcttttttggtctcctggataataggctaggtttggccttccttgatattcagttatttggagctcaaagtggacaagagctgttgctgcccctatcctgggaagctaatccttcacatgctgctaacttgggttagatcttctgccagcaaaacctcacccgtctttcccctccaagcaagtcagtgccggtgattccttggacaccagaaatgctaatcttgtctatttgaataggcctaaaggatgttggcaaaggatgaactgatgaccatacttgagaaatgtttcaaggtttttaagtcttattgtgaaaaccaccttggcagcacagctaagagaatagaggagttcctggcccagtttcagagcctcgatgaaaccaaagaggaagaagatgcttctgggtcacagccaaaggggcttcagaagacagacctctatcatcttcagaagtccttattggaaatgaaggagttaagaagaagtaagaagcaaaccaaatttgaagtactcagagaaaatgttgtgaacttcattgactgtctagtgagagaataccttctgcctcctgagacacagcctctccatgaggtggtgtacttcagtgctgcccatgcccttcgtgagcatttaaatgctgctccgcgaattgccctccatactgcactcaacaatccttactattatctcaagaatgaagcactgaaaagcgaagaaggctgcattccgaatatcgccccagacatctgcatagcatacaaactgcacctagagtgtagcaggctcatcaacctcgtggactggtcagaggcttttgcaacagttgtgacagctgctgaaaaaatggatgcaaattctgcaacctcagaagaaatgaatgaaattatccatgctcggtttattagagctgtttctgaactagaacttttaggatttataaaacctaccaaacagaagactgaccatgtggcaagactaacatggggaggctgctagaaagcaaataagcaaagccagaactatcacatttagcttaagagaaaaaggtgaccagtcatatttacatatattagaggagcctgttttgttgagaagataaatgtgtaacccccattgatgtttaaccagaaaagtacattgctaaccccaaacaggcatgtatcaaaacacctgtggagtactttagactccaacaaataataatgtaactaaaactgctcacacattttactgtactttccaaagtcattactaaattgtgagtaaatcattcttgaacttagagtatgtaaatgtaataaattccgttatccaggagtata

SEQ ID NO: 429943 - DNA, 1071 bp, Homo sapiens
gcgcgcgggaaatcccgagtgcatctggaatacgcagagtcagtaagaccatggctacgtcctcgatgtctaagggttgctttgtttttaagccaaactccaaaaagagaaagatctctctgccaatagaggactattttaacaaagggaaaaatgagcctgaggacagtaagcttcgattcgaaacttatcagttgatatggcagcagatgaaatctgaaaatgagcgactacaagaggaattaaataaaaacttgtttgacaatctgattgaatttctgcaaaaatcacattctggattccagaagaattcaagagacttgggcggtcaaataaaactcagagaaattccaactgctgctcttgttcttggtgtgaatgtcacagatcatgatttgacattcggaagtctaacagaggcccttcagaataatgtcacaccatatgtagtctcattgcaagctaaagattgtccagatatgaaacattttttgcaaaagttgatctcacagttgatggactgctgtgtagatataaaatccaaagaggaggaaagtgttcacgtcacccaaagaaagacacattattcaatggattcactttccagttggtatatgactgtcacacagaagacggacccaaaaatgctaagcaaaaaaaggactacttctagccaatggcagtctcctcctgttgtcgttatcttgaaggatatggaaagctttgccacaaaagtactacaagacttcataattatcagcaggtagatggtgtattacctggcttttatgaaaaactccctttttaagaaaatactacttttaacttgaaaagtataatcttcattttaataccaactggataaaaatcaaagtattcaaattctttataattgaatattcaaagacttcctatcagattttccatttgctttttgagccaagaatgagaatcaaaggcacatttagccagttttaaattgacatggtaagatagtattaaatatggtttttctcaccaagattgactgtctcttactcacccattaaatagataaactactccaggttg

SEQ ID NO: 429944 - DNA, 893 bp, Homo sapiens
aggttgggggcttcattaatgtctgattttattcctaataatttataaaagttagtcatcttagtttactgttaattgttagaatgaagcactgaaaagcgaagaaggctgcattccgaatatcgccccagacatctgcatagcatacaaactgcacctagagtgtagcaggctcatcaacctcgtggactggtcagaggcttttgcaacagttgtgacagctgctgaaaaaatggatgcaaattctgcaacctcagaagaaatgaatgaaattatccatgctcggtttattagagctgtttctgaactagaacttttaggatttataaaacctaccaaacagaagactgaccatgtggcaagactaacatggggaggctgctagaaagcaaataagcaaagccagaactatcacatttagcttaagagaaaaaggtgaccagtcatatttacatatattagaggagcctgttttgttgagaagataaatgtgtaacccccattgatgtttaaccagaaaagtacattgctaaccccaaacaggcatgtatcaaaacacctgtggagtactttagactccaacaaataataatgtaactaaaactgctcacacattttactgtactttccaaagtcattactaaattgtgagtaaatcattcttgaacttagagtatgtaaatgtaataaattccgttatccaggagtataaattatttgcagttgctttagcaatcctcattcctcctctcccaattccctgcattggcattcctcactttagtgtagtaggcagtaagtaacatgaatatcttacaggttgtttctcctggtgactacataggttccaaaactgtctctgcctctccatttcctgtagtcttacaacttta

SEQ ID NO: 429945 - DNA, 557 bp, Homo sapiens
gcgcgcgggaaatcccgagtgcatctggaatacgcagagtcagtaagaccatggctacgtcctcgatgtctaagggttgctttgtttttaagccaaactccaaaaagagaaagatctctctgccaatagcatttatgttccaaggcattggtcaaagagataagaggacaccccagggctctaattgaaaagagaatccaattacaccttccaaagggataaatgctgtgcacatcaatacatgctgagaaaaaagcccaaggtcttggatctcttacagtaattctacctgctagagcacaaagttatggaatcacctggactataagtaaaggaattggagtgtgatcctgagcctgaccagctctatggctttggccctgctgtttaacctttccctaagtctcttcatctgtaaaatgagcaactatactcacttatcactaagatttctccctattctcattctatctctctaagagctaacatgtagtgctttgtaagactatcataaataccatgtgaataaatttgtgttattatggattgttaaaaac

SEQ ID NO: 429946 - DNA, 415 bp, Homo sapiens
aattcaagagacttgggcggtcaaataaaactcagagaaattccaactgctgctcttgttcttggtatatatgcgtatgtttgttcatgcatgcatctctgtgtatttcgtttttaaatttttttttattgttgagaatagtggaaggacctgttttgatgagcctattttgtctctcttatttgtacaattaaaccaactatagtttatattacatattttcaaaaaccaataaaaattccttatctttacagacgatcatatgtttgtaaattaaaaggaatttatctagctaatgttctccccaacttttggtcggaagggaaaatatatttgttttactctttctttgtagatacattacaagagtatatgagatttggtaataaagaaactaccagtgttagtagatttg

SEQ ID NO: 429947 - DNA, 2512 bp, Homo sapiens
gcgcgcgggaaatcccgagtgcatctggaatacgcagagtcagtaagaccatggctacgtcctcgatgtctaagggttgctttgtttttaagccaaactccaaaaagagaaagatctctctgccaatagaggactattttaacaaagggaaaaatgagcctgaggacagtaagcttcgattcgaaacttatcagttgatatggcagcagatgaaatctgaaaatgagcgactacaagaggaattaaataaaaacttgtttgacaatctgattgaatttctgcaaaaatcacattctggattccagaagaattcaagagacttgggcggtcaaataaaactcagagaaattccaactgctgctcttgttcttggtgtgaatgtcacagatcatgatttgacattcggaagtctaacagaggcccttcagaataatgtcacaccatatgtagtctcattgcaagctaaagattgtccagatatgaaacattttttgcaaaagttgatctcacagttgatggactgctgtgtagatataaaatccaaagaggaggaaagtgttcacgtcacccaaagaaagacacattattcaatggattcactttccagttggtatatgactgtcacacagaagacggacccaaaaatgctaagcaaaaaaaggactacttctagccaatggcagtctcctcctgttgtcgttatcttgaaggatatggaaagctttgccacaaaagtactacaagacttcataattatcagcagtcaacatctccatgaatttccactaatactcatttttggaatagccacatctcctattatcatccaccgattgcttcctcatgcagtatcatctctattgtgcatagaactgttccaatctttgtcttgtaaggagcacctgactacggtactcgataagctacttcttacaactcagtttccctttaaaataaatgaaaaagtattacaggttctgaccaacatctttttgtatcatgatttctcagttcaaaactttataaaaggacttcagctttctctattagagcatttctattcccagcccttaagtgtcctgtgctgtaatcttccagaagccaaaagaagaataaattttttatcaaataatcaatgtgaaaacatccgacgtctaccatcttttaggaggtacgtggaaaagcaagcttcagaaaagcaagttgcgctcttgaccaatgagagatatttgaaggaggaaacacaattattactagaaaacctgcatgtttatcatatgaattacttcctggttttgagatgtcttcataagttcacctcttctcttcccaagtatccactaggtcgacagatcagagagttgtactgtacatgtttagaaaagaacatatgggattcagaggagtatgcatcagtcttgcagctgctgaggatgttggcaaaggatgaactgatgaccatacttgagaaatgtttcaaggtttttaagtcttattgtgaaaaccaccttggcagcacagctaagagaatagaggagttcctggcccagtttcagagcctcgatgaaaccaaagaggaagaagatgcttctgggtcacagccaaaggggcttcagaagacagacctctatcatcttcagaagtccttattggaaatgaaggagttaagaagaagtaagaagcaaaccaaatttgaagtactcagagaaaatgttgtgaacttcattgactgtctagtgagagaataccttctgcctcctgagacacagcctctccatgaggtggtgtacttcagtgctgcccatgcccttcgtgagcatttaaatgctgctccgcgaattgccctccatactgcactcaacaatccttactattatctcaagaatgaagcactgaaaagcgaagaaggctgcattccgaatatcgccccagacatctgcatagcatacaaactgcacctagagtgtagcaggctcatcaacctcgtggactggtcagaggcttttgcaacagttgtgacagctgctgaaaaaatggatgcaaattctgcaacctcagaagaaatgaatgaaattatccatgctcggtttattagagctgtttctgaactagaacttttaggatttataaaacctaccaaacagaagactgaccatgtggcaagactaacatggggaggctgctagaaagcaaataagcaaagccagaactatcacatttagcttaagagaaaaaggtgaccagtcatatttacatatattagaggagcctgttttgttgagaagataaatgtgtaacccccattgatgtttaaccagaaaagtacattgctaaccccaaacaggcatgtatcaaaacacctgtggagtactttagactccaacaaataataatgtaactaaaactgctcacacattttactgtactttccaaagtcattactaaattgtgagtaaatcattcttgaacttagagtatgtaaatgtaataaattccgttatccaggagtata

SEQ ID NO: 429948 - DNA, 2599 bp, Homo sapiens
gcgcgcgggaaatcccgagtgcatctggaatacgcagagtcagtaagaccatggctacgtcctcgatgtctaagggttgctttgtttttaagccaaactccaaaaagagaaagatctctctgccaatagcatttatgttccaaggcattggtcaaagagataagaggacaccccagggctctaattgaaaagagaatccaattacaccttccaaagaggactattttaacaaagggaaaaatgagcctgaggacagtaagcttcgattcgaaacttatcagttgatatggcagcagatgaaatctgaaaatgagcgactacaagaggaattaaataaaaacttgtttgacaatctgattgaatttctgcaaaaatcacattctggattccagaagaattcaagagacttgggcggtcaaataaaactcagagaaattccaactgctgctcttgttcttggtgtgaatgtcacagatcatgatttgacattcggaagtctaacagaggcccttcagaataatgtcacaccatatgtagtctcattgcaagctaaagattgtccagatatgaaacattttttgcaaaagttgatctcacagttgatggactgctgtgtagatataaaatccaaagaggaggaaagtgttcacgtcacccaaagaaagacacattattcaatggattcactttccagttggtatatgactgtcacacagaagacggacccaaaaatgctaagcaaaaaaaggactacttctagccaatggcagtctcctcctgttgtcgttatcttgaaggatatggaaagctttgccacaaaagtactacaagacttcataattatcagcagtcaacatctccatgaatttccactaatactcatttttggaatagccacatctcctattatcatccaccgattgcttcctcatgcagtatcatctctattgtgcatagaactgttccaatctttgtcttgtaaggagcacctgactacggtactcgataagctacttcttacaactcagtttccctttaaaataaatgaaaaagtattacaggttctgaccaacatctttttgtatcatgatttctcagttcaaaactttataaaaggacttcagctttctctattagagcatttctattcccagcccttaagtgtcctgtgctgtaatcttccagaagccaaaagaagaataaattttttatcaaataatcaatgtgaaaacatccgacgtctaccatcttttaggaggtacgtggaaaagcaagcttcagaaaagcaagttgcgctcttgaccaatgagagatatttgaaggaggaaacacaattattactagaaaacctgcatgtttatcatatgaattacttcctggttttgagatgtcttcataagttcacctcttctcttcccaagtatccactaggtcgacagatcagagagttgtactgtacatgtttagaaaagaacatatgggattcagaggagtatgcatcagtcttgcagctgctgaggatgttggcaaaggatgaactgatgaccatacttgagaaatgtttcaaggtttttaagtcttattgtgaaaaccaccttggcagcacagctaagagaatagaggagttcctggcccagtttcagagcctcgatgaaaccaaagaggaagaagatgcttctgggtcacagccaaaggggcttcagaagacagacctctatcatcttcagaagtccttattggaaatgaaggagttaagaagaagtaagaagcaaaccaaatttgaagtactcagagaaaatgttgtgaacttcattgactgtctagtgagagaataccttctgcctcctgagacacagcctctccatgaggtggtgtacttcagtgctgcccatgcccttcgtgagcatttaaatgctgctccgcgaattgccctccatactgcactcaacaatccttactattatctcaagaatgaagcactgaaaagcgaagaaggctgcattccgaatatcgccccagacatctgcatagcatacaaactgcacctagagtgtagcaggctcatcaacctcgtggactggtcagaggcttttgcaacagttgtgacagctgctgaaaaaatggatgcaaattctgcaacctcagaagaaatgaatgaaattatccatgctcggtttattagagctgtttctgaactagaacttttaggatttataaaacctaccaaacagaagactgaccatgtggcaagactaacatggggaggctgctagaaagcaaataagcaaagccagaactatcacatttagcttaagagaaaaaggtgaccagtcatatttacatatattagaggagcctgttttgttgagaagataaatgtgtaacccccattgatgtttaaccagaaaagtacattgctaaccccaaacaggcatgtatcaaaacacctgtggagtactttagactccaacaaataataatgtaactaaaactgctcacacattttactgtactttccaaagtcattactaaattgtgagtaaatcattcttgaacttagagtatgtaaatgtaataaattccgttatccaggagtata

SEQ ID NO: 429949 - DNA, 1781 bp, Homo sapiens
atggaaagctttgccacaaaagtactacaagataacgacaacaggaggagactgccattggctagaagtagtcctgttgtcgttatcttgaaggatatggaaagctttgccacaaaagtactacaagacttcataattatcagcagtcaacatctccatgaatttccactaatactcatttttggaatagccacatctcctattatcatccaccgattgcttcctcatgcagtatcatctctattgtgcatagaactgttccaatctttgtcttgtaaggagcacctgactacggtactcgataagctttctctattagagcatttctattcccagcccttaagtgtcctgtgctgtaatcttccagaagccaaaagaagaataaattttttatcaaataatcaatgtgaaaacatccgacgtctaccatcttttaggaggtacgtggaaaagcaagcttcagaaaagcaagttgcgctcttgaccaatgagagatatttgaaggaggaaacacaattattactagaaaacctgcatgtttatcatatgaattacttcctggttttgagatgtcttcataagttcacctcttctcttcccaagtatccactaggtcgacagatcagagagttgtactgtacatgtttagaaaagaacatatgggattcagaggagtatgcatcagtcttgcagctgctgaggatgttggcaaaggatgaactgatgaccatacttgagaaatgtttcaaggtttttaagtcttattgtgaaaaccaccttggcagcacagctaagagaatagaggagttcctggcccagtttcagagcctcgatgaaaccaaagaggaagaagatgcttctgggtcacagccaaaggggcttcagaagacagacctctatcatcttcagaagtccttattggaaatgaaggagttaagaagaagtaagaagcaaaccaaatttgaagtactcagagaaaatgttgtgaacttcattgactgtctagtgagagaataccttctgcctcctgagacacagcctctccatgaggtggtgtacttcagtgctgcccatgcccttcgtgagcatttaaatgctgctccgcgaattgccctccatactgcactcaacaatccttactattatctcaagaatgaagcactgaaaagcgaagaaggctgcattccgaatatcgccccagacatctgcatagcatacaaactgcacctagagtgtagcaggctcatcaacctcgtggactggtcagaggcttttgcaacagttgtgacagctgctgaaaaaatggatgcaaattctgcaacctcagaagaaatgaatgaaattatccatgctcggtttattagagctgtttctgaactagaacttttaggatttataaaacctaccaaacagaagactgaccatgtggcaagactaacatggggaggctgctagaaagcaaataagcaaagccagaactatcacatttagcttaagagaaaaaggtgaccagtcatatttacatatattagaggagcctgttttgttgagaagataaatgtgtaacccccattgatgtttaaccagaaaagtacattgctaaccccaaacaggcatgtatcaaaacacctgtggagtactttagactccaacaaataataatgtaactaaaactgctcacacattttactgtactttccaaagtcattactaaattgtgagtaaatcattcttgaacttagagtatgtaaatgtaataaattccgttatccaggagtata

SEQ ID NO: 429950 - DNA, 1091 bp, Homo sapiens
gcgcgcgggaaatcccgagtgcatctggaatacgcagagtcagtaagaccatggctacgtcctcgatgtctaagggttgctttgtttttaagccaaactccaaaaagagaaagatctctctgccaatagaggactattttaacaaagggaaaaatgagcctgaggacagtaagcttcgattcgaaacttatcagttgatatggcagcagatgaaatctgaaaatgagcgactacaagaggaattaaataaaaacttgtttgacaatctgattgaatttctgcaaaaatcacattctggattccagaagaattcaagagacttgggcggtcaaataaaactcagagaaattccaactgctgctcttgttcttggtgtgaatgtcacagatcatgatttgacattcggaagtctaacagaggcccttcagaataatgtcacaccatatgtagtctcattgcaagctaaagattgtccagatatgaaacattttttgcaaaagttgatctcacagttgatggactgctgtgtagatataaaatccaaagaggaggaaagtgttcacgtcacccaaagaaagacacattattcaatggattcactttccagttggtatatgactgtcacacagaagacggacccaaaaatgctaagcaaaaaaaggactacttctagccaatggcagtctcctcctgttgtcgttatcttgaaggatatggaaagctttgccacaaaagtactacaagacttcataattatcagcagtcaacatctccatgaatttccactaatactcatttttggaatagccacatctcctattatcatccaccgattgcttcctcatgcagtatcatctctattgtgcatagaactgttccaatctttgtcttgtaaggagcacctgactacggtactcgataagctacttcttacaactcagtttccttttataaagttttgaactgagaaatcatgacccacgcgttcgcccacgcgtccgggcagacgccttcaccgagactggcgctgtctacccgctacagccctgatgagatgaacaacagtcccaacttcgaagaaaagaagaagt

SEQ ID NO: 429951 - DNA, 5947 bp, Homo sapiens
cagagctcttagcagccagatggactcagttcccagtgaaaggacagggatggcaagatcttttagcatttaggggatgcctttgttagtaaccgttcacaatgggcagctcccggctgagggtctttgaccctcatttggagaggaaagattccgccgcggcgctctcagaccgagagctgcccttgcctaccttcgatgtgccttatttcaaatacatcgacgaggaggatgaggacgatgaatggagcagccgctcgcagtcttccaccgaggatgactcagtggactctctgctctctgacagatatgtggtggtgtccgggaccccggagaagattttggagcaccttttgaatgacttgcacctggaagaagtccaggacaaagaaacagagaccctcctggatgacttccttctcacgtacactgtcttcatgacaactgatgacttgtgccaggctctgttaaggcactattctgctaagaagtatcaaggcaaagaggaaaactcagatgttccgcgtaggaaacgtaaagtcttgcatcttgtttcccagtggattgctctgtacaaagactggttacctgaagatgaacattcaaaaatgtttttaaagaccatatataggaatgtactggatgatgtttatgaatatccaatacttgaaaaagaattgaaagaatttcaaaagatacttggaatgcaccgtcgtcacactgtagatgaatattcaccacaaaaaaagaataaagcccttttccaccaattcagtcttaaggagaactggctccagcatagaggaactgtgactgaaacggaggaaattttctgccacgtgtatataacagagcactcctatgtcagtgtgaaggcaaaagtttccagtatagcccaagagatcctaaaagtcgtggcagaaaagatccagtatgcagaagaggatctggctctggtggccatcacattctctggggaaaagcatgaacttcagccaaatgacttagtcatctccaaatccctcgaggcatctggtcgaatatatgtctaccggaaagacctggcggacactttgaacccatttgcagaaaatgaggaatcacagcaaaggtcgatgaggattttgggaatgaacacttgggatcttgctctggaattaatgaattttgattggagtctattcaattcaattcacgagcaagagctgatctacttcacgttcagcagacagggaagtggggaacacactgcaaatctcagccttctgctccagagatgcaatgaggtccagctttgggtggccacggagattctgctctgcagccagctgggcaagcgagtgcagctggtgaaaaaattcatcaaaattgcggctcactgcaaagcccagagaaacctgaattctttctttgccattgtgatgggtctcaacactgcttctgtcagtcgactgtcgcagacctgggagaaaatccctgggaagtttaagaaacttttctctgaacttgaaagtttaacagatccttccctaaatcacaaagcctacagagatgcattcaaaaagatgaagccaccaaaaatccctttcatgcccttattgcttaaagatgtaacatttattcatgaaggaaataaaacttttttggataatcttgtcaattttgaaaagctgcatatgatcgcagacactgtccgaaccctgagacactgcaggactaaccagtttggtgacctgtctccaaaagagcatcaagagttaaagtcctatgttaatcacctgtatgtcattgacagccagcaggctctgtttgagctctcacacaggatcgagcctcgggtgtgagccccactgcctcacctcccctgtatctgcagcactttgagctacgggaatgtctatgccaagcacgttgctttcctgtgagaaaagaagttgctgagttttatcagtataacccaagacattcacaggaaagccagccaaagcgtgttcaggaagtgatgtcagccaccagagagggggagaggtttctccatgctactctcgggacaagaaggcagaaggagagtcagaagcattcttgagatggagaaggctggtttcttatgatcacattgttgatccagtccagttttcaatatgagatgtgccagcatcaagacaagacaacgtcttgacatgcaatgaccaaatatttcattaagagcgtgcatgaaacaggaaggagtttttactttgcctagttttagattactgtccataagctgtcaaagaagtcattcttttgaacacctgatgacagagacagcatctctagatctccagggaggagaggtttctgttgatacaacctgtgacatcaccaaaagccacttgtgtctagggagttagtgaggactgcagctagcatccatgctctgatgggcagatgaacaatgtcaaggtgtgcatcactttgcaccacaatcaactattgacacatgcttgcaggtgaaattagtttctgtacaactgatttgcagctataggcaaggtagatgaagttgctttgccagtaaggaaaaatagtaatctttaagaaattgactcattgtttaatttctggggattttctttatacttctaagcaggctcttatcttttattggacataatatgattttgaaaaagcacagtgcctgacacattgcaaacactcaccaactgcttgctgaggtgacagagtcacaaaagtctgcattcttgtgcctgatgatgcattttgcgtacctcatacaggctccttgcccacactatggaatgacagcagccagtgcagggaggttaagtgacatttaatgagtgaagcacttagcactctctaggtaataagatagtggtaattactagtgttttggcaaatgaaaaatgccctgaaatagccaaatgtctgattaatgttggcaacttagaagtcctataatccaactaccagccaaagcagggagcctttctataatttgcctttttttttttttttttcaaaatctgagtcttctaaaatcttattattcccatttttaccaattgaggctcctgtagcaaataagacctcttgatattttcaaggactggttagaggatttctttcaaccttcacatgaacaaaacagcctatgggtcaaaataatgaaatccacccctgcctgctagatacttgtcaccttgctaaaatgcaagggcctggtccattcattttccaaatgcaggagtcttggtgcacttctcactcttcctgcctgttcatctctttcatgcccacacagacctgtttcctttttgtctcatcaacgcctcattcatcctcattactgaggcgtgtccaatgctttttgacatctttatagcagtgctgtttcctgggctcaggaaccacactgagcttgagatactgctggaaggaaccatgtggagagaaggtttgggagaactttgagagagacttagtttggcccagcatgtaaaacttcagtcctgaacatttatagggttttatagaagggcatcctccagggctggtccattcagagaaatgctgcatgctgccgtcatggaatgtggcccacaggacaccagagccgtgagaaccggagagcagacttccctcacggctgggctgagcaaaccctccaaagccctcctcacgcagttactaacaatagcatgggcttacagcacaagcacgtgttctcacctttttcctatgccctggactaaggtttggccagtgtaatcatataaggccatcctgacattgtttctgtgtttcaaaatttggatttttatttacattagaactacattgctcctagtagaacattacctttaggggactaattttccatggagaactatttcagcatattgcatgctgctcagaccccaagtcagatatgcccaccaagccagatgaagctacacaaatgtggtatttaaatgcattttgtacagtgacttcagagtatctcacatgacatgggtgtaaactggctggggagaaaatgatgcttgttcacctcttcctccagccgtggttaggtggtcctaggggtagcagagggaagggaggattttgtgcagtcaagatttgcttttccatccttgtcttctgaatgtctaaaatctctgcatctttctgaagtttaacaactgtctccagaggtttgccaggcagcagctctcagaagtttccaaagctttgcagaatcttagatctggaattaaagaattcaagcccgaattgtgagaaccagatattactcaacagaaagctctttctaaggaatctgagctgttcactggtggacagtggtggggcttgagtgctccttgttaataggatgggccatgcaccctctctggatattcaccaaggcctcttcagaatagggtttgttctggctagaagcgtggtctagaagatggctaagctctttgccagctctcatttggagttttattattgcataaaatcttcgctcactctgcaaatcttacgtaatctggcaccttcggcaccaggtggtgcaggggcacttctaagtgggctctttttgttacagcacaactctcagacagtcctgtgggtctttggattcgtcagcattccagcaaactagccctgcttagaagttagcacaagacggcagaatgcaggaccccgtaggcaaaatcacaaccttgctattaaaaaaaatttttttttacatacacatttgcaggtgttccctagagtgtggtgttttgaatttgctctttgtcatctgtataattgccaaatgattatagtgatacacatgacctgcattcacttttttctagtttccttaattatgtttagaataaattcgtttccctagaccgagaaccacaaacaggtagtgtggagcatacaccgaatttagaagcatgtggataaggtcagtgctcacactgcctagtccacagggagaggatgctgcatgaatatatacttgcctctgagtggaggagaaatcgtggcatgaaagagagagtaccagtgatgacttcttatccctggagctgggctttcactgctacccatatcccagccctgcgagtctgttctagccagcacagacaccgcagatccggaactgaatgttcctaaatggcgcagccaatccaggcttttcagaaactgggcaaaaacattaaaatggggacgatcgggtcttccgcagtggtccaacacaggatttcttttaaatgtttcaaaaacatgtccttaaaatttcagcctgcttcttagcgagtgggccagttttgcttaaaactggtgggggggcgggggggaagtttttaaaaattgccaaaaagttagatgcaaatgtattactgtataaagcaaagctgtatatactaaacattttttagcagagtaatatttatttgcatagtctatttattgtattcgtatcacactgttattaaatactgggatgaaatcagtgacctgaagcaagaaatcttgccttttaatgtatcattaattagggctgctgtgatattgtcagcttgcattaacaattagaagatagagaacccgccatcagggtgtctacctaacttctcagggactacacttggtagttttccaccatttaaagaactggtaaatatgaaacatttgttgagttaccagaattgccattaacagtgttttctttcccatattccatgctttctgcctctgtgtatatatataatatatatgtatatgactgtgctgtgtatttatcgaagctagtaagcaataatttatatgtaaaaatggccaagcaatataaggttaaaacttatataagtaacccttaccttatcttgtattttcaatttttttttaaaactgcttttccaaatatgagactatgttaaagacacta

SEQ ID NO: 429952 - DNA, 1003 bp, Homo sapiens
tggcatggtgctcttaggttataataatgtaacttcaatttttgaaaggcaaaatattttaccaagaccatgatttaatccaggcagtggaaaagatgagcttattataaggtgaactttgcggtggtgtcatgtcctgggactgtggttttaagtatatcttcgctttttctccaactcttaaggcaggggtgatgtgcaagctccaggaaagagatgaaatcggacgaattgaactagtccagaagctggcaaaagaaaactatcagtttttgcagacggacaaaaaagaacaggagaagtctgaacacgtaagccttttgcctcttggggatgcaggtttgaaggggtggaaaatgtttttgcctgattgcatgtttgaacgaaagactattttattttaaattctttaggttttgggggtttttttccccccaagagcatcctccttagtaaaaatgacagctgctcatagctctaagcaagtggcttatgacacaggatttataagagactcttctcaaaagtaaattatgtagaaatatgagaatacatttaagcaaatatgaatccttatctatttatgatcctgcttgggtggctttcaagtttgattttggaagttttgccttatcatatagtttgtagaacatgaattttgaaaaaacatttcaacatatttttatgtttagtacagaggtggatctagttgccaaatgaatgtgtcctaagtcactagaaatagatgaaaacacaaaaagagattatagatgctctcaccaagtgggagggtcagaagggagttttcccagtatcttatgaaggcttgtgttccaacaagagttatattgtttgaatatagttaaagctggaggaactgagagtgctgccgtcatgctgggaagacaatgggaccactttcttgtgccacacattgttatctggtgacttggttgttgttggttatgagacttcactctcagggctgcactatccagtggtg

SEQ ID NO: 429953 - DNA, 1003 bp, Homo sapiens
tggcatggtgctcttaggttataataatgtaacttcaatttttgaaaggcaaaatattttaccaagaccatgatttaatccaggcagtggaaaagatgagcttattataaggtgaactttgcggtggtgtcatgtcctgggactgtggttttaagtatatcttcgctttttctccaactcttaaggcaggggtgatgtgcaagctccaggaaagagatgaaatcggacgaattgaactagtccagaagctggcaaaagaaaactatcagtttttgcagacggacaaaaaagaacaggagaagtctgaacacgtaagccttttgcctcttggggatgcaggtttgaaggggtggaaaatgtttttgcctgattgcatgtttgaacgaaagactattttattttaaattctttaggttttgggggtttttttccccccaagagcatcctccttagtaaaaatgacagctgctcatagctctaagcaagtggcttatgacacaggatttataagagactcttctcaaaagtaaattatgtagaaatatgagaatacatttaagcaaatatgaatccttatctatttatgatcctgcttgggtggctttcaagtttgattttggaagttttgccttatcatatagtttgtagaacatgaattttgaaaaaacatttcaacatatttttatgtttagtacagaggtggatctagttgccaaatgaatgtgtcctaagtcactagaaatagatgattttcccagtatcttatgaaggcttgtgttccaacaagagttatattgtttgaatatagttaaagctggaggaaagggacgttccgcttggtcctcctgaaagcagttattcagattgagccttagaactgagagtgctgccgtcatgctgggaagacaatgggaccactttcttgtgccacacattgttatctggtgacttggttgttgttggttatgagacttcactctcagggctgcactatccagtggtg

SEQ ID NO: 429954 - DNA, 956 bp, Homo sapiens
tggcatggtgctcttaggttataataatgtaacttcaatttttgaaaggcaaaatattttaccaagaccatgatttaatccaggcagtggaaaagatgagcttattataaggtgaactttgcggtggtgtcatgtcctgggactgtggttttaagtatatcttcgctttttctccaactcttaaggcaggggtgatgtgcaagctccaggaaagagatgaaatcggacgaattgaactagtccagaagctggcaaaagaaaactatcagtttttgcagacggacaaaaaagaacaggagaagtctgaacacgtaagccttttgcctcttggggatgcaggtttgaaggggtggaaaatgtttttgcctgattgcatgtttgaacccccaagagcatcctccttagtaaaaatgacagctgctcatagctctaagcaagtggcttatgacacaggatttataagagactcttctcaaaagtaaattatgtagaaatatgagaatacatttaagcaaatatgaatccttatctatttatgatcctgcttgggtggctttcaagtttgattttggaagttttgccttatcatatagtttgtagaacatgaattttgaaaaaacatttcaacatatttttatgtttagtacagaggtggatctagttgccaaatgaatgtgtcctaagtcactagaaatagatgaaaacacaaaaagagattatagatgctctcaccaagtgggagggtcagaagggagttttcccagtatcttatgaaggcttgtgttccaacaagagttatattgtttgaatatagttaaagctggaggaaagggacgttccgcttggtcctctgggaagacaatgggaccactttcttgtgccacacattgttatctggtgacttggttgttgttggttatgagacttcactctcagggctgcactatccagtggtg

SEQ ID NO: 429955 - DNA, 955 bp, Homo sapiens
tggcatggtgctcttaggttataataatgtaacttcaatttttgaaaggcaaaatattttaccaagaccatgatttaatccaggcagtggaaaagatgagcttattataaggtgaactttgcggtggtgtcatgtcctgggactgtggttttaagtatatcttcgctttttctccaactcttaaggcaggggtgatgtgcaagctccaggaaagagatgaaatcggacgaattgaactagtccagaagctggcaaaagaaaactatcagtttttgcagacggacaaaaaagaacaggagaagtctgaacacgtaagccttttgcctcttggggatgcaggtttgaaggggtggaaaatgtttttgcctgattgcatgtttgaacccccaagagcatcctccttagtaaaaatgacagctgctcatagctctaagcaagtggcttatgacacaggatttataagagactcttctcaaaagtaaattatgtagaaatatgagaatacatttaagcaaatatgaatccttatctatttatgatcctgcttgggtggctttcaagtttgattttggaagttttgccttatcatatagtttgtagaacatgaattttgaaaaaacatttcaacatatttttatgtttagtacagaggtggatctagttgccaaatgaatgtgtcctaagtcactagaaatagatgaaaacacaaaaagagattatagatgctctcaccaagtgggagggtcagaagggagttttcccagtatcttatgaaggcttgtgttccaacaagagttatattgtttgaatatagttaaagctggaggaactgagagtgctgccgtcatgctgggaagacaatgggaccactttcttgtgccacacattgttatctggtgacttggttgttgttggttatgagacttcactctcagggctgcactatccagtggtg

SEQ ID NO: 429956 - DNA, 5893 bp, Homo sapiens
cagagctcttagcagccagatggactcagttcccagtgaaaggacagggatggcaagatcttttagcatttaggggatgcctttgttagtaaccgttcacaatgggcagctcccggctgagggtctttgaccctcatttggagaggaaagattccgccgcggcgctctcagaccgagagctgcccttgcctaccttcgatgtgccttatttcaaatacatcgacgaggaggatgaggacgatgaatggagcagccgctcgcagtcttccaccgaggatgactcagtggactctctgctctctgacagatatgtggtggtgtccgggaccccggagaagattttggagcaccttttgaatgacttgcacctggaagaagtccaggacaaagaaacagagaccctcctggatgacttccttctcacgtacactgtcttcatgacaactgatgacttgtgccaggctctgttaaggcactattctgctaagaagtatcaaggcaaagaggaaaactcagatgttccgcgtaggaaacgtaaagtcttgcatcttgtttcccagtggattgctctgtacaaagactggttacctgaagatgaacattcaaaaatgtttttaaagaccatatataggaatgtactggatgatgtttatgaatatccaatacttgaaaaagaattgaaagaatttcaaaagatacttggaatgcaccgtcgtcacactgtagatgaatattcaccacaaaaaaagaataaagcccttttccaccaattcagtcttaaggagaactggctccagcatagaggaactgtgactgaaacggaggaaattttctgccacgtgtatataacagagcactcctatgtcagtgtgaaggcaaaagtttccagtatagcccaagagatcctaaaagtcgtggcagaaaagatccagtatgcagaagaggatctggctctggtggccatcacattctctggggaaaagcatgaacttcagccaaatgacttagtcatctccaaatccctcgaggcatctggtcgaatatatgtctaccggaaagacctggcggacactttgaacccatttgcagaaaatgaggaatcacagcaaaggtcgatgaggattttgggaatgaacacttgggatcttgctctggaattaatgaattttgattggagtctattcaattcaattcacgagcaagagctgatctacttcacgttcagcagacagggaagtggggaacacactgcaaatctcagccttctgctccagagatgcaatgaggtccagctttgggtggccacggagattctgctctgcagccagctgggcaagcgagtgcagctggtgaaaaaattcatcaaaattgcggctcactgcaaagcccagagaaacctgaattctttctttgccattgtgatgggtctcaacactgcttctgtcagtcgactgtcgcagacctgggagaaaatccctgggaagtttaagaaacttttctctgaacttgaaagtttaacagatccttccctaaatcacaaagcctacagagatgcattcaaaaagatgaagccaccaaaaatccctttcatgcccttattgcttaaagatgtaacatttattcatgaaggaaataaaacttttttggataatcttgtcaattttgaaaagctgcatatgatcgcagacactgtccgaaccctgagacactgcaggactaaccagtttggtgacctgtctccaaaagagcatcaagagttaaagtcctatgttaatcacctgtatgtcattgacagccagcaggctctgtttgagctctcacacaggatcgagcctcgggtgtgagccccactgcctcacctcccctgtatctgcagcactttgagctacgggaatgtctatgccaagcacgttgctttcctgtgagaaaagaagttgctgagttttatcagtataacccaagacattcacaggaaagccagccaaagcgtgttcaggaagtgatgtcagccaccagagagggggagaggtttctccatgctactctcgggacaagaaggcagaaggagagtcagaagcattcttgagatggagaaggctggtttcttatgatcacattgttgatccagtccagttttcaatatgagatgtgccagcatcaagacaagacaacgtcttgacatgcaatgaccaaatatttcattaagagcgtgcatgaaacaggaaggagtttttactttgcctagttttagattactgtccataagctgtcaaagaagtcattcttttgaacacctgatgacagagacagcatctctagatctccagggaggagaggtttctgttgatacaacctgtgacatcaccaaaagccacttgtgtctagggagttagtgaggactgcagctagcatccatgctctgatgggcagatgaacaatgtcaaggtgtgcatcactttgcaccacaatcaactattgacacatgcttgcaggtgaaattagtttctgtacaactgatttgcagctataggcaaggtagatgaagttgctttgccagtaaggaaaaatagtaatctttaagaaattgactcattgtttaatttctggggattttctttatacttctaagcaggctcttatcttttattggacataatatgattttgaaaaagcacagtgcctgacacattgcaaacactcaccaactgcttgctgaggtgacagagtcacaaaagtctgcattcttgtgcctgatgatgcattttgcgtacctcatacaggctccttgcccacactatggaatgacagcagccagtgcagggaggttaagtgacatttaatgagtgaagcacttagcactctctaggtaataagatagtggtaattactagtgttttggcaaatgaaaaatgccctgaaatagccaaatgtctgattaatgttggcaacttagaagtcctataatccaactaccagccaaagcagggagcctttctataatttgcctttttttttttttttttcaaaatctgagtcttctaaaatcttattattcccatttttaccaattgaggctcctgtagcaaataagacctcttgatattttcaaggactggttagaggatttctttcaaccttcacatgaacaaaacagcctatgggtcaaaataatgaaatccacccctgcctgctagatacttgtcaccttgctaaaatgcaagggcctggtccattcattttccaaatgcaggagtcttggtgcacttctcactcttcctgcctgttcatctctttcatgcccacacagacctgtttcctttttgtctcatcaacgcctcattcatcctcattactgaggcgtgtccaatgctttttgacatctttatagcagtgctgtttcctgggctcaggaaccacactgagcttgagatactgctggaaggaaccatgtggagagaaggtttgggagaactttgagagagacttagtttggcccagcatgtaaaacttcagtcctgaacatttatagggttttatagaagggcatcctccagggctggtccattcagagaaatgctgcatgctgccgtcatggaatgtggcccacaggacaccagagccgtgagaaccggagagcagacttccctcacggctgggctgagcaaaccctccaaagccctcctcacgcagttactaacaatagcatgggcttacagcacaagcacgtgttctcacctttttcctatgccctggactaaggtttggccagtgtaatcatataaggccatcctgacattgtttctgtgtttcaaaatttggatttttatttacattagaactacattgctcctagtagaacattacctttaggggactaattttccatggagaactatttcagcatattgcatgctgctcagaccccaagtcagatatgcccaccaagccagatgaagctacacaaatgtggtatttaaatgcattttgtacagtgacttcagagtatctcacatgacatgggtgtaaactggctggggagaaaatgatgcttgttcacctcttcctccagccgtggttaggtggtcctaggggtagcagagggaagggaggattttgtgcagtcaagatttgcttttccatccttgtcttctgaatgtctaaaatctctgcatctttctgaagtttaacaactgtctccagaggtttgccaggcagcagctctcagaagtttccaaagctttgcagaatcttagatctggaattaaagaattcaagcccgaattgtgagaaccagatattactcaacagaaagctctttctaaggaatctgagctgttcactggtggacagtggtggggcttgagtgctccttgttaataggatgggccatgcaccctctctggatattcaccaaggcctcttcagaatagggtttgttctggctagaagcgtggtctagaagatggctaagctctttgccagctctcatttggagttttattattgcataaaatcttcgctcactctgcaaatcttacgtaatctggcaccttcggcaccaggtggtgcaggggcacttctaagtgggctctttttgttacagcacaactctcagacagtcctgtgggtctttggattcgtcagcattccagcaaactagccctgcttagaagttagcacaagacggcagaatgcaggaccccgtaggcaaaatcacaaccttgctattaaaaaatttgctctttgtcatctgtataattgccaaatgattatagtgatacacatgacctgcattcacttttttctagtttccttaattatgtttagaataaattcgtttccctagaccgagaaccacaaacaggtagtgtggagcatacaccgaatttagaagcatgtggataaggtcagtgctcacactgcctagtccacagggagaggatgctgcatgaatatatacttgcctctgagtggaggagaaatcgtggcatgaaagagagagtaccagtgatgacttcttatccctggagctgggctttcactgctacccatatcccagccctgcgagtctgttctagccagcacagacaccgcagatccggaactgaatgttcctaaatggcgcagccaatccaggcttttcagaaactgggcaaaaacattaaaatggggacgatcgggtcttccgcagtggtccaacacaggatttcttttaaatgtttcaaaaacatgtccttaaaatttcagcctgcttcttagcgagtgggccagttttgcttaaaactggtgggggggcgggggggaagtttttaaaaattgccaaaaagttagatgcaaatgtattactgtataaagcaaagctgtatatactaaacattttttagcagagtaatatttatttgcatagtctatttattgtattcgtatcacactgttattaaatactgggatgaaatcagtgacctgaagcaagaaatcttgccttttaatgtatcattaattagggctgctgtgatattgtcagcttgcattaacaattagaagatagagaacccgccatcagggtgtctacctaacttctcagggactacacttggtagttttccaccatttaaagaactggtaaatatgaaacatttgttgagttaccagaattgccattaacagtgttttctttcccatattccatgctttctgcctctgtgtatatatataatatatatgtatatgactgtgctgtgtatttatcgaagctagtaagcaataatttatatgtaaaaatggccaagcaatataaggttaaaacttatataagtaacccttaccttatcttgtattttcaatttttttttaaaactgcttttccaaatatgagactatgttaaagacacta

SEQ ID NO: 429957 - DNA, 6130 bp, Homo sapiens
tggcatggtgctcttaggttataataatgtaacttcaatttttgaaaggcaaaatattttaccaagaccatgatttaatccaggcagtggaaaagatgagcttattataaggtgaactttgcggtggtgtcatgtcctgggactgtggttttaagtatatcttcgctttttctccaactcttaaggcaggggtgatgtgcaagctccaggaaagagatgaaatcggacgaattgaactagtccagaagctggcaaaagaaaactatcagtttttgcagacggacaaaaaagaacaggagaagtctgaacaccaagatgatgaagtgacgactgttcaggttaaagagcaagaccagagcgtcctggtgctgaagaaagtgcagtgctgtggcccagcccccacagctgggagtgcggagagccattggagatatgtggtggtgtccgggaccccggagaagattttggagcaccttttgaatgacttgcacctggaagaagtccaggacaaagaaacagttataccaacccctgggatcacatgtgtcacttctgccatgtgctcacaaagccaagcggaccaggacttcatggcttgactctcctagcaccaacctaagtggggaagaagggagaccctcctggatgacttccttctcacgtacactgtcttcatgacaactgatgacttgtgccaggctctgttaaggcactattctgctaagaagtatcaaggcaaagaggaaaactcagatgttccgcgtaggaaacgtaaagtcttgcatcttgtttcccagtggattgctctgtacaaagactggttacctgaagatgaacattcaaaaatgtttttaaagaccatatataggaatgtactggatgatgtttatgaatatccaatacttgaaaaagaattgaaagaatttcaaaagatacttggaatgcaccgtcgtcacactgtagatgaatattcaccacaaaaaaagaataaagcccttttccaccaattcagtcttaaggagaactggctccagcatagaggaactgtgactgaaacggaggaaattttctgccacgtgtatataacagagcactcctatgtcagtgtgaaggcaaaagtttccagtatagcccaagagatcctaaaagtcgtggcagaaaagatccagtatgcagaagaggatctggctctggtggccatcacattctctggggaaaagcatgaacttcagccaaatgacttagtcatctccaaatccctcgaggcatctggtcgaatatatgtctaccggaaagacctggcggacactttgaacccatttgcagaaaatgaggaatcacagcaaaggtcgatgaggattttgggaatgaacacttgggatcttgctctggaattaatgaattttgattggagtctattcaattcaattcacgagcaagagctgatctacttcacgttcagcagacagggaagtggggaacacactgcaaatctcagccttctgctccagagatgcaatgaggtccagctttgggtggccacggagattctgctctgcagccagctgggcaagcgagtgcagctggtgaaaaaattcatcaaaattgcggctcactgcaaagcccagagaaacctgaattctttctttgccattgtgatgggtctcaacactgcttctgtcagtcgactgtcgcagacctgggagaaaatccctgggaagtttaagaaacttttctctgaacttgaaagtttaacagatccttccctaaatcacaaagcctacagagatgcattcaaaaagatgaagccaccaaaaatccctttcatgcccttattgcttaaagatgtaacatttattcatgaaggaaataaaacttttttggataatcttgtcaattttgaaaagctgcatatgatcgcagacactgtccgaaccctgagacactgcaggactaaccagtttggtgacctgtctccaaaagagcatcaagagttaaagtcctatgttaatcacctgtatgtcattgacagccagcaggctctgtttgagctctcacacaggatcgagcctcgggtgtgagccccactgcctcacctcccctgtatctgcagcactttgagctacgggaatgtctatgccaagcacgttgctttcctgtgagaaaagaagttgctgagttttatcagtataacccaagacattcacaggaaagccagccaaagcgtgttcaggaagtgatgtcagccaccagagagggggagaggtttctccatgctactctcgggacaagaaggcagaaggagagtcagaagcattcttgagatggagaaggctggtttcttatgatcacattgttgatccagtccagttttcaatatgagatgtgccagcatcaagacaagacaacgtcttgacatgcaatgaccaaatatttcattaagagcgtgcatgaaacaggaaggagtttttactttgcctagttttagattactgtccataagctgtcaaagaagtcattcttttgaacacctgatgacagagacagcatctctagatctccagggaggagaggtttctgttgatacaacctgtgacatcaccaaaagccacttgtgtctagggagttagtgaggactgcagctagcatccatgctctgatgggcagatgaacaatgtcaaggtgtgcatcactttgcaccacaatcaactattgacacatgcttgcaggtgaaattagtttctgtacaactgatttgcagctataggcaaggtagatgaagttgctttgccagtaaggaaaaatagtaatctttaagaaattgactcattgtttaatttctggggattttctttatacttctaagcaggctcttatcttttattggacataatatgattttgaaaaagcacagtgcctgacacattgcaaacactcaccaactgcttgctgaggtgacagagtcacaaaagtctgcattcttgtgcctgatgatgcattttgcgtacctcatacaggctccttgcccacactatggaatgacagcagccagtgcagggaggttaagtgacatttaatgagtgaagcacttagcactctctaggtaataagatagtggtaattactagtgttttggcaaatgaaaaatgccctgaaatagccaaatgtctgattaatgttggcaacttagaagtcctataatccaactaccagccaaagcagggagcctttctataatttgcctttttttttttttttttcaaaatctgagtcttctaaaatcttattattcccatttttaccaattgaggctcctgtagcaaataagacctcttgatattttcaaggactggttagaggatttctttcaaccttcacatgaacaaaacagcctatgggtcaaaataatgaaatccacccctgcctgctagatacttgtcaccttgctaaaatgcaagggcctggtccattcattttccaaatgcaggagtcttggtgcacttctcactcttcctgcctgttcatctctttcatgcccacacagacctgtttcctttttgtctcatcaacgcctcattcatcctcattactgaggcgtgtccaatgctttttgacatctttatagcagtgctgtttcctgggctcaggaaccacactgagcttgagatactgctggaaggaaccatgtggagagaaggtttgggagaactttgagagagacttagtttggcccagcatgtaaaacttcagtcctgaacatttatagggttttatagaagggcatcctccagggctggtccattcagagaaatgctgcatgctgccgtcatggaatgtggcccacaggacaccagagccgtgagaaccggagagcagacttccctcacggctgggctgagcaaaccctccaaagccctcctcacgcagttactaacaatagcatgggcttacagcacaagcacgtgttctcacctttttcctatgccctggactaaggtttggccagtgtaatcatataaggccatcctgacattgtttctgtgtttcaaaatttggatttttatttacattagaactacattgctcctagtagaacattacctttaggggactaattttccatggagaactatttcagcatattgcatgctgctcagaccccaagtcagatatgcccaccaagccagatgaagctacacaaatgtggtatttaaatgcattttgtacagtgacttcagagtatctcacatgacatgggtgtaaactggctggggagaaaatgatgcttgttcacctcttcctccagccgtggttaggtggtcctaggggtagcagagggaagggaggattttgtgcagtcaagatttgcttttccatccttgtcttctgaatgtctaaaatctctgcatctttctgaagtttaacaactgtctccagaggtttgccaggcagcagctctcagaagtttccaaagctttgcagaatcttagatctggaattaaagaattcaagcccgaattgtgagaaccagatattactcaacagaaagctctttctaaggaatctgagctgttcactggtggacagtggtggggcttgagtgctccttgttaataggatgggccatgcaccctctctggatattcaccaaggcctcttcagaatagggtttgttctggctagaagcgtggtctagaagatggctaagctctttgccagctctcatttggagttttattattgcataaaatcttcgctcactctgcaaatcttacgtaatctggcaccttcggcaccaggtggtgcaggggcacttctaagtgggctctttttgttacagcacaactctcagacagtcctgtgggtctttggattcgtcagcattccagcaaactagccctgcttagaagttagcacaagacggcagaatgcaggaccccgtaggcaaaatcacaaccttgctattaaaaaatttgctctttgtcatctgtataattgccaaatgattatagtgatacacatgacctgcattcacttttttctagtttccttaattatgtttagaataaattcgtttccctagaccgagaaccacaaacaggtagtgtggagcatacaccgaatttagaagcatgtggataaggtcagtgctcacactgcctagtccacagggagaggatgctgcatgaatatatacttgcctctgagtggaggagaaatcgtggcatgaaagagagagtaccagtgatgacttcttatccctggagctgggctttcactgctacccatatcccagccctgcgagtctgttctagccagcacagacaccgcagatccggaactgaatgttcctaaatggcgcagccaatccaggcttttcagaaactgggcaaaaacattaaaatggggacgatcgggtcttccgcagtggtccaacacaggatttcttttaaatgtttcaaaaacatgtccttaaaatttcagcctgcttcttagcgagtgggccagttttgcttaaaactggtgggggggcgggggggaagtttttaaaaattgccaaaaagttagatgcaaatgtattactgtataaagcaaagctgtatatactaaacattttttagcagagtaatatttatttgcatagtctatttattgtattcgtatcacactgttattaaatactgggatgaaatcagtgacctgaagcaagaaatcttgccttttaatgtatcattaattagggctgctgtgatattgtcagcttgcattaacaattagaagatagagaacccgccatcagggtgtctacctaacttctcagggactacacttggtagttttccaccatttaaagaactggtaaatatgaaacatttgttgagttaccagaattgccattaacagtgttttctttcccatattccatgctttctgcctctgtgtatatatataatatatatgtatatgactgtgctgtgtatttatcgaagctagtaagcaataatttatatgtaaaaatggccaagcaatataaggttaaaacttatataagtaacccttaccttatcttgtattttcaatttttttttaaaactgcttttccaaatatgagactatgttaaagacacta

SEQ ID NO: 429958 - DNA, 6016 bp, Homo sapiens
tggcatggtgctcttaggttataataatgtaacttcaatttttgaaaggcaaaatattttaccaagaccatgatttaatccaggcagtggaaaagatgagcttattataaggtgaactttgcggtggtgtcatgtcctgggactgtggttttaagtatatcttcgctttttctccaactcttaaggcaggggtgatgtgcaagctccaggaaagagatgaaatcggacgaattgaactagtccagaagctggcaaaagaaaactatcagtttttgcagacggacaaaaaagaacaggagaagtctgaacaccaagatgatgaagtgacgactgttcaggttaaagagcaagaccagagcgtcctggtgctgaagaaagtgcagtgctgtggcccagcccccacagctgggagtgcggagagccattggagatatgtggtggtgtccgggaccccggagaagattttggagcaccttttgaatgacttgcacctggaagaagtccaggacaaagaaacagagaccctcctggatgacttccttctcacgtacactgtcttcatgacaactgatgacttgtgccaggctctgttaaggcactattctgctaagaagtatcaaggcaaagaggaaaactcagatgttccgcgtaggaaacgtaaagtcttgcatcttgtttcccagtggattgctctgtacaaagactggttacctgaagatgaacattcaaaaatgtttttaaagaccatatataggaatgtactggatgatgtttatgaatatccaatacttgaaaaagaattgaaagaatttcaaaagatacttggaatgcaccgtcgtcacactgtagatgaatattcaccacaaaaaaagaataaagcccttttccaccaattcagtcttaaggagaactggctccagcatagaggaactgtgactgaaacggaggaaattttctgccacgtgtatataacagagcactcctatgtcagtgtgaaggcaaaagtttccagtatagcccaagagatcctaaaagtcgtggcagaaaagatccagtatgcagaagaggatctggctctggtggccatcacattctctggggaaaagcatgaacttcagccaaatgacttagtcatctccaaatccctcgaggcatctggtcgaatatatgtctaccggaaagacctggcggacactttgaacccatttgcagaaaatgaggaatcacagcaaaggtcgatgaggattttgggaatgaacacttgggatcttgctctggaattaatgaattttgattggagtctattcaattcaattcacgagcaagagctgatctacttcacgttcagcagacagggaagtggggaacacactgcaaatctcagccttctgctccagagatgcaatgaggtccagctttgggtggccacggagattctgctctgcagccagctgggcaagcgagtgcagctggtgaaaaaattcatcaaaattgcggctcactgcaaagcccagagaaacctgaattctttctttgccattgtgatgggtctcaacactgcttctgtcagtcgactgtcgcagacctgggagaaaatccctgggaagtttaagaaacttttctctgaacttgaaagtttaacagatccttccctaaatcacaaagcctacagagatgcattcaaaaagatgaagccaccaaaaatccctttcatgcccttattgcttaaagatgtaacatttattcatgaaggaaataaaacttttttggataatcttgtcaattttgaaaagctgcatatgatcgcagacactgtccgaaccctgagacactgcaggactaaccagtttggtgacctgtctccaaaagagcatcaagagttaaagtcctatgttaatcacctgtatgtcattgacagccagcaggctctgtttgagctctcacacaggatcgagcctcgggtgtgagccccactgcctcacctcccctgtatctgcagcactttgagctacgggaatgtctatgccaagcacgttgctttcctgtgagaaaagaagttgctgagttttatcagtataacccaagacattcacaggaaagccagccaaagcgtgttcaggaagtgatgtcagccaccagagagggggagaggtttctccatgctactctcgggacaagaaggcagaaggagagtcagaagcattcttgagatggagaaggctggtttcttatgatcacattgttgatccagtccagttttcaatatgagatgtgccagcatcaagacaagacaacgtcttgacatgcaatgaccaaatatttcattaagagcgtgcatgaaacaggaaggagtttttactttgcctagttttagattactgtccataagctgtcaaagaagtcattcttttgaacacctgatgacagagacagcatctctagatctccagggaggagaggtttctgttgatacaacctgtgacatcaccaaaagccacttgtgtctagggagttagtgaggactgcagctagcatccatgctctgatgggcagatgaacaatgtcaaggtgtgcatcactttgcaccacaatcaactattgacacatgcttgcaggtgaaattagtttctgtacaactgatttgcagctataggcaaggtagatgaagttgctttgccagtaaggaaaaatagtaatctttaagaaattgactcattgtttaatttctggggattttctttatacttctaagcaggctcttatcttttattggacataatatgattttgaaaaagcacagtgcctgacacattgcaaacactcaccaactgcttgctgaggtgacagagtcacaaaagtctgcattcttgtgcctgatgatgcattttgcgtacctcatacaggctccttgcccacactatggaatgacagcagccagtgcagggaggttaagtgacatttaatgagtgaagcacttagcactctctaggtaataagatagtggtaattactagtgttttggcaaatgaaaaatgccctgaaatagccaaatgtctgattaatgttggcaacttagaagtcctataatccaactaccagccaaagcagggagcctttctataatttgcctttttttttttttttttcaaaatctgagtcttctaaaatcttattattcccatttttaccaattgaggctcctgtagcaaataagacctcttgatattttcaaggactggttagaggatttctttcaaccttcacatgaacaaaacagcctatgggtcaaaataatgaaatccacccctgcctgctagatacttgtcaccttgctaaaatgcaagggcctggtccattcattttccaaatgcaggagtcttggtgcacttctcactcttcctgcctgttcatctctttcatgcccacacagacctgtttcctttttgtctcatcaacgcctcattcatcctcattactgaggcgtgtccaatgctttttgacatctttatagcagtgctgtttcctgggctcaggaaccacactgagcttgagatactgctggaaggaaccatgtggagagaaggtttgggagaactttgagagagacttagtttggcccagcatgtaaaacttcagtcctgaacatttatagggttttatagaagggcatcctccagggctggtccattcagagaaatgctgcatgctgccgtcatggaatgtggcccacaggacaccagagccgtgagaaccggagagcagacttccctcacggctgggctgagcaaaccctccaaagccctcctcacgcagttactaacaatagcatgggcttacagcacaagcacgtgttctcacctttttcctatgccctggactaaggtttggccagtgtaatcatataaggccatcctgacattgtttctgtgtttcaaaatttggatttttatttacattagaactacattgctcctagtagaacattacctttaggggactaattttccatggagaactatttcagcatattgcatgctgctcagaccccaagtcagatatgcccaccaagccagatgaagctacacaaatgtggtatttaaatgcattttgtacagtgacttcagagtatctcacatgacatgggtgtaaactggctggggagaaaatgatgcttgttcacctcttcctccagccgtggttaggtggtcctaggggtagcagagggaagggaggattttgtgcagtcaagatttgcttttccatccttgtcttctgaatgtctaaaatctctgcatctttctgaagtttaacaactgtctccagaggtttgccaggcagcagctctcagaagtttccaaagctttgcagaatcttagatctggaattaaagaattcaagcccgaattgtgagaaccagatattactcaacagaaagctctttctaaggaatctgagctgttcactggtggacagtggtggggcttgagtgctccttgttaataggatgggccatgcaccctctctggatattcaccaaggcctcttcagaatagggtttgttctggctagaagcgtggtctagaagatggctaagctctttgccagctctcatttggagttttattattgcataaaatcttcgctcactctgcaaatcttacgtaatctggcaccttcggcaccaggtggtgcaggggcacttctaagtgggctctttttgttacagcacaactctcagacagtcctgtgggtctttggattcgtcagcattccagcaaactagccctgcttagaagttagcacaagacggcagaatgcaggaccccgtaggcaaaatcacaaccttgctattaaaaaatttgctctttgtcatctgtataattgccaaatgattatagtgatacacatgacctgcattcacttttttctagtttccttaattatgtttagaataaattcgtttccctagaccgagaaccacaaacaggtagtgtggagcatacaccgaatttagaagcatgtggataaggtcagtgctcacactgcctagtccacagggagaggatgctgcatgaatatatacttgcctctgagtggaggagaaatcgtggcatgaaagagagagtaccagtgatgacttcttatccctggagctgggctttcactgctacccatatcccagccctgcgagtctgttctagccagcacagacaccgcagatccggaactgaatgttcctaaatggcgcagccaatccaggcttttcagaaactgggcaaaaacattaaaatggggacgatcgggtcttccgcagtggtccaacacaggatttcttttaaatgtttcaaaaacatgtccttaaaatttcagcctgcttcttagcgagtgggccagttttgcttaaaactggtgggggggcgggggggaagtttttaaaaattgccaaaaagttagatgcaaatgtattactgtataaagcaaagctgtatatactaaacattttttagcagagtaatatttatttgcatagtctatttattgtattcgtatcacactgttattaaatactgggatgaaatcagtgacctgaagcaagaaatcttgccttttaatgtatcattaattagggctgctgtgatattgtcagcttgcattaacaattagaagatagagaacccgccatcagggtgtctacctaacttctcagggactacacttggtagttttccaccatttaaagaactggtaaatatgaaacatttgttgagttaccagaattgccattaacagtgttttctttcccatattccatgctttctgcctctgtgtatatatataatatatatgtatatgactgtgctgtgtatttatcgaagctagtaagcaataatttatatgtaaaaatggccaagcaatataaggttaaaacttatataagtaacccttaccttatcttgtattttcaatttttttttaaaactgcttttccaaatatgagactatgttaaagacacta

SEQ ID NO: 429959 - DNA, 5678 bp, Homo sapiens
tttttcatatcttaattttaataaataatgtctttcctggctaaaattctcctaatccctcccacagctatcaatatttatcatatttctgccatgcacatggttctggggcccagataagcagctgctcttcttatccacctctttgcttaccttgtgtttgttttttttttctttgcagagaccctcctggatgacttccttctcacgtacactgtcttcatgacaactgatgacttgtgccaggctctgttaaggcactattctgctaagaagtatcaaggcaaagaggaaaactcagatgttccgcgtaggaaacgtaaagtcttgcatcttgtttcccagtggattgctctgtacaaagactggttacctgaagatgaacattcaaaaatgtttttaaagaccatatataggaatgtactggatgatgtttatgaatatccaatacttgaaaaagaattgaaagaatttcaaaagatacttggaatgcaccgtcgtcacactgtagatgaatattcaccacaaaaaaagaataaagcccttttccaccaattcagtcttaaggagaactggctccagcatagaggaactgtgactgaaacggaggaaattttctgccacgtgtatataacagagcactcctatgtcagtgtgaaggcaaaagtttccagtatagcccaagagatcctaaaagtcgtggcagaaaagatccagtatgcagaagaggatctggctctggtggccatcacattctctggggaaaagcatgaacttcagccaaatgacttagtcatctccaaatccctcgaggcatctggtcgaatatatgtctaccggaaagacctggcggacactttgaacccatttgcagaaaatgaggaatcacagcaaaggtcgatgaggattttgggaatgaacacttgggatcttgctctggaattaatgaattttgattggagtctattcaattcaattcacgagcaagagctgatctacttcacgttcagcagacagggaagtggggaacacactgcaaatctcagccttctgctccagagatgcaatgaggtccagctttgggtggccacggagattctgctctgcagccagctgggcaagcgagtgcagctggtgaaaaaattcatcaaaattgcggctcactgcaaagcccagagaaacctgaattctttctttgccattgtgatgggtctcaacactgcttctgtcagtcgactgtcgcagacctgggagaaaatccctgggaagtttaagaaacttttctctgaacttgaaagtttaacagatccttccctaaatcacaaagcctacagagatgcattcaaaaagatgaagccaccaaaaatccctttcatgcccttattgcttaaagatgtaacatttattcatgaaggaaataaaacttttttggataatcttgtcaattttgaaaagctgcatatgatcgcagacactgtccgaaccctgagacactgcaggactaaccagtttggtgacctgtctccaaaagagcatcaagagttaaagtcctatgttaatcacctgtatgtcattgacagccagcaggctctgtttgagctctcacacaggatcgagcctcgggtgtgagccccactgcctcacctcccctgtatctgcagcactttgagctacgggaatgtctatgccaagcacgttgctttcctgtgagaaaagaagttgctgagttttatcagtataacccaagacattcacaggaaagccagccaaagcgtgttcaggaagtgatgtcagccaccagagagggggagaggtttctccatgctactctcgggacaagaaggcagaaggagagtcagaagcattcttgagatggagaaggctggtttcttatgatcacattgttgatccagtccagttttcaatatgagatgtgccagcatcaagacaagacaacgtcttgacatgcaatgaccaaatatttcattaagagcgtgcatgaaacaggaaggagtttttactttgcctagttttagattactgtccataagctgtcaaagaagtcattcttttgaacacctgatgacagagacagcatctctagatctccagggaggagaggtttctgttgatacaacctgtgacatcaccaaaagccacttgtgtctagggagttagtgaggactgcagctagcatccatgctctgatgggcagatgaacaatgtcaaggtgtgcatcactttgcaccacaatcaactattgacacatgcttgcaggtgaaattagtttctgtacaactgatttgcagctataggcaaggtagatgaagttgctttgccagtaaggaaaaatagtaatctttaagaaattgactcattgtttaatttctggggattttctttatacttctaagcaggctcttatcttttattggacataatatgattttgaaaaagcacagtgcctgacacattgcaaacactcaccaactgcttgctgaggtgacagagtcacaaaagtctgcattcttgtgcctgatgatgcattttgcgtacctcatacaggctccttgcccacactatggaatgacagcagccagtgcagggaggttaagtgacatttaatgagtgaagcacttagcactctctaggtaataagatagtggtaattactagtgttttggcaaatgaaaaatgccctgaaatagccaaatgtctgattaatgttggcaacttagaagtcctataatccaactaccagccaaagcagggagcctttctataatttgcctttttttttttttttttcaaaatctgagtcttctaaaatcttattattcccatttttaccaattgaggctcctgtagcaaataagacctcttgatattttcaaggactggttagaggatttctttcaaccttcacatgaacaaaacagcctatgggtcaaaataatgaaatccacccctgcctgctagatacttgtcaccttgctaaaatgcaagggcctggtccattcattttccaaatgcaggagtcttggtgcacttctcactcttcctgcctgttcatctctttcatgcccacacagacctgtttcctttttgtctcatcaacgcctcattcatcctcattactgaggcgtgtccaatgctttttgacatctttatagcagtgctgtttcctgggctcaggaaccacactgagcttgagatactgctggaaggaaccatgtggagagaaggtttgggagaactttgagagagacttagtttggcccagcatgtaaaacttcagtcctgaacatttatagggttttatagaagggcatcctccagggctggtccattcagagaaatgctgcatgctgccgtcatggaatgtggcccacaggacaccagagccgtgagaaccggagagcagacttccctcacggctgggctgagcaaaccctccaaagccctcctcacgcagttactaacaatagcatgggcttacagcacaagcacgtgttctcacctttttcctatgccctggactaaggtttggccagtgtaatcatataaggccatcctgacattgtttctgtgtttcaaaatttggatttttatttacattagaactacattgctcctagtagaacattacctttaggggactaattttccatggagaactatttcagcatattgcatgctgctcagaccccaagtcagatatgcccaccaagccagatgaagctacacaaatgtggtatttaaatgcattttgtacagtgacttcagagtatctcacatgacatgggtgtaaactggctggggagaaaatgatgcttgttcacctcttcctccagccgtggttaggtggtcctaggggtagcagagggaagggaggattttgtgcagtcaagatttgcttttccatccttgtcttctgaatgtctaaaatctctgcatctttctgaagtttaacaactgtctccagaggtttgccaggcagcagctctcagaagtttccaaagctttgcagaatcttagatctggaattaaagaattcaagcccgaattgtgagaaccagatattactcaacagaaagctctttctaaggaatctgagctgttcactggtggacagtggtggggcttgagtgctccttgttaataggatgggccatgcaccctctctggatattcaccaaggcctcttcagaatagggtttgttctggctagaagcgtggtctagaagatggctaagctctttgccagctctcatttggagttttattattgcataaaatcttcgctcactctgcaaatcttacgtaatctggcaccttcggcaccaggtggtgcaggggcacttctaagtgggctctttttgttacagcacaactctcagacagtcctgtgggtctttggattcgtcagcattccagcaaactagccctgcttagaagttagcacaagacggcagaatgcaggaccccgtaggcaaaatcacaaccttgctattaaaaaatttgctctttgtcatctgtataattgccaaatgattatagtgatacacatgacctgcattcacttttttctagtttccttaattatgtttagaataaattcgtttccctagaccgagaaccacaaacaggtagtgtggagcatacaccgaatttagaagcatgtggataaggtcagtgctcacactgcctagtccacagggagaggatgctgcatgaatatatacttgcctctgagtggaggagaaatcgtggcatgaaagagagagtaccagtgatgacttcttatccctggagctgggctttcactgctacccatatcccagccctgcgagtctgttctagccagcacagacaccgcagatccggaactgaatgttcctaaatggcgcagccaatccaggcttttcagaaactgggcaaaaacattaaaatggggacgatcgggtcttccgcagtggtccaacacaggatttcttttaaatgtttcaaaaacatgtccttaaaatttcagcctgcttcttagcgagtgggccagttttgcttaaaactggtgggggggcgggggggaagtttttaaaaattgccaaaaagttagatgcaaatgtattactgtataaagcaaagctgtatatactaaacattttttagcagagtaatatttatttgcatagtctatttattgtattcgtatcacactgttattaaatactgggatgaaatcagtgacctgaagcaagaaatcttgccttttaatgtatcattaattagggctgctgtgatattgtcagcttgcattaacaattagaagatagagaacccgccatcagggtgtctacctaacttctcagggactacacttggtagttttccaccatttaaagaactggtaaatatgaaacatttgttgagttaccagaattgccattaacagtgttttctttcccatattccatgctttctgcctctgtgtatatatataatatatatgtatatgactgtgctgtgtatttatcgaagctagtaagcaataatttatatgtaaaaatggccaagcaatataaggttaaaacttatataagtaacccttaccttatcttgtattttcaatttttttttaaaactgcttttccaaatatgagactatgttaaagacacta

SEQ ID NO: 429960 - DNA, 1809 bp, Homo sapiens
  misc_feature (10)..(10): n is a, c, g, or t
  misc_feature (23)..(23): n is a, c, g, or t
tcggaatcgngctcggtcccacngggattttgtgcagtcaagatttgcttttccatccttgtcttctgaatgtctaaaatctctgcatctttctgaagtttaacaactgtctccagaggtttgccaggcagcagctctcagaagtttccaaagctttgcagaatcttagatctggaattaaagaattcaagcccgaattgtgagaaccagatattactcaacagaaagctctttctaaggaatctgagctgttcactggtggacagtggtggggcttgagtgctccttgttaataggatgggccatgcaccctctctggatattcaccaaggcctcttcagaatagggtttgttctggctagaagcgtggtctagaagatggctaagctctttgccagctctcatttggagttttattattgcataaaatcttcgctcactctgcaaatcttacgtaatctggcaccttcggcaccaggtggtgcaggggcacttctaagtgggctctttttgttacagcacaactctcagacagtcctgtgggtctttggattcgtcagcattccagcaaactagccctgcttagaagttagcacaagacggcagaatgcaggaccccgtaggcaaaatcacaaccttgctattaaaaaatttgctctttgtcatctgtataattgccaaatgattatagtgatacacatgacctgcattcacttttttctagtttccttaattatgtttagaataaattcgtttccctagaccgagaaccacaaacaggtagtgtggagcatacaccgaatttagaagcatgtggataaggtcagtgctcacactgcctagtccacagggagaggatgctgcatgaatatatacttgcctctgagtggaggagaaatcgtggcatgaaagagagagtaccagtgatgacttcttatccctggagctgggctttcactgctacccatatcccagccctgcgagtctgttctagccagcacagacaccgcagatccggaactgaatgttcctaaatggcgcagccaatccaggcttttcagaaactgggcaaaaacattaaaatggggacgatcgggtcttccgcagtggtccaacacaggatttcttttaaatgtttcaaaaacatgtccttaaaatttcagcctgcttcttagcgagtgggccagttttgcttaaaactggtgggggggcgggggggaagtttttaaaaattgccaaaaagttagatgcaaatgtattactgtataaagcaaagctgtatatactaaacattttttagcagagtaatatttatttgcatagtctatttattgtattcgtatcacactgttattaaatactgggatgaaatcagtgacctgaagcaagaaatcttgccttttaatgtatcattaattagggctgctgtgatattgtcagcttgcattaacaattagaagatagagaacccgccatcagggtgtctacctaacttctcagggactacacttggtagttttccaccatttaaagaactggtaaatatgaaacatttgttgagttaccagaattgccattaacagtgttttctttcccatattccatgctttctgcctctgtgtatatatataatatatatgtatatgactgtgctgtgtatttatcgaagctagtaagcaataatttatatgtaaaaatggccaagcaatataaggttaaaacttatataagtaacccttaccttatcttgtattttcaatttttttttaaaactgcttttccaaatatgagactatgttaaagacacta

SEQ ID NO: 429961 - DNA, 1523 bp, Homo sapiens
tgcacggggatttgtgcaatataaactccaaatgagagatggctaagctctttgccagctctcatttggagttttattattgcataaaatcttcgctcactctgcaaatcttacgtaatctggcaccttcggcaccaggtggtgcaggggcacttctaagtgggctctttttgttacagcacaactctcagacagtcctgtgggtctttggattcgtcagcattccagcaaactagccctgcttagaagttagcacaagacggcagaatgcaggaccccgtaggcaaaatcacaaccttgctattaaaaaaaatttttttttacatacacatttgcaggtgttccctagagtgtggtgttttgaatttgctctttgtcatctgtataattgccaaatgattatagtgatacacatgacctgcattcacttttttctagtttccttaattatgtttagaataaattcgtttccctagaccgagaaccacaaacaggtagtgtggagcatacaccgaatttagaagcatgtggataaggtcagtgctcacactgcctagtccacagggagaggatgctgcatgaatatatacttgcctctgagtggaggagaaatcgtggcatgaaagagagagtaccagtgatgacttcttatccctggagctgggctttcactgctacccatatcccagccctgcgagtctgttctagccagcacagacaccgcagatccggaactgaatgttcctaaatggcgcagccaatccaggcttttcagaaactgggcaaaaacattaaaatggggacgatcgggtcttccgcagtggtccaacacaggatttcttttaaatgtttcaaaaacatgtccttaaaatttcagcctgcttcttagcgagtgggccagttttgcttaaaactggtgggggggcgggggggaagtttttaaaaattgccaaaaagttagatgcaaatgtattactgtataaagcaaagctgtatatactaaacattttttagcagagtaatatttatttgcatagtctatttattgtattcgtatcacactgttattaaatactgggatgaaatcagtgacctgaagcaagaaatcttgccttttaatgtatcattaattagggctgctgtgatattgtcagcttgcattaacaattagaagatagagaacccgccatcagggtgtctacctaacttctcagggactacacttggtagttttccaccatttaaagaactggtaaatatgaaacatttgttgagttaccagaattgccattaacagtgttttctttcccatattccatgctttctgcctctgtgtatatatataatatatatgtatatgactgtgctgtgtatttatcgaagctagtaagcaataatttatatgtaaaaatggccaagcaatataaggttaaaacttatataagtaacccttaccttatcttgtattttcaatttttttttaaaactgcttttccaaatatgagactatgttaaagacacta

SEQ ID NO: 429962 - DNA, 1393 bp, Homo sapiens
cagagctcttagcagccagatggactcagttcccagtgaaaggacagggatggcaagatcttttagcatttaggggatgcctttgttagtaaccgttcacaatgggcagctcccggctgagggtctttgaccctcatttggagaggaaagattccgccgcggcgctctcagaccgagagctgcccttgcctaccttcgatgtgccttatttcaaatacatcgacgaggaggatgaggacgatgaatggagcagccgctcgcagtcttccaccgaggatgactcagtggactctctgctctctgacagatatgtggtggtgtccgggaccccggagaagattttggagcaccttttgaatgacttgcacctggaagaagtccaggacaaagaaacagagaccctcctggatgacttccttctcacgtacactgtcttcatgacaactgatgacttgtgccaggctctgttaaggcactattctgctaagaagtatcaaggcaaagaggaaaactcagatgttccgcgtaggaaacgtaaagtcttgcatcttgtttcccagtggattgctctgtacaaagactggttacctgaagatgaacattcaaaaatgtttttaaagaccatatataggaatgtactggatgatgtttatgaatatccaatacttgaaaaagaattgaaagaatttcaaaagatacttggaatgcaccgtcgtcacactgtagatgaatattcaccacaaaaaaagaataaagcccttttccaccaattcagtcttaaggagaactggctccagcatagaggaactgtgactgaaacggaggaaattttctgccacgtgtatataacagagcactcctatgtcagtgtgaaggcaaaagtttccagtatagcccaagagatcctaaaagtcgtggcagaaaagatccagtatgcagaagaggatctggctctggtggccatcacattctctggggaaaagcatgaacttcagccaaatgacttagtcatctccaaatccctcgaggcatctggtcgaatatatgtctaccggaaagacctggcggacactttggtaaggaccttcagccttgtatttgaaacaaacaggccaggcgaggtggctcatacctgtaatctgagcactttgggaggccaaggcaggaagatggcttgagctcagaagtttgagaccagcttagaagtttgcaaccctgtctctacaaaaaaacttaagaattaactgggcatagtagtacacacctgttgtccctaggtgtgtgctgaggtgggaggatctcttcagcccaggaggtcaaggctgcaatgagttgtgatctcatcattgcactccagcccaggtgatagggtaggaccttgtctcaaaaaaaa

SEQ ID NO: 429963 - DNA, 1536 bp, Homo sapiens
cagagctcttagcagccagatggactcagttcccagtgaaaggacagggatggcaagatcttttagcatttaggggatgcctttgttagtaaccgttcacaatgggcagctcccggctgagggtctttgaccctcatttggagaggaaagattccgccgcggcgctctcagaccgagagctgcccttgcctaccttcgatgtgccttatttcaaatacatcgacgaggaggatgaggacgatgaatggagcagccgctcgcagtcttccaccgaggatgactcagtggactctctgctctctgacagatatgtggtggtgtccgggaccccggagaagattttggagcaccttttgaatgacttgcacctggaagaagtccaggacaaagaaacagagaccctcctggatgacttccttctcacgtacactgtcttcatgacaactgatgacttgtgccaggctctgttaaggcactattctgctaagaagtatcaaggcaaagaggaaaactcagatgttccgcgtaggaaacgtaaagtcttgcatcttgtttcccagtggattgctctgtacaaagactggttacctgaagatgaacattcaaaaatgtttttaaagaccatatataggaatgtactggatgatgtttatgaatatccaatacttgaaaaagaattgaaagaatttcaaaagatacttggaatgcaccgtcgtcacactgtagatgaatattcaccacaaaaaaagaataaagcccttttccaccaattcagtcttaaggagaactggctccagcatagaggaactgtgactgaaacggaggaaattttctgccacgtgtatataacagagcactcctatgtcagtgtgaaggcaaaagtttccagtatagcccaagagatcctaaaagtcgtggcagaaaagatccagtatgcagaagaggatctggctctggtggccatcacattctctggggaaaagcatgaacttcagccaaatgacttagtcatctccaaatccctcgaggcatctggtcgaatatatgtctaccggaaagacctggcggacactttgaacccatttgcagaaaatgaggaatcacagcaaaggtcgatgaggattttgggaatgaacacttgggatcttgctctggaattaatgaattttgattggagtctattcaattcaattcacgagcaagagctgatctacttcacgttcagcagacagggaagtggggaacacactgcaaatctcagccttctgctccagagatgcaatgaggtccagctttgggtggccacggagattctgctctgcagccagctgggcaagcgagtgcagctggtgaaaaaattcatcaaaattgcggctcactgcaaagcccagagaaacctgaattctttctttgccattgtgatgggtctcaacactgcttctgtcagtcgactgtcgcagacctgggaggtgagccttggagtcccatggtgaggggcacataaaatggaaataaagtaatttacatggattaaat

SEQ ID NO: 429964 - DNA, 1918 bp, Homo sapiens
cagagctcttagcagccagatggactcagttcccagtgaaaggacagggatggcaagatcttttagcatttaggggatgcctttgttagtaaccgttcacaatgggcagctcccggctgagggtctttgaccctcatttggagaggaaagattccgccgcggcgctctcagaccgagagctgcccttgcctaccttcgatgtgccttatttcaaatacatcgacgaggaggatgaggacgatgaatggagcagccgctcgcagtcttccaccgaggatgactcagtggactctctgctctctgacagatatgtggtggtgtccgggaccccggagaagattttggagcaccttttgaatgacttgcacctggaagaagtccaggacaaagaaacagagaccctcctggatgacttccttctcacgtacactgtcttcatgacaactgatgacttgtgccaggctctgttaaggcactattctgctaagaagtatcaaggcaaagaggaaaactcagatgttccgcgtaggaaacgtaaagtcttgcatcttgtttcccagtggattgctctgtacaaagactggttacctgaagatgaacattcaaaaatgtttttaaagaccatatataggaatgtactggatgatgtttatgaatatccaatacttgaaaaagaattgaaagaatttcaaaagatacttggaatgcaccgtcgtcacactgtagatgaatattcaccacaaaaaaagaataaagcccttttccaccaattcagtcttaaggagaactggctccagcatagaggaactgtgactgaaacggaggaaattttctgccacgtgtatataacagagcactcctatgtcagtgtgaaggcaaaagtttccagtatagcccaagagatcctaaaagtcgtggcagaaaagatccagtatgcagaagaggatctggctctggtggccatcacattctctggggaaaagcatgaacttcagccaaatgacttagtcatctccaaatccctcgaggcatctggtcgaatatatgtctaccggaaagacctggcggacactttgaacccatttgcagaaaatgaggaatcacagcaaaggtcgatgaggattttgggaatgaacacttgggatcttgctctggaattaatgaattttgattggagtctattcaattcaattcacgagcaagagctgatctacttcacgttcagcagacagggaagtggggaacacactgcaaatctcagccttctgctccagagatgcaatgaggtccagctttgggtggccacggagattctgctctgcagccagctgggcaagcgagtgcagctggtgaaaaaattcatcaaaattgcggctcactgcaaagcccagagaaacctgaattctttctttgccattgtgatgggtctcaacactgcttctgtcagtcgactgtcgcagacctgggagaaaatccctgggaagtttaagaaacttttctctgaacttgaaagtttaacagatccttccctaaatcacaaagcctacagagatgcattcaaaaagatgaagccaccaaaaatccctttcatgcccttattgcttaaagatgtaacatttattcatgaaggaaataaaacttttttggataatcttgtcaattttgaaaagctgcatatgatcgcagacactgtccgaaccctgagacactgcaggactaaccagtttgaggaagacaagatatggcagattattatcccctcatggcagcaagtttatgctgtgaagagtgactttacacactcagaaacctcctccccgcaactcccgctgactcctgtccccacagtgtcttgctttgcttgtccattggctcaaaatcactggtgagtttagcaggggtgaccttgcccctaacc

SEQ ID NO: 429965 - DNA, 235 bp, Homo sapiens
cagctatcaatatttatcatatttctgccatgcacatggttctggggcccagataagcagctgctcttcttatccacctctttgcttaccttgtgtttgttttttttttctttgcagagaccctcctggatgacttccttctcacgtacactgtcttcatgacaactgatgacttgtgccaggctctgttaaggcaatatccttcattatcttcaggctgctgtgtccacttcct

SEQ ID NO: 429966 - DNA, 674 bp, Homo sapiens
taaatgatggtataatgaactatcatataaccaattaaacatgacatatgtaaataattttggcaagtggataaagtgcttataagaatatgagaatataaaactatggaataattgcaaatgtatatgtgtatccgcaatagttataaatgcatatgcataaatcattgcaaatcaatgcaattatttgtgtgtgtatatatatacatggttatataaaaatcagaacaaaaatagacctaagtgtaaccagtgttaacatggtattgttatcttagatgagtaaattttactttttgtcttaaactgttctgtgttccaaacaatgactaaatgttataggaaataactgcaagaggactccactttctgaccgctgagcagtgagagctatttgtgatgccactggtatcattgtatagagtgtgcagaacttaattaatccactttaagttctatttacttttaagtatttttctttggcaagtttcactttttaagtgtactgtgtaggcctactgctgctactcttgtatttctgattattccttttttttttttttttttcaaataaagaaaagcatgaacttcagccaaatgacttagtcatctccaaatccctcgaggcatctggtcgaatatatgtctaccggaaagacctggcggacactttg

SEQ ID NO: 429967 - DNA, 2100 bp, Homo sapiens
cagagctcttagcagccagatggactcagttcccagtgaaaggacagggatggcaagatcttttagcatttaggggatgcctttgttagtaaccgttcacaatgggcagctcccggctgagggtctttgaccctcatttggagaggaaagattccgccgcggcgctctcagaccgagagctgcccttgcctaccttcgatgtgccttatttcaaatacatcgacgaggaggatgaggacgatgaatggagcagccgctcgcagtcttccaccgaggatgactcagtggactctctgctctctgacagatatgtggtggtgtccgggaccccggagaagattttggagcaccttttgaatgacttgcacctggaagaagtccaggacaaagaaacagagaccctcctggatgacttccttctcacgtacactgtcttcatgacaactgatgacttgtgccaggctctgttaaggcactattctgctaagaagtatcaaggcaaagaggaaaactcagatgttccgcgtaggaaacgtaaagtcttgcatcttgtttcccagtggattgctctgtacaaagactggttacctgaagatgaacattcaaaaatgtttttaaagaccatatataggaatgtactggatgatgtttatgaatatccaatacttgaaaaagaattgaaagaatttcaaaagatacttggaatgcaccgtcgtcacactgtagatgaatattcaccacaaaaaaagaataaagcccttttccaccaattcagtcttaaggagaactggctccagcatagaggaactgtgactgaaacggaggaaattttctgccacgtgtatataacagagcactcctatgtcagtgtgaaggcaaaagtttccagtatagcccaagagatcctaaaagtcgtggcagaaaagatccagtatgcagaagaggatctggctctggtggccatcacattctctggggaaaagcatgaacttcagccaaatgacttagtcatctccaaatccctcgaggcatctggtcgaatatatgtctaccggaaagacctggcggacactttgaacccatttgcagaaaatgaggaatcacagcaaaggtcgatgaggattttgggaatgaacacttgggatcttgctctggaattaatgaattttgattggagtctattcaattcaattcacgagcaagagctgatctacttcacgttcagcagacagggaagtggggaacacactgcaaatctcagccttctgctccagagatgcaatgaggtccagctttgggtggccacggagattctgctctgcagccagctgggcaagcgagtgcagctggtgaaaaaattcatcaaaattgcggctcactgcaaagcccagagaaacctgaattctttctttgccattgtgatgggtctcaacactgcttctgtcagtcgactgtcgcagacctgggagaaaatccctgggaagtttaagaaacttttctctgaacttgaaagtttaacagatccttccctaaatcacaaagcctacagagatgcattcaaaaagatgaagccaccaaaaatccctttcatgcccttattgcttaaagatgtaacatttattcatgaaggaaataaaacttttttggataatcttgtcaattttgaaaagctgcatatgatcgcagacactgtccgaaccctgagacactgcaggactaaccagtttggtgagtaattgaagtcaggtgcggaatgtaaattgactctacgttggtaccaactgtggtcacaagtattgggtggtaatcaatttaaacagattgaaaagtatcatatgtatatacatacgcatattgtatatatatagtagattgtctctttgtttcctcactgcatgttggggatgcagaggaagacaagatatggcagattattatcccctcatggcagcaagtttatgctgtgaagagtgactttacacactcagaaacctcctccccgcaactcccgctgactcctgtccccacagtgtcttgctttgcttgtccattggctcaaaatcactggtgagtttagcaggggtgaccttgcccctaacc

SEQ ID NO: 429968 - DNA, 7769 bp, Homo sapiens
caagagtgcctgaggctggatcagaaatagccacgatcgtccagtttgattgattgattgattgatttagttgtgatggagtctcgctgtatttcccaggctggagtgcagaggcacgatctccgttcactgcagcctccacctccccggttcaagtgattctcctgcctcagccttccgagtagctgggattacaggcacctgccaccacgcccggctgatttttgtgtttttagtagagacagggtttcgccatgttggccaggctggtcttgaactcctgacctcaggtgagccacccgcctcggcctcccaaagtgttgggattacaggcgtgagccactgcccccagccccagcttgatcttgaacctcctgtgtgtgggcagagagacatggccctgctactgcttgaacggcttccggagacagtgacttgtttcctttttccctctgaactatgccgtagggccaggtgagctgctgtgaaggactcattcttggtagccggcagttactggcaacttgtgagcttggtgggctcctactaacgcacctgggacaccaggctgctgggctcccctctaggcagcctcccctccaggcagcctcaccagcagctcccctgagccatggagaccccagaggtccccgtgggctcgctaatcgactttgggcctgaggcacccacctcttctcccctggaggcaccaccccctgtgctgcaggacggcgatggctccctgggggacggtgcatcagagagtgagaccactgagtctgcggacagtgagaatgacatgggcgagtcgccctcgcacccgtcctgggaccaagaccgccgttcctcctccaacgagtccttctcctccaaccagagcaccgagtctacccaggatgaagagaccctggcactcagggacttcatgcgtggctacgtggagaagatcttctctggaggggaggacttggatcaggaggagaaagccaagtttggagagtactgcagcagtgaaaatggaaaaggccgggagtggtttgctcgatacgtgagtgcccagcgctgcaactccaagtgtgtctcagaggcaaccttctaccgcctggtgcagtcttttgcagtggtgctgttcgagtgtcatcagatggatgactttgggcctgccaagaacctcatgaccatgtgcttcacctactaccacatcggaaaaccacagctgctgcccccggagtcccgggagaagcccgcgggcagcatcgactcctacctgaaatccgcaaacagctggctggccgaaaagaaggacatcgccgagcggctgctgaagaacacctcggccaggactgagaatgtcaagggcttcttcggggggctggagaccaagctgaaggggcccctggccaggaggaacgaggaagacgagaacaaaccccaggagaagcggcccagggctgtgaccgcgtacagccccgaggacgaaaagaagggggagaagatctacctgtacacgcacctgaagcaacagcccatctggcacactctgaggttctggaatgcagccttttttgacgctgtccattgtgagaggacaaagcgatctcccactaccagaggggatgctggagaggaggaggagaagagggagaagtggtgccacatgacccaggaggagcgcgacgacagcctccggttcaacgagaacatcaccttcgggcagctgggcacattcacgcacaacatgctggcctttggactgaacaagaagctgtgcaatgacttcctgaagaagcaggctgtgattggcaacctggatgaagagcaatacaagctgcttagtgaccacattgagcaaatggccactgagtaggccccagaggtcgcactccgcaggaggactgaggccatgtgccattctcccgggcccagcgcccggccgtcaccccacccgatgacctgcatgaagccagcagcacccagagccactcctgctgccctagaactagcggttagaagaatccgctgttcctccctcatctcctctgcctgtgtctgcgacccccatccatgtgccaaagtgtcccttgggtcacacagctaaagccgaggtgaccagttgtaccccgagtgccaggcttgtgagatgagaccaagagggaggaggggaaggactccatgggccatcgtgggccaagggctggcgagggtgggggtgggcaagggatgcaggcaggacagccatgaggtggggctgcagccggcacacccagtggtggagggccggcgctgccactcacggtgggtggccgtgggccaccttccctgcaatgggtgcacacgcggctcccatccagccctctcagcgtggggctgtggctggtcctcactattccccagtctcccgctgtggggcaggaacaggaagtgacgggaaccttgaggaggaaacgcctgtgttagggagagagtgggtgcggtgtagaggatgctcttggccggctggagcaagacctggctcccaccagagggacgtgtgtgtgcctgcagacggcccgggagctgtgtgtctccgccagagtcacagcagtgccgaggtgtccgcggcagaccacacagaccgtctgaaatgcgcccgcctggcggacagctcccttctgaagcagagaagcctccatggtcacgaagcagcgttgtgctgtgtgtccctcgcaagaagcacaggaaagagaagtttctttagtagccactagacaaccaccctttctgaaagcaaacagtgctgctctttattccagacaaggcaggaaagtctgagttgggagtgacagtggctggagagaagcagatctgtgcaacgtgcagggcaagccagtggcgtggcctctgcctctaagcgctgagcattgggccccttccccaccagacctttgtagctcctccagcctctgcagagactcccttcacctcgcacttactgcctgggaaccacggcccttctcttctgtgggtctgtaccaggtactccaggccagcccatgggcccggggcctgaccccaacacctgcatgctgggtccagagccttctgtttcaccgtgcgtggacactgctaggccgcctggggtcccctgcctcctgcctgtcgctgccgtggtccctgactgcgaaataggcccgcggggctctccctcctcctgccatcctcccctcccgcccttcctggctacctcctctgacatgcggtcagataagtcccgtcttgtttgtgagtaccacagaaacgcctgagagtcacttacccggccactgcttggaaggtttccctccggggaatgcctccctggaatgttccagagacggaacattctctagagacaacagtctgtgctgcagattggttggatcacagaatgtgtgtctggggcattatctgaaacgtggtgtcatctgatgcatttggaccatatgctgccagactgcagaacgggggagccggggctcagggcccctgactgcatggtgcatgagtgatctcagcctagcgatgccgctggccagaccgtgaccatgctgccagtgtgctcgccatgagctgggtcagggctggggagttgtgcaggctggggtgacccttcccccatcattgggccccaacgggcatgtctccaccgaatccatttagagaaatgtcagagcgaggggtgtgtggacacccctcgctctgatgccaactgcagataatacacacctcctgcagcgtccagccacggctccagggcactgctctcctccttgcaccggtgaaactcaggccacactcaagggctgactgtccaggcgctcccttcagccgcctcgtcgtcagcgttcttagtcatgcattattcgtgttagctgaaatgcattcagactttgttctgcggtgcccacaggacttacccctgtatgtacaggatttttgtatgaaagttttgtttgattctgagactctcttgggaacgctggagagcttgtgcacagcctctggaaggaaaggcagcgctgacttcgttgggcttttttccaagcactttaacttcagaaatggtcttgacacttttttctccacatagactcttgaaatagccatttcaggggaggaaagggttggggttttctttgtttgtttgtttgtttccccctttactacctgttcttgtagatctagctcctcagagttggaggaaggctgacagagaaggtctcctctgtgctccatccacacaggatgccggagagacagccccttgtgctgtgagcagagcaggcagtggctctggaggctgcctgtggtctccttccagctgtggctgacagtggctctggccagggttgcttggagaaggctcagtgtgcctgggacagggcttaccacctgccaccaaggtttcctctcttcccccaggacctgggcagagcaggcatgagctgggctgtggtgcagagcaagcagacccagccacactgctcaaaggtccctgcgtggggaggtgtcacaccaggggcacacccagggccacctgggtgtaggagagctctggtggcccctccgtaaactcaggaagtgtcaggtgatttcctagggagaggttcccagtcccagcaggcagaatgcccaaaaccaggagcacgaaggcctgtcatccatggggccattgcaggcaccctgccgcccgaccttgagggctgtgccaatcctagtgaaccaaaatgcaaacaactcacacaagtgaaaagctccctgctttgaaaacaggacatgttgacaggcagcatggtatgtttttagcctttgttacagttttagcaacattgatgtctaagaggggccgtggtaatagattgcatctgccctgtgcatgcgcatgtttaaccacaggccagagaactcaattctgatgtcgtaagttctctgtaagtgaaatggggtagactgtatgattttcctattgccaaaagaaagaaagggggccaaacagctctgaaatttccaaaaaatggctagagggagagtccagtttctgagctctgtacccaaattaaaatcctgatgttcaggttaatccaagcaacacgcattgggtttaaaaccagcaccgaggcccagtgggggaatcacagacatcaccaagtctcgtcttctttccttcctgtgagttgaaaccaaacaggcctctcgctcactcctcccagcccagtaatgctgaggagttcagttgtgaggaaagaaggctggagctgtgagattcgcttttccctaggctgttccgcgtgggttaccttatcaccctggagcacttggtattccagacccctgacatgaggaatgcaggttcacactgtaaagagtttgtgaaaggtttcagtctaactggggttccttagctggaagccagggctggaagctacaggcctgaccttcctgggtcccactatctgttggcattttttttttttttttttagacggagttttgctcttgttgcccaggctggagtgcagtgacacaatctctactcactgcaacctccacctcccgggttcaagcaattctcctgcctcagcctcctgagtagctgggatgacaggtgcacgccaccacgcccggctaatttttatatttttggtagagatggggtttcaccatgctggccaggctggtctcgaactcctgacctcaggtgatcccccccacctcagcctcccaaagtgctgggattacaggcgtgaggcatcacacctgcctctgttggctttttagttaggaaggatccagctaggcccgtgtggttagatcagctttgttactgaattacctaaaaccagaccacagcacagccagggagcccagtagtgtttccaagaacagtgtggagcttgagaaagagaactttaaaaattagagggtccctttctgcagaggaagggatgctcgcagggtggcagtggcccagccccagcctcagggacggggagggagagccccctctgggcccagcaggcaggtgttctgaggctggtccctcctcagtttccgcagccacaaggcgaaacggccagattctcactcaaggtcgttctcactccttttcctgtcccgtttccagtcccactgagccattcacttctgctgaaccatttttcttaggatgcagccgtctcactcccttgtcctgtaaatcgtgtattcatgttgatgattcttggagataggtttcactttttcccagctgcgtccacaggaaaggggagtcggatgccagctgcaccccgcctggctcgcacaggctaagaccacagacagagcagggcttcccggagccacacaggccacgcaccccaggaacccttgctgccgcgggccaggaacaggaatgtgttggtgcctgagacaccaaatggaagaagcacatcaagactgttctcctgcggccaacactggcccggaagccgccctccatacaggccctcagggggcctgccttctgcgcctcagtcccccgtgcatccctgggcctgggtatcacatgctctccaggaaagggacggaatcaatcgtgtgaccgatgggctcgcaaggatgggtgccgccgtgggagccctgcctctggtgctggcaagggattgggtttgtgtgggtgtctctagcctgcagagtgcagtgagtgagagtccttgggagcgcggcgctgcctgtagctgtgcctggggatgcacgtggccacgggatttcagtgggacagcgctcccacaggggctgggggtgggggtggggtttcttagttactgttggaaagggaaaaattcaccatatccaaggggagagacgatgggctgggtttgtttactccaacttcccttctacacccctcctgcaggacagtacgatttggggagaacccagctccccactttatctgcagactctgggacctgacaaaacagtcagagcctgagtgcactgcagcctgaactcccttgagcagcgctataagggactttgcactttaaaaaggggatgcctgtcagtaaatcccctgtgcattgactagaactggggggctgcgcccgctccctccttaatcctagatgatttgctcatgaaatagaggtgggggacgaccgcatgcactctgggaggtgcagccctaaggggtggactccagatctccctgcaagagacagcttggcttggctttggctgttggggaggagtccctgccatcccggtgagcctggggctgttgcttagggtcttctgggtggacacgtggagaaagagaaggcaaacgttggaacactaggaaaagctagaaattcagacaacacacatggatccccttaaaacatgtaaatgtgtcagaacacggttgacctgccgccttcttgaacctggtggcccccgttggaactatcagtggcgtctcccatgcacacgccctctgctttctctttcctagactcgcggtgctcacatccagacattaccttgttggtagcccccaagtggcgtgcagtgacaccagtatcttctctgttgcatttttgcaatcttgtgtcccgctcggtgatgttctacaaactctgttttaaggttgagaaagtttcaagggtgaagatctcaaaacagtgctaaaatcaaaggtgtttgctgtgaagaaaaacatgtgtatatattgcaccttgagttgtcagaaggtagaaactgaaataaactaactttaaaaaaagaag

SEQ ID NO: 429969 - DNA, 436 bp, Homo sapiens
agttaggcatgaggaacagcacagaagacagacaacattacccttaaaacatgtaaatgtgtcagaacacggttgacctgccgccttcttgaacctggtggcccccgttggaactatcagtggcgtctcccatgcacacgccctctgctttctctttcctagactcgcggtgctcacatccagacattaccttgttggtagcccccaagtggcgtgcagtgacaccagtatcttctctgttgcatttttgcaatcttgtgtcccgctcggtgatgttctacaaactctgttttaaggttgagaaagtttcaagggtgaagatctcaaaacagtgctaaaatcaaaggtgtttgctgtgaagaaaaacatgtgtatatattgcaccttgagttgtcagaaggtagaaactgaaataaactaactttaaaaaaagaag

SEQ ID NO: 429970 - DNA, 7328 bp, Homo sapiens
ccgagtctgacggcgccggttcgctgcccggtccgcccgcggtgagagatgccgtagggccaggtgagctgctgtgaaggactcattcttggtagccggcagttactggcaacttgtgagcttggtgggctcctactaacgcacctgggacaccaggctgctgggctcccctctaggcagcctcccctccaggcagcctcaccagcagctcccctgagccatggagaccccagaggtccccgtgggctcgctaatcgactttgggcctgaggcacccacctcttctcccctggaggcaccaccccctgtgctgcaggacggcgatggctccctgggggacggtgcatcagagagtgagaccactgagtctgcggacagtgagaatgacatgggcgagtcgccctcgcacccgtcctgggaccaagaccgccgttcctcctccaacgagtccttctcctccaaccagagcaccgagtctacccaggatgaagagaccctggcactcagggacttcatgcgtggctacgtggagaagatcttctctggaggggaggacttggatcaggaggagaaagccaagtttggagagtactgcagcagtgaaaatggaaaaggccgggagtggtttgctcgatacgtgagtgcccagcgctgcaactccaagtgtgtctcagaggcaaccttctaccgcctggtgcagtcttttgcagtggtgctgttcgagtgtcatcagatggatgactttgggcctgccaagaacctcatgaccatgtgcttcacctactaccacatcggaaaaccacagctgctgcccccggagtcccgggagaagcccgcgggcagcatcgactcctacctgaaatccgcaaacagctggctggccgaaaagaaggacatcgccgagcggctgctgaagaacacctcggccaggactgagaatgtcaagggcttcttcggggggctggagaccaagctgaaggggcccctggccaggaggaacgaggaagacgagaacaaaccccaggagaagcggcccagggctgtgaccgcgtacagccccgaggacgaaaagaagggggagaagatctacctgtacacgcacctgaagcaacagcccatctggcacactctgaggttctggaatgcagccttttttgacgctgtccattgtgagaggacaaagcgatctcccactaccagggagaagtggtgccacatgacccaggaggagcgcgacgacagcctccggttcaacgagaacatcaccttcgggcagctgggcacattcacgcacaacatgctggcctttggactgaacaagaagctgtgcaatgacttcctgaagaagcaggctgtgattggcaacctggatgaagagcaatacaagctgcttagtgaccacattgagcaaatggccactgagtaggccccagaggtcgcactccgcaggaggactgaggccatgtgccattctcccgggcccagcgcccggccgtcaccccacccgatgacctgcatgaagccagcagcacccagagccactcctgctgccctagaactagcggttagaagaatccgctgttcctccctcatctcctctgcctgtgtctgcgacccccatccatgtgccaaagtgtcccttgggtcacacagctaaagccgaggtgaccagttgtaccccgagtgccaggcttgtgagatgagaccaagagggaggaggggaaggactccatgggccatcgtgggccaagggctggcgagggtgggggtgggcaagggatgcaggcaggacagccatgaggtggggctgcagccggcacacccagtggtggagggccggcgctgccactcacggtgggtggccgtgggccaccttccctgcaatgggtgcacacgcggctcccatccagccctctcagcgtggggctgtggctggtcctcactattccccagtctcccgctgtggggcaggaacaggaagtgacgggaaccttgaggaggaaacgcctgtgttagggagagagtgggtgcggtgtagaggatgctcttggccggctggagcaagacctggctcccaccagagggacgtgtgtgtgcctgcagacggcccgggagctgtgtgtctccgccagagtcacagcagtgccgaggtgtccgcggcagaccacacagaccgtctgaaatgcgcccgcctggcggacagctcccttctgaagcagagaagcctccatggtcacgaagcagcgttgtgctgtgtgtccctcgcaagaagcacaggaaagagaagtttctttagtagccactagacaaccaccctttctgaaagcaaacagtgctgctctttattccagacaaggcaggaaagtctgagttgggagtgacagtggctggagagaagcagatctgtgcaacgtgcagggcaagccagtggcgtggcctctgcctctaagcgctgagcattgggccccttccccaccagacctttgtagctcctccagcctctgcagagactcccttcacctcgcacttactgcctgggaaccacggcccttctcttctgtgggtctgtaccaggtactccaggccagcccatgggcccggggcctgaccccaacacctgcatgctgggtccagagccttctgtttcaccgtgcgtggacactgctaggccgcctggggtcccctgcctcctgcctgtcgctgccgtggtccctgactgcgaaataggcccgcggggctctccctcctcctgccatcctcccctcccgcccttcctggctacctcctctgacatgcggtcagataagtcccgtcttgtttgtgagtaccacagaaacgcctgagagtcacttacccggccactgcttggaaggtttccctccggggaatgcctccctggaatgttccagagacggaacattctctagagacaacagtctgtgctgcagattggttggatcacagaatgtgtgtctggggcattatctgaaacgtggtgtcatctgatgcatttggaccatatgctgccagactgcagaacgggggagccggggctcagggcccctgactgcatggtgcatgagtgatctcagcctagcgatgccgctggccagaccgtgaccatgctgccagtgtgctcgccatgagctgggtcagggctggggagttgtgcaggctggggtgacccttcccccatcattgggccccaacgggcatgtctccaccgaatccatttagagaaatgtcagagcgaggggtgtgtggacacccctcgctctgatgccaactgcagataatacacacctcctgcagcgtccagccacggctccagggcactgctctcctccttgcaccggtgaaactcaggccacactcaagggctgactgtccaggcgctcccttcagccgcctcgtcgtcagcgttcttagtcatgcattattcgtgttagctgaaatgcattcagactttgttctgcggtgcccacaggacttacccctgtatgtacaggatttttgtatgaaagttttgtttgattctgagactctcttgggaacgctggagagcttgtgcacagcctctggaaggaaaggcagcgctgacttcgttgggcttttttccaagcactttaacttcagaaatggtcttgacacttttttctccacatagactcttgaaatagccatttcaggggaggaaagggttggggttttctttgtttgtttgtttgtttccccctttactacctgttcttgtagatctagctcctcagagttggaggaaggctgacagagaaggtctcctctgtgctccatccacacaggatgccggagagacagccccttgtgctgtgagcagagcaggcagtggctctggaggctgcctgtggtctccttccagctgtggctgacagtggctctggccagggttgcttggagaaggctcagtgtgcctgggacagggcttaccacctgccaccaaggtttcctctcttcccccaggacctgggcagagcaggcatgagctgggctgtggtgcagagcaagcagacccagccacactgctcaaaggtccctgcgtggggaggtgtcacaccaggggcacacccagggccacctgggtgtaggagagctctggtggcccctccgtaaactcaggaagtgtcaggtgatttcctagggagaggttcccagtcccagcaggcagaatgcccaaaaccaggagcacgaaggcctgtcatccatggggccattgcaggcaccctgccgcccgaccttgagggctgtgccaatcctagtgaaccaaaatgcaaacaactcacacaagtgaaaagctccctgctttgaaaacaggacatgttgacaggcagcatggtatgtttttagcctttgttacagttttagcaacattgatgtctaagaggggccgtggtaatagattgcatctgccctgtgcatgcgcatgtttaaccacaggccagagaactcaattctgatgtcgtaagttctctgtaagtgaaatggggtagactgtatgattttcctattgccaaaagaaagaaagggggccaaacagctctgaaatttccaaaaaatggctagagggagagtccagtttctgagctctgtacccaaattaaaatcctgatgttcaggttaatccaagcaacacgcattgggtttaaaaccagcaccgaggcccagtgggggaatcacagacatcaccaagtctcgtcttctttccttcctgtgagttgaaaccaaacaggcctctcgctcactcctcccagcccagtaatgctgaggagttcagttgtgaggaaagaaggctggagctgtgagattcgcttttccctaggctgttccgcgtgggttaccttatcaccctggagcacttggtattccagacccctgacatgaggaatgcaggttcacactgtaaagagtttgtgaaaggtttcagtctaactggggttccttagctggaagccagggctggaagctacaggcctgaccttcctgggtcccactatctgttggcattttttttttttttttttagacggagttttgctcttgttgcccaggctggagtgcagtgacacaatctctactcactgcaacctccacctcccgggttcaagcaattctcctgcctcagcctcctgagtagctgggatgacaggtgcacgccaccacgcccggctaatttttatatttttggtagagatggggtttcaccatgctggccaggctggtctcgaactcctgacctcaggtgatcccccccacctcagcctcccaaagtgctgggattacaggcgtgaggcatcacacctgcctctgttggctttttagttaggaaggatccagctaggcccgtgtggttagatcagctttgttactgaattacctaaaaccagaccacagcacagccagggagcccagtagtgtttccaagaacagtgtggagcttgagaaagagaactttaaaaattagagggtccctttctgcagaggaagggatgctcgcagggtggcagtggcccagccccagcctcagggacggggagggagagccccctctgggcccagcaggcaggtgttctgaggctggtccctcctcagtttccgcagccacaaggcgaaacggccagattctcactcaaggtcgttctcactccttttcctgtcccgtttccagtcccactgagccattcacttctgctgaaccatttttcttaggatgcagccgtctcactcccttgtcctgtaaatcgtgtattcatgttgatgattcttggagataggtttcactttttcccagctgcgtccacaggaaaggggagtcggatgccagctgcaccccgcctggctcgcacaggctaagaccacagacagagcagggcttcccggagccacacaggccacgcaccccaggaacccttgctgccgcgggccaggaacaggaatgtgttggtgcctgagacaccaaatggaagaagcacatcaagactgttctcctgcggccaacactggcccggaagccgccctccatacaggccctcagggggcctgccttctgcgcctcagtcccccgtgcatccctgggcctgggtatcacatgctctccaggaaagggacggaatcaatcgtgtgaccgatgggctcgcaaggatgggtgccgccgtgggagccctgcctctggtgctggcaagggattgggtttgtgtgggtgtctctagcctgcagagtgcagtgagtgagagtccttgggagcgcggcgctgcctgtagctgtgcctggggatgcacgtggccacgggatttcagtgggacagcgctcccacaggggctgggggtgggggtggggtttcttagttactgttggaaagggaaaaattcaccatatccaaggggagagacgatgggctgggtttgtttactccaacttcccttctacacccctcctgcaggacagtacgatttggggagaacccagctccccactttatctgcagactctgggacctgacaaaacagtcagagcctgagtgcactgcagcctgaactcccttgagcagcgctataagggactttgcactttaaaaaggggatgcctgtcagtaaatcccctgtgcattgactagaactggggggctgcgcccgctccctccttaatcctagatgatttgctcatgaaatagaggtgggggacgaccgcatgcactctgggaggtgcagccctaaggggtggactccagatctccctgcaagagacagcttggcttggctttggctgttggggaggagtccctgccatcccggtgagcctggggctgttgcttagggtcttctgggtggacacgtggagaaagagaaggcaaacgttggaacactaggaaaagctagaaattcagacaacacacatggatccccttaaaacatgtaaatgtgtcagaacacggttgacctgccgccttcttgaacctggtggcccccgttggaactatcagtggcgtctcccatgcacacgccctctgctttctctttcctagactcgcggtgctcacatccagacattaccttgttggtagcccccaagtggcgtgcagtgacaccagtatcttctctgttgcatttttgcaatcttgtgtcccgctcggtgatgttctacaaactctgttttaaggttgagaaagtttcaagggtgaagatctcaaaacagtgctaaaatcaaaggtgtttgctgtgaagaaaaacatgtgtatatattgcaccttgagttgtcagaaggtagaaactgaaataaactaactttaaaaaaagaag

SEQ ID NO: 429971 - DNA, 7250 bp, Homo sapiens
ccgagtctgacggcgccggttcgctgcccggtccgcccgcggtgagagatgccgtagggccaggtgagctgctgtgaaggactcattcttggtagccggcagttactggcaacttgtgagcttggtgggctcctactaacgcacctgggacaccaggctgctgggctcccctctaggcagcctcccctccaggcagcctcaccagcagctcccctgagccatggagaccccagaggtccccgtgggctcgctaatcgactttgggcctgaggcacccacctcttctcccctggaggcaccaccccctgtgctgcaggacggcgatggctccctgggggacggtgcatcagagagtgagaccactgagtctgcggacagtgagaatgacatgggcgagtcgccctcgcacccgtcctgggaccaagaccgccgttcctcctccaacgagtccttctcctccaaccagagcaccgagtctacccaggatgaagagaccctggcactcagggacttcatgcgtggctacgtggagaagatcttctctggaggggaggacttggatcaggaggagaaagccaagtttggagagtactgcagcagtgaaaatggaaaaggccgggagtggtttgctcgatacgtgagtgcccagcgctgcaactccaagtgtgtctcagaggcaaccttctaccgcctggtgcagtcttttgcagtggtgctgttcgagtgtcatcagatggatgactttgggcctgccaagaacctcatgaccatgtgcttcacctactaccacatcggaaaaccacagctgctgcccccggagtcccgggagaagcccgcgggcagcatcgactcctacctgaaatccgcaaacagctggctggccgaaaagaaggacatcgccgagcggctgctgaagaacacctcggccaggactgagaatgtcaagggcttcttcggggggctggagaccaagctgaaggggcccctggccaggaggaacgaggaagacgagaacaaaccccaggagaagcggcccagggctgtgaccgcgtacagccccgaggacgaaaagaagggggagaagatctacctgtacacgcacctgaagcaacagcccatctgggagaagtggtgccacatgacccaggaggagcgcgacgacagcctccggttcaacgagaacatcaccttcgggcagctgggcacattcacgcacaacatgctggcctttggactgaacaagaagctgtgcaatgacttcctgaagaagcaggctgtgattggcaacctggatgaagagcaatacaagctgcttagtgaccacattgagcaaatggccactgagtaggccccagaggtcgcactccgcaggaggactgaggccatgtgccattctcccgggcccagcgcccggccgtcaccccacccgatgacctgcatgaagccagcagcacccagagccactcctgctgccctagaactagcggttagaagaatccgctgttcctccctcatctcctctgcctgtgtctgcgacccccatccatgtgccaaagtgtcccttgggtcacacagctaaagccgaggtgaccagttgtaccccgagtgccaggcttgtgagatgagaccaagagggaggaggggaaggactccatgggccatcgtgggccaagggctggcgagggtgggggtgggcaagggatgcaggcaggacagccatgaggtggggctgcagccggcacacccagtggtggagggccggcgctgccactcacggtgggtggccgtgggccaccttccctgcaatgggtgcacacgcggctcccatccagccctctcagcgtggggctgtggctggtcctcactattccccagtctcccgctgtggggcaggaacaggaagtgacgggaaccttgaggaggaaacgcctgtgttagggagagagtgggtgcggtgtagaggatgctcttggccggctggagcaagacctggctcccaccagagggacgtgtgtgtgcctgcagacggcccgggagctgtgtgtctccgccagagtcacagcagtgccgaggtgtccgcggcagaccacacagaccgtctgaaatgcgcccgcctggcggacagctcccttctgaagcagagaagcctccatggtcacgaagcagcgttgtgctgtgtgtccctcgcaagaagcacaggaaagagaagtttctttagtagccactagacaaccaccctttctgaaagcaaacagtgctgctctttattccagacaaggcaggaaagtctgagttgggagtgacagtggctggagagaagcagatctgtgcaacgtgcagggcaagccagtggcgtggcctctgcctctaagcgctgagcattgggccccttccccaccagacctttgtagctcctccagcctctgcagagactcccttcacctcgcacttactgcctgggaaccacggcccttctcttctgtgggtctgtaccaggtactccaggccagcccatgggcccggggcctgaccccaacacctgcatgctgggtccagagccttctgtttcaccgtgcgtggacactgctaggccgcctggggtcccctgcctcctgcctgtcgctgccgtggtccctgactgcgaaataggcccgcggggctctccctcctcctgccatcctcccctcccgcccttcctggctacctcctctgacatgcggtcagataagtcccgtcttgtttgtgagtaccacagaaacgcctgagagtcacttacccggccactgcttggaaggtttccctccggggaatgcctccctggaatgttccagagacggaacattctctagagacaacagtctgtgctgcagattggttggatcacagaatgtgtgtctggggcattatctgaaacgtggtgtcatctgatgcatttggaccatatgctgccagactgcagaacgggggagccggggctcagggcccctgactgcatggtgcatgagtgatctcagcctagcgatgccgctggccagaccgtgaccatgctgccagtgtgctcgccatgagctgggtcagggctggggagttgtgcaggctggggtgacccttcccccatcattgggccccaacgggcatgtctccaccgaatccatttagagaaatgtcagagcgaggggtgtgtggacacccctcgctctgatgccaactgcagataatacacacctcctgcagcgtccagccacggctccagggcactgctctcctccttgcaccggtgaaactcaggccacactcaagggctgactgtccaggcgctcccttcagccgcctcgtcgtcagcgttcttagtcatgcattattcgtgttagctgaaatgcattcagactttgttctgcggtgcccacaggacttacccctgtatgtacaggatttttgtatgaaagttttgtttgattctgagactctcttgggaacgctggagagcttgtgcacagcctctggaaggaaaggcagcgctgacttcgttgggcttttttccaagcactttaacttcagaaatggtcttgacacttttttctccacatagactcttgaaatagccatttcaggggaggaaagggttggggttttctttgtttgtttgtttgtttccccctttactacctgttcttgtagatctagctcctcagagttggaggaaggctgacagagaaggtctcctctgtgctccatccacacaggatgccggagagacagccccttgtgctgtgagcagagcaggcagtggctctggaggctgcctgtggtctccttccagctgtggctgacagtggctctggccagggttgcttggagaaggctcagtgtgcctgggacagggcttaccacctgccaccaaggtttcctctcttcccccaggacctgggcagagcaggcatgagctgggctgtggtgcagagcaagcagacccagccacactgctcaaaggtccctgcgtggggaggtgtcacaccaggggcacacccagggccacctgggtgtaggagagctctggtggcccctccgtaaactcaggaagtgtcaggtgatttcctagggagaggttcccagtcccagcaggcagaatgcccaaaaccaggagcacgaaggcctgtcatccatggggccattgcaggcaccctgccgcccgaccttgagggctgtgccaatcctagtgaaccaaaatgcaaacaactcacacaagtgaaaagctccctgctttgaaaacaggacatgttgacaggcagcatggtatgtttttagcctttgttacagttttagcaacattgatgtctaagaggggccgtggtaatagattgcatctgccctgtgcatgcgcatgtttaaccacaggccagagaactcaattctgatgtcgtaagttctctgtaagtgaaatggggtagactgtatgattttcctattgccaaaagaaagaaagggggccaaacagctctgaaatttccaaaaaatggctagagggagagtccagtttctgagctctgtacccaaattaaaatcctgatgttcaggttaatccaagcaacacgcattgggtttaaaaccagcaccgaggcccagtgggggaatcacagacatcaccaagtctcgtcttctttccttcctgtgagttgaaaccaaacaggcctctcgctcactcctcccagcccagtaatgctgaggagttcagttgtgaggaaagaaggctggagctgtgagattcgcttttccctaggctgttccgcgtgggttaccttatcaccctggagcacttggtattccagacccctgacatgaggaatgcaggttcacactgtaaagagtttgtgaaaggtttcagtctaactggggttccttagctggaagccagggctggaagctacaggcctgaccttcctgggtcccactatctgttggcattttttttttttttttttagacggagttttgctcttgttgcccaggctggagtgcagtgacacaatctctactcactgcaacctccacctcccgggttcaagcaattctcctgcctcagcctcctgagtagctgggatgacaggtgcacgccaccacgcccggctaatttttatatttttggtagagatggggtttcaccatgctggccaggctggtctcgaactcctgacctcaggtgatcccccccacctcagcctcccaaagtgctgggattacaggcgtgaggcatcacacctgcctctgttggctttttagttaggaaggatccagctaggcccgtgtggttagatcagctttgttactgaattacctaaaaccagaccacagcacagccagggagcccagtagtgtttccaagaacagtgtggagcttgagaaagagaactttaaaaattagagggtccctttctgcagaggaagggatgctcgcagggtggcagtggcccagccccagcctcagggacggggagggagagccccctctgggcccagcaggcaggtgttctgaggctggtccctcctcagtttccgcagccacaaggcgaaacggccagattctcactcaaggtcgttctcactccttttcctgtcccgtttccagtcccactgagccattcacttctgctgaaccatttttcttaggatgcagccgtctcactcccttgtcctgtaaatcgtgtattcatgttgatgattcttggagataggtttcactttttcccagctgcgtccacaggaaaggggagtcggatgccagctgcaccccgcctggctcgcacaggctaagaccacagacagagcagggcttcccggagccacacaggccacgcaccccaggaacccttgctgccgcgggccaggaacaggaatgtgttggtgcctgagacaccaaatggaagaagcacatcaagactgttctcctgcggccaacactggcccggaagccgccctccatacaggccctcagggggcctgccttctgcgcctcagtcccccgtgcatccctgggcctgggtatcacatgctctccaggaaagggacggaatcaatcgtgtgaccgatgggctcgcaaggatgggtgccgccgtgggagccctgcctctggtgctggcaagggattgggtttgtgtgggtgtctctagcctgcagagtgcagtgagtgagagtccttgggagcgcggcgctgcctgtagctgtgcctggggatgcacgtggccacgggatttcagtgggacagcgctcccacaggggctgggggtgggggtggggtttcttagttactgttggaaagggaaaaattcaccatatccaaggggagagacgatgggctgggtttgtttactccaacttcccttctacacccctcctgcaggacagtacgatttggggagaacccagctccccactttatctgcagactctgggacctgacaaaacagtcagagcctgagtgcactgcagcctgaactcccttgagcagcgctataagggactttgcactttaaaaaggggatgcctgtcagtaaatcccctgtgcattgactagaactggggggctgcgcccgctccctccttaatcctagatgatttgctcatgaaatagaggtgggggacgaccgcatgcactctgggaggtgcagccctaaggggtggactccagatctccctgcaagagacagcttggcttggctttggctgttggggaggagtccctgccatcccggtgagcctggggctgttgcttagggtcttctgggtggacacgtggagaaagagaaggcaaacgttggaacactaggaaaagctagaaattcagacaacacacatggatccccttaaaacatgtaaatgtgtcagaacacggttgacctgccgccttcttgaacctggtggcccccgttggaactatcagtggcgtctcccatgcacacgccctctgctttctctttcctagactcgcggtgctcacatccagacattaccttgttggtagcccccaagtggcgtgcagtgacaccagtatcttctctgttgcatttttgcaatcttgtgtcccgctcggtgatgttctacaaactctgttttaaggttgagaaagtttcaagggtgaagatctcaaaacagtgctaaaatcaaaggtgtttgctgtgaagaaaaacatgtgtatatattgcaccttgagttgtcagaaggtagaaactgaaataaactaactttaaaaaaagaag

SEQ ID NO: 429972 - DNA, 4979 bp, Homo sapiens
ccgagtctgacggcgccggttcgctgcccggtccgcccgcggtgagagatgccgtagggccaggtgagctgctgtgaaggactcattcttggtagccggcagttactggcaacttgtgagcttggtgggctcctactaacgcacctgggacaccaggctgctgggctcccctctaggcagcctcccctccaggcagcctcaccagcagctcccctgagccatggagaccccagaggtccccgtgggctcgctaatcgactttgggcctgaggcacccacctcttctcccctggaggcaccaccccctgtgctgcaggacggcgatggctccctgggggacggtgcatcagagagtgagaccactgagtctgcggacagtgagaatgacatgggcgagtcgccctcgcacccgtcctgggaccaagaccgccgttcctcctccaacgagtccttctcctccaaccagagcaccgagtctacccaggatgaagagaccctggcactcagggacttcatgcgtggctacgtggagaagatcttctctggaggggaggacttggatcaggaggagaaagccaagtttggagagtactgcagcagtgaaaatggaaaaggccgggagtggtttgctcgatacgtgagtgcccagcgctgcaactccaagtgtgtctcagaggcaaccttctaccgcctggtgcagtcttttgcagtggtgctgttcgagtgtcatcagatggatgactttgggcctgccaagaacctcatgaccatgtgcttcacctactaccacatcggaaaaccacagctgctgcccccggagtcccgggagaagcccgcgggcagcatcgactcctacctgaaatccgcaaacagctggctggccgaaaagaaggacatcgccgagcggctgctgaagaacacctcggccaggactgagaatgtcaagggcttcttcggggggctggagaccaagctgaaggggcccctggccaggaggaacgaggaagacgagaacaaaccccaggagaagcggcccagggctgtgaccgcgtacagccccgaggacgaaaagaagggggagaagatctacctgtacacgcacctgaagcaacagcccatctggcacactctgaggttctggaatgcagccttttttgacgctgtccattgtgagaggacaaagcgatctcccactaccagggagaagtggtgccacatgacccaggaggagcgcgacgacagcctccggttcaacgagaacatcaccttcgggcagctgggcacattcacgcacaacatgctggcctttggactgaacaagaagctgtgcaatgacttcctgaagaagcaggctgtgattggcaacctggatgaagagcaatacaagctgcttagtgaccacattgagcaaatggccactgagtaggccccagaggtcgcactccgcaggaggactgaggccatgtgccattctcccgggcccagcgcccggccgtcaccccacccgatgacctgcatgaagccagcagcacccagagccactcctgctgccctagaactagcggttagaagaatccgctgttcctccctcatctcctctgcctgtgtctgcgacccccatccatgtgccaaagtgtcccttgggtcacacagctaaagccgaggtgaccagttgtaccccgagtgccaggcttgtgagatgagaccaagagggaggaggggaaggactccatgggccatcgtgggccaagggctggcgagggtgggggtgggcaagggatgcaggcaggacagccatgaggtggggctgcagccggcacacccagtggtggagggccggcgctgccactcacggtgggtggccgtgggccaccttccctgcaatgggtgcacacgcggctcccatccagccctctcagcgtggggctgtggctggtcctcactattccccagtctcccgctgtggggcaggaacaggaagtgacgggaaccttgaggaggaaacgcctgtgttagggagagagtgggtgcggtgtagaggatgctcttggccggctggagcaagacctggctcccaccagagggacgtgtgtgtgcctgcagacggcccgggagctgtgtgtctccgccagagtcacagcagtgccgaggtgtccgcggcagaccacacagaccgtctgaaatgcgcccgcctggcggacagctcccttctgaagcagagaagcctccatggtcacgaagcagcgttgtgctgtgtgtccctcgcaagaagcacaggaaagagaagtttctttagtagccactagacaaccaccctttctgaaagcaaacagtgctgctctttattccagacaaggcaggaaagtctgagttgggagtgacagtggctggagagaagcagatctgtgcaacgtgcagggcaagccagtggcgtggcctctgcctctaagcgctgagcattgggccccttccccaccagacctttgtagctcctccagcctctgcagagactcccttcacctcgcacttactgcctgggaaccacggcccttctcttctgtgggtctgtaccaggtactccaggccagcccatgggcccggggcctgaccccaacacctgcatgctgggtccagagccttctgtttcaccgtgcgtggacactgctaggccgcctggggtcccctgcctcctgcctgtcgctgccgtggtccctgactgcgaaataggcccgcggggctctccctcctcctgccatcctcccctcccgcccttcctggctacctcctctgacatgcggtcagataagtcccgtcttgtttgtgagtaccacagaaacgcctgagagtcacttacccggccactgcttggaaggtttccctccggggaatgcctccctggaatgttccagagacggaacattctctagagacaacagtctgtgctgcagattggttggatcacagaatgtgtgtctggggcattatctgaaacgtggtgtcatctgatgcatttggaccatatgctgccagactgcagaacgggggagccggggctcagggcccctgactgcatggtgcatgagtgatctcagcctagcgatgccgctggccagaccgtgaccatgctgccagtgtgctcgccatgagctgggtcagggctggggagttgtgcaggctggggtgacccttcccccatcattgggccccaacgggcatgtctccaccgaatccatttagagaaatgtcagagcgaggggtgtgtggacacccctcgctctgatgccaactgcagataatacacacctcctgcagcgtccagccacggctccagggcactgctctcctccttgcaccggtgaaactcaggccacactcaagggctgactgtccaggcgctcccttcagccgcctcgtcgtcagcgttcttagtcatgcattattcgtgttagctgaaatgcattcagactttgttctgcggtgcccacaggacttacccctgtatgtacaggatttttgtatgaaagttttgtttgattctgagactctcttgggaacgctggagagcttgtgcacagcctctggaaggaaaggcagcgctgacttcgttgggcttttttccaagcactttaacttcagaaatggtcttgacacttttttctccacatagactcttgaaatagccatttcaggggaggaaagggttggggttttctttgtttgtttgtttgtttccccctttactacctgttcttgtagatctagctcctcagagttggaggaaggctgacagagaaggtctcctctgtgctccatccacacaggatgccggagagacagccccttgtgctgtgagcagagcaggcagtggctctggaggctgcctgtggtctccttccagctgtggctgacagtggctctggccagggttgcttggagaaggctcagtgtgcctgggacagggcttaccacctgccaccaaggtttcctctcttcccccaggacctgggcagagcaggcatgagctgggctgtggtgcagagcaagcagacccagccacactgctcaaaggtccctgcgtggggaggtgtcacaccaggggcacacccagggccacctgggtgtaggagagctctggtggcccctccgtaaactcaggaagtgtcaggtgatttcctagggagaggttcccagtcccagcaggcagaatgcccaaaaccaggagcacgaaggcctgtcatccatggggccattgcaggcaccctgccgcccgaccttgagggctgtgccaatcctagtgaaccaaaatgcaaacaactcacacaagtgaaaagctccctgctttgaaaacaggacatgttgacaggcagcatggtatgtttttagcctttgttacagttttagcaacattgatgtctaagaggggccgtggtaatagattgcatctgccctgtgcatgcgcatgtttaaccacaggccagagaactcaattctgatgtcgtaagttctctgtaagtgaaatggggtagactgtatgattttcctattgccaaaagaaagaaagggggccaaacagctctgaaatttccaaaaaatggctagagggagagtccagtttctgagctctgtacccaaattaaaatcctgatgttcaggttaatccaagcaacacgcattgggtttaaaaccagcaccgaggcccagtgggggaatcacagacatcaccaagtctcgtcttctttccttcctgtgagttgaaaccaaacaggcctctcgctcactcctcccagcccagtaatgctgaggagttcagttgtgatgttctacaaactctgttttaaggttgagaaagtttcaagggtgaagatctcaaaacagtgctaaaatcaaaggtgtttgctgtgaagaaaaacatgtgtatatattgcaccttgagttgtcagaaggtagaaactgaaataaactaactttaaaaaaagaag

SEQ ID NO: 429973 - DNA, 1948 bp, Homo sapiens
ccgagtctgacggcgccggttcgctgcccggtccgcccgcggtgagagatgccgtagggccaggtgagctgctgtgaaggactcattcttggtagccggcagttactggcaacttgtgagcttggtgggctcctactaacgcacctgggacaccaggctgctgggctcccctctaggcagcctcccctccaggcagcctcaccagcagctcccctgagccatggagaccccagaggtccccgtgggctcgctaatcgactttgggcctgaggcacccacctcttctcccctggaggcaccaccccctgtgctgcaggacggcgatggctccctgggggacggtgcatcagagagtgagaccactgagtctgcggacagtgagaatgacatgggcgagtcgccctcgcacccgtcctgggaccaagaccgccgttcctcctccaacgagtccttctcctccaaccagagcaccgagtctacccaggatgaagagaccctggcactcagggacttcatgcgtggctacgtggagaagatcttctctggaggggaggacttggatcaggaggagaaagccaagtttggagagtactgcagcagtgaaaatggaaaaggccgggagtggtttgctcgatacgtgagtgcccagcgctgcaactccaagtgtgtctcagaggcaaccttctaccgcctggtgcagtcttttgcagtggtgctgttcgagtgtcatcagatggatgactttgggcctgccaagaacctcatgaccatgtgcttcacctactaccacatcggaaaaccacagctgctgcccccggagtcccgggagaagcccgcgggcagcatcgactcctacctgaaatccgcaaacagctggctggccgaaaagaaggacatcgccgagcggctgctgaagaacacctcggccaggactgagaatgtcaagggcttcttcggggggctggagaccaagctgaaggggcccctggccaggaggaacgaggaagacgagaacaaaccccaggagaagcggcccagggctgtgaccgcgtacagccccgaggacgaaaagaagggggagaagatctacctgtacacgcacctgaagcaacagcccatctggtaaggccgagcccgcggcttcccgtcaccctcttactgacggggccagcagtcactccccgggatcacttctagctgcctttgtccccatcagaatggcagaattctcacactcaccagagtggcagaataaaaagatgaacactcacaggcgttggtgaggatgtggagaaactggagctctcctgtatggctaggagcaatgtaaatgagcagccgctgagaaacagtctggcagttcctttaaaggtgaaacacaagagttactctgtgacccagcagctccactcctaggagtcgcccaagagaaaaacatgtcctcacaaaaccttgtacacaaatgtctgtagcaacgtcgtttattatggccccgaggtggaaaccaccttcatggctgtccagtgatgaatgggtaaacaaaatgtggtccatccgttgcatggactattagccagccatgaaaagcaatggcatgctgctccacgctgtagcagggatagacctgggaaacatcgtgaaactcagtggaagaagccagacacagaagcccaagtattgtatcatccctatgaaatgtccagaactgcagattcctagagacacagcagatgacagattgcccgggcagagggtggggaatggggagcagggcgtgactgctgatggggatggggcttctttatggggtgagagaatgttctggaaatggtggtggctgcacaactctgtgaatacactaaaaatcactgaattgtatgttttagagggtgaatttcatggcaagtgaattatatcctaattaagctcttacatatatatacgtgaa

SEQ ID NO: 429974 - DNA, 813 bp, Homo sapiens
ccgagtctgacggcgccggttcgctgcccggtccgcccgcggtgagagatgccgtagggccaggtgagctgctgtgaaggactcattcttggtagccggcagttactggcaacttgtgagcttggtgggctcctactaacgcacctgggacaccaggctgctgggctcccctctaggcagcctcccctccaggcagcctcaccagcagctcccctgagccatggagaccccagaggtccccgtgggctcgctaatcgactttgggcctgaggcacccacctcttctcccctggaggcaccaccccctgtgctgcaggacggcgatggctccctgggggacggtgcatcagagagtgagaccactgagtctgcggacagtgagaatgacatgggcgagtcgccctcgcacccgtcctgggaccaagaccgccgttcctcctccaacgagtccttctcctccaaccagagcaccgagtctacccaggatgaagagaccctggcactcagggacttcatgcgtggctacgtggagaagatcttctctggaggggaggacttggatcaggaggagaaagccaagtttggagagtactgcagcagtgaaaatggaaaaggccgggagtggtttgctcgatacgtgagtgcccagcgctgcaactccaagtgtgtctcagaggcaaccttctaccgcctggtgcagtcttttgcagtggtgctgttcgagtgtcatcagatggatgactttgggcctgccaagaacctcatgaccatgtgcttcacctactaccacatcggtaagacatgggtgggctg

SEQ ID NO: 429975 - DNA, 6271 bp, Homo sapiens
  misc_feature (3955)..(3955): n is a, c, g, or t
  misc_feature (3964)..(3964): n is a, c, g, or t
  misc_feature (3974)..(3974): n is a, c, g, or t
  misc_feature (4026)..(4026): n is a, c, g, or t
  misc_feature (4029)..(4029): n is a, c, g, or t
  misc_feature (4039)..(4039): n is a, c, g, or t
  misc_feature (4060)..(4060): n is a, c, g, or t
  misc_feature (4066)..(4066): n is a, c, g, or t
  misc_feature (4081)..(4081): n is a, c, g, or t
  misc_feature (4093)..(4093): n is a, c, g, or t
  misc_feature (4142)..(4142): n is a, c, g, or t
  misc_feature (4161)..(4161): n is a, c, g, or t
  misc_feature (4588)..(4589): n is a, c, g, or t
  misc_feature (4634)..(4634): n is a, c, g, or t
  misc_feature (4661)..(4661): n is a, c, g, or t
  misc_feature (4673)..(4673): n is a, c, g, or t
  misc_feature (4686)..(4686): n is a, c, g, or t
  misc_feature (4695)..(4695): n is a, c, g, or t
  misc_feature (6048)..(6048): n is a, c, g, or t
  misc_feature (6146)..(6146): n is a, c, g, or t
  misc_feature (6268)..(6268): n is a, c, g, or t
actggtgggcggtgaggggggaaagccccggatgttcgttggggattcaacatggcggcgggagtgtccgcggtggtggcggtgcaagagagctgagggaggcgcgagggcgcggagttccaggtcgagcagttaggccgcgagcgactgcggcgccgagccgatgagtaacccgaagcccctagaggagtggtcacctgcctgagggcacttctgtcccaccagcatcagaccaggccgcaccgagtccccggcaccatgtttgggaagaggaagaagcgggtggagatctccgcgccgtccaacttcgagcaccgcgtgcacacgggcttcgaccagcacgagcagaagttcacggggctgccccgccagtggcagagcctgatcgaggagtcggctcgccggcccaagcccctcgtcgaccccgcctgcatcacctccatccagcccggggcccccaagaccatcgtgcggggcagcaaaggtgccaaagatggggccctcacgctgctgctggacgagtttgagaacatgtcggtgacacgctccaactccctgcggagagacagcccgccgccgcccgcccgtgcccgccaggaaaatgggatgccagaggagccggccaccacggccagagggggcccagggaaggcaggcagccgaggccggttcgccggtcacagcgaggcgggtggcggcagtggtgacaggcgacgggcggggccagagaagaggcccaagtcttccagggagggctcagggggtccccaggagtcctcccgggacaaacgccccctctccgggcctgatgtcggcaccccccagcctgctggtctggccagtggggcgaaactggcagctggccggccctttaacacctacccgagggctgacacggaccacccatcccggggtgcccagggggagcctcatgacgtggcccctaacgggccatcagcggggggcctggccatcccccagtcctcctcctcctcctcccggcctcccacccgagcccgaggtgcccccagccctggagtgctgggaccccacgcctcagagccccagctggcccctccagcctgcacccccgccgcccctgctgttcctgggccccctggcccccgctcaccacagcgggagccacagcgagtatcccatgagcagttccgggctgccctgcagctggtggtggacccaggcgacccccgctcctacctggacaacttcatcaagattggcgagggctccacgggcatcgtgtgcatcgccaccgtgcgcagctcgggcaagctggtggccgtcaagaagatggacctgcgcaagcagcagaggcgcgagctgctcttcaacgaggtggtaatcatgagggactaccagcacgagaatgtggtggagatgtacaacagctacctggtgggggacgagctctgggtggtcatggagttcctggaaggaggcgccctcaccgacatcgtcacccacaccaggatgaacgaggagcagatcgcggccgtgtgccttgcagtgctgcaggccctgtcggtgctccacgcccagggcgtcatccaccgggacatcaagagcgactcgatcctgctgacccatgatggcagggtgaagctgtcagactttgggttctgcgcccaggtgagcaaggaagtgccccgaaggaagtcgctggtcggcacgccctactggatggccccagagctcatctcccgccttccctacgggccagaggtagacatctggtcgctggggataatggtgattgagatggtggacggagagcccccctacttcaacgagccacccctcaaagccatgaagatgattcgggacaacctgccaccccgactgaagaacctgcacaaggtgtcgccatccctgaagggcttcctggaccgcctgctggtgcgagaccctgcccagcgggccacggcagccgagctgctgaagcacccattcctggccaaggcagggccgcctgccagcatcgtgcccctcatgcgccagaaccgcaccagatgaggcccagcgcccttcccctcaaccaaagagccccccgggtcacccccgccccactgaggccagtagggggccaggcctcccactcctcccagcccgggagatgctccgcgtggcaccaccctccttgctgggggtagatgagaccctactactgaactccagttttgatctcgtgacttttagaaaaacacagggactcgtgggagcaagcgaggctcccaggacccccaccctctgggacaggccctcccccatgttcttctgtctccaggaagggcagcggccctcccatcactggaagtctgcagtgggggtcgctgggggtggagagaacactaagaggtgaacatgtatgagtgtgtgcacgcgtgtgagtgtgcatgtgtgtgtgtgcaaaggtccagccaccccgtcctccagcctgcaaggggtgtctggcgccttgcctgacacccagccccctctccccctgagccattgtgggggtcgatcatgaatgtccgaagagtggccttttcccgtagccctgcgccccctttctgtggctggatggggagacaggtcagggccccccaccctctccagcccctgcagcaaatgactactgcacctggacagcctcctcttttctagaagtctatttatattgtcattttataacactctagcccctgcccttattgggggacagatggtccctgtcctgcggggtggccctggcagaaccactgcctgaagaaccaggttcctgcccggtcagcgcagccccagcccgcccacccctgcctcgagttagttttacaattaaaacattgtcttgttttgtgtctgtgtgcgatgtgtggggggcagggggccctgcccggctgtcttgggtgggaatttgcagggagagggtctggatctgggagcaaaccacgattccagccaaggcagggcaagggtggggtggggagtggggagttcaggtcatagcagccagtaagctcccccagcctgccactccccagaatggggcaggattgtccccacccctggaagcagccagtttgccacagtccatgtgcagactgatcccagtttgccaaatctgcaatttcctggaaccttttaaaggctgtcttgagcgcgtttggtgagtaggagctaacccaagttagtaaattgaaggccatttggcaaattggtcagtgggcagatgggcttttggggattgactgaggctgactggcctggagctgctggcttcggagagacaccctgtgaagtgtgtccttccacgcaggagcccagagccgagcccacgctggggggaatctgactggcatggaggtggccatgccaccatcgctgctgcagctgcatcctggcactttgcgcctcaggccctgttgggctccactttctgcatcctccccagcccccagggaggcagtggagtggggagagagccaggagtgagcctccgtccccaaagccagccaggcgtcatcagcaccagagacctcagcctggtcctctcgggaagtgagtggccagggcagagattccaggttagtccacgcctcccacccttcacaggtcctgaccccaagaatcagagcactgtgtgtgtggcagggcctatgccaagtgcaaacacagcctagatggatcatcacagagtgaaacccagcggtgcaagcagctgtgctctctgcgatgtattggaggcttaggtgaggtggatgcctttctggaaaaaaaaaaaatgctaacattggcaaaagaagaaatagaaaacaagaccaaaataactgtctcctcactgcacacacactccagaataaataaaaggtttcaggcttgaatgcactttcaaatgagattttttttttttttttgagacggagtatcgctctgtcgcccaggctggagtgcngtggcacgntcttggctcnctgcaacttctgcctcctgggttcaagcgattctcctgcctcagcctcccangtngctgggattncaggcgcttgccaccacgccnggctanttttttgtattttgngtagagactggntttcgccatcttggccagactggtcttgaactcctgacctcgtgatccncccacctcagcctcccaangtgctgggattacaggcatgagccaccatgcctggcctcaaatgaggtttaccagactttgaaggagcaggtaattccttctaccttgtgaacaagttgttccagaaagatagcagctcaggaggcctctgtgaccatggttccagacccagataaggacggcaaagaacagagcatctcagaaacgcaaggctcacagccagggtgcccggcgaccccacgggcactgagaacagctagctctaggagctccactctcctgctgaagaaaccacgggctcagagacggggagctccctcgcccagccacatctgtgaccccacggtaactctgctggttttggtgccttcagtcactcactgcaggtttgttttgttttgttttgttttgagtttttttgttttttgttttttgtttttagagacnngatgttgctatgttgcctaggctggtttcgaactcctggcctcangggatcctccctccttggccccgcaangtgctgggattncaggcgtgagccnccgtgcccngcccgctcactgcagtttgaaggcatggctttgggtggcgtggggtgaaagctgcccgaggccccgttcctccccacgtggctgcctcctgccagagccagtcaggaaaacagaccccaactagagttgtttcaaatggcagggatttggtaccggtggttggatcatgacaaagctctgagaaggctggaggagccacagagtgccaagtgcccagcaatcattagaggaaggaggctgctgccacctgtgtggctagaggaacagaggggccaatggcattccccaaaccccactctcgcctctgtctggccagagcagaatggcttcttccagcttcccaccctggactcccacccaggagcctcctcctggcagacccttcctgaccccaccggcccggggggtctacagatccatgtttcaggcgtccgcctggagcggaacaggggagtgcttaggacaagggtggtgccagaggatccactctgcccacatttagttgaccagctgaggcactccacgggaatgaatgactctcgacaggtgccggaggtgaggaggggcccggaggcccaggaggggcacagggatggattcgtccgcctgggggctggaggtgtgtttacagagccccaaaataaacaatgcaaccaggtcagaccagcggttctcacagtgtggttcccagaccagcagcatcactgggagcttactggacacgcaaataaatccctgtgtgccaccccagctgcatcagatgctggtggggcccagtgatctgtatttaacacaccctccgggggatgccggtgcccactcacgtttgagaacccctgcgatccacgactgccctcccgtgtaaaaggcccacctctgtgggactccaagtcatcagcaccctagggtccttccgtctttttccttcctcctgggacacctgcctctcccatgtcgtattagagaattccttatgctcccaagtgggcacggggagaggaaggcactcctctttaaggaccgacccagaggttttgccattgcttcactggccagagcttagtcacgcagcctcacccagaggcaagggaggttggaaaatgtagtgtttgtgtgtgtctaacacaaattctattaccatgcagtcaggattctccactcttgctctttcattagatttgctgggcttcaccctggactttctgatttagtgacagaacagagaacccagaggcagacccagatgtgtacaagggcttcatatacaatcaggagatttaataatcatgctaggggccgggtgcagtggctcacgcctgtaatcccaagcactttggggagccgaggcaggcngatcacttgaggtcaggagtttgagaccagcctgggcaacaaagtgagaccctgtctctactaaaaataacaaaaattagccgggcgtggtggtgggngcctgtaatcccagctcctcgggtggctgaggcatgagaatcacttgaacccaggaggcagaggtttcagtgagctgagatcacatcactgcactccagcctgggtgacagagtgagattcngtc

SEQ ID NO: 429976 - DNA, 6198 bp, Homo sapiens
  misc_feature (3882)..(3882): n is a, c, g, or t
  misc_feature (3891)..(3891): n is a, c, g, or t
  misc_feature (3901)..(3901): n is a, c, g, or t
  misc_feature (3953)..(3953): n is a, c, g, or t
  misc_feature (3956)..(3956): n is a, c, g, or t
  misc_feature (3966)..(3966): n is a, c, g, or t
  misc_feature (3987)..(3987): n is a, c, g, or t
  misc_feature (3993)..(3993): n is a, c, g, or t
  misc_feature (4008)..(4008): n is a, c, g, or t
  misc_feature (4020)..(4020): n is a, c, g, or t
  misc_feature (4069)..(4069): n is a, c, g, or t
  misc_feature (4088)..(4088): n is a, c, g, or t
  misc_feature (4515)..(4516): n is a, c, g, or t
  misc_feature (4561)..(4561): n is a, c, g, or t
  misc_feature (4588)..(4588): n is a, c, g, or t
  misc_feature (4600)..(4600): n is a, c, g, or t
  misc_feature (4613)..(4613): n is a, c, g, or t
  misc_feature (4622)..(4622): n is a, c, g, or t
  misc_feature (5975)..(5975): n is a, c, g, or t
  misc_feature (6073)..(6073): n is a, c, g, or t
  misc_feature (6195)..(6195): n is a, c, g, or t
actggtgggcggtgaggggggaaagccccggatgttcgttggggattcaacatggcggcgggagtgtccgcggtggtggcggtgcaagagagctgagggaggcgcgagggcgcggagttccaggtcgagcagttaggccgcgagcgactgcggcgccgagccggccgcaccgagtccccggcaccatgtttgggaagaggaagaagcgggtggagatctccgcgccgtccaacttcgagcaccgcgtgcacacgggcttcgaccagcacgagcagaagttcacggggctgccccgccagtggcagagcctgatcgaggagtcggctcgccggcccaagcccctcgtcgaccccgcctgcatcacctccatccagcccggggcccccaagaccatcgtgcggggcagcaaaggtgccaaagatggggccctcacgctgctgctggacgagtttgagaacatgtcggtgacacgctccaactccctgcggagagacagcccgccgccgcccgcccgtgcccgccaggaaaatgggatgccagaggagccggccaccacggccagagggggcccagggaaggcaggcagccgaggccggttcgccggtcacagcgaggcgggtggcggcagtggtgacaggcgacgggcggggccagagaagaggcccaagtcttccagggagggctcagggggtccccaggagtcctcccgggacaaacgccccctctccgggcctgatgtcggcaccccccagcctgctggtctggccagtggggcgaaactggcagctggccggccctttaacacctacccgagggctgacacggaccacccatcccggggtgcccagggggagcctcatgacgtggcccctaacgggccatcagcggggggcctggccatcccccagtcctcctcctcctcctcccggcctcccacccgagcccgaggtgcccccagccctggagtgctgggaccccacgcctcagagccccagctggcccctccagcctgcacccccgccgcccctgctgttcctgggccccctggcccccgctcaccacagcgggagccacagcgagtatcccatgagcagttccgggctgccctgcagctggtggtggacccaggcgacccccgctcctacctggacaacttcatcaagattggcgagggctccacgggcatcgtgtgcatcgccaccgtgcgcagctcgggcaagctggtggccgtcaagaagatggacctgcgcaagcagcagaggcgcgagctgctcttcaacgaggtggtaatcatgagggactaccagcacgagaatgtggtggagatgtacaacagctacctggtgggggacgagctctgggtggtcatggagttcctggaaggaggcgccctcaccgacatcgtcacccacaccaggatgaacgaggagcagatcgcggccgtgtgccttgcagtgctgcaggccctgtcggtgctccacgcccagggcgtcatccaccgggacatcaagagcgactcgatcctgctgacccatgatggcagggtgaagctgtcagactttgggttctgcgcccaggtgagcaaggaagtgccccgaaggaagtcgctggtcggcacgccctactggatggccccagagctcatctcccgccttccctacgggccagaggtagacatctggtcgctggggataatggtgattgagatggtggacggagagcccccctacttcaacgagccacccctcaaagccatgaagatgattcgggacaacctgccaccccgactgaagaacctgcacaaggtgtcgccatccctgaagggcttcctggaccgcctgctggtgcgagaccctgcccagcgggccacggcagccgagctgctgaagcacccattcctggccaaggcagggccgcctgccagcatcgtgcccctcatgcgccagaaccgcaccagatgaggcccagcgcccttcccctcaaccaaagagccccccgggtcacccccgccccactgaggccagtagggggccaggcctcccactcctcccagcccgggagatgctccgcgtggcaccaccctccttgctgggggtagatgagaccctactactgaactccagttttgatctcgtgacttttagaaaaacacagggactcgtgggagcaagcgaggctcccaggacccccaccctctgggacaggccctcccccatgttcttctgtctccaggaagggcagcggccctcccatcactggaagtctgcagtgggggtcgctgggggtggagagaacactaagaggtgaacatgtatgagtgtgtgcacgcgtgtgagtgtgcatgtgtgtgtgtgcaaaggtccagccaccccgtcctccagcctgcaaggggtgtctggcgccttgcctgacacccagccccctctccccctgagccattgtgggggtcgatcatgaatgtccgaagagtggccttttcccgtagccctgcgccccctttctgtggctggatggggagacaggtcagggccccccaccctctccagcccctgcagcaaatgactactgcacctggacagcctcctcttttctagaagtctatttatattgtcattttataacactctagcccctgcccttattgggggacagatggtccctgtcctgcggggtggccctggcagaaccactgcctgaagaaccaggttcctgcccggtcagcgcagccccagcccgcccacccctgcctcgagttagttttacaattaaaacattgtcttgttttgtgtctgtgtgcgatgtgtggggggcagggggccctgcccggctgtcttgggtgggaatttgcagggagagggtctggatctgggagcaaaccacgattccagccaaggcagggcaagggtggggtggggagtggggagttcaggtcatagcagccagtaagctcccccagcctgccactccccagaatggggcaggattgtccccacccctggaagcagccagtttgccacagtccatgtgcagactgatcccagtttgccaaatctgcaatttcctggaaccttttaaaggctgtcttgagcgcgtttggtgagtaggagctaacccaagttagtaaattgaaggccatttggcaaattggtcagtgggcagatgggcttttggggattgactgaggctgactggcctggagctgctggcttcggagagacaccctgtgaagtgtgtccttccacgcaggagcccagagccgagcccacgctggggggaatctgactggcatggaggtggccatgccaccatcgctgctgcagctgcatcctggcactttgcgcctcaggccctgttgggctccactttctgcatcctccccagcccccagggaggcagtggagtggggagagagccaggagtgagcctccgtccccaaagccagccaggcgtcatcagcaccagagacctcagcctggtcctctcgggaagtgagtggccagggcagagattccaggttagtccacgcctcccacccttcacaggtcctgaccccaagaatcagagcactgtgtgtgtggcagggcctatgccaagtgcaaacacagcctagatggatcatcacagagtgaaacccagcggtgcaagcagctgtgctctctgcgatgtattggaggcttaggtgaggtggatgcctttctggaaaaaaaaaaaatgctaacattggcaaaagaagaaatagaaaacaagaccaaaataactgtctcctcactgcacacacactccagaataaataaaaggtttcaggcttgaatgcactttcaaatgagattttttttttttttttgagacggagtatcgctctgtcgcccaggctggagtgcngtggcacgntcttggctcnctgcaacttctgcctcctgggttcaagcgattctcctgcctcagcctcccangtngctgggattncaggcgcttgccaccacgccnggctanttttttgtattttgngtagagactggntttcgccatcttggccagactggtcttgaactcctgacctcgtgatccncccacctcagcctcccaangtgctgggattacaggcatgagccaccatgcctggcctcaaatgaggtttaccagactttgaaggagcaggtaattccttctaccttgtgaacaagttgttccagaaagatagcagctcaggaggcctctgtgaccatggttccagacccagataaggacggcaaagaacagagcatctcagaaacgcaaggctcacagccagggtgcccggcgaccccacgggcactgagaacagctagctctaggagctccactctcctgctgaagaaaccacgggctcagagacggggagctccctcgcccagccacatctgtgaccccacggtaactctgctggttttggtgccttcagtcactcactgcaggtttgttttgttttgttttgttttgagtttttttgttttttgttttttgtttttagagacnngatgttgctatgttgcctaggctggtttcgaactcctggcctcangggatcctccctccttggccccgcaangtgctgggattncaggcgtgagccnccgtgcccngcccgctcactgcagtttgaaggcatggctttgggtggcgtggggtgaaagctgcccgaggccccgttcctccccacgtggctgcctcctgccagagccagtcaggaaaacagaccccaactagagttgtttcaaatggcagggatttggtaccggtggttggatcatgacaaagctctgagaaggctggaggagccacagagtgccaagtgcccagcaatcattagaggaaggaggctgctgccacctgtgtggctagaggaacagaggggccaatggcattccccaaaccccactctcgcctctgtctggccagagcagaatggcttcttccagcttcccaccctggactcccacccaggagcctcctcctggcagacccttcctgaccccaccggcccggggggtctacagatccatgtttcaggcgtccgcctggagcggaacaggggagtgcttaggacaagggtggtgccagaggatccactctgcccacatttagttgaccagctgaggcactccacgggaatgaatgactctcgacaggtgccggaggtgaggaggggcccggaggcccaggaggggcacagggatggattcgtccgcctgggggctggaggtgtgtttacagagccccaaaataaacaatgcaaccaggtcagaccagcggttctcacagtgtggttcccagaccagcagcatcactgggagcttactggacacgcaaataaatccctgtgtgccaccccagctgcatcagatgctggtggggcccagtgatctgtatttaacacaccctccgggggatgccggtgcccactcacgtttgagaacccctgcgatccacgactgccctcccgtgtaaaaggcccacctctgtgggactccaagtcatcagcaccctagggtccttccgtctttttccttcctcctgggacacctgcctctcccatgtcgtattagagaattccttatgctcccaagtgggcacggggagaggaaggcactcctctttaaggaccgacccagaggttttgccattgcttcactggccagagcttagtcacgcagcctcacccagaggcaagggaggttggaaaatgtagtgtttgtgtgtgtctaacacaaattctattaccatgcagtcaggattctccactcttgctctttcattagatttgctgggcttcaccctggactttctgatttagtgacagaacagagaacccagaggcagacccagatgtgtacaagggcttcatatacaatcaggagatttaataatcatgctaggggccgggtgcagtggctcacgcctgtaatcccaagcactttggggagccgaggcaggcngatcacttgaggtcaggagtttgagaccagcctgggcaacaaagtgagaccctgtctctactaaaaataacaaaaattagccgggcgtggtggtgggngcctgtaatcccagctcctcgggtggctgaggcatgagaatcacttgaacccaggaggcagaggtttcagtgagctgagatcacatcactgcactccagcctgggtgacagagtgagattcngtc

SEQ ID NO: 429977 - DNA, 6275 bp, Homo sapiens
  misc_feature (3959)..(3959): n is a, c, g, or t
  misc_feature (3968)..(3968): n is a, c, g, or t
  misc_feature (3978)..(3978): n is a, c, g, or t
  misc_feature (4030)..(4030): n is a, c, g, or t
  misc_feature (4033)..(4033): n is a, c, g, or t
  misc_feature (4043)..(4043): n is a, c, g, or t
  misc_feature (4064)..(4064): n is a, c, g, or t
  misc_feature (4070)..(4070): n is a, c, g, or t
  misc_feature (4085)..(4085): n is a, c, g, or t
  misc_feature (4097)..(4097): n is a, c, g, or t
  misc_feature (4146)..(4146): n is a, c, g, or t
  misc_feature (4165)..(4165): n is a, c, g, or t
  misc_feature (4592)..(4593): n is a, c, g, or t
  misc_feature (4638)..(4638): n is a, c, g, or t
  misc_feature (4665)..(4665): n is a, c, g, or t
  misc_feature (4677)..(4677): n is a, c, g, or t
  misc_feature (4690)..(4690): n is a, c, g, or t
  misc_feature (4699)..(4699): n is a, c, g, or t
  misc_feature (6052)..(6052): n is a, c, g, or t
  misc_feature (6150)..(6150): n is a, c, g, or t
  misc_feature (6272)..(6272): n is a, c, g, or t
ccacaggaagaatatagctaggacggtcaccggttgttatttcatcacgagggcggggattggacgttactgtgactgtgggcccgtcggcagacatgaatggaggcgcgagggcgcggagttccaggtcgagcagttaggccgcgagcgactgcggcgccgagccgatgagtaacccgaagcccctagaggagtggtcacctgcctgagggcacttctgtcccaccagcatcagaccaggccgcaccgagtccccggcaccatgtttgggaagaggaagaagcgggtggagatctccgcgccgtccaacttcgagcaccgcgtgcacacgggcttcgaccagcacgagcagaagttcacggggctgccccgccagtggcagagcctgatcgaggagtcggctcgccggcccaagcccctcgtcgaccccgcctgcatcacctccatccagcccggggcccccaagaccatcgtgcggggcagcaaaggtgccaaagatggggccctcacgctgctgctggacgagtttgagaacatgtcggtgacacgctccaactccctgcggagagacagcccgccgccgcccgcccgtgcccgccaggaaaatgggatgccagaggagccggccaccacggccagagggggcccagggaaggcaggcagccgaggccggttcgccggtcacagcgaggcgggtggcggcagtggtgacaggcgacgggcggggccagagaagaggcccaagtcttccagggagggctcagggggtccccaggagtcctcccgggacaaacgccccctctccgggcctgatgtcggcaccccccagcctgctggtctggccagtggggcgaaactggcagctggccggccctttaacacctacccgagggctgacacggaccacccatcccggggtgcccagggggagcctcatgacgtggcccctaacgggccatcagcggggggcctggccatcccccagtcctcctcctcctcctcccggcctcccacccgagcccgaggtgcccccagccctggagtgctgggaccccacgcctcagagccccagctggcccctccagcctgcacccccgccgcccctgctgttcctgggccccctggcccccgctcaccacagcgggagccacagcgagtatcccatgagcagttccgggctgccctgcagctggtggtggacccaggcgacccccgctcctacctggacaacttcatcaagattggcgagggctccacgggcatcgtgtgcatcgccaccgtgcgcagctcgggcaagctggtggccgtcaagaagatggacctgcgcaagcagcagaggcgcgagctgctcttcaacgaggtggtaatcatgagggactaccagcacgagaatgtggtggagatgtacaacagctacctggtgggggacgagctctgggtggtcatggagttcctggaaggaggcgccctcaccgacatcgtcacccacaccaggatgaacgaggagcagatcgcggccgtgtgccttgcagtgctgcaggccctgtcggtgctccacgcccagggcgtcatccaccgggacatcaagagcgactcgatcctgctgacccatgatggcagggtgaagctgtcagactttgggttctgcgcccaggtgagcaaggaagtgccccgaaggaagtcgctggtcggcacgccctactggatggccccagagctcatctcccgccttccctacgggccagaggtagacatctggtcgctggggataatggtgattgagatggtggacggagagcccccctacttcaacgagccacccctcaaagccatgaagatgattcgggacaacctgccaccccgactgaagaacctgcacaaggtgtcgccatccctgaagggcttcctggaccgcctgctggtgcgagaccctgcccagcgggccacggcagccgagctgctgaagcacccattcctggccaaggcagggccgcctgccagcatcgtgcccctcatgcgccagaaccgcaccagatgaggcccagcgcccttcccctcaaccaaagagccccccgggtcacccccgccccactgaggccagtagggggccaggcctcccactcctcccagcccgggagatgctccgcgtggcaccaccctccttgctgggggtagatgagaccctactactgaactccagttttgatctcgtgacttttagaaaaacacagggactcgtgggagcaagcgaggctcccaggacccccaccctctgggacaggccctcccccatgttcttctgtctccaggaagggcagcggccctcccatcactggaagtctgcagtgggggtcgctgggggtggagagaacactaagaggtgaacatgtatgagtgtgtgcacgcgtgtgagtgtgcatgtgtgtgtgtgcaaaggtccagccaccccgtcctccagcctgcaaggggtgtctggcgccttgcctgacacccagccccctctccccctgagccattgtgggggtcgatcatgaatgtccgaagagtggccttttcccgtagccctgcgccccctttctgtggctggatggggagacaggtcagggccccccaccctctccagcccctgcagcaaatgactactgcacctggacagcctcctcttttctagaagtctatttatattgtcattttataacactctagcccctgcccttattgggggacagatggtccctgtcctgcggggtggccctggcagaaccactgcctgaagaaccaggttcctgcccggtcagcgcagccccagcccgcccacccctgcctcgagttagttttacaattaaaacattgtcttgttttgtgtctgtgtgcgatgtgtggggggcagggggccctgcccggctgtcttgggtgggaatttgcagggagagggtctggatctgggagcaaaccacgattccagccaaggcagggcaagggtggggtggggagtggggagttcaggtcatagcagccagtaagctcccccagcctgccactccccagaatggggcaggattgtccccacccctggaagcagccagtttgccacagtccatgtgcagactgatcccagtttgccaaatctgcaatttcctggaaccttttaaaggctgtcttgagcgcgtttggtgagtaggagctaacccaagttagtaaattgaaggccatttggcaaattggtcagtgggcagatgggcttttggggattgactgaggctgactggcctggagctgctggcttcggagagacaccctgtgaagtgtgtccttccacgcaggagcccagagccgagcccacgctggggggaatctgactggcatggaggtggccatgccaccatcgctgctgcagctgcatcctggcactttgcgcctcaggccctgttgggctccactttctgcatcctccccagcccccagggaggcagtggagtggggagagagccaggagtgagcctccgtccccaaagccagccaggcgtcatcagcaccagagacctcagcctggtcctctcgggaagtgagtggccagggcagagattccaggttagtccacgcctcccacccttcacaggtcctgaccccaagaatcagagcactgtgtgtgtggcagggcctatgccaagtgcaaacacagcctagatggatcatcacagagtgaaacccagcggtgcaagcagctgtgctctctgcgatgtattggaggcttaggtgaggtggatgcctttctggaaaaaaaaaaaatgctaacattggcaaaagaagaaatagaaaacaagaccaaaataactgtctcctcactgcacacacactccagaataaataaaaggtttcaggcttgaatgcactttcaaatgagattttttttttttttttgagacggagtatcgctctgtcgcccaggctggagtgcngtggcacgntcttggctcnctgcaacttctgcctcctgggttcaagcgattctcctgcctcagcctcccangtngctgggattncaggcgcttgccaccacgccnggctanttttttgtattttgngtagagactggntttcgccatcttggccagactggtcttgaactcctgacctcgtgatccncccacctcagcctcccaangtgctgggattacaggcatgagccaccatgcctggcctcaaatgaggtttaccagactttgaaggagcaggtaattccttctaccttgtgaacaagttgttccagaaagatagcagctcaggaggcctctgtgaccatggttccagacccagataaggacggcaaagaacagagcatctcagaaacgcaaggctcacagccagggtgcccggcgaccccacgggcactgagaacagctagctctaggagctccactctcctgctgaagaaaccacgggctcagagacggggagctccctcgcccagccacatctgtgaccccacggtaactctgctggttttggtgccttcagtcactcactgcaggtttgttttgttttgttttgttttgagtttttttgttttttgttttttgtttttagagacnngatgttgctatgttgcctaggctggtttcgaactcctggcctcangggatcctccctccttggccccgcaangtgctgggattncaggcgtgagccnccgtgcccngcccgctcactgcagtttgaaggcatggctttgggtggcgtggggtgaaagctgcccgaggccccgttcctccccacgtggctgcctcctgccagagccagtcaggaaaacagaccccaactagagttgtttcaaatggcagggatttggtaccggtggttggatcatgacaaagctctgagaaggctggaggagccacagagtgccaagtgcccagcaatcattagaggaaggaggctgctgccacctgtgtggctagaggaacagaggggccaatggcattccccaaaccccactctcgcctctgtctggccagagcagaatggcttcttccagcttcccaccctggactcccacccaggagcctcctcctggcagacccttcctgaccccaccggcccggggggtctacagatccatgtttcaggcgtccgcctggagcggaacaggggagtgcttaggacaagggtggtgccagaggatccactctgcccacatttagttgaccagctgaggcactccacgggaatgaatgactctcgacaggtgccggaggtgaggaggggcccggaggcccaggaggggcacagggatggattcgtccgcctgggggctggaggtgtgtttacagagccccaaaataaacaatgcaaccaggtcagaccagcggttctcacagtgtggttcccagaccagcagcatcactgggagcttactggacacgcaaataaatccctgtgtgccaccccagctgcatcagatgctggtggggcccagtgatctgtatttaacacaccctccgggggatgccggtgcccactcacgtttgagaacccctgcgatccacgactgccctcccgtgtaaaaggcccacctctgtgggactccaagtcatcagcaccctagggtccttccgtctttttccttcctcctgggacacctgcctctcccatgtcgtattagagaattccttatgctcccaagtgggcacggggagaggaaggcactcctctttaaggaccgacccagaggttttgccattgcttcactggccagagcttagtcacgcagcctcacccagaggcaagggaggttggaaaatgtagtgtttgtgtgtgtctaacacaaattctattaccatgcagtcaggattctccactcttgctctttcattagatttgctgggcttcaccctggactttctgatttagtgacagaacagagaacccagaggcagacccagatgtgtacaagggcttcatatacaatcaggagatttaataatcatgctaggggccgggtgcagtggctcacgcctgtaatcccaagcactttggggagccgaggcaggcngatcacttgaggtcaggagtttgagaccagcctgggcaacaaagtgagaccctgtctctactaaaaataacaaaaattagccgggcgtggtggtgggngcctgtaatcccagctcctcgggtggctgaggcatgagaatcacttgaacccaggaggcagaggtttcagtgagctgagatcacatcactgcactccagcctgggtgacagagtgagattcngtc

SEQ ID NO: 429978 - DNA, 5776 bp, Homo sapiens
  misc_feature (3460)..(3460): n is a, c, g, or t
  misc_feature (3469)..(3469): n is a, c, g, or t
  misc_feature (3479)..(3479): n is a, c, g, or t
  misc_feature (3531)..(3531): n is a, c, g, or t
  misc_feature (3534)..(3534): n is a, c, g, or t
  misc_feature (3544)..(3544): n is a, c, g, or t
  misc_feature (3565)..(3565): n is a, c, g, or t
  misc_feature (3571)..(3571): n is a, c, g, or t
  misc_feature (3586)..(3586): n is a, c, g, or t
  misc_feature (3598)..(3598): n is a, c, g, or t
  misc_feature (3647)..(3647): n is a, c, g, or t
  misc_feature (3666)..(3666): n is a, c, g, or t
  misc_feature (4093)..(4094): n is a, c, g, or t
  misc_feature (4139)..(4139): n is a, c, g, or t
  misc_feature (4166)..(4166): n is a, c, g, or t
  misc_feature (4178)..(4178): n is a, c, g, or t
  misc_feature (4191)..(4191): n is a, c, g, or t
  misc_feature (4200)..(4200): n is a, c, g, or t
  misc_feature (5553)..(5553): n is a, c, g, or t
  misc_feature (5651)..(5651): n is a, c, g, or t
  misc_feature (5773)..(5773): n is a, c, g, or t
actggtgggcggtgaggggggaaagccccggatgttcgttggggattcaacatggcggcgggagtgtccgcggtggtggcggtgcaagagagctgagggaggcgcgagggcgcggagttccaggtcgagcagttaggccgcgagcgactgcggcgccgagccgatgagtaacccgaagcccctagaggagtggtcacctgcctgagggcacttctgtcccaccagcatcagaccaggccgcaccgagtccccggcaccatgtttgggaagaggaagaagcgggtggagatctccgcgccgtccaacttcgagcaccgcgtgcacacgggcttcgaccagcacgagcagaagttcacggggctgccccgccagtggcagagcctgatcgaggagtcggctcgccggcccaagcccctcgtcgaccccgcctgcatcacctccatccagcccggggcccccaagaccatcgtgcggggcagcaaaggtgccaaagatggggccctcacgctgctgctggacgagtttgagaacatgtcggtgacacgctccaactccctgcggagagacagcccgccgccgcccgcccgtgcccgccaggaaaatgggatgccagaggagccccctggcccccgctcaccacagcgggagccacagcgagtatcccatgagcagttccgggctgccctgcagctggtggtggacccaggcgacccccgctcctacctggacaacttcatcaagattggcgagggctccacgggcatcgtgtgcatcgccaccgtgcgcagctcgggcaagctggtggccgtcaagaagatggacctgcgcaagcagcagaggcgcgagctgctcttcaacgaggtggtaatcatgagggactaccagcacgagaatgtggtggagatgtacaacagctacctggtgggggacgagctctgggtggtcatggagttcctggaaggaggcgccctcaccgacatcgtcacccacaccaggatgaacgaggagcagatcgcggccgtgtgccttgcagtgctgcaggccctgtcggtgctccacgcccagggcgtcatccaccgggacatcaagagcgactcgatcctgctgacccatgatggcagggtgaagctgtcagactttgggttctgcgcccaggtgagcaaggaagtgccccgaaggaagtcgctggtcggcacgccctactggatggccccagagctcatctcccgccttccctacgggccagaggtagacatctggtcgctggggataatggtgattgagatggtggacggagagcccccctacttcaacgagccacccctcaaagccatgaagatgattcgggacaacctgccaccccgactgaagaacctgcacaaggtgtcgccatccctgaagggcttcctggaccgcctgctggtgcgagaccctgcccagcgggccacggcagccgagctgctgaagcacccattcctggccaaggcagggccgcctgccagcatcgtgcccctcatgcgccagaaccgcaccagatgaggcccagcgcccttcccctcaaccaaagagccccccgggtcacccccgccccactgaggccagtagggggccaggcctcccactcctcccagcccgggagatgctccgcgtggcaccaccctccttgctgggggtagatgagaccctactactgaactccagttttgatctcgtgacttttagaaaaacacagggactcgtgggagcaagcgaggctcccaggacccccaccctctgggacaggccctcccccatgttcttctgtctccaggaagggcagcggccctcccatcactggaagtctgcagtgggggtcgctgggggtggagagaacactaagaggtgaacatgtatgagtgtgtgcacgcgtgtgagtgtgcatgtgtgtgtgtgcaaaggtccagccaccccgtcctccagcctgcaaggggtgtctggcgccttgcctgacacccagccccctctccccctgagccattgtgggggtcgatcatgaatgtccgaagagtggccttttcccgtagccctgcgccccctttctgtggctggatggggagacaggtcagggccccccaccctctccagcccctgcagcaaatgactactgcacctggacagcctcctcttttctagaagtctatttatattgtcattttataacactctagcccctgcccttattgggggacagatggtccctgtcctgcggggtggccctggcagaaccactgcctgaagaaccaggttcctgcccggtcagcgcagccccagcccgcccacccctgcctcgagttagttttacaattaaaacattgtcttgttttgtgtctgtgtgcgatgtgtggggggcagggggccctgcccggctgtcttgggtgggaatttgcagggagagggtctggatctgggagcaaaccacgattccagccaaggcagggcaagggtggggtggggagtggggagttcaggtcatagcagccagtaagctcccccagcctgccactccccagaatggggcaggattgtccccacccctggaagcagccagtttgccacagtccatgtgcagactgatcccagtttgccaaatctgcaatttcctggaaccttttaaaggctgtcttgagcgcgtttggtgagtaggagctaacccaagttagtaaattgaaggccatttggcaaattggtcagtgggcagatgggcttttggggattgactgaggctgactggcctggagctgctggcttcggagagacaccctgtgaagtgtgtccttccacgcaggagcccagagccgagcccacgctggggggaatctgactggcatggaggtggccatgccaccatcgctgctgcagctgcatcctggcactttgcgcctcaggccctgttgggctccactttctgcatcctccccagcccccagggaggcagtggagtggggagagagccaggagtgagcctccgtccccaaagccagccaggcgtcatcagcaccagagacctcagcctggtcctctcgggaagtgagtggccagggcagagattccaggttagtccacgcctcccacccttcacaggtcctgaccccaagaatcagagcactgtgtgtgtggcagggcctatgccaagtgcaaacacagcctagatggatcatcacagagtgaaacccagcggtgcaagcagctgtgctctctgcgatgtattggaggcttaggtgaggtggatgcctttctggaaaaaaaaaaaatgctaacattggcaaaagaagaaatagaaaacaagaccaaaataactgtctcctcactgcacacacactccagaataaataaaaggtttcaggcttgaatgcactttcaaatgagattttttttttttttttgagacggagtatcgctctgtcgcccaggctggagtgcngtggcacgntcttggctcnctgcaacttctgcctcctgggttcaagcgattctcctgcctcagcctcccangtngctgggattncaggcgcttgccaccacgccnggctanttttttgtattttgngtagagactggntttcgccatcttggccagactggtcttgaactcctgacctcgtgatccncccacctcagcctcccaangtgctgggattacaggcatgagccaccatgcctggcctcaaatgaggtttaccagactttgaaggagcaggtaattccttctaccttgtgaacaagttgttccagaaagatagcagctcaggaggcctctgtgaccatggttccagacccagataaggacggcaaagaacagagcatctcagaaacgcaaggctcacagccagggtgcccggcgaccccacgggcactgagaacagctagctctaggagctccactctcctgctgaagaaaccacgggctcagagacggggagctccctcgcccagccacatctgtgaccccacggtaactctgctggttttggtgccttcagtcactcactgcaggtttgttttgttttgttttgttttgagtttttttgttttttgttttttgtttttagagacnngatgttgctatgttgcctaggctggtttcgaactcctggcctcangggatcctccctccttggccccgcaangtgctgggattncaggcgtgagccnccgtgcccngcccgctcactgcagtttgaaggcatggctttgggtggcgtggggtgaaagctgcccgaggccccgttcctccccacgtggctgcctcctgccagagccagtcaggaaaacagaccccaactagagttgtttcaaatggcagggatttggtaccggtggttggatcatgacaaagctctgagaaggctggaggagccacagagtgccaagtgcccagcaatcattagaggaaggaggctgctgccacctgtgtggctagaggaacagaggggccaatggcattccccaaaccccactctcgcctctgtctggccagagcagaatggcttcttccagcttcccaccctggactcccacccaggagcctcctcctggcagacccttcctgaccccaccggcccggggggtctacagatccatgtttcaggcgtccgcctggagcggaacaggggagtgcttaggacaagggtggtgccagaggatccactctgcccacatttagttgaccagctgaggcactccacgggaatgaatgactctcgacaggtgccggaggtgaggaggggcccggaggcccaggaggggcacagggatggattcgtccgcctgggggctggaggtgtgtttacagagccccaaaataaacaatgcaaccaggtcagaccagcggttctcacagtgtggttcccagaccagcagcatcactgggagcttactggacacgcaaataaatccctgtgtgccaccccagctgcatcagatgctggtggggcccagtgatctgtatttaacacaccctccgggggatgccggtgcccactcacgtttgagaacccctgcgatccacgactgccctcccgtgtaaaaggcccacctctgtgggactccaagtcatcagcaccctagggtccttccgtctttttccttcctcctgggacacctgcctctcccatgtcgtattagagaattccttatgctcccaagtgggcacggggagaggaaggcactcctctttaaggaccgacccagaggttttgccattgcttcactggccagagcttagtcacgcagcctcacccagaggcaagggaggttggaaaatgtagtgtttgtgtgtgtctaacacaaattctattaccatgcagtcaggattctccactcttgctctttcattagatttgctgggcttcaccctggactttctgatttagtgacagaacagagaacccagaggcagacccagatgtgtacaagggcttcatatacaatcaggagatttaataatcatgctaggggccgggtgcagtggctcacgcctgtaatcccaagcactttggggagccgaggcaggcngatcacttgaggtcaggagtttgagaccagcctgggcaacaaagtgagaccctgtctctactaaaaataacaaaaattagccgggcgtggtggtgggngcctgtaatcccagctcctcgggtggctgaggcatgagaatcacttgaacccaggaggcagaggtttcagtgagctgagatcacatcactgcactccagcctgggtgacagagtgagattcngtc

SEQ ID NO: 429979 - DNA, 6054 bp, Homo sapiens
  misc_feature (3738)..(3738): n is a, c, g, or t
  misc_feature (3747)..(3747): n is a, c, g, or t
  misc_feature (3757)..(3757): n is a, c, g, or t
  misc_feature (3809)..(3809): n is a, c, g, or t
  misc_feature (3812)..(3812): n is a, c, g, or t
  misc_feature (3822)..(3822): n is a, c, g, or t
  misc_feature (3843)..(3843): n is a, c, g, or t
  misc_feature (3849)..(3849): n is a, c, g, or t
  misc_feature (3864)..(3864): n is a, c, g, or t
  misc_feature (3876)..(3876): n is a, c, g, or t
  misc_feature (3925)..(3925): n is a, c, g, or t
  misc_feature (3944)..(3944): n is a, c, g, or t
  misc_feature (4371)..(4372): n is a, c, g, or t
  misc_feature (4417)..(4417): n is a, c, g, or t
  misc_feature (4444)..(4444): n is a, c, g, or t
  misc_feature (4456)..(4456): n is a, c, g, or t
  misc_feature (4469)..(4469): n is a, c, g, or t
  misc_feature (4478)..(4478): n is a, c, g, or t
  misc_feature (5831)..(5831): n is a, c, g, or t
  misc_feature (5929)..(5929): n is a, c, g, or t
  misc_feature (6051)..(6051): n is a, c, g, or t
actggtgggcggtgaggggggaaagccccggatgttcgttggggattcaacatggcggcgggagtgtccgcggtggtggcggtgcaagagagctgagggaggcgcgagggcgcggagttccaggtcgagcagttaggccgcgagcgactgcggcgccgagccgatgagtaacccgaagcccctagaggagtggtcacctgcctgagggcacttctgtcccaccagcatcagaccaggccgcaccgagtccccggcaccatgtttgggaagaggaagaagcgggtggagatctccgcgccgtccaacttcgagcaccgcgtgcacacgggcttcgaccagcacgagcagaagttcacggggctgccccgccagtggcagagcctgatcgaggagtcggctcgccggcccaagcccctcgtcgaccccgcctgcatcacctccatccagcccggggcccccaagaccatcgtgcggggcagcaaaggtgccaaagatggggccctcacgctgctgctggacgagtttgagaacatgtcggtgacacgctccaactccctgcggagagacagcccgccgccgcccgcccgtgcccgccaggaaaatgggatgccagaggagccggccaccacggccagagggggcccagggaaggcaggcagccgaggccggttcgccggtcacagcgaggcgggtggcggcagtggtgacaggcgacgggcggggccagagaagaggcccaagtcttccagggagggctcagggggtccccaggagtcctcccgggacaaacgccccctctccgggcctgatgtcggcaccccccagcctgctggtctggccagtggggcgaaactggcagctggccggccctttaacacctacccgagggctgacacggaccacccatcccggggtgcccagggggagcctcatgacgtggcccctaacgggccatcagcggggggcctggccatcccccagtcctcctcctcctcctcccggcctcccacccgagcccgaggtgcccccagccctggagtgctgggaccccacgcctcagagccccagctggcccctccagcctgcacccccgccgcccctgctgttcctgggccccctggcccccgctcaccacagcgggagccacagcgagtatcccatgagcagttccgggctgccctgcagctggtggtggacccaggcgacccccgctcctacctggacaacttcatcaagattggcgagggctccacgggcatcgtgtgcatcgccaccgtgcgcagctcgggcaagctggtggccgtcaagaagatggacctgcgcaagcagcagaggcgcgagctgctcttcaacgaggtggtaatcatgagggactaccagcacgagaatgtggtggagatgtgaagctgtcagactttgggttctgcgcccaggtgagcaaggaagtgccccgaaggaagtcgctggtcggcacgccctactggatggccccagagctcatctcccgccttccctacgggccagaggtagacatctggtcgctggggataatggtgattgagatggtggacggagagcccccctacttcaacgagccacccctcaaagccatgaagatgattcgggacaacctgccaccccgactgaagaacctgcacaaggtgtcgccatccctgaagggcttcctggaccgcctgctggtgcgagaccctgcccagcgggccacggcagccgagctgctgaagcacccattcctggccaaggcagggccgcctgccagcatcgtgcccctcatgcgccagaaccgcaccagatgaggcccagcgcccttcccctcaaccaaagagccccccgggtcacccccgccccactgaggccagtagggggccaggcctcccactcctcccagcccgggagatgctccgcgtggcaccaccctccttgctgggggtagatgagaccctactactgaactccagttttgatctcgtgacttttagaaaaacacagggactcgtgggagcaagcgaggctcccaggacccccaccctctgggacaggccctcccccatgttcttctgtctccaggaagggcagcggccctcccatcactggaagtctgcagtgggggtcgctgggggtggagagaacactaagaggtgaacatgtatgagtgtgtgcacgcgtgtgagtgtgcatgtgtgtgtgtgcaaaggtccagccaccccgtcctccagcctgcaaggggtgtctggcgccttgcctgacacccagccccctctccccctgagccattgtgggggtcgatcatgaatgtccgaagagtggccttttcccgtagccctgcgccccctttctgtggctggatggggagacaggtcagggccccccaccctctccagcccctgcagcaaatgactactgcacctggacagcctcctcttttctagaagtctatttatattgtcattttataacactctagcccctgcccttattgggggacagatggtccctgtcctgcggggtggccctggcagaaccactgcctgaagaaccaggttcctgcccggtcagcgcagccccagcccgcccacccctgcctcgagttagttttacaattaaaacattgtcttgttttgtgtctgtgtgcgatgtgtggggggcagggggccctgcccggctgtcttgggtgggaatttgcagggagagggtctggatctgggagcaaaccacgattccagccaaggcagggcaagggtggggtggggagtggggagttcaggtcatagcagccagtaagctcccccagcctgccactccccagaatggggcaggattgtccccacccctggaagcagccagtttgccacagtccatgtgcagactgatcccagtttgccaaatctgcaatttcctggaaccttttaaaggctgtcttgagcgcgtttggtgagtaggagctaacccaagttagtaaattgaaggccatttggcaaattggtcagtgggcagatgggcttttggggattgactgaggctgactggcctggagctgctggcttcggagagacaccctgtgaagtgtgtccttccacgcaggagcccagagccgagcccacgctggggggaatctgactggcatggaggtggccatgccaccatcgctgctgcagctgcatcctggcactttgcgcctcaggccctgttgggctccactttctgcatcctccccagcccccagggaggcagtggagtggggagagagccaggagtgagcctccgtccccaaagccagccaggcgtcatcagcaccagagacctcagcctggtcctctcgggaagtgagtggccagggcagagattccaggttagtccacgcctcccacccttcacaggtcctgaccccaagaatcagagcactgtgtgtgtggcagggcctatgccaagtgcaaacacagcctagatggatcatcacagagtgaaacccagcggtgcaagcagctgtgctctctgcgatgtattggaggcttaggtgaggtggatgcctttctggaaaaaaaaaaaatgctaacattggcaaaagaagaaatagaaaacaagaccaaaataactgtctcctcactgcacacacactccagaataaataaaaggtttcaggcttgaatgcactttcaaatgagattttttttttttttttgagacggagtatcgctctgtcgcccaggctggagtgcngtggcacgntcttggctcnctgcaacttctgcctcctgggttcaagcgattctcctgcctcagcctcccangtngctgggattncaggcgcttgccaccacgccnggctanttttttgtattttgngtagagactggntttcgccatcttggccagactggtcttgaactcctgacctcgtgatccncccacctcagcctcccaangtgctgggattacaggcatgagccaccatgcctggcctcaaatgaggtttaccagactttgaaggagcaggtaattccttctaccttgtgaacaagttgttccagaaagatagcagctcaggaggcctctgtgaccatggttccagacccagataaggacggcaaagaacagagcatctcagaaacgcaaggctcacagccagggtgcccggcgaccccacgggcactgagaacagctagctctaggagctccactctcctgctgaagaaaccacgggctcagagacggggagctccctcgcccagccacatctgtgaccccacggtaactctgctggttttggtgccttcagtcactcactgcaggtttgttttgttttgttttgttttgagtttttttgttttttgttttttgtttttagagacnngatgttgctatgttgcctaggctggtttcgaactcctggcctcangggatcctccctccttggccccgcaangtgctgggattncaggcgtgagccnccgtgcccngcccgctcactgcagtttgaaggcatggctttgggtggcgtggggtgaaagctgcccgaggccccgttcctccccacgtggctgcctcctgccagagccagtcaggaaaacagaccccaactagagttgtttcaaatggcagggatttggtaccggtggttggatcatgacaaagctctgagaaggctggaggagccacagagtgccaagtgcccagcaatcattagaggaaggaggctgctgccacctgtgtggctagaggaacagaggggccaatggcattccccaaaccccactctcgcctctgtctggccagagcagaatggcttcttccagcttcccaccctggactcccacccaggagcctcctcctggcagacccttcctgaccccaccggcccggggggtctacagatccatgtttcaggcgtccgcctggagcggaacaggggagtgcttaggacaagggtggtgccagaggatccactctgcccacatttagttgaccagctgaggcactccacgggaatgaatgactctcgacaggtgccggaggtgaggaggggcccggaggcccaggaggggcacagggatggattcgtccgcctgggggctggaggtgtgtttacagagccccaaaataaacaatgcaaccaggtcagaccagcggttctcacagtgtggttcccagaccagcagcatcactgggagcttactggacacgcaaataaatccctgtgtgccaccccagctgcatcagatgctggtggggcccagtgatctgtatttaacacaccctccgggggatgccggtgcccactcacgtttgagaacccctgcgatccacgactgccctcccgtgtaaaaggcccacctctgtgggactccaagtcatcagcaccctagggtccttccgtctttttccttcctcctgggacacctgcctctcccatgtcgtattagagaattccttatgctcccaagtgggcacggggagaggaaggcactcctctttaaggaccgacccagaggttttgccattgcttcactggccagagcttagtcacgcagcctcacccagaggcaagggaggttggaaaatgtagtgtttgtgtgtgtctaacacaaattctattaccatgcagtcaggattctccactcttgctctttcattagatttgctgggcttcaccctggactttctgatttagtgacagaacagagaacccagaggcagacccagatgtgtacaagggcttcatatacaatcaggagatttaataatcatgctaggggccgggtgcagtggctcacgcctgtaatcccaagcactttggggagccgaggcaggcngatcacttgaggtcaggagtttgagaccagcctgggcaacaaagtgagaccctgtctctactaaaaataacaaaaattagccgggcgtggtggtgggngcctgtaatcccagctcctcgggtggctgaggcatgagaatcacttgaacccaggaggcagaggtttcagtgagctgagatcacatcactgcactccagcctgggtgacagagtgagattcngtc

SEQ ID NO: 429980 - DNA, 5993 bp, Homo sapiens
  misc_feature (3677)..(3677): n is a, c, g, or t
  misc_feature (3686)..(3686): n is a, c, g, or t
  misc_feature (3696)..(3696): n is a, c, g, or t
  misc_feature (3748)..(3748): n is a, c, g, or t
  misc_feature (3751)..(3751): n is a, c, g, or t
  misc_feature (3761)..(3761): n is a, c, g, or t
  misc_feature (3782)..(3782): n is a, c, g, or t
  misc_feature (3788)..(3788): n is a, c, g, or t
  misc_feature (3803)..(3803): n is a, c, g, or t
  misc_feature (3815)..(3815): n is a, c, g, or t
  misc_feature (3864)..(3864): n is a, c, g, or t
  misc_feature (3883)..(3883): n is a, c, g, or t
  misc_feature (4310)..(4311): n is a, c, g, or t
  misc_feature (4356)..(4356): n is a, c, g, or t
  misc_feature (4383)..(4383): n is a, c, g, or t
  misc_feature (4395)..(4395): n is a, c, g, or t
  misc_feature (4408)..(4408): n is a, c, g, or t
  misc_feature (4417)..(4417): n is a, c, g, or t
  misc_feature (5770)..(5770): n is a, c, g, or t
  misc_feature (5868)..(5868): n is a, c, g, or t
  misc_feature (5990)..(5990): n is a, c, g, or t
actggtgggcggtgaggggggaaagccccggatgttcgttggggattcaacatggcggcgggagtgtccgcggtggtggcggtgcaagagagctgagggaggcgcgagggcgcggagttccaggtcgagcagttaggccgcgagcgactgcggcgccgagccgatgagtaacccgaagcccctagaggagtggtcacctgcctgagggcacttctgtcccaccagcatcagaccaggccgcaccgagtccccggcaccatgtttgggaagaggaagaagcgggtggagatctccgcgccgtccaacttcgagcaccgcgtgcacacgggcttcgaccagcacgagcagaagttcacggggctgccccgccagtggcagagcctgatcgaggagtcggctcgccggcccaagcccctcgtcgaccccgcctgcatcacctccatccagcccggggcccccaagaccatcgtgcggggcagcaaaggtgccaaagatggggccctcacgctgctgctggacgagtttgagaacatgtcggtgacacgctccaactccctgcggagagacagcccgccgccgcccgcccgtgcccgccaggaaaatgggatgccagaggagccggccaccacggccagagggggccggggagcctcatgacgtggcccctaacgggccatcagcggggggcctggccatcccccagtcctcctcctcctcctcccggcctcccacccgagcccgaggtgcccccagccctggagtgctgggaccccacgcctcagagccccagctggcccctccagcctgcacccccgccgcccctgctgttcctgggccccctggcccccgctcaccacagcgggagccacagcgagtatcccatgagcagttccgggctgccctgcagctggtggtggacccaggcgacccccgctcctacctggacaacttcatcaagattggcgagggctccacgggcatcgtgtgcatcgccaccgtgcgcagctcgggcaagctggtggccgtcaagaagatggacctgcgcaagcagcagaggcgcgagctgctcttcaacgaggtggtaatcatgagggactaccagcacgagaatgtggtggagatgtacaacagctacctggtgggggacgagctctgggtggtcatggagttcctggaaggaggcgccctcaccgacatcgtcacccacaccaggatgaacgaggagcagatcgcggccgtgtgccttgcagtgctgcaggccctgtcggtgctccacgcccagggcgtcatccaccgggacatcaagagcgactcgatcctgctgacccatgatggcagggtgaagctgtcagactttgggttctgcgcccaggtgagcaaggaagtgccccgaaggaagtcgctggtcggcacgccctactggatggccccagagctcatctcccgccttccctacgggccagaggtagacatctggtcgctggggataatggtgattgagatggtggacggagagcccccctacttcaacgagccacccctcaaagccatgaagatgattcgggacaacctgccaccccgactgaagaacctgcacaaggtgtcgccatccctgaagggcttcctggaccgcctgctggtgcgagaccctgcccagcgggccacggcagccgagctgctgaagcacccattcctggccaaggcagggccgcctgccagcatcgtgcccctcatgcgccagaaccgcaccagatgaggcccagcgcccttcccctcaaccaaagagccccccgggtcacccccgccccactgaggccagtagggggccaggcctcccactcctcccagcccgggagatgctccgcgtggcaccaccctccttgctgggggtagatgagaccctactactgaactccagttttgatctcgtgacttttagaaaaacacagggactcgtgggagcaagcgaggctcccaggacccccaccctctgggacaggccctcccccatgttcttctgtctccaggaagggcagcggccctcccatcactggaagtctgcagtgggggtcgctgggggtggagagaacactaagaggtgaacatgtatgagtgtgtgcacgcgtgtgagtgtgcatgtgtgtgtgtgcaaaggtccagccaccccgtcctccagcctgcaaggggtgtctggcgccttgcctgacacccagccccctctccccctgagccattgtgggggtcgatcatgaatgtccgaagagtggccttttcccgtagccctgcgccccctttctgtggctggatggggagacaggtcagggccccccaccctctccagcccctgcagcaaatgactactgcacctggacagcctcctcttttctagaagtctatttatattgtcattttataacactctagcccctgcccttattgggggacagatggtccctgtcctgcggggtggccctggcagaaccactgcctgaagaaccaggttcctgcccggtcagcgcagccccagcccgcccacccctgcctcgagttagttttacaattaaaacattgtcttgttttgtgtctgtgtgcgatgtgtggggggcagggggccctgcccggctgtcttgggtgggaatttgcagggagagggtctggatctgggagcaaaccacgattccagccaaggcagggcaagggtggggtggggagtggggagttcaggtcatagcagccagtaagctcccccagcctgccactccccagaatggggcaggattgtccccacccctggaagcagccagtttgccacagtccatgtgcagactgatcccagtttgccaaatctgcaatttcctggaaccttttaaaggctgtcttgagcgcgtttggtgagtaggagctaacccaagttagtaaattgaaggccatttggcaaattggtcagtgggcagatgggcttttggggattgactgaggctgactggcctggagctgctggcttcggagagacaccctgtgaagtgtgtccttccacgcaggagcccagagccgagcccacgctggggggaatctgactggcatggaggtggccatgccaccatcgctgctgcagctgcatcctggcactttgcgcctcaggccctgttgggctccactttctgcatcctccccagcccccagggaggcagtggagtggggagagagccaggagtgagcctccgtccccaaagccagccaggcgtcatcagcaccagagacctcagcctggtcctctcgggaagtgagtggccagggcagagattccaggttagtccacgcctcccacccttcacaggtcctgaccccaagaatcagagcactgtgtgtgtggcagggcctatgccaagtgcaaacacagcctagatggatcatcacagagtgaaacccagcggtgcaagcagctgtgctctctgcgatgtattggaggcttaggtgaggtggatgcctttctggaaaaaaaaaaaatgctaacattggcaaaagaagaaatagaaaacaagaccaaaataactgtctcctcactgcacacacactccagaataaataaaaggtttcaggcttgaatgcactttcaaatgagattttttttttttttttgagacggagtatcgctctgtcgcccaggctggagtgcngtggcacgntcttggctcnctgcaacttctgcctcctgggttcaagcgattctcctgcctcagcctcccangtngctgggattncaggcgcttgccaccacgccnggctanttttttgtattttgngtagagactggntttcgccatcttggccagactggtcttgaactcctgacctcgtgatccncccacctcagcctcccaangtgctgggattacaggcatgagccaccatgcctggcctcaaatgaggtttaccagactttgaaggagcaggtaattccttctaccttgtgaacaagttgttccagaaagatagcagctcaggaggcctctgtgaccatggttccagacccagataaggacggcaaagaacagagcatctcagaaacgcaaggctcacagccagggtgcccggcgaccccacgggcactgagaacagctagctctaggagctccactctcctgctgaagaaaccacgggctcagagacggggagctccctcgcccagccacatctgtgaccccacggtaactctgctggttttggtgccttcagtcactcactgcaggtttgttttgttttgttttgttttgagtttttttgttttttgttttttgtttttagagacnngatgttgctatgttgcctaggctggtttcgaactcctggcctcangggatcctccctccttggccccgcaangtgctgggattncaggcgtgagccnccgtgcccngcccgctcactgcagtttgaaggcatggctttgggtggcgtggggtgaaagctgcccgaggccccgttcctccccacgtggctgcctcctgccagagccagtcaggaaaacagaccccaactagagttgtttcaaatggcagggatttggtaccggtggttggatcatgacaaagctctgagaaggctggaggagccacagagtgccaagtgcccagcaatcattagaggaaggaggctgctgccacctgtgtggctagaggaacagaggggccaatggcattccccaaaccccactctcgcctctgtctggccagagcagaatggcttcttccagcttcccaccctggactcccacccaggagcctcctcctggcagacccttcctgaccccaccggcccggggggtctacagatccatgtttcaggcgtccgcctggagcggaacaggggagtgcttaggacaagggtggtgccagaggatccactctgcccacatttagttgaccagctgaggcactccacgggaatgaatgactctcgacaggtgccggaggtgaggaggggcccggaggcccaggaggggcacagggatggattcgtccgcctgggggctggaggtgtgtttacagagccccaaaataaacaatgcaaccaggtcagaccagcggttctcacagtgtggttcccagaccagcagcatcactgggagcttactggacacgcaaataaatccctgtgtgccaccccagctgcatcagatgctggtggggcccagtgatctgtatttaacacaccctccgggggatgccggtgcccactcacgtttgagaacccctgcgatccacgactgccctcccgtgtaaaaggcccacctctgtgggactccaagtcatcagcaccctagggtccttccgtctttttccttcctcctgggacacctgcctctcccatgtcgtattagagaattccttatgctcccaagtgggcacggggagaggaaggcactcctctttaaggaccgacccagaggttttgccattgcttcactggccagagcttagtcacgcagcctcacccagaggcaagggaggttggaaaatgtagtgtttgtgtgtgtctaacacaaattctattaccatgcagtcaggattctccactcttgctctttcattagatttgctgggcttcaccctggactttctgatttagtgacagaacagagaacccagaggcagacccagatgtgtacaagggcttcatatacaatcaggagatttaataatcatgctaggggccgggtgcagtggctcacgcctgtaatcccaagcactttggggagccgaggcaggcngatcacttgaggtcaggagtttgagaccagcctgggcaacaaagtgagaccctgtctctactaaaaataacaaaaattagccgggcgtggtggtgggngcctgtaatcccagctcctcgggtggctgaggcatgagaatcacttgaacccaggaggcagaggtttcagtgagctgagatcacatcactgcactccagcctgggtgacagagtgagattcngtc

SEQ ID NO: 429981 - DNA, 2247 bp, Homo sapiens
actggtgggcggtgaggggggaaagccccggatgttcgttggggattcaacatggcggcgggagtgtccgcggtggtggcggtgcaagagagctgagggaggcgcgagggcgcggagttccaggtcgagcagttaggccgcgagcgactgcggcgccgagccgatgagtaacccgaagcccctagaggagtggtcacctgcctgagggcacttctgtcccaccagcatcagaccaggccgcaccgagtccccggcaccatgtttgggaagaggaagaagcgggtggagatctccgcgccgtccaacttcgagcaccgcgtgcacacgggcttcgaccagcacgagcagaagttcacggggctgccccgccagtggcagagcctgatcgaggagtcggctcgccggcccaagcccctcgtcgaccccgcctgcatcacctccatccagcccggggcccccaagaccatcgtgcggggcagcaaaggtgccaaagatggggccctcacgctgctgctggacgagtttgagaacatgtcggtgacacgctccaactccctgcggagagacagcccgccgccgcccgcccgtgcccgccaggaaaatgggatgccagaggagccggccaccacggccagagggggcccagggaaggcaggcagccgaggccggttcgccggtcacagcgaggcgggtggcggcagtggtgacaggcgacgggcggggccagagaagaggcccaagtcttccagggagggctcagggggtccccaggagtcctcccgggacaaacgccccctctccgggcctgatgtcggcaccccccagcctgctggtctggccagtggggcgaaactggcagctggccggccctttaacacctacccgagggctgacacggaccacccatcccggggtgcccagggggagcctcatgacgtggcccctaacgggccatcagcggggggcctggccatcccccagtcctcctcctcctcctcccggcctcccacccgagcccgaggtgcccccagccctggagtgctgggaccccacgcctcagagccccagctggcccctccagcctgcacccccgccgcccctgctgttcctgggccccctggcccccgctcaccacagcgggagccacagcgagtatcccatgagcagttccgggctgccctgcagctggtggtggacccaggcgacccccgctcctacctggacaacttcatcaagattggcgagggctccacgggcatcgtgtgcatcgccaccgtgcgcagctcgggcaagctggtggccgtcaagaagatggacctgcgcaagcagcagaggcgcgagctgctcttcaacgaggtggtaatcatgagggactaccagcacgagaatgtggtggagatgtacaacagctacctggtgggggacgagctctgggtggtcatggagttcctggaaggaggcgccctcaccgacatcgtcacccacaccaggatgaacgaggagcagatcgcggccgtgtgccttgcagtgctgcaggccctgtcggtgctccacgcccagggcgtcatccaccgggacatcaagagcgactcgatcctgctgacccatgatggcagggtgaagctgtcagactttgggttctgcgcccaggtgagcaaggaagtgccccgaaggaagtcgctggtcggcacgccctactggatggccccagagctcatctcccgccttccctacgggccagaggtagacatctggtcgctggggataatggtgattgagatggtggacggagagcccccctacttcaacgagccacccctcaaagccatgaagatgattcgggacaacctgccaccccgactgaagaacctgcacaaggtgtcgccatccctgaagggcttcctggaccgcctgctggtgcgagaccctgcccagcgggccacggcagccgagctgctgaagcacccattcctggccaaggcagggccgcctgccagcatcgtgcccctcatgcgccagaaccgcaccagatgaggcccagcgcccttcccctcaaccaaagagccccccgggtcacccccgccccactgaggccagtagggggccaggcctcccactcctcccagcccgggagatgctccgcgtggcaccaccctccttgctgggggtagatgagaccctactactgaactccagttttgatctcgtgactcgtggaaatgtccacgggatcctctagatcacctt

SEQ ID NO: 429982 - DNA, 904 bp, Homo sapiens
actggtgggcggtgaggggggaaagccccggatgttcgttggggattcaacatggcggcgggagtgtccgcggtggtggcggtgcaagagagctgagggaggcgcgagggcgcggagttccaggtcgagcagttaggccgcgagcgactgcggcgccgagccgatgagtaacccgaagcccctagaggagtggtcacctgcctgagggcacttctgtcccaccagcatcagaccaggccgcaccgagtccccggcaccatgtttgggaagaggaagaagcgggtggagatctccgcgccgtccaacttcgagcaccgcgtgcacacgggcttcgaccagcacgagcagaagttcacggggctgccccgccagtggcagagcctgatcgaggagtcggctcgccggcccaagcccctcgtcgaccccgcctgcatcacctccatccagcccggggcccccaagaccatcgtgcggggcagcaaaggtgccaaagatggggccctcacgctgctgctggacgagtttgagaacatgtcggtgacacgctccaactccctgcggagagacagcccgccgccgcccgcccgtgcccgccaggaaaatgggatgccagaggagccggccaccacggccagagggggcccagggaaggcaggcagccgaggccggttcgccggtcacagcgaggcgggtggcggcagtggtgacaggcgacgggcggggccagagaagaggcccaagtcttccagggagggctcagggagtctccggacaagccctctcgggcctgttcgggccctgctgtggtctgcgtggggaactggtggcggcttaactaccgggtgcgccctccggtcccccctggctgggcgctccctcccggagcggccccttggtgtccttg

SEQ ID NO: 429983 - DNA, 2886 bp, Homo sapiens
actggtgggcggtgaggggggaaagccccggatgttcgttggggattcaacatggcggcgggagtgtccgcggtggtggcggtgcaagagagctgagggaggcgcgagggcgcggagttccaggtcgagcagttaggccgcgagcgactgcggcgccgagccgatgagtaacccgaagcccctagaggagtggtcacctgcctgagggcacttctgtcccaccagcatcagaccaggccgcaccgagtccccggcaccatgtttgggaagaggaagaagcgggtggagatctccgcgccgtccaacttcgagcaccgcgtgcacacgggcttcgaccagcacgagcagaagttcacggggctgccccgccagtggcagagcctgatcgaggagtcggctcgccggcccaagcccctcgtcgaccccgcctgcatcacctccatccagcccggggcccccaagaccatcgtgcggggcagcaaaggtgccaaagatggggccctcacgctgctgctggacgagtttgagaacatgtcggtgacacgctccaactccctgcggagagacagcccgccgccgcccgcccgtgcccgccaggaaaatgggatgccagaggagccggccaccacggccagagggggcccagggaaggcaggcagccgaggccggttcgccggtcacagcgaggcgggtggcggcagtggtgacaggcgacgggcggggccagagaagaggcccaagtcttccagggagggctcagggggtccccaggagtcctcccgggacaaacgccccctctccgggcctgatgtcggcaccccccagcctgctggtctggccagtggggcgaaactggcagctggccggccctttaacacctacccgagggctgacacggaccacccatcccggggtgcccagggggagcctcatgacgtggcccctaacgggccatcagcggggggcctggccatcccccagtcctcctcctcctcctcccggcctcccacccgagcccgaggtgcccccagccctggagtgctgggaccccacgcctcagagccccagctggcccctccagcctgcacccccgccgcccctgctgttcctgggccccctggcccccgctcaccacagcgggagccacagcgagtatcccatgagcagttccgggctgccctgcagctggtggtggacccaggcgacccccgctcctacctggacaacttcatcaagattggcgagggctccacgggcatcgtgtgcatcgccaccgtgcgcagctcgggcaagctggtggccgtcaagaagatggacctgcgcaagcagcagaggcgcgagctgctcttcaacgaggtggtaatcatgagggactaccagcacgagaatgtggtggagatgtacaacagctacctggtgggggacgagctctgggtggtcatggagttcctggaaggaggcgccctcaccgacatcgtcacccacaccaggatgaacgaggagcagatcgcggccgtgtgccttgcagtgctgcaggccctgtcggtgctccacgcccagggcgtcatccaccgggacatcaagagcgactcgatcctgctgacccatgatggcagggtgaagctgtcagactttgggttctgcgcccaggtgagcaaggaagtgccccgaaggaagtcgctggtcggcacgccctactggatggccccagagctcatctcccgccttccctacgggccagaggtagacatctggtcgctggggataatggtgattgagatggtggacggagagcccccctacttcaacgagccacccctcaaagccatgaagatgattcgggacaacctgccaccccgactgaagaacctgcacaaggtgtcgccatccctgaagggcttcctggaccgcctgctggtgcgagaccctgcccagcgggccacggcagccgagctgctgaagcacccattcctggccaaggcagggccgcctgccagcatcgtgcccctcatgcgccagaaccgcaccagatgaggcccagcgcccttcccctcaaccaaagagccccccgggtcacccccgccccactgaggccagtagggggccaggcctcccactcctcccagcccgggagatgctccgcgtggcaccaccctccttgctgggggtagatgagaccctactactgaactccagttttgatctcgtgacttttagaaaaacacagggactcgtgggagcaagcgaggctcccaggacccccaccctctgggacaggccctcccccatgttcttctgtctccaggaagggcagcggccctcccatcactggaagtctgcagtgggggtcgctgggggtggagagaacactaagaggtgaacatgtatgagtgtgtgcacgcgtgtgagtgtgcatgtgtgtgtgtgcaaaggtccagccaccccgtcctccagcctgcaaggggtgtctggcgccttgcctgacacccagccccctctccccctgagccattgtgggggtcgatcatgaatgtccgaagagtggccttttcccgtagccctgcgccccctttctgtggctggatggggagacaggtcagggccccccaccctctccagcccctgcagcaaatgactactgcacctggacagcctcctcttttctagaagtctatttatattgtcattttataacactctagcccctgcccttattgggggacagatggtccctgtcctgcggggtggccctggcagaaccactgcctgaagaaccaggttcctgcccggtcagcgcagccccagcccgcccacccctgcctcgagttagttttacaataacatgtcgggggggggggggagggggggggggtgggggggggggag

SEQ ID NO: 429984 - DNA, 5812 bp, Homo sapiens
  misc_feature (3496)..(3496): n is a, c, g, or t
  misc_feature (3505)..(3505): n is a, c, g, or t
  misc_feature (3515)..(3515): n is a, c, g, or t
  misc_feature (3567)..(3567): n is a, c, g, or t
  misc_feature (3570)..(3570): n is a, c, g, or t
  misc_feature (3580)..(3580): n is a, c, g, or t
  misc_feature (3601)..(3601): n is a, c, g, or t
  misc_feature (3607)..(3607): n is a, c, g, or t
  misc_feature (3622)..(3622): n is a, c, g, or t
  misc_feature (3634)..(3634): n is a, c, g, or t
  misc_feature (3683)..(3683): n is a, c, g, or t
  misc_feature (3702)..(3702): n is a, c, g, or t
  misc_feature (4129)..(4130): n is a, c, g, or t
  misc_feature (4175)..(4175): n is a, c, g, or t
  misc_feature (4202)..(4202): n is a, c, g, or t
  misc_feature (4214)..(4214): n is a, c, g, or t
  misc_feature (4227)..(4227): n is a, c, g, or t
  misc_feature (4236)..(4236): n is a, c, g, or t
  misc_feature (5589)..(5589): n is a, c, g, or t
  misc_feature (5687)..(5687): n is a, c, g, or t
  misc_feature (5809)..(5809): n is a, c, g, or t
actggtgggcggtgaggggggaaagccccggatgttcgttggggattcaacatggcggcgggagtgtccgcggtggtggcggtgcaagagagctgagggaggcgcgagggcgcggagttccaggtcgagcagttaggccgcgagcgactgcggcgccgagccgatgagtaacccgaagcccctagaggagtggtcacctgcctgagggcacttctgtcccaccagcatcagaccaggccgcaccgagtccccggcaccatgtttgggaagaggaagaagcgggtggagatctccgcgccgtccaacttcgagcaccgcgtgcacacgggcttcgaccagcacgagcagaagttcacggggctgccccgccagtggcagagcctgatcgaggagtcggctcgccggcccaagcccctcgtcgaccccgcctgcatcacctccatccagcccggggcccccaagggggagcctcatgacgtggcccctaacgggccatcagcggggggcctggccatcccccagtcctcctcctcctcctcccggcctcccacccgagcccgaggtgcccccagccctggagtgctgggaccccacgcctcagagccccagctggcccctccagcctgcacccccgccgcccctgctgttcctgggccccctggcccccgctcaccacagcgggagccacagcgagtatcccatgagcagttccgggctgccctgcagctggtggtggacccaggcgacccccgctcctacctggacaacttcatcaagattggcgagggctccacgggcatcgtgtgcatcgccaccgtgcgcagctcgggcaagctggtggccgtcaagaagatggacctgcgcaagcagcagaggcgcgagctgctcttcaacgaggtggtaatcatgagggactaccagcacgagaatgtggtggagatgtacaacagctacctggtgggggacgagctctgggtggtcatggagttcctggaaggaggcgccctcaccgacatcgtcacccacaccaggatgaacgaggagcagatcgcggccgtgtgccttgcagtgctgcaggccctgtcggtgctccacgcccagggcgtcatccaccgggacatcaagagcgactcgatcctgctgacccatgatggcagggtgaagctgtcagactttgggttctgcgcccaggtgagcaaggaagtgccccgaaggaagtcgctggtcggcacgccctactggatggccccagagctcatctcccgccttccctacgggccagaggtagacatctggtcgctggggataatggtgattgagatggtggacggagagcccccctacttcaacgagccacccctcaaagccatgaagatgattcgggacaacctgccaccccgactgaagaacctgcacaaggtgtcgccatccctgaagggcttcctggaccgcctgctggtgcgagaccctgcccagcgggccacggcagccgagctgctgaagcacccattcctggccaaggcagggccgcctgccagcatcgtgcccctcatgcgccagaaccgcaccagatgaggcccagcgcccttcccctcaaccaaagagccccccgggtcacccccgccccactgaggccagtagggggccaggcctcccactcctcccagcccgggagatgctccgcgtggcaccaccctccttgctgggggtagatgagaccctactactgaactccagttttgatctcgtgacttttagaaaaacacagggactcgtgggagcaagcgaggctcccaggacccccaccctctgggacaggccctcccccatgttcttctgtctccaggaagggcagcggccctcccatcactggaagtctgcagtgggggtcgctgggggtggagagaacactaagaggtgaacatgtatgagtgtgtgcacgcgtgtgagtgtgcatgtgtgtgtgtgcaaaggtccagccaccccgtcctccagcctgcaaggggtgtctggcgccttgcctgacacccagccccctctccccctgagccattgtgggggtcgatcatgaatgtccgaagagtggccttttcccgtagccctgcgccccctttctgtggctggatggggagacaggtcagggccccccaccctctccagcccctgcagcaaatgactactgcacctggacagcctcctcttttctagaagtctatttatattgtcattttataacactctagcccctgcccttattgggggacagatggtccctgtcctgcggggtggccctggcagaaccactgcctgaagaaccaggttcctgcccggtcagcgcagccccagcccgcccacccctgcctcgagttagttttacaattaaaacattgtcttgttttgtgtctgtgtgcgatgtgtggggggcagggggccctgcccggctgtcttgggtgggaatttgcagggagagggtctggatctgggagcaaaccacgattccagccaaggcagggcaagggtggggtggggagtggggagttcaggtcatagcagccagtaagctcccccagcctgccactccccagaatggggcaggattgtccccacccctggaagcagccagtttgccacagtccatgtgcagactgatcccagtttgccaaatctgcaatttcctggaaccttttaaaggctgtcttgagcgcgtttggtgagtaggagctaacccaagttagtaaattgaaggccatttggcaaattggtcagtgggcagatgggcttttggggattgactgaggctgactggcctggagctgctggcttcggagagacaccctgtgaagtgtgtccttccacgcaggagcccagagccgagcccacgctggggggaatctgactggcatggaggtggccatgccaccatcgctgctgcagctgcatcctggcactttgcgcctcaggccctgttgggctccactttctgcatcctccccagcccccagggaggcagtggagtggggagagagccaggagtgagcctccgtccccaaagccagccaggcgtcatcagcaccagagacctcagcctggtcctctcgggaagtgagtggccagggcagagattccaggttagtccacgcctcccacccttcacaggtcctgaccccaagaatcagagcactgtgtgtgtggcagggcctatgccaagtgcaaacacagcctagatggatcatcacagagtgaaacccagcggtgcaagcagctgtgctctctgcgatgtattggaggcttaggtgaggtggatgcctttctggaaaaaaaaaaaatgctaacattggcaaaagaagaaatagaaaacaagaccaaaataactgtctcctcactgcacacacactccagaataaataaaaggtttcaggcttgaatgcactttcaaatgagattttttttttttttttgagacggagtatcgctctgtcgcccaggctggagtgcngtggcacgntcttggctcnctgcaacttctgcctcctgggttcaagcgattctcctgcctcagcctcccangtngctgggattncaggcgcttgccaccacgccnggctanttttttgtattttgngtagagactggntttcgccatcttggccagactggtcttgaactcctgacctcgtgatccncccacctcagcctcccaangtgctgggattacaggcatgagccaccatgcctggcctcaaatgaggtttaccagactttgaaggagcaggtaattccttctaccttgtgaacaagttgttccagaaagatagcagctcaggaggcctctgtgaccatggttccagacccagataaggacggcaaagaacagagcatctcagaaacgcaaggctcacagccagggtgcccggcgaccccacgggcactgagaacagctagctctaggagctccactctcctgctgaagaaaccacgggctcagagacggggagctccctcgcccagccacatctgtgaccccacggtaactctgctggttttggtgccttcagtcactcactgcaggtttgttttgttttgttttgttttgagtttttttgttttttgttttttgtttttagagacnngatgttgctatgttgcctaggctggtttcgaactcctggcctcangggatcctccctccttggccccgcaangtgctgggattncaggcgtgagccnccgtgcccngcccgctcactgcagtttgaaggcatggctttgggtggcgtggggtgaaagctgcccgaggccccgttcctccccacgtggctgcctcctgccagagccagtcaggaaaacagaccccaactagagttgtttcaaatggcagggatttggtaccggtggttggatcatgacaaagctctgagaaggctggaggagccacagagtgccaagtgcccagcaatcattagaggaaggaggctgctgccacctgtgtggctagaggaacagaggggccaatggcattccccaaaccccactctcgcctctgtctggccagagcagaatggcttcttccagcttcccaccctggactcccacccaggagcctcctcctggcagacccttcctgaccccaccggcccggggggtctacagatccatgtttcaggcgtccgcctggagcggaacaggggagtgcttaggacaagggtggtgccagaggatccactctgcccacatttagttgaccagctgaggcactccacgggaatgaatgactctcgacaggtgccggaggtgaggaggggcccggaggcccaggaggggcacagggatggattcgtccgcctgggggctggaggtgtgtttacagagccccaaaataaacaatgcaaccaggtcagaccagcggttctcacagtgtggttcccagaccagcagcatcactgggagcttactggacacgcaaataaatccctgtgtgccaccccagctgcatcagatgctggtggggcccagtgatctgtatttaacacaccctccgggggatgccggtgcccactcacgtttgagaacccctgcgatccacgactgccctcccgtgtaaaaggcccacctctgtgggactccaagtcatcagcaccctagggtccttccgtctttttccttcctcctgggacacctgcctctcccatgtcgtattagagaattccttatgctcccaagtgggcacggggagaggaaggcactcctctttaaggaccgacccagaggttttgccattgcttcactggccagagcttagtcacgcagcctcacccagaggcaagggaggttggaaaatgtagtgtttgtgtgtgtctaacacaaattctattaccatgcagtcaggattctccactcttgctctttcattagatttgctgggcttcaccctggactttctgatttagtgacagaacagagaacccagaggcagacccagatgtgtacaagggcttcatatacaatcaggagatttaataatcatgctaggggccgggtgcagtggctcacgcctgtaatcccaagcactttggggagccgaggcaggcngatcacttgaggtcaggagtttgagaccagcctgggcaacaaagtgagaccctgtctctactaaaaataacaaaaattagccgggcgtggtggtgggngcctgtaatcccagctcctcgggtggctgaggcatgagaatcacttgaacccaggaggcagaggtttcagtgagctgagatcacatcactgcactccagcctgggtgacagagtgagattcngtc

SEQ ID NO: 429985 - DNA, 6365 bp, Homo sapiens
  misc_feature (4049)..(4049): n is a, c, g, or t
  misc_feature (4058)..(4058): n is a, c, g, or t
  misc_feature (4068)..(4068): n is a, c, g, or t
  misc_feature (4120)..(4120): n is a, c, g, or t
  misc_feature (4123)..(4123): n is a, c, g, or t
  misc_feature (4133)..(4133): n is a, c, g, or t
  misc_feature (4154)..(4154): n is a, c, g, or t
  misc_feature (4160)..(4160): n is a, c, g, or t
  misc_feature (4175)..(4175): n is a, c, g, or t
  misc_feature (4187)..(4187): n is a, c, g, or t
  misc_feature (4236)..(4236): n is a, c, g, or t
  misc_feature (4255)..(4255): n is a, c, g, or t
  misc_feature (4682)..(4683): n is a, c, g, or t
  misc_feature (4728)..(4728): n is a, c, g, or t
  misc_feature (4755)..(4755): n is a, c, g, or t
  misc_feature (4767)..(4767): n is a, c, g, or t
  misc_feature (4780)..(4780): n is a, c, g, or t
  misc_feature (4789)..(4789): n is a, c, g, or t
  misc_feature (6142)..(6142): n is a, c, g, or t
  misc_feature (6240)..(6240): n is a, c, g, or t
  misc_feature (6362)..(6362): n is a, c, g, or t
actggtgggcggtgaggggggaaagccccggatgttcgttggggattcaacatggcggcgggagtgtccgcggtggtggcggtgcaagagagctgagggaggcgcgagggcgcggagttccaggtcgagcagttaggccgcgagcgactgcggcgccgagccgccttcctgctgcccaccccgcgtccctccagactgggtcccgtgctcccgtcccccagccctgaccaccctgggcagctgctgcatggggacagatgagtaacccgaagcccctagaggagtggtcacctgcctgagggcacttctgtcccaccagcatcagaccaggccgcaccgagtccccggcaccatgtttgggaagaggaagaagcgggtggagatctccgcgccgtccaacttcgagcaccgcgtgcacacgggcttcgaccagcacgagcagaagttcacggggctgccccgccagtggcagagcctgatcgaggagtcggctcgccggcccaagcccctcgtcgaccccgcctgcatcacctccatccagcccggggcccccaagaccatcgtgcggggcagcaaaggtgccaaagatggggccctcacgctgctgctggacgagtttgagaacatgtcggtgacacgctccaactccctgcggagagacagcccgccgccgcccgcccgtgcccgccaggaaaatgggatgccagaggagccggccaccacggccagagggggcccagggaaggcaggcagccgaggccggttcgccggtcacagcgaggcgggtggcggcagtggtgacaggcgacgggcggggccagagaagaggcccaagtcttccagggagggctcagggggtccccaggagtcctcccgggacaaacgccccctctccgggcctgatgtcggcaccccccagcctgctggtctggccagtggggcgaaactggcagctggccggccctttaacacctacccgagggctgacacggaccacccatcccggggtgcccagggggagcctcatgacgtggcccctaacgggccatcagcggggggcctggccatcccccagtcctcctcctcctcctcccggcctcccacccgagcccgaggtgcccccagccctggagtgctgggaccccacgcctcagagccccagctggcccctccagcctgcacccccgccgcccctgctgttcctgggccccctggcccccgctcaccacagcgggagccacagcgagtatcccatgagcagttccgggctgccctgcagctggtggtggacccaggcgacccccgctcctacctggacaacttcatcaagattggcgagggctccacgggcatcgtgtgcatcgccaccgtgcgcagctcgggcaagctggtggccgtcaagaagatggacctgcgcaagcagcagaggcgcgagctgctcttcaacgaggtggtaatcatgagggactaccagcacgagaatgtggtggagatgtacaacagctacctggtgggggacgagctctgggtggtcatggagttcctggaaggaggcgccctcaccgacatcgtcacccacaccaggatgaacgaggagcagatcgcggccgtgtgccttgcagtgctgcaggccctgtcggtgctccacgcccagggcgtcatccaccgggacatcaagagcgactcgatcctgctgacccatgatggcagggtgaagctgtcagactttgggttctgcgcccaggtgagcaaggaagtgccccgaaggaagtcgctggtcggcacgccctactggatggccccagagctcatctcccgccttccctacgggccagaggtagacatctggtcgctggggataatggtgattgagatggtggacggagagcccccctacttcaacgagccacccctcaaagccatgaagatgattcgggacaacctgccaccccgactgaagaacctgcacaaggtgtcgccatccctgaagggcttcctggaccgcctgctggtgcgagaccctgcccagcgggccacggcagccgagctgctgaagcacccattcctggccaaggcagggccgcctgccagcatcgtgcccctcatgcgccagaaccgcaccagatgaggcccagcgcccttcccctcaaccaaagagccccccgggtcacccccgccccactgaggccagtagggggccaggcctcccactcctcccagcccgggagatgctccgcgtggcaccaccctccttgctgggggtagatgagaccctactactgaactccagttttgatctcgtgacttttagaaaaacacagggactcgtgggagcaagcgaggctcccaggacccccaccctctgggacaggccctcccccatgttcttctgtctccaggaagggcagcggccctcccatcactggaagtctgcagtgggggtcgctgggggtggagagaacactaagaggtgaacatgtatgagtgtgtgcacgcgtgtgagtgtgcatgtgtgtgtgtgcaaaggtccagccaccccgtcctccagcctgcaaggggtgtctggcgccttgcctgacacccagccccctctccccctgagccattgtgggggtcgatcatgaatgtccgaagagtggccttttcccgtagccctgcgccccctttctgtggctggatggggagacaggtcagggccccccaccctctccagcccctgcagcaaatgactactgcacctggacagcctcctcttttctagaagtctatttatattgtcattttataacactctagcccctgcccttattgggggacagatggtccctgtcctgcggggtggccctggcagaaccactgcctgaagaaccaggttcctgcccggtcagcgcagccccagcccgcccacccctgcctcgagttagttttacaattaaaacattgtcttgttttgtgtctgtgtgcgatgtgtggggggcagggggccctgcccggctgtcttgggtgggaatttgcagggagagggtctggatctgggagcaaaccacgattccagccaaggcagggcaagggtggggtggggagtggggagttcaggtcatagcagccagtaagctcccccagcctgccactccccagaatggggcaggattgtccccacccctggaagcagccagtttgccacagtccatgtgcagactgatcccagtttgccaaatctgcaatttcctggaaccttttaaaggctgtcttgagcgcgtttggtgagtaggagctaacccaagttagtaaattgaaggccatttggcaaattggtcagtgggcagatgggcttttggggattgactgaggctgactggcctggagctgctggcttcggagagacaccctgtgaagtgtgtccttccacgcaggagcccagagccgagcccacgctggggggaatctgactggcatggaggtggccatgccaccatcgctgctgcagctgcatcctggcactttgcgcctcaggccctgttgggctccactttctgcatcctccccagcccccagggaggcagtggagtggggagagagccaggagtgagcctccgtccccaaagccagccaggcgtcatcagcaccagagacctcagcctggtcctctcgggaagtgagtggccagggcagagattccaggttagtccacgcctcccacccttcacaggtcctgaccccaagaatcagagcactgtgtgtgtggcagggcctatgccaagtgcaaacacagcctagatggatcatcacagagtgaaacccagcggtgcaagcagctgtgctctctgcgatgtattggaggcttaggtgaggtggatgcctttctggaaaaaaaaaaaatgctaacattggcaaaagaagaaatagaaaacaagaccaaaataactgtctcctcactgcacacacactccagaataaataaaaggtttcaggcttgaatgcactttcaaatgagattttttttttttttttgagacggagtatcgctctgtcgcccaggctggagtgcngtggcacgntcttggctcnctgcaacttctgcctcctgggttcaagcgattctcctgcctcagcctcccangtngctgggattncaggcgcttgccaccacgccnggctanttttttgtattttgngtagagactggntttcgccatcttggccagactggtcttgaactcctgacctcgtgatccncccacctcagcctcccaangtgctgggattacaggcatgagccaccatgcctggcctcaaatgaggtttaccagactttgaaggagcaggtaattccttctaccttgtgaacaagttgttccagaaagatagcagctcaggaggcctctgtgaccatggttccagacccagataaggacggcaaagaacagagcatctcagaaacgcaaggctcacagccagggtgcccggcgaccccacgggcactgagaacagctagctctaggagctccactctcctgctgaagaaaccacgggctcagagacggggagctccctcgcccagccacatctgtgaccccacggtaactctgctggttttggtgccttcagtcactcactgcaggtttgttttgttttgttttgttttgagtttttttgttttttgttttttgtttttagagacnngatgttgctatgttgcctaggctggtttcgaactcctggcctcangggatcctccctccttggccccgcaangtgctgggattncaggcgtgagccnccgtgcccngcccgctcactgcagtttgaaggcatggctttgggtggcgtggggtgaaagctgcccgaggccccgttcctccccacgtggctgcctcctgccagagccagtcaggaaaacagaccccaactagagttgtttcaaatggcagggatttggtaccggtggttggatcatgacaaagctctgagaaggctggaggagccacagagtgccaagtgcccagcaatcattagaggaaggaggctgctgccacctgtgtggctagaggaacagaggggccaatggcattccccaaaccccactctcgcctctgtctggccagagcagaatggcttcttccagcttcccaccctggactcccacccaggagcctcctcctggcagacccttcctgaccccaccggcccggggggtctacagatccatgtttcaggcgtccgcctggagcggaacaggggagtgcttaggacaagggtggtgccagaggatccactctgcccacatttagttgaccagctgaggcactccacgggaatgaatgactctcgacaggtgccggaggtgaggaggggcccggaggcccaggaggggcacagggatggattcgtccgcctgggggctggaggtgtgtttacagagccccaaaataaacaatgcaaccaggtcagaccagcggttctcacagtgtggttcccagaccagcagcatcactgggagcttactggacacgcaaataaatccctgtgtgccaccccagctgcatcagatgctggtggggcccagtgatctgtatttaacacaccctccgggggatgccggtgcccactcacgtttgagaacccctgcgatccacgactgccctcccgtgtaaaaggcccacctctgtgggactccaagtcatcagcaccctagggtccttccgtctttttccttcctcctgggacacctgcctctcccatgtcgtattagagaattccttatgctcccaagtgggcacggggagaggaaggcactcctctttaaggaccgacccagaggttttgccattgcttcactggccagagcttagtcacgcagcctcacccagaggcaagggaggttggaaaatgtagtgtttgtgtgtgtctaacacaaattctattaccatgcagtcaggattctccactcttgctctttcattagatttgctgggcttcaccctggactttctgatttagtgacagaacagagaacccagaggcagacccagatgtgtacaagggcttcatatacaatcaggagatttaataatcatgctaggggccgggtgcagtggctcacgcctgtaatcccaagcactttggggagccgaggcaggcngatcacttgaggtcaggagtttgagaccagcctgggcaacaaagtgagaccctgtctctactaaaaataacaaaaattagccgggcgtggtggtgggngcctgtaatcccagctcctcgggtggctgaggcatgagaatcacttgaacccaggaggcagaggtttcagtgagctgagatcacatcactgcactccagcctgggtgacagagtgagattcngtc

SEQ ID NO: 429986 - DNA, 6072 bp, Homo sapiens
  misc_feature (3756)..(3756): n is a, c, g, or t
  misc_feature (3765)..(3765): n is a, c, g, or t
  misc_feature (3775)..(3775): n is a, c, g, or t
  misc_feature (3827)..(3827): n is a, c, g, or t
  misc_feature (3830)..(3830): n is a, c, g, or t
  misc_feature (3840)..(3840): n is a, c, g, or t
  misc_feature (3861)..(3861): n is a, c, g, or t
  misc_feature (3867)..(3867): n is a, c, g, or t
  misc_feature (3882)..(3882): n is a, c, g, or t
  misc_feature (3894)..(3894): n is a, c, g, or t
  misc_feature (3943)..(3943): n is a, c, g, or t
  misc_feature (3962)..(3962): n is a, c, g, or t
  misc_feature (4389)..(4390): n is a, c, g, or t
  misc_feature (4435)..(4435): n is a, c, g, or t
  misc_feature (4462)..(4462): n is a, c, g, or t
  misc_feature (4474)..(4474): n is a, c, g, or t
  misc_feature (4487)..(4487): n is a, c, g, or t
  misc_feature (4496)..(4496): n is a, c, g, or t
  misc_feature (5849)..(5849): n is a, c, g, or t
  misc_feature (5947)..(5947): n is a, c, g, or t
  misc_feature (6069)..(6069): n is a, c, g, or t
actggtgggcggtgaggggggaaagccccggatgttcgttggggattcaacatggcggcgggagtgtccgcggtggtggcggtgcaagagagctgagggaggcgcgagggcgcggagttccaggtcgagcagttaggccgcgagcgactgcggcgccgagccgatgagtaacccgaagcccctagaggagtggtcacctgcctgagggcacttctgtcccaccagcatcagaccaggccgcaccgagtccccggcaccatgtttgggaagaggaagaagcgggtggagatctccgcgccgtccaacttcgagcaccgcgtgcacacgggcttcgaccagcacgagcagaagttcacggggctgccccgccagtggcagagcctgatcgaggagtcggctcgccggcccaagcccctcgtcgaccccgcctgcatcacctccatccagcccggggcccccaagaccatcgtgcggggcagcaaaggtgccaaagatggggccctcacgctgctgctggacgagtttgagaacatgtcggtgacacgctccaactccctgcggagagacagcccgccgccgcccgcccgtgcccgccaggaaaatgggatgccagaggagccggccaccacggccagagggggcctggggcgaaactggcagctggccggccctttaacacctacccgagggctgacacggaccacccatcccggggtgcccagggggagcctcatgacgtggcccctaacgggccatcagcggggggcctggccatcccccagtcctcctcctcctcctcccggcctcccacccgagcccgaggtgcccccagccctggagtgctgggaccccacgcctcagagccccagctggcccctccagcctgcacccccgccgcccctgctgttcctgggccccctggcccccgctcaccacagcgggagccacagcgagtatcccatgagcagttccgggctgccctgcagctggtggtggacccaggcgacccccgctcctacctggacaacttcatcaagattggcgagggctccacgggcatcgtgtgcatcgccaccgtgcgcagctcgggcaagctggtggccgtcaagaagatggacctgcgcaagcagcagaggcgcgagctgctcttcaacgaggtggtaatcatgagggactaccagcacgagaatgtggtggagatgtacaacagctacctggtgggggacgagctctgggtggtcatggagttcctggaaggaggcgccctcaccgacatcgtcacccacaccaggatgaacgaggagcagatcgcggccgtgtgccttgcagtgctgcaggccctgtcggtgctccacgcccagggcgtcatccaccgggacatcaagagcgactcgatcctgctgacccatgatggcagggtgaagctgtcagactttgggttctgcgcccaggtgagcaaggaagtgccccgaaggaagtcgctggtcggcacgccctactggatggccccagagctcatctcccgccttccctacgggccagaggtagacatctggtcgctggggataatggtgattgagatggtggacggagagcccccctacttcaacgagccacccctcaaagccatgaagatgattcgggacaacctgccaccccgactgaagaacctgcacaaggtgtcgccatccctgaagggcttcctggaccgcctgctggtgcgagaccctgcccagcgggccacggcagccgagctgctgaagcacccattcctggccaaggcagggccgcctgccagcatcgtgcccctcatgcgccagaaccgcaccagatgaggcccagcgcccttcccctcaaccaaagagccccccgggtcacccccgccccactgaggccagtagggggccaggcctcccactcctcccagcccgggagatgctccgcgtggcaccaccctccttgctgggggtagatgagaccctactactgaactccagttttgatctcgtgacttttagaaaaacacagggactcgtgggagcaagcgaggctcccaggacccccaccctctgggacaggccctcccccatgttcttctgtctccaggaagggcagcggccctcccatcactggaagtctgcagtgggggtcgctgggggtggagagaacactaagaggtgaacatgtatgagtgtgtgcacgcgtgtgagtgtgcatgtgtgtgtgtgcaaaggtccagccaccccgtcctccagcctgcaaggggtgtctggcgccttgcctgacacccagccccctctccccctgagccattgtgggggtcgatcatgaatgtccgaagagtggccttttcccgtagccctgcgccccctttctgtggctggatggggagacaggtcagggccccccaccctctccagcccctgcagcaaatgactactgcacctggacagcctcctcttttctagaagtctatttatattgtcattttataacactctagcccctgcccttattgggggacagatggtccctgtcctgcggggtggccctggcagaaccactgcctgaagaaccaggttcctgcccggtcagcgcagccccagcccgcccacccctgcctcgagttagttttacaattaaaacattgtcttgttttgtgtctgtgtgcgatgtgtggggggcagggggccctgcccggctgtcttgggtgggaatttgcagggagagggtctggatctgggagcaaaccacgattccagccaaggcagggcaagggtggggtggggagtggggagttcaggtcatagcagccagtaagctcccccagcctgccactccccagaatggggcaggattgtccccacccctggaagcagccagtttgccacagtccatgtgcagactgatcccagtttgccaaatctgcaatttcctggaaccttttaaaggctgtcttgagcgcgtttggtgagtaggagctaacccaagttagtaaattgaaggccatttggcaaattggtcagtgggcagatgggcttttggggattgactgaggctgactggcctggagctgctggcttcggagagacaccctgtgaagtgtgtccttccacgcaggagcccagagccgagcccacgctggggggaatctgactggcatggaggtggccatgccaccatcgctgctgcagctgcatcctggcactttgcgcctcaggccctgttgggctccactttctgcatcctccccagcccccagggaggcagtggagtggggagagagccaggagtgagcctccgtccccaaagccagccaggcgtcatcagcaccagagacctcagcctggtcctctcgggaagtgagtggccagggcagagattccaggttagtccacgcctcccacccttcacaggtcctgaccccaagaatcagagcactgtgtgtgtggcagggcctatgccaagtgcaaacacagcctagatggatcatcacagagtgaaacccagcggtgcaagcagctgtgctctctgcgatgtattggaggcttaggtgaggtggatgcctttctggaaaaaaaaaaaatgctaacattggcaaaagaagaaatagaaaacaagaccaaaataactgtctcctcactgcacacacactccagaataaataaaaggtttcaggcttgaatgcactttcaaatgagattttttttttttttttgagacggagtatcgctctgtcgcccaggctggagtgcngtggcacgntcttggctcnctgcaacttctgcctcctgggttcaagcgattctcctgcctcagcctcccangtngctgggattncaggcgcttgccaccacgccnggctanttttttgtattttgngtagagactggntttcgccatcttggccagactggtcttgaactcctgacctcgtgatccncccacctcagcctcccaangtgctgggattacaggcatgagccaccatgcctggcctcaaatgaggtttaccagactttgaaggagcaggtaattccttctaccttgtgaacaagttgttccagaaagatagcagctcaggaggcctctgtgaccatggttccagacccagataaggacggcaaagaacagagcatctcagaaacgcaaggctcacagccagggtgcccggcgaccccacgggcactgagaacagctagctctaggagctccactctcctgctgaagaaaccacgggctcagagacggggagctccctcgcccagccacatctgtgaccccacggtaactctgctggttttggtgccttcagtcactcactgcaggtttgttttgttttgttttgttttgagtttttttgttttttgttttttgtttttagagacnngatgttgctatgttgcctaggctggtttcgaactcctggcctcangggatcctccctccttggccccgcaangtgctgggattncaggcgtgagccnccgtgcccngcccgctcactgcagtttgaaggcatggctttgggtggcgtggggtgaaagctgcccgaggccccgttcctccccacgtggctgcctcctgccagagccagtcaggaaaacagaccccaactagagttgtttcaaatggcagggatttggtaccggtggttggatcatgacaaagctctgagaaggctggaggagccacagagtgccaagtgcccagcaatcattagaggaaggaggctgctgccacctgtgtggctagaggaacagaggggccaatggcattccccaaaccccactctcgcctctgtctggccagagcagaatggcttcttccagcttcccaccctggactcccacccaggagcctcctcctggcagacccttcctgaccccaccggcccggggggtctacagatccatgtttcaggcgtccgcctggagcggaacaggggagtgcttaggacaagggtggtgccagaggatccactctgcccacatttagttgaccagctgaggcactccacgggaatgaatgactctcgacaggtgccggaggtgaggaggggcccggaggcccaggaggggcacagggatggattcgtccgcctgggggctggaggtgtgtttacagagccccaaaataaacaatgcaaccaggtcagaccagcggttctcacagtgtggttcccagaccagcagcatcactgggagcttactggacacgcaaataaatccctgtgtgccaccccagctgcatcagatgctggtggggcccagtgatctgtatttaacacaccctccgggggatgccggtgcccactcacgtttgagaacccctgcgatccacgactgccctcccgtgtaaaaggcccacctctgtgggactccaagtcatcagcaccctagggtccttccgtctttttccttcctcctgggacacctgcctctcccatgtcgtattagagaattccttatgctcccaagtgggcacggggagaggaaggcactcctctttaaggaccgacccagaggttttgccattgcttcactggccagagcttagtcacgcagcctcacccagaggcaagggaggttggaaaatgtagtgtttgtgtgtgtctaacacaaattctattaccatgcagtcaggattctccactcttgctctttcattagatttgctgggcttcaccctggactttctgatttagtgacagaacagagaacccagaggcagacccagatgtgtacaagggcttcatatacaatcaggagatttaataatcatgctaggggccgggtgcagtggctcacgcctgtaatcccaagcactttggggagccgaggcaggcngatcacttgaggtcaggagtttgagaccagcctgggcaacaaagtgagaccctgtctctactaaaaataacaaaaattagccgggcgtggtggtgggngcctgtaatcccagctcctcgggtggctgaggcatgagaatcacttgaacccaggaggcagaggtttcagtgagctgagatcacatcactgcactccagcctgggtgacagagtgagattcngtc

SEQ ID NO: 429987 - DNA, 5739 bp, Homo sapiens
  misc_feature (3423)..(3423): n is a, c, g, or t
  misc_feature (3432)..(3432): n is a, c, g, or t
  misc_feature (3442)..(3442): n is a, c, g, or t
  misc_feature (3494)..(3494): n is a, c, g, or t
  misc_feature (3497)..(3497): n is a, c, g, or t
  misc_feature (3507)..(3507): n is a, c, g, or t
  misc_feature (3528)..(3528): n is a, c, g, or t
  misc_feature (3534)..(3534): n is a, c, g, or t
  misc_feature (3549)..(3549): n is a, c, g, or t
  misc_feature (3561)..(3561): n is a, c, g, or t
  misc_feature (3610)..(3610): n is a, c, g, or t
  misc_feature (3629)..(3629): n is a, c, g, or t
  misc_feature (4056)..(4057): n is a, c, g, or t
  misc_feature (4102)..(4102): n is a, c, g, or t
  misc_feature (4129)..(4129): n is a, c, g, or t
  misc_feature (4141)..(4141): n is a, c, g, or t
  misc_feature (4154)..(4154): n is a, c, g, or t
  misc_feature (4163)..(4163): n is a, c, g, or t
  misc_feature (5516)..(5516): n is a, c, g, or t
  misc_feature (5614)..(5614): n is a, c, g, or t
  misc_feature (5736)..(5736): n is a, c, g, or t
actggtgggcggtgaggggggaaagccccggatgttcgttggggattcaacatggcggcgggagtgtccgcggtggtggcggtgcaagagagctgagggaggcgcgagggcgcggagttccaggtcgagcagttaggccgcgagcgactgcggcgccgagccggccgcaccgagtccccggcaccatgtttgggaagaggaagaagcgggtggagatctccgcgccgtccaacttcgagcaccgcgtgcacacgggcttcgaccagcacgagcagaagttcacggggctgccccgccagtggcagagcctgatcgaggagtcggctcgccggcccaagcccctcgtcgaccccgcctgcatcacctccatccagcccggggcccccaagggggagcctcatgacgtggcccctaacgggccatcagcggggggcctggccatcccccagtcctcctcctcctcctcccggcctcccacccgagcccgaggtgcccccagccctggagtgctgggaccccacgcctcagagccccagctggcccctccagcctgcacccccgccgcccctgctgttcctgggccccctggcccccgctcaccacagcgggagccacagcgagtatcccatgagcagttccgggctgccctgcagctggtggtggacccaggcgacccccgctcctacctggacaacttcatcaagattggcgagggctccacgggcatcgtgtgcatcgccaccgtgcgcagctcgggcaagctggtggccgtcaagaagatggacctgcgcaagcagcagaggcgcgagctgctcttcaacgaggtggtaatcatgagggactaccagcacgagaatgtggtggagatgtacaacagctacctggtgggggacgagctctgggtggtcatggagttcctggaaggaggcgccctcaccgacatcgtcacccacaccaggatgaacgaggagcagatcgcggccgtgtgccttgcagtgctgcaggccctgtcggtgctccacgcccagggcgtcatccaccgggacatcaagagcgactcgatcctgctgacccatgatggcagggtgaagctgtcagactttgggttctgcgcccaggtgagcaaggaagtgccccgaaggaagtcgctggtcggcacgccctactggatggccccagagctcatctcccgccttccctacgggccagaggtagacatctggtcgctggggataatggtgattgagatggtggacggagagcccccctacttcaacgagccacccctcaaagccatgaagatgattcgggacaacctgccaccccgactgaagaacctgcacaaggtgtcgccatccctgaagggcttcctggaccgcctgctggtgcgagaccctgcccagcgggccacggcagccgagctgctgaagcacccattcctggccaaggcagggccgcctgccagcatcgtgcccctcatgcgccagaaccgcaccagatgaggcccagcgcccttcccctcaaccaaagagccccccgggtcacccccgccccactgaggccagtagggggccaggcctcccactcctcccagcccgggagatgctccgcgtggcaccaccctccttgctgggggtagatgagaccctactactgaactccagttttgatctcgtgacttttagaaaaacacagggactcgtgggagcaagcgaggctcccaggacccccaccctctgggacaggccctcccccatgttcttctgtctccaggaagggcagcggccctcccatcactggaagtctgcagtgggggtcgctgggggtggagagaacactaagaggtgaacatgtatgagtgtgtgcacgcgtgtgagtgtgcatgtgtgtgtgtgcaaaggtccagccaccccgtcctccagcctgcaaggggtgtctggcgccttgcctgacacccagccccctctccccctgagccattgtgggggtcgatcatgaatgtccgaagagtggccttttcccgtagccctgcgccccctttctgtggctggatggggagacaggtcagggccccccaccctctccagcccctgcagcaaatgactactgcacctggacagcctcctcttttctagaagtctatttatattgtcattttataacactctagcccctgcccttattgggggacagatggtccctgtcctgcggggtggccctggcagaaccactgcctgaagaaccaggttcctgcccggtcagcgcagccccagcccgcccacccctgcctcgagttagttttacaattaaaacattgtcttgttttgtgtctgtgtgcgatgtgtggggggcagggggccctgcccggctgtcttgggtgggaatttgcagggagagggtctggatctgggagcaaaccacgattccagccaaggcagggcaagggtggggtggggagtggggagttcaggtcatagcagccagtaagctcccccagcctgccactccccagaatggggcaggattgtccccacccctggaagcagccagtttgccacagtccatgtgcagactgatcccagtttgccaaatctgcaatttcctggaaccttttaaaggctgtcttgagcgcgtttggtgagtaggagctaacccaagttagtaaattgaaggccatttggcaaattggtcagtgggcagatgggcttttggggattgactgaggctgactggcctggagctgctggcttcggagagacaccctgtgaagtgtgtccttccacgcaggagcccagagccgagcccacgctggggggaatctgactggcatggaggtggccatgccaccatcgctgctgcagctgcatcctggcactttgcgcctcaggccctgttgggctccactttctgcatcctccccagcccccagggaggcagtggagtggggagagagccaggagtgagcctccgtccccaaagccagccaggcgtcatcagcaccagagacctcagcctggtcctctcgggaagtgagtggccagggcagagattccaggttagtccacgcctcccacccttcacaggtcctgaccccaagaatcagagcactgtgtgtgtggcagggcctatgccaagtgcaaacacagcctagatggatcatcacagagtgaaacccagcggtgcaagcagctgtgctctctgcgatgtattggaggcttaggtgaggtggatgcctttctggaaaaaaaaaaaatgctaacattggcaaaagaagaaatagaaaacaagaccaaaataactgtctcctcactgcacacacactccagaataaataaaaggtttcaggcttgaatgcactttcaaatgagattttttttttttttttgagacggagtatcgctctgtcgcccaggctggagtgcngtggcacgntcttggctcnctgcaacttctgcctcctgggttcaagcgattctcctgcctcagcctcccangtngctgggattncaggcgcttgccaccacgccnggctanttttttgtattttgngtagagactggntttcgccatcttggccagactggtcttgaactcctgacctcgtgatccncccacctcagcctcccaangtgctgggattacaggcatgagccaccatgcctggcctcaaatgaggtttaccagactttgaaggagcaggtaattccttctaccttgtgaacaagttgttccagaaagatagcagctcaggaggcctctgtgaccatggttccagacccagataaggacggcaaagaacagagcatctcagaaacgcaaggctcacagccagggtgcccggcgaccccacgggcactgagaacagctagctctaggagctccactctcctgctgaagaaaccacgggctcagagacggggagctccctcgcccagccacatctgtgaccccacggtaactctgctggttttggtgccttcagtcactcactgcaggtttgttttgttttgttttgttttgagtttttttgttttttgttttttgtttttagagacnngatgttgctatgttgcctaggctggtttcgaactcctggcctcangggatcctccctccttggccccgcaangtgctgggattncaggcgtgagccnccgtgcccngcccgctcactgcagtttgaaggcatggctttgggtggcgtggggtgaaagctgcccgaggccccgttcctccccacgtggctgcctcctgccagagccagtcaggaaaacagaccccaactagagttgtttcaaatggcagggatttggtaccggtggttggatcatgacaaagctctgagaaggctggaggagccacagagtgccaagtgcccagcaatcattagaggaaggaggctgctgccacctgtgtggctagaggaacagaggggccaatggcattccccaaaccccactctcgcctctgtctggccagagcagaatggcttcttccagcttcccaccctggactcccacccaggagcctcctcctggcagacccttcctgaccccaccggcccggggggtctacagatccatgtttcaggcgtccgcctggagcggaacaggggagtgcttaggacaagggtggtgccagaggatccactctgcccacatttagttgaccagctgaggcactccacgggaatgaatgactctcgacaggtgccggaggtgaggaggggcccggaggcccaggaggggcacagggatggattcgtccgcctgggggctggaggtgtgtttacagagccccaaaataaacaatgcaaccaggtcagaccagcggttctcacagtgtggttcccagaccagcagcatcactgggagcttactggacacgcaaataaatccctgtgtgccaccccagctgcatcagatgctggtggggcccagtgatctgtatttaacacaccctccgggggatgccggtgcccactcacgtttgagaacccctgcgatccacgactgccctcccgtgtaaaaggcccacctctgtgggactccaagtcatcagcaccctagggtccttccgtctttttccttcctcctgggacacctgcctctcccatgtcgtattagagaattccttatgctcccaagtgggcacggggagaggaaggcactcctctttaaggaccgacccagaggttttgccattgcttcactggccagagcttagtcacgcagcctcacccagaggcaagggaggttggaaaatgtagtgtttgtgtgtgtctaacacaaattctattaccatgcagtcaggattctccactcttgctctttcattagatttgctgggcttcaccctggactttctgatttagtgacagaacagagaacccagaggcagacccagatgtgtacaagggcttcatatacaatcaggagatttaataatcatgctaggggccgggtgcagtggctcacgcctgtaatcccaagcactttggggagccgaggcaggcngatcacttgaggtcaggagtttgagaccagcctgggcaacaaagtgagaccctgtctctactaaaaataacaaaaattagccgggcgtggtggtgggngcctgtaatcccagctcctcgggtggctgaggcatgagaatcacttgaacccaggaggcagaggtttcagtgagctgagatcacatcactgcactccagcctgggtgacagagtgagattcngtc

SEQ ID NO: 429988 - DNA, 3924 bp, Homo sapiens
  misc_feature (1608)..(1608): n is a, c, g, or t
  misc_feature (1617)..(1617): n is a, c, g, or t
  misc_feature (1627)..(1627): n is a, c, g, or t
  misc_feature (1679)..(1679): n is a, c, g, or t
  misc_feature (1682)..(1682): n is a, c, g, or t
  misc_feature (1692)..(1692): n is a, c, g, or t
  misc_feature (1713)..(1713): n is a, c, g, or t
  misc_feature (1719)..(1719): n is a, c, g, or t
  misc_feature (1734)..(1734): n is a, c, g, or t
  misc_feature (1746)..(1746): n is a, c, g, or t
  misc_feature (1795)..(1795): n is a, c, g, or t
  misc_feature (1814)..(1814): n is a, c, g, or t
  misc_feature (2241)..(2242): n is a, c, g, or t
  misc_feature (2287)..(2287): n is a, c, g, or t
  misc_feature (2314)..(2314): n is a, c, g, or t
  misc_feature (2326)..(2326): n is a, c, g, or t
  misc_feature (2339)..(2339): n is a, c, g, or t
  misc_feature (2348)..(2348): n is a, c, g, or t
  misc_feature (3701)..(3701): n is a, c, g, or t
  misc_feature (3799)..(3799): n is a, c, g, or t
  misc_feature (3921)..(3921): n is a, c, g, or t
cacaccagctcggggttgcacaccagctcggggttgcacaccagctcggggttgcacaccagctcggggttgcacaccagctcggggttgcacaccaactcggggttgcacaccagctcggggttgcacaccagctcggggttgcacaccagctcggggttccattgtgggggtcgatcatgaatgtccgaagagtggccttttcccgtagccctgcgccccctttctgtggctggatggggagacaggtcagggccccccaccctctccagcccctgcagcaaatgactactgcacctggacagcctcctcttttctagaagtctatttatattgtcattttataacactctagcccctgcccttattgggggacagatggtccctgtcctgcggggtggccctggcagaaccactgcctgaagaaccaggttcctgcccggtcagcgcagccccagcccgcccacccctgcctcgagttagttttacaattaaaacattgtcttgttttgtgtctgtgtgcgatgtgtggggggcagggggccctgcccggctgtcttgggtgggaatttgcagggagagggtctggatctgggagcaaaccacgattccagccaaggcagggcaagggtggggtggggagtggggagttcaggtcatagcagccagtaagctcccccagcctgccactccccagaatggggcaggattgtccccacccctggaagcagccagtttgccacagtccatgtgcagactgatcccagtttgccaaatctgcaatttcctggaaccttttaaaggctgtcttgagcgcgtttggtgagtaggagctaacccaagttagtaaattgaaggccatttggcaaattggtcagtgggcagatgggcttttggggattgactgaggctgactggcctggagctgctggcttcggagagacaccctgtgaagtgtgtccttccacgcaggagcccagagccgagcccacgctggggggaatctgactggcatggaggtggccatgccaccatcgctgctgcagctgcatcctggcactttgcgcctcaggccctgttgggctccactttctgcatcctccccagcccccagggaggcagtggagtggggagagagccaggagtgagcctccgtccccaaagccagccaggcgtcatcagcaccagagacctcagcctggtcctctcgggaagtgagtggccagggcagagattccaggttagtccacgcctcccacccttcacaggtcctgaccccaagaatcagagcactgtgtgtgtggcagggcctatgccaagtgcaaacacagcctagatggatcatcacagagtgaaacccagcggtgcaagcagctgtgctctctgcgatgtattggaggcttaggtgaggtggatgcctttctggaaaaaaaaaaaatgctaacattggcaaaagaagaaatagaaaacaagaccaaaataactgtctcctcactgcacacacactccagaataaataaaaggtttcaggcttgaatgcactttcaaatgagattttttttttttttttgagacggagtatcgctctgtcgcccaggctggagtgcngtggcacgntcttggctcnctgcaacttctgcctcctgggttcaagcgattctcctgcctcagcctcccangtngctgggattncaggcgcttgccaccacgccnggctanttttttgtattttgngtagagactggntttcgccatcttggccagactggtcttgaactcctgacctcgtgatccncccacctcagcctcccaangtgctgggattacaggcatgagccaccatgcctggcctcaaatgaggtttaccagactttgaaggagcaggtaattccttctaccttgtgaacaagttgttccagaaagatagcagctcaggaggcctctgtgaccatggttccagacccagataaggacggcaaagaacagagcatctcagaaacgcaaggctcacagccagggtgcccggcgaccccacgggcactgagaacagctagctctaggagctccactctcctgctgaagaaaccacgggctcagagacggggagctccctcgcccagccacatctgtgaccccacggtaactctgctggttttggtgccttcagtcactcactgcaggtttgttttgttttgttttgttttgagtttttttgttttttgttttttgtttttagagacnngatgttgctatgttgcctaggctggtttcgaactcctggcctcangggatcctccctccttggccccgcaangtgctgggattncaggcgtgagccnccgtgcccngcccgctcactgcagtttgaaggcatggctttgggtggcgtggggtgaaagctgcccgaggccccgttcctccccacgtggctgcctcctgccagagccagtcaggaaaacagaccccaactagagttgtttcaaatggcagggatttggtaccggtggttggatcatgacaaagctctgagaaggctggaggagccacagagtgccaagtgcccagcaatcattagaggaaggaggctgctgccacctgtgtggctagaggaacagaggggccaatggcattccccaaaccccactctcgcctctgtctggccagagcagaatggcttcttccagcttcccaccctggactcccacccaggagcctcctcctggcagacccttcctgaccccaccggcccggggggtctacagatccatgtttcaggcgtccgcctggagcggaacaggggagtgcttaggacaagggtggtgccagaggatccactctgcccacatttagttgaccagctgaggcactccacgggaatgaatgactctcgacaggtgccggaggtgaggaggggcccggaggcccaggaggggcacagggatggattcgtccgcctgggggctggaggtgtgtttacagagccccaaaataaacaatgcaaccaggtcagaccagcggttctcacagtgtggttcccagaccagcagcatcactgggagcttactggacacgcaaataaatccctgtgtgccaccccagctgcatcagatgctggtggggcccagtgatctgtatttaacacaccctccgggggatgccggtgcccactcacgtttgagaacccctgcgatccacgactgccctcccgtgtaaaaggcccacctctgtgggactccaagtcatcagcaccctagggtccttccgtctttttccttcctcctgggacacctgcctctcccatgtcgtattagagaattccttatgctcccaagtgggcacggggagaggaaggcactcctctttaaggaccgacccagaggttttgccattgcttcactggccagagcttagtcacgcagcctcacccagaggcaagggaggttggaaaatgtagtgtttgtgtgtgtctaacacaaattctattaccatgcagtcaggattctccactcttgctctttcattagatttgctgggcttcaccctggactttctgatttagtgacagaacagagaacccagaggcagacccagatgtgtacaagggcttcatatacaatcaggagatttaataatcatgctaggggccgggtgcagtggctcacgcctgtaatcccaagcactttggggagccgaggcaggcngatcacttgaggtcaggagtttgagaccagcctgggcaacaaagtgagaccctgtctctactaaaaataacaaaaattagccgggcgtggtggtgggngcctgtaatcccagctcctcgggtggctgaggcatgagaatcacttgaacccaggaggcagaggtttcagtgagctgagatcacatcactgcactccagcctgggtgacagagtgagattcngtc

SEQ ID NO: 429989 - DNA, 2996 bp, Homo sapiens
ctcactgcaagctctgcctcccgggttcacgccattctcctgcctcagcctcccgagtagctgggactacaggtgcccgccaccatgcccggctgatttctttttgtatttttagtagagacggagtttcaccgtgttagccaggatggtctcgatctcctgacctcgtgatccgcccgccttggcctccaaagtgctgggattacaggtgtgagctaccgcgcccggcctattatcttgtactttctaactgagccctctattttctttattttaataatatttctccccacttgagaatcacttgttagttcttggtaggaattcagttgggcaatgataacttttatgggcaaaaacattctattatagtgaacaaatgaaaataacagcgtattttcaatattttcttattccttaaattccactcttttaacactatgcttaaccacttaatgtgatgaaatattcctaaaagttaaatgactattaaagcatatattgttgcatgtatatattaagtagccgatactctaaataaaaataccactgttacagataaatggggcctttaaaaatatgaaaaacaaacttgtgaaaatgtataaaagatgcatctgttgtttcaaatggcactatcttcttttcagtactacaaaaacagaataattttgaagttttagaataaatgtaatatatttactataattctaaatgtttaaatgcttttctaaaaatgcaaaactatgatgtttagttgctttattttacctctatgtgattatttttcttaattgttattttttataatcattatttttctgaaccattcttctggcctcagaagtaggactgaattctactattgctaggtgtgagaaagtggtggtgagaaccttagagcagtggagatttgctacctggtctgtgttttgagaagtgccccttagaaagttaaaagaatgtagaaaagatactcagtcttaatcctatgcaaaaaaaaaaaatcaagtaattgttttcctatgaggaaaataaccatgagctgtatcatgctacttagcttttatgtaaatatttcttatgtctcctctattaagagtatttaaaatcatatttaaatatgaatctattcatgctaacattatttttcaaaacatacatggaaatttagcccagattgtctacatataaggtttttatttgaattgtaaaatatttaaaagtatgaataaaatatatttataggtatttatcagagatgattattttgtgctacatacaggttggctaatgagctctagtgttaaactacctgattaatttcttataaagcagcataaccttggcttgattaaggaattctactttcaaaaattaatctgataatagtaacaaggtatattatactttcattacaatcaaattatagaaattacttgtgtaaaagggcttcaagaatatatccaatttttaaatattttaatatatctcctatctgataacttaattcttctaaattaccacttgccattaagctatttcataataaattctgtacagtttcccccaaaaaaagagatttatttatgaaatatttaaagtttctaatgtggtattttaaataaagtatcataaatgtaataagtaaatatttatttaggaatactgtgaacactgaactaattattcctgtgtcagtctatgaaatccctgttttgaaataagtaaacagcctaaaatgtgttgaaattattttgtaaatccatgacttaaaacaagatacatacatagtataacacacctcacagtgttaagatttatattgtgaaatgagacaccctaccttcaattgttcatcagtgggtaaaacaaattctgatgtacattcaggacaaatgattagccctaaatgaaactgtaataatttcagtggaaactcaatctgtttttacctttaaacagtgaattttacatgaatgaatgggttcttcactttttttttagtatgagaaaattatacagtgcttaattttcagagattctttccatatgttactaaaaaatgttttgttcagcctaacatactgagttttttttaactttctaaattattgaatttccatcatgcattcatccaaaattaaggcagactgtttggattcttccagtggccagatgagctaaattaaatcacaaaagcagatgcttttgtatgatctccaaattgccaactttaaggaaatattctcttgaaattgtctttaaagatcttttgcagctttgcagatacccagactgagctggaactggaatttgtcttcctattgactctacttctttaaaagcggctgcccattacattcctcagctgtccttgcagttaggtgtacatgtgactgagtgttggccagtgagatgaagtctcctcaaaggaaggcagcatgtgtcctttttcatcccttcatcttgctgctgggattgtggatataacaggagccctggcagctgtctccagaggatcaaagccacacccaaagagtaaggcagattagagaccagaaagaccttgactacttccctacttccactgctttttcctgcatttaagccattgtaaatctgggtgtgttacatgaagtgaaaattaattctttctgcccttcagttctttatcctgataccatttaacactgtctgaattaactagactgcaataattctttcttttgaaagcttttaaaggataatgtgcaattcacattaaaattgattttccattgtcaattagttatactcattttcctgccttgatctttcattagatattttgtatctgcttggaatatattatcttctttttaactgtgtaattggtaattactaaaactctgtaatctccaaaatattgctatcaaattacacaccatgttttctatcattctcatagatctgccttataaacatttaaataaaaagtactatttaatgattta

SEQ ID NO: 429990 - DNA, 1221 bp, Homo sapiens
ctcactgcaagctctgcctcccgggttcacgccattctcctgcctcagcctcccgagtagctgggactacaggtgcccgccaccatgcccggctgatttctttttgtatttttagtagagacggagtttcaccgtgttagccaggatggtctcgatctcctgacctcgtgatccgcccgccttggcctccaaagtgctgggattacaggtgtgagctaccgcgcccggcctattatcttgtactttctaactgagccctctattttctttattttaataatatttctccccacttgagaatcacttgttagttcttggtaggaattcagttgggcaatgataacttttatgggcaaaaacattctattatagtgaacaaatgaaaataacagcgtattttcaatattttcttattccttaaattccactcttttaacactatgcttaaccacttaatgtgatgaaatattcctaaaagttaaatgactattaaagcatatattgttgcatgtatatattaagtagccgatactctaaataaaaataccactgttacagataaatggggcctttaaaaatatgaaaaacaaacttgtgaaaatgtataaaagatgcatctgttgtttcaaatggcactatcttcttttcagtactacaaaaacagaataattttgaagttttagaataaatgtaatatatttactataattctaaatgtttaaatgcttttctaaaaatgcaaaactatgatgtttagttgctttattttacctctatgtgattatttttcttaattgttattttttataatcattatttttctgaaccattcttctggcctcagaagtaggactgaattctactattgctaggtgtgagaaagtggtggtgagaaccttagagcagtggagatttgctacctggtctgtgttttgagaagtgccccttagaaagttaaaagaatgtagaaaagatactcagtcttaatcctatgcaaaaaaaaaaaatcaagtaattgttttcctatgaggaaaataaccatgagctgtatcatgctacttagcttttatgtaaatatttcttatgtctcctctattaagagtaattactaaaactctgtaatctccaaaatattgctatcaaattacacaccatgttttctatcattctcatagatctgccttataaacatttaaataaaaagtactatttaatgattta

SEQ ID NO: 429991 - DNA, 3328 bp, Homo sapiens
ctcactgcaagctctgcctcccgggttcacgccattctcctgcctcagcctcccgagtagctgggactacaggtgcccgccaccatgcccggctgatttctttttgtatttttagtagagacggagtttcaccgtgttagccaggatggtctcgatctcctgacctcgtgatccgcccgccttggcctccaaagtgctgggattacaggtgtgagctaccgcgcccggcctattatcttgtactttctaactgagccctctattttctttattttaataatatttctccccacttgagaatcacttgttagttcttggtaggaattcagttgggcaatgataacttttatgggcaaaaacattctattatagtgaacaaatgaaaataacagcgtattttcaatattttcttattccttaaattccactcttttaacactatgcttaaccacttaatgtgatgaaatattcctaaaagttaaatgactattaaagcatatattgttgcatgtatatattaagtagccgatactctaaataaaaataccactgttacagataaatggggcctttaaaaatatgaaaaacaaacttgtgaaaatgtataaaagatgcatctgttgtttcaaatggcactatcttcttttcagtactacaaaaacagaataattttgaagttttagaataaatgtaatatatttactataattctaaatgtttaaatgcttttctaaaaatgcaaaactatgatgtttagttgctttattttacctctatgtgattatttttcttaattgttattttttataatcattatttttctgaaccattcttctggcctcagaagtaggactgaattctactattgctaggtgtgagaaagtggtggtgagaaccttagagcagtggagatttgctacctggtctgtgttttgagaagtgccccttagaaagttaaaagaatgtagaaaagatactcagtcttaatcctatgcaaaaaaaaaaaatcaagtaattgttttcctatgaggaaaataaccatgagctgtatcatgctacttagcttttatgtaaatatttcttatgtctcctctattaagagtatttaaaatcatatttaaatatgaatctattcatgctaacattatttttcaaaacatacatggaaatttagcccagattgtctacatataaggtttttatttgaattgtaaaatatttaaaagtatgaataaaatatatttataggtatttatcagagatgattattttgtgctacatacaggttggctaatgagctctagtgttaaactacctgattaatttcttataaagcagcataaccttggcttgattaaggaattctactttcaaaaattaatctgataatagtaacaaggtatattatactttcattacaatcaaattatagaaattacttgtgtaaaagggcttcaagaatatatccaatttttaaatattttaatatatctcctatctgataacttaattcttctaaattaccacttgccattaagctatttcataataaattctgtacagtttcccccaaaaaaagagatttatttatgaaatatttaaagtttctaatgtggtattttaaataaagtatcataaatgtaataagtaaatatttatttaggaatactgtgaacactgaactaattattcctgtgtcagtctatgaaatccctgttttgaaataagtaaacagcctaaaatgtgttgaaattattttgtaaatccatgacttaaaacaagatacatacatagtataacacacctcacagtgttaagatttatattgtgaaatgagacaccctaccttcaattgttcatcagtgggtaaaacaaattctgatgtacattcaggacaaatgattagccctaaatgaaactgtaataatttcagtggaaactcaatctgtttttacctttaaacagtgaattttacatgaatgaatgggttcttcactttttttttagtatgagaaaattatacagtgcttaattttcagagattctttccatatgttactaaaaaatgttttgttcagcctaacatactgagttttttttaactttctaaattattgaatttccatcatgcattcatccaaaattaaggcagactgtttggattcttccagtggccagatgagctaaattaaatcacaaaagcagatgcttttgtatgatctccaaattgccaactttaaggaaatattctcttgaaattgtctttaaagatcttttgcagctttgcagatacccagactgagctggaactggaatttgtcttcctattgactctacttctttaaaagcggctgcccattacattcctcagctgtccttgcagttaggtgtacatgtgactgagtgttggccagtgagatgaagtctcctcaaaggaaggcagcatgtgtcctttttcatcccttcatcttgctgctgggattgtggatataacaggagccctggcagctgtctccagaggatcaaagccacacccaaagagtaaggcagattagagaccagaaagaccttgactacttccctacttccactgctttttcctgcatttaagccattgtaaatctgggtgtgttacatgaagtgaaaattaattctttctgcccttcagttctttatcctgataccatttaacactgtctgaattaactagactgcaataattctttcttttgaaagcttttaaaggataatgtgcaattcacattaaaattgattttccattgtcaattagttatactcattttcctgccttgatctttcattagatattttgtatctgcttggaatatattatcttctttttaactgtgtaattggtaattactaaaactctgtaatctccaaaatattgctatcaaattacacaccatgttttctatcattctcatagatctgccttataaacatttaaataaaaagtactatttaatgatttaacacaaaaaaaaaaaaaaaaaaaaaaaaaaaaaaaaaagaaaaaaaacaaaaaaaaaaagcccacaaaaagacaaaaatgcaaacgaaaaaaaaacagattgttggggggccgccgcgcccaccaaagaagaatggttaacacacaagacatgagggcggggcggcgccacagagtataggaagcaagctgagaagtcgtgtccacgaaagaaagctggctacactgggggggtttcctcacacacaaaaaaggcccggggaccagatgggttagaaacagcagatgcggaccaagggcatcacaagggacgagggaaaaatagcaccgagt

SEQ ID NO: 429992 - DNA, 3282 bp, Homo sapiens
ctcactgcaagctctgcctcccgggttcacgccattctcctgcctcagcctcccgagtagctgggactacaggtgcccgccaccatgcccggctgatttctttttgtatttttagtagagacggagtttcaccgtgttagccaggatggtctcgatctcctgacctcgtgatccgcccgccttggcctccaaagtgctgggattacaggtgtgagctaccgcgcccggcctattatcttgtactttctaactgagccctctattttctttattttaataatatttctccccacttgagaatcacttgttagttcttggtaggaattcagttgggcaatgataacttttatgggcaaaaacattctattatagtgaacaaatgaaaataacagcgtattttcaatattttcttattccttaaattccactcttttaacactatgcttaaccacttaatgtgatgaaatattcctaaaagttaaatgactattaaagcatatattgttgcatgtatatattaagtagccgatactctaaataaaaataccactgttacagataaatggggcctttaaaaatatgaaaaacaaacttgtgaaaatgtataaaagatgcatctgttgtttcaaatggcactatcttcttttcagtactacaaaaacagaataattttgaagttttagaataaatgtaatatatttactataattctaaatgtttaaatgcttttctaaaaatgcaaaactatgatgtttagttgctttattttacctctatgtgattatttttcttaattgttattttttataatcattatttttctgaaccattcttctggcctcagaagtaggactgaattctactattgctaggtgtgagaaagtggtggtgagaaccttagagcagtggagatttgctacctggtctgtgttttgagaagtgccccttagaaagttaaaagaatgtagaaaagatactcagtcttaatcctatgcaaaaaaaaaaaatcaagtaattgttttcctatgaggaaaataaccatgagctgtatcatgctacttagcttttatgtaaatatttcttatgtctcctctattaagagtatttaaaatcatatttaaatatgaatctattcatgctaacattatttttcaaaacatacatggaaatttagcccagattgtctacatataaggtttttatttgaattgtaaaatatttaaaagtatgaataaaatatatttataggtatttatcagagatgattattttgtgctacatacaggttggctaatgagctctagtgttaaactacctgattaatttcttataaagcagcataaccttggcttgattaaggaattctactttcaaaaattaatctgataatagtaacaaggtatattatactttcattacaatcaaattatagaaattacttgtgtaaaagggcttcaagaatatatccaatttttaaatattttaatatatctcctatctgataacttaattcttctaaattaccacttgccattaagctatttcataataaattctgtacagtttcccccaaaaaaagagatttatttatgaaatatttaaagtttctaatgtggtattttaaataaagtatcataaatgtaataagtaaatatttatttaggaatactgtgaacactgaactaattattcctgtgtcagtctatgaaatccctgttttgaaataagtaaacagcctaaaatgtgttgaaattattttgtaaatccatgacttaaaacaagatacatacatagtataacacacctcacagtgttaagatttatattgtgaaatgagacaccctaccttcaattgttcatcagtgggtaaaacaaattctgatgtacattcaggacaaatgattagccctaaatgaaactgtaataatttcagtggaaactcaatctgtttttacctttaaacagtgaattttacatgaatgaatgggttcttcactttttttttagtatgagaaaattatacagtgcttaattttcagagattctttccatatgttactaaaaaatgttttgttcagcctaacatactgagttttttttaactttctaaattattgaatttccatcatgcattcatccaaaattaaggcagactgtttggattcttccagtggccagatgagctaaattaaatcacaaaagcagatgcttttgtatgatctccaaattgccaactttaaggaaatattctcttgaaattgtctttaaagatcttttgcagctttgcagatacccagactgagctggaactggaatttgtcttcctattgactctacttctttaaaagcggctgcccattacattcctcagctgtccttgcagttaggtgtacatgtgactgagtgttggccagtgagatgaagtctcctcaaaggaaggcagcatgtgtcctttttcatcccttcatcttgctgctgggattgtggatataacaggagccctggcagctgtctccagaggatcaaagccacacccaaagagtaaggcagattagagaccagaaagaccttgactacttccctacttccactgctttttcctgcatttaagccattgtaaatctgggtgtgttacatgaagtgaaaattaattctttctgcccttcagttctttatcctgataccatttaacactgtctgaattaactagactgcaataattctttcttttgaaagcttttaaaggataatgtgcaattcacattaaaattgattttccattgtcaattagttatactcattttcctgccttgatctttcattagatattttgtatctgcttggaatatattatcttctttttaactgtgtaattggtaattactaaaactctgtaatctccaaaatattgctatcaaattacacaccatgttttctatcattctcatagatctgccttataaacatttaaataaaaagtactatttaatgatttaactctgttgaaaaacaaaacccaaacaaaaagcaaaagagaaacaagacacaaatcaacacgacccgaagcgaaaccagacacacccaacaaaggaaacaaacacaaaacggccagaaaaagaacagcaaataacgcagcagggatacaaaaaaaccaagcacagaaagcgagcagaccagaaacacgtggataagcagcaaccgtacccgccgaaagcggccgaagaccgacaacctacccgcgagaacgagcagaaaacgcagaaccgacacgaccacgccaca

SEQ ID NO: 429993 - DNA, 2892 bp, Homo sapiens
  misc_feature (2837)..(2837): n is a, c, g, or t
  misc_feature (2840)..(2840): n is a, c, g, or t
  misc_feature (2846)..(2847): n is a, c, g, or t
  misc_feature (2851)..(2851): n is a, c, g, or t
ctcactgcaagctctgcctcccgggttcacgccattctcctgcctcagcctcccgagtagctgggactacaggtgcccgccaccatgcccggctgatttctttttgtatttttagtagagacggagtttcaccgtgttagccaggatggtctcgatctcctgacctcgtgatccgcccgccttggcctccaaagtgctgggattacaggtgtgagctaccgcgcccggcctattatcttgtactttctaactgagccctctattttctttattttaataatatttctccccacttgagaatcacttgttagttcttggtaggaattcagttgggcaatgataacttttatgggcaaaaacattctattatagtgaacaaatgaaaataacagcgtattttcaatattttcttattccttaaattccactcttttaacactatgcttaaccacttaatgtgatgaaatattcctaaaagttaaatgactattaaagcatatattgttgcatgtatatattaagtagccgatactctaaataaaaataccactgttacagataaatggggcctttaaaaatatgaaaaacaaacttgtgaaaatgtataaaagatgcatctgttgtttcaaatggcactatcttcttttcagtactacaaaaacagaataattttgaagttttagaataaatgtaatatatttactataattctaaatgtttaaatgcttttctaaaaatgcaaaactatgatgtttagttgctttattttacctctatgtgattatttttcttaattgttattttttataatcattatttttctgaaccattcttctggcctcagaagtaggactgaattctactattgctaggtgtgagaaagtggtggtgagaaccttagagcagtggagatttgctacctggtctgtgttttgagaagtgccccttagaaagttaaaagaatgtagaaaagatactcagtcttaatcctatgcaaaaaaaaaaaatcaagtaattgttttcctatgaggaaaataaccatgagctgtatcatgctacttagcttttatgtaaatatttcttatgtctcctctattaagagtatttaaaatcatatttaaatatgaatctattcatgctaacattatttttcaaaacatacatggaaatttagcccagattgtctacatataaggtttttatttgaattgtaaaatatttaaaagtatgaataaaatatatttataggtatttatcagagatgattattttgtgctacatacaggttggctaatgagctctagtgttaaactacctgattaatttcttataaagcagcataaccttggcttgattaaggaattctactttcaaaaattaatctgataatagtaacaaggtatattatactttcattacaatcaaattatagaaattacttgtgtaaaagggcttcaagaatatatccaatttttaaatattttaatatatctcctatctgataacttaattcttctaaattaccacttgccattaagctatttcataataaattctgtacagtttcccccaaaaaaagagatttatttatgaaatatttaaagtttctaatgtggtattttaaataaagtatcataaatgtaataagtaaatatttatttaggaatactgtgaacactgaactaattattcctgtgtcagtctatgaaatccctgttttgaaataagtaaacagcctaaaatgtgttgaaattattttgtaaatccatgacttaaaacaagatacatacatagtataacacacctcacagtgttaagatttatattgtgaaatgagacaccctaccttcaattgttcatcagtgggtaaaacaaattctgatgtacattcaggacaaatgattagccctaaatgaaactgtaataatttcagtggaaactcaatctgtttttacctttaaacagtgaattttacatgaatgaatgggttcttcactttttttttagtatgagaaaattatacagtgcttaattttcagagattctttccatatgttactaaaaaatgttttgttcagcctaacatactgagttttttttaactttctaaattattgaatttccatcatgcattcatccaaaattaaggcagactgtttggattcttccagtggccagatgagctaaattaaatcacaaaagcagatgcttttgtatgatctccaaattgccaactttaaggaaatattctcttgaaattgtctttaaagatcttttgcagctttgcagatacccagactgagctggaactggaatttgtcttcctattgactctacttctttaaaagcggctgcccattacattcctcagctgtccttgcagttaggtgtacatgtgactgagtgttggccagtgagatgaagtctcctcaaaggaaggcagcatgtgtcctttttcatcccttcatcttgctgctgggattgtggatataacaggagccctggcagctgtctccagaggatcaaagccacacccaaagagtaaggcagattagagaccagaaagaccttgactacttccctacttccactgctttttcctgcatttaagccattgtaaatctgggtgtgttacatgaagtgaaaattaattctttctgcccttcagttctttatcctgataccatttaacactgtctgaattaactagactgcaataattctttcttttgaaagcttttaaaggataatgtgcaattcacattaaaattgattttccattgtcaattagttatactcattttcctgccttgatctttcattagatattttcgcancgngtatgnnctcngcgagcgggggatcgtctatctacagtcggcctgcagggtt

SEQ ID NO: 429994 - DNA, 740 bp, Homo sapiens
ttgtgagtgatctagaggatcccggctcgcgagcagcccagactgagctggaactggaatttgtcttcctattgactctacttctttaaaagcggctgcccattacattcctcagctgtccttgcagttaggtgtacatgtgactgagtgttggccagtgagatgaagtctcctcaaaggaaggcagcatgtgtcctttttcatcccttcatcttgctgctgggattgtggatataacaggagccctggcagctgtctccagaggatcaaagccacacccaaagagtaaggcagattagagaccagaaagaccttgactacttccctacttccactgctttttcctgcatttaagccattgtaaatctgggtgtgttacatgaagtgaaaattaattctttctgcccttcagttctttatcctgataccatttaacactgtctgaattaactagactgcaataattctttcttttgaaagcttttaaaggataatgtgcaattcacattaaaattgattttccattgtcaattagttatactcattttcctgccttgatctttcattagatattttgtatctgcttggaatatattatcttctttttaactgtgtaattggtaattactaaaactctgtaatctccaaaatattgctatcaaattacacaccatgttttctatcattctcatagatctgccttataaacatttaaataaaaagtactatttaatgattta

SEQ ID NO: 429995 - DNA, 737 bp, Homo sapiens
  misc_feature (13)..(13): n is a, c, g, or t
tacgaagtcgagntcggaccggctcgcgagcagcccagactgagctggaactggaatttgtcttcctattgactctacttctttaaaagcggctgcccattacattcctcagctgtccttgcagttaggtgtacatgtgactgagtgttggccagtgagatgaagtctcctcaaaggaaggcagcatgtgtcctttttcatcccttcatcttgctgctgggattgtggatataacaggagccctggcagctgtctccagaggatcaaagccacacccaaagagtaaggcagattagagaccagaaagaccttgactacttccctacttccactgctttttcctgcatttaagccattgtaaatctgggtgtgttacatgaagtgaaaattaattctttctgcccttcagttctttatcctgataccatttaacactgtctgaattaactagactgcaataattctttcttttgaaagcttttaaaggataatgtgcaattcacattaaaattgattttccattgtcaattagttatactcattttcctgccttgatctttcattagatattttgtatctgcttggaatatattatcttctttttaactgtgtaattggtaattactaaaactctgtaatctccaaaatattgctatcaaattacacaccatgttttctatcattctcatagatctgccttataaacatttaaataaaaagtactatttaatgattta

SEQ ID NO: 429996 - DNA, 761 bp, Homo sapiens
ggctggagtgcgactctagagtagaccaggctcgcctagccgagcccaagcacagctcccagactgagctggaactggaatttgtcttcctattgactctacttctttaaaagcggctgcccattacattcctcagctgtccttgcagttaggtgtacatgtgactgagtgttggccagtgagatgaagtctcctcaaaggaaggcagcatgtgtcctttttcatcccttcatcttgctgctgggattgtggatataacaggagccctggcagctgtctccagaggatcaaagccacacccaaagagtaaggcagattagagaccagaaagaccttgactacttccctacttccactgctttttcctgcatttaagccattgtaaatctgggtgtgttacatgaagtgaaaattaattctttctgcccttcagttctttatcctgataccatttaacactgtctgaattaactagactgcaataattctttcttttgaaagcttttaaaggataatgtgcaattcacattaaaattgattttccattgtcaattagttatactcattttcctgccttgatctttcattagatattttgtatctgcttggaatatattatcttctttttaactgtgtaattggtaattactaaaactctgtaatctccaaaatattgctatcaaattacacaccatgttttctatcattctcatagatctgccttataaacatttaaataaaaagtactatttaatgattta

SEQ ID NO: 429997 - DNA, 738 bp, Homo sapiens
gacactagaggagccccgccgcgttgagaatataccctgactgatctgatactgcaaggagtcttactatatactattgtgagacaggagcggctgcccattacattcctcagctgtccttgcagttaggtgtacatgtgactgagtgttggccagtgagatgaagtctcctcaaaggaaggcagcatgtgtcctttttcatcccttcatcttgctgctgggattgtggatataacaggagccctggcagctgtctccagaggatcaaagccacacccaaagagtaaggcagattagagaccagaaagaccttgactacttccctacttccactgctttttcctgcatttaagccattgtaaatctgggtgtgttacatgaagtgaaaattaattctttctgcccttcagttctttatcctgataccatttaacactgtctgaattaactagactgcaataattctttcttttgaaagcttttaaaggataatgtgcaattcacattaaaattgattttccattgtcaattagttatactcattttcctgccttgatctttcattagatattttgtatctgcttggaatatattatcttctttttaactgtgtaattggtaattactaaaactctgtaatctccaaaatattgctatcaaattacacaccatgttttctatcattctcatagatctgccttataaacatttaaataaaaagtactatttaatgattta

SEQ ID NO: 429998 - DNA, 453 bp, Homo sapiens
ccattgtaaatctgggtgtgttacatgaagtgaaaattaattctttctgcccttcagttctttatcctgataccatttaacactgtctgaattaactagactgcaataattctttcttttgaaagcttttaaaggataatgtgcaattcacattaaaattgattttccattgtcaattagttatactcattttcctgccttgatctttcattagatattttgtatctgcttggaatatattatcttctttttaactgtgtaattggtaattactaaaactctgtaatctccaaaatattgctatcaaattacacaccatgttttctatcattctcatagatctgccttataaacatttaaataaaaagtactatttaatgatttaaacttctgttttgaaatgttgtatacacgtggatttttttctcattaaataataattctagtatttga

SEQ ID NO: 429999 - DNA, 3736 bp, Homo sapiens
agcggcgggcaggccgggcatggcgtccatggcggcggcgatcgcggcttcgcgctcggcggtcatgagcgggaaccggcctctggacgaccgggagcgaaagcgcttcacttacttctcgtcgctgagccccatggccaggaagatcatgcaggacaaggagaagatccgcgagaagtacgggcccgagtgggcgcggctgccgcccgcgcagcaggacgagatcatcgaccggtgcctggtggggccgcgcgccccggcgccccgagaccccggggactcggaggagctcacgcgcttccccggcttgcgcgggcccacgggccagaaggtggtgcgcttcggggacgaggatctaacttggcaagatgagcactctgcccctttctcctgggaaacaaagagtcagatggagttcagtatctccgccctatccatccaggagccgagcaacggcaccgccgccagcgagcccagaccactgtccaaagcttcccagggctcccaggccctcaagtcctcccaaggcagcaggtcctccagcctggacgccctgggccccaccaggaaggaggaggaagcgtcattctggaagatcaatgctgagcggtcccgaggggaggggcctgaggccgagttccagtcgctgacccctagccagatcaagtccatggagaagggggaaaaggtcttgcctccctgctaccggcaggaacctgccccgaaggacagggaggccaaggtggaaaggcccagcaccctccgtcaggagcagcgtcctcttcccaacgtgagcaccgaacgtgagagaccccagcctgtccaggccttcagcagtgcactgcacgaggctgccccctcccagctcgaggggaagctgccatctcctgatgtcaggcaggacgatggggaagacaccctgttctcggaacccaagtttgcacaggtcagctcaagtaatgtcgtcttgaagacgggatttgattttctggacaattggtaaaatgtattagaaaaatacaatgaagaaccctaaaatgttttccaaagtggtgtggtggaggaggataaaaagggccaccttttcctatgtattttactggtttcttgacactcttttcttaatcatttggaaactggtcaatactgccagatttttttcttttttggtagaaccagatatatatgctattttcagtgatttgataacagaagttttccatttggaatttttaaggtctgttaataattcaggagatcttgtaaataaaacttctgttcccagctccacccaactttccccctcctcaaaggatgtgtttcaaccatgtcacaaaaatcatataagtgatttccatctccttctccattattccccctcccccctccgctttttaccgtatgggttccttttggtgggtgattgagggtgatgttatcagccatgacatcagcatgctggctgtgaccccggaaagactggcccccagcgacgttctcagccagcgctcgcagctgtccggggcttctctggcagaagccatgtctctcacatcatgtgccagcctccaccctcacgccatttccagggaacagactgcgggtatgtagcagtgtagtctttaacctgctctgatacatattcagagtatggattgttgtttaaaaagagttgcatgtttaaagagttttgtactagcttttcattattttgtatctagattatcaacaatggggctaccactttccttggttttatatccatttcctcttggaagttcttgttgcttatgtgacctgttggttgttccccggactgggcacctgcaggagtcagggcagacggcagatgtggctggaggtcagggctcttctgcttagttgtgttagagtcttccagcatgggactgatgggagcagtgggcattctttatcccaagggctagccaggttgcgtcatgacggaccttccccagccctgaccaccaccagaagtggaagagtggagtttgcggtcaactcagcagtgcccatggagacctgcgtggtgtcagagcagcagtatctcttggagctggtgcagacaccaaggctgcccagtggtacaacgtggtccacctcccctagggaagctgctgcactcagaggctgtcctgcccagtggcccctgagccgtgtgagcctgcaggaggcgtctgagcagagcctcaagcccggtatggcgccatctccatgttgccatcactgcgttctcacctgaagccttaatctttgcgacacctgccagtgagcgctcggtttcaataccaaagtgtgtcttcttcttttttttttttttttaaatgcctgtttcataggaccttctgaaatgatttccagaatattttatctggctccaaaataaagcacatagcaactcacctcaacccctcatcatctccaggaaagtttctgccaaagctgtggcatagccaacttttgatttggttcttgccaattgttttatgtccctaaacctcatttggatccttggggtatagttttatctttctgcttcagtgatttactgtaacttttcaaatattggttctttctgtaccatttaagtatagttgatatatgtgaggcaaaaaaaggtttcagcatggtggtgagggaaaaaggagcttagaaatcccagttggcacagcctgggcaagcgccagctcccctcagggctaacggcactgttcacacagggatcctcagaatcagcggccacctgcctccaccttctgcctggagggcatggggctgttgtagaacctatggtagcaaatgtatatgtatgagtttgtattctgtagtgttggtgtagcacagaagaaagacctgtgtcctagagagtaggccaaggtgatctgcctcttctattgggagaaattctaatttctttcccactttctcaacaagcccaatattccctccaagttcttcttggtgctgagggctgtaggaattattgaaagcttctgcctcacttagtatcgtctggggcccagcacccagcaataactctaataatgtttcttaatggtatagcctcctgagattaaatgtaaaatcaaaaattaggaaatcttggagggagtcctcaagttgtattgctttgctgtgcttttggaagaagggacgacctggaggacacaggctcatgtgtgggtcttcatcctgcctgaccggcagatcttcctctacaccttgggcaaagtctatgcgaagatggtttcttagctctccatttgccatgattttcctcccattcatcatgagggagtttctcaaaccaggagtttatatttattttttagaaaatacacacttttcaggagaaacctgagcatgattttggattctccacctccccccagtctctgcacctgggattcagctcaaggattcagtgtcttcatttttacaaaagttcccccaagaaatcagcaaccagcctctgtttcatctgggagcccctcccttggccccctgggtttgggggtgctgccctactgggaacagcgggggtctgtcacccgtctgagccgcacccccctgtgtggatttcaggaagagcctccctttctttgcgtctccctttctttaattaacattttcaaaagtaataaattcttactgacgacttgtaacttagtcatattttatacttgtagcctttaataaagccatttaaaaaatgcta

SEQ ID NO: 430000 - DNA, 2989 bp, Homo sapiens
atgctggcagagtatagattgcattgaactgtatttaatcttctgatttcaagcactgagataaattgaggtcagggaacctctgagacagaagtaggctcttttatctgggtcgttttaaatgagatgctgtttttagattatacgtaactgaaaaaaagaggctcgtcttacttccatgtttttgtcccttctacaggtcagctcaagtaatgtcgtcttgaagacgggatttgattttctggacaattggtaaaatgtattagaaaaatacaatgaagaaccctaaaatgttttccaaagtggtgtggtggaggaggataaaaagggccaccttttcctatgtattttactggtttcttgacactcttttcttaatcatttggaaactggtcaatactgccagatttttttcttttttggtagaaccagatatatatgctattttcagtgatttgataacagaagttttccatttggaatttttaaggtctgttaataattcaggagatcttgtaaataaaacttctgttcccagctccacccaactttccccctcctcaaaggatgtgtttcaaccatgtcacaaaaatcatataagtgatttccatctccttctccattattccccctcccccctccgctttttaccgtatgggttccttttggtgggtgattgagggtgatgttatcagccatgacatcagcatgctggctgtgaccccggaaagactggcccccagcgacgttctcagccagcgctcgcagctgtccggggcttctctggcagaagccatgtctctcacatcatgtgccagcctccaccctcacgccatttccagggaacagactgcgggtatgtagcagtgtagtctttaacctgctctgatacatattcagagtatggattgttgtttaaaaagagttgcatgtttaaagagttttgtactagcttttcattattttgtatctagattatcaacaatggggctaccactttccttggttttatatccatttcctcttggaagttcttgttgcttatgtgacctgttggttgttccccggactgggcacctgcaggagtcagggcagacggcagatgtggctggaggtcagggctcttctgcttagttgtgttagagtcttccagcatgggactgatgggagcagtgggcattctttatcccaagggctagccaggttgcgtcatgacggaccttccccagccctgaccaccaccagaagtggaagagtggagtttgcggtcaactcagcagtgcccatggagacctgcgtggtgtcagagcagcagtatctcttggagctggtgcagacaccaaggctgcccagtggtacaacgtggtccacctcccctagggaagctgctgcactcagaggctgtcctgcccagtggcccctgagccgtgtgagcctgcaggaggcgtctgagcagagcctcaagcccggtatggcgccatctccatgttgccatcactgcgttctcacctgaagccttaatctttgcgacacctgccagtgagcgctcggtttcaataccaaagtgtgtcttcttcttttttttttttttttaaatgcctgtttcataggaccttctgaaatgatttccagaatattttatctggctccaaaataaagcacatagcaactcacctcaacccctcatcatctccaggaaagtttctgccaaagctgtggcatagccaacttttgatttggttcttgccaattgttttatgtccctaaacctcatttggatccttggggtatagttttatctttctgcttcagtgatttactgtaacttttcaaatattggttctttctgtaccatttaagtatagttgatatatgtgaggcaaaaaaaggtttcagcatggtggtgagggaaaaaggagcttagaaatcccagttggcacagcctgggcaagcgccagctcccctcagggctaacggcactgttcacacagggatcctcagaatcagcggccacctgcctccaccttctgcctggagggcatggggctgttgtagaacctatggtagcaaatgtatatgtatgagtttgtattctgtagtgttggtgtagcacagaagaaagacctgtgtcctagagagtaggccaaggtgatctgcctcttctattgggagaaattctaatttctttcccactttctcaacaagcccaatattccctccaagttcttcttggtgctgagggctgtaggaattattgaaagcttctgcctcacttagtatcgtctggggcccagcacccagcaataactctaataatgtttcttaatggtatagcctcctgagattaaatgtaaaatcaaaaattaggaaatcttggagggagtcctcaagttgtattgctttgctgtgcttttggaagaagggacgacctggaggacacaggctcatgtgtgggtcttcatcctgcctgaccggcagatcttcctctacaccttgggcaaagtctatgcgaagatggtttcttagctctccatttgccatgattttcctcccattcatcatgagggagtttctcaaaccaggagtttatatttattttttagaaaatacacacttttcaggagaaacctgagcatgattttggattctccacctccccccagtctctgcacctgggattcagctcaaggattcagtgtcttcatttttacaaaagttcccccaagaaatcagcaaccagcctctgtttcatctgggagcccctcccttggccccctgggtttgggggtgctgccctactgggaacagcgggggtctgtcacccgtctgagccgcacccccctgtgtggatttcaggaagagcctccctttctttgcgtctccctttctttaattaacattttcaaaagtaataaattcttactgacgacttgtaacttagtcatattttatacttgtagcctttaataaagccatttaaaaaatgcta

SEQ ID NO: 430001 - DNA, 3682 bp, Homo sapiens
agcggcgggcaggccgggcatggcgtccatggcggcggcgatcgcggcttcgcgctcggcggtcatgagcgggaaccggcctctggacgaccgggagcgaaagcgcttcacttacttctcgtcgctgagccccatggccaggaagatcatgcaggacaaggagaagatccgcgagaagtacgggcccgagtgggcgcggctgccgcccgcgcagcaggacgagatcatcgaccggtgcctggtggggccgcgcgccccggcgccccgagaccccggggactcggaggagctcacgcgcttccccggcttgcgcgggcccacgggccagaaggtggtgcgcttcggggacgaggatctaacttggcaagatgagcactctgcccctttctcctgggaaacaaagagtcagatggagttcagtatctccgccctatccatccaggagccgagcaacggcaccgccgccagcgagcccagaccactgtccaaagcttcccagggctcccaggccctcaagtcctcccaaggcagcaggtcctccagcctggacgccctgggccccaccaggaaggaggaggaagcgtcattctggaagatcaatgctgagcggtcccgaggggaggggcctgaggccgagttccagtcgctgacccctagccagatcaagtccatggagaagggggaaaaggtcttgcctccctgctaccggcaggaacctgccccgaaggacagggaggccaaggtggaaaggcccagcaccctccgtcaggagcagcgtcctcttcccaacgtgagcaccgaacgtgagagaccccagcctgtccaggccttcagcagtgcactgcacgaggctgccccctcccagctcgaggggaagctgccatctcctgatgtcaggcaggacgatggggaagacaccctgttctcggaacccaagtttgcacaggtcagctcaagtaatgtcgtcttgaagacgggatttgattttctggacaattggtaaaatgtattagaaaaatacaatgaagaaccctaaaatgttttccaaagtggtgtggtggaggaggataaaaagggccaccttttcctatgtattttactggtttcttgacactcttttcttaatcatttggaaactggtcaatactgccagatttttttcttttttggtagaaccagatatatatgctattttcagtgatttgataacagaagttttccatttggaatttttaaggtctgttaataattcaggagatcttgtaaataaaacttctgttcccagctccacccaactttccccctcctcaaaggatgtgtttcaaccatgtcacaaaaatcatataagtgatttccatctccttctccattattccccctcccccctccgctttttaccgtatgggttccttttggtgggtgattgagggtgatgttatcagccatgacatcagcatgctggctgtgaccccggaaagactggcccccagcgacgttctcagccagcgctcgcagctgtccggggcttctctggcagaagccatgtctctcacatcatgtgccagcctccaccctcacgccatttccagggaacagactgcgggtatgtagcagtgtagtctttaacctgctctgatacatattcagagtatggattgttgtttaaaaagagttgcatgtttaaagagttttgtactagcttttcattattttgtatctagattatcaacaatggggctaccactttccttggttttatatccatttcctcttggaagttcttgttgcttatgtgacctgttggttgttccccggactgggcacctgcaggagtcagggcagacggcagatgtggctggaggtcagggctcttctgcttagttgtgttagagtcttccagcatgggactgatgggagcagtgggcattctttatcccaagggctagccaggttgcgtcatgacggaccttccccagccctgaccaccaccagaagtggaagagtggagtttgcggtcaactcagcagtgcccatggagacctgcgtggtgtcagagcagcagtatctcttggagctggtgcagacaccaaggctgcccagtggtacaacgtggtccacctcccctagggaagctgctgcactcagaggctgtcctgcccagtggcccctgagccgtgtgagcctgcaggaggcgtctgagcagagcctcaagcccggtatggcgccatctccatgttgccatcactgcgttctcacctgaagccttaatctttgcgacacctgccagtgagcgctcggtttcaataccaaagtgtgtcttcttcttttttttttttttttaaatgcctgtttcataggaccttctgaaatgatttccagaatattttatctggctccaaaataaagcacatagcaactcacctcaacccctcatcatctccaggaaagtttctgccaaagctgtggcatagccaacttttgatttggttcttgccaattgttttatgtccctaaacctcatttggatccttggggtatagttttatctttctgcttcagtgatttactgtaacttttcaaatattggttctttctgtaccatttaagtatagttgatatatgtgaggcaaaaaaaggtttcagcatggtggtgagggaaaaaggagcttagaaatcccagttggcacagcctgggcaagcgccagctcccctcagggctaacggcactgttcacacagggatcctcagaatcagcggccacctgcctccaccttctgcctggagggcatggggctgttgtagaacctatggtagcaaatgtatatgtatgagtttgtattctgtagtgttggtgtagcacagaagaaagacctgtgtcctagagagtaggccaaggtgatctgcctcttctattgggagaaattctaatttctttcccactttctcaacaagcccaatattccctccaagttcttcttggtgctgagggctgtaggaattattgaaagcttctgcctcacttagtatcgtctggggcccagcacccagcaataactctaataatgtttcttaatggtatagcctcctgagattaaatgtaaaatcatggaagaagggacgacctggaggacacaggctcatgtgtgggtcttcatcctgcctgaccggcagatcttcctctacaccttgggcaaagtctatgcgaagatggtttcttagctctccatttgccatgattttcctcccattcatcatgagggagtttctcaaaccaggagtttatatttattttttagaaaatacacacttttcaggagaaacctgagcatgattttggattctccacctccccccagtctctgcacctgggattcagctcaaggattcagtgtcttcatttttacaaaagttcccccaagaaatcagcaaccagcctctgtttcatctgggagcccctcccttggccccctgggtttgggggtgctgccctactgggaacagcgggggtctgtcacccgtctgagccgcacccccctgtgtggatttcaggaagagcctccctttctttgcgtctccctttctttaattaacattttcaaaagtaataaattcttactgacgacttgtaacttagtcatattttatacttgtagcctttaataaagccatttaaaaaatgcta

SEQ ID NO: 430002 - DNA, 1652 bp, Homo sapiens
acgtggggcaaacctcccctatagggaactgctgcatattaaagctgttcttgtccacatggcgcccctgaacgcgtttgagctctgcacgaagcgtttttgcccagcctccaaccccggaaggggccattttcaaagtgcccacaatgcggtttgtacctggagcccgttaatttttcgacaaccggcccctgagcgcgtcgggttccaaaacccaaggtgggtttttgtgtcttcttcttttttttttttttttaaatgcctgtttcataggaccttctgaaatgatttccagaatattttatctggctccaaaataaagcacatagcaactcacctcaacccctcatcatctccaggaaagtttctgccaaagctgtggcatagccaacttttgatttggttcttgccaattgttttatgtccctaaacctcatttggatccttggggtatagttttatctttctgcttcagtgatttactgtaacttttcaaatattggttctttctgtaccatttaagtatagttgatatatgtgaggcaaaaaaaggtttcagcatggtggtgagggaaaaaggagcttagaaatcccagttggcacagcctgggcaagcgccagctcccctcagggctaacggcactgttcacacagggatcctcagaatcagcggccacctgcctccaccttctgcctggagggcatggggctgttgtagaacctatggtagcaaatgtatatgtatgagtttgtattctgtagtgttggtgtagcacagaagaaagacctgtgtcctagagagtaggccaaggtgatctgcctcttctattgggagaaattctaatttctttcccactttctcaacaagcccaatattccctccaagttcttcttggtgctgagggctgtaggaattattgaaagcttctgcctcacttagtatcgtctggggcccagcacccagcaataactctaataatgtttcttaatggtatagcctcctgagattaaatgtaaaatcaaaaattaggaaatcttggagggagtcctcaagttgtattgctttgctgtgcttttggaagaagggacgacctggaggacacaggctcatgtgtgggtcttcatcctgcctgaccggcagatcttcctctacaccttgggcaaagtctatgcgaagatggtttcttagctctccatttgccatgattttcctcccattcatcatgagggagtttctcaaaccaggagtttatatttattttttagaaaatacacacttttcaggagaaacctgagcatgattttggattctccacctccccccagtctctgcacctgggattcagctcaaggattcagtgtcttcatttttacaaaagttcccccaagaaatcagcaaccagcctctgtttcatctgggagcccctcccttggccccctgggtttgggggtgctgccctactgggaacagcgggggtctgtcacccgtctgagccgcacccccctgtgtggatttcaggaagagcctccctttctttgcgtctccctttctttaattaacattttcaaaagtaataaattcttactgacgacttgtaacttagtcatattttatacttgtagcctttaataaagccatttaaaaaatgcta

SEQ ID NO: 430003 - DNA, 4316 bp, Homo sapiens
  misc_feature (3742)..(3742): n is a, c, g, or t
  misc_feature (3744)..(3744): n is a, c, g, or t
  misc_feature (3746)..(3746): n is a, c, g, or t
  misc_feature (3778)..(3778): n is a, c, g, or t
  misc_feature (3783)..(3783): n is a, c, g, or t
  misc_feature (3788)..(3788): n is a, c, g, or t
  misc_feature (3792)..(3792): n is a, c, g, or t
  misc_feature (3795)..(3795): n is a, c, g, or t
  misc_feature (3804)..(3804): n is a, c, g, or t
agcggcgggcaggccgggcatggcgtccatggcggcggcgatcgcggcttcgcgctcggcggtcatgagcgggaaccggcctctggacgaccgggagcgaaagcgcttcacttacttctcgtcgctgagccccatggccaggaagatcatgcaggacaaggagaagatccgcgagaagtacgggcccgagtgggcgcggctgccgcccgcgcagcaggacgagatcatcgaccggtgcctggtggggccgcgcgccccggcgccccgagaccccggggactcggaggagctcacgcgcttccccggcttgcgcgggcccacgggccagaaggtggtgcgcttcggggacgaggatctaacttggcaagatgagcactctgcccctttctcctgggaaacaaagagtcagatggagttcagtatctccgccctatccatccaggagccgagcaacggcaccgccgccagcgagcccagaccactgtccaaagcttcccagggctcccaggccctcaagtcctcccaaggcagcaggtcctccagcctggacgccctgggccccaccaggaaggaggaggaagcgtcattctggaagatcaatgctgagcggtcccgaggggaggggcctgaggccgagttccagtcgctgacccctagccagatcaagtccatggagaagggggaaaaggtcttgcctccctgctaccggcaggaacctgccccgaaggacagggaggccaaggtggaaaggcccagcaccctccgtcaggagcagcgtcctcttcccaacgtgagcaccgaacgtgagagaccccagcctgtccaggccttcagcagtgcactgcacgaggctgccccctcccagctcgaggggaagctgccatctcctgatgtcaggcaggacgatggggaagacaccctgttctcggaacccaagtttgcacaggtcagctcaagtaatgtcgtcttgaagacgggatttgattttctggacaattggtaaaatgtattagaaaaatacaatgaagaaccctaaaatgttttccaaagtggtgtggtggaggaggataaaaagggccaccttttcctatgtattttactggtttcttgacactcttttcttaatcatttggaaactggtcaatactgccagatttttttcttttttggtagaaccagatatatatgctattttcagtgatttgataacagaagttttccatttggaatttttaaggtctgttaataattcaggagatcttgtaaataaaacttctgttcccagctccacccaactttccccctcctcaaaggatgtgtttcaaccatgtcacaaaaatcatataagtgatttccatctccttctccattattccccctcccccctccgctttttaccgtatgggttccttttggtgggtgattgagggtgatgttatcagccatgacatcagcatgctggctgtgaccccggaaagactggcccccagcgacgttctcagccagcgctcgcagctgtccggggcttctctggcagaagccatgtctctcacatcatgtgccagcctccaccctcacgccatttccagggaacagactgcgggtatgtagcagtgtagtctttaacctgctctgatacatattcagagtatggattgttgtttaaaaagagttgcatgtttaaagagttttgtactagcttttcattattttgtatctagattatcaacaatggggctaccactttccttggttttatatccatttcctcttggaagttcttgttgcttatgtgacctgttggttgttccccggactgggcacctgcaggagtcagggcagacggcagatgtggctggaggtcagggctcttctgcttagttgtgttagagtcttccagcatgggactgatgggagcagtgggcattctttatcccaagggctagccaggttgcgtcatgacggaccttccccagccctgaccaccaccagaagtggaagagtggagtttgcggtcaactcagcagtgcccatggagacctgcgtggtgtcagagcagcagtatctcttggagctggtgcagacaccaaggctgcccagtggtacaacgtggtccacctcccctagggaagctgctgcactcagaggctgtcctgcccagtggcccctgagccgtgtgagcctgcaggaggcgtctgagcagagcctcaagcccggtatggcgccatctccatgttgccatcactgcgttctcacctgaagccttaatctttgcgacacctgccagtgagcgctcggtttcaataccaaagtgtgtcttcttcttttttttttttttttaaatgcctgtttcataggaccttctgaaatgatttccagaatattttatctggctccaaaataaagcacatagcaactcacctcaacccctcatcatctccaggaaagtttctgccaaagctgtggcatagccaacttttgatttggttcttgccaattgttttatgtccctaaacctcatttggatccttggggtatagttttatctttctgcttcagtgatttactgtaacttttcaaatattggttctttctgtaccatttaagtatagttgatatatgtgaggcaaaaaaaggtttcagcatggtggtgagggaaaaaggagcttagaaatcccagttggcacagcctgggcaagcgccagctcccctcagggctaacggcactgttcacacagggatcctcagaatcagcggccacctgcctccaccttctgcctggagggcatggggctgttgtagaacctatggtagcaaatgtatatgtatgagtttgtattctgtagtgttggtgtagcacagaagaaagacctgtgtcctagagagtaggccaaggtgatctgcctcttctattgggagaaattctaatttctttcccactttctcaacaagcccaatattccctccaagttcttcttggtgctgagggctgtaggaattattgaaagcttctgcctcacttagtatcgtctggggcccagcacccagcaataactctaataatgtttcttaatggtatagcctcctgagattaaatgtaaaatcaaaaattaggaaatcttggagggagtcctcaagttgtattgctttgctgtgcttttggaagaagggacgacctggaggacacaggctcatgtgtgggtcttcatcctgcctgaccggcagatcttcctctacaccttgggcaaagtctatgcgaagatggtttcttagctctccatttgccatgattttcctcccattcatcatgagggagtttctcaaaccaggagtttatatttattttttagaaaatacacacttttcaggagaaacctgagcatgattttggattctccacctccccccagtctctgcacctgggattcagctcaaggattcagtgtcttcatttttacaaaagttcccccaagaaatcagcaaccagcctctgtttcatctgggagcccctcccttggccccctgggtttgggggtgctgccctactgggaacagcgggggtctgtcacccgtctgagccgcacccccctgtgtggatttcaggaagagcctccctttctttgcgtctccctttctttaattaacattttcaaaagtaataaattcttactgacgacttgtaacttagtcatattttatacttgtagcctttaataaagccatttaaaaaatgctaaaaaanananaaaaaaaaaaaaaaaaaaaaaacaaaaaaaanaaaanaaaanaaanaanaaaaaaaanaaaaaaaaaaaagaagaaaaaaaaaaagaagatggggggccggcgccggtccaacacatatcttccccgcgcgggggggcgcccagcatatgccgcggccgacccccttttttgttggaagacggcgggcgcctccactcttaggaggggggcttcattatatatagcagcgcgacgcgggcggcggttgttaaaaaaacagcgtgagggggggaggacaacaaccagctcggatcgatggggagatatcttcttctgagaagagaagagccccacatctctcgggggggggggcgagacacaaatggggggacaacacaccacaccaaaagaaattaatacccactgctacgagagggaaatataacactatgacgcaggcatgatagaggtgggggaaccaaccccgcacgagaaatgacggcggcgtcaacaaaaagaaaatgttggttagccagaaatatttagtgaagaacaaattttttcgcggcgcgttataataacaaggggaa

SEQ ID NO: 430004 - DNA, 3857 bp, Homo sapiens
agcggcgggcaggccgggcatggcgtccatggcggcggcgatcgcggcttcgcgctcggcggtcatgagcgggaaccggcctctggacgaccgggagcgaaagcgcttcacttacttctcgtcgctgagccccatggccaggaagatcatgcaggacaaggagaagatccgcgagaagtacgggcccgagtgggcgcggctgccgcccgcgcagcaggacgagatcatcgaccggtgcctggtggggccgcgcgccccggcgccccgagaccccggggactcggaggagctcacgcgcttccccggcttgcgcgggcccacgggccagaaggtggtgcgcttcggggacgaggatctaacttggcaagatgagcactctgcccctttctcctgggaaacaaagagtcagatggagttcagtatctccgccctatccatccaggagccgagcaacggcaccgccgccagcgagcccagaccactgtccaaagcttcccagggctcccaggccctcaagtcctcccaaggcagcaggtcctccagcctggacgccctgggccccaccaggaaggaggaggaagcgtcattctggaagatcaatgctgagcggtcccgaggggaggggcctgaggccgagttccagtcgctgacccctagccagatcaagtccatggagaagggggaaaaggtcttgcctccctgctaccggcaggaacctgccccgaaggacagggaggccaaggtggaaaggcccagcaccctccgtcaggagcagcgtcctcttcccaacgtgagcaccgaacgtgagagaccccagcctgtccaggccttcagcagtgcactgcacgaggctgccccctcccagctcgaggggaagctgccatctcctgatgtcaggcaggacgatggggaagacaccctgttctcggaacccaagtttgcacaggtcagctcaagtaatgtcgtcttgaagacgggatttgattttctggacaattggtaaaatgtattagaaaaatacaatgaagaaccctaaaatgttttccaaagtggtgtggtggaggaggataaaaagggccaccttttcctatgtattttactggtttcttgacactcttttcttaatcatttggaaactggtcaatactgccagatttttttcttttttggtagaaccagatatatatgctattttcagtgatttgataacagaagttttccatttggaatttttaaggtctgttaataattcaggagatcttgtaaataaaacttctgttcccagctccacccaactttccccctcctcaaaggatgtgtttcaaccatgtcacaaaaatcatataagtgatttccatctccttctccattattccccctcccccctccgctttttaccgtatgggttccttttggtgggtgattgagggtgatgttatcagccatgacatcagcatgctggctgtgaccccggaaagactggcccccagcgacgttctcagccagcgctcgcagctgtccggggcttctctggcagaagccatgtctctcacatcatgtgccagcctccaccctcacgccatttccagggaacagactgcgggtatgtagcagtgtagtctttaacctgctctgatacatattcagagtatggattgttgtttaaaaagagttgcatgtttaaagagttttgtactagcttttcattattttgtatctagattatcaacaatggggctaccactttccttggttttatatccatttcctcttggaagttcttgttgcttatgtgacctgttggttgttccccggactgggcacctgcaggagtcagggcagacggcagatgtggctggaggtcagggctcttctgcttagttgtgttagagtcttccagcatgggactgatgggagcagtgggcattctttatcccaagggctagccaggttgcgtcatgacggaccttccccagccctgaccaccaccagaagtggaagagtggagtttgcggtcaactcagcagtgcccatggagacctgcgtggtgtcagagcagcagtatctcttggagctggtgcagacaccaaggctgcccagtggtacaacgtggtccacctcccctagggaagctgctgcactcagaggctgtcctgcccagtggcccctgagccgtgtgagcctgcaggaggcgtctgagcagagcctcaagcccggtatggcgccatctccatgttgccatcactgcgttctcacctgaagccttaatctttgcgacacctgccagtgagcgctcggtttcaataccaaagtgtgtcttcttcttttttttttttttttaaatgcctgtttcataggaccttctgaaatgatttccagaatattttatctggctccaaaataaagcacatagcaactcacctcaacccctcatcatctccaggaaagtttctgccaaagctgtggcatagccaacttttgatttggttcttgccaattgttttatgtccctaaacctcatttggatccttggggtatagttttatctttctgcttcagtgatttactgtaacttttcaaatattggttctttctgtaccatttaagtatagttgatatatgtgaggcaaaaaaaggtttcagcatggtggtgagggaaaaaggagcttagaaatcccagttggcacagcctgggcaagcgccagctcccctcagggctaacggcactgttcacacagggatcctcagaatcagcggccacctgcctccaccttctgcctggagggcatggggctgttgtagaacctatggtagcaaatgtatatgtatgagtttgtattctgtagtgttggtgtagcacagaagaaagacctgtgtcctagagagtaggccaaggtgatctgcctcttctattgggagaaattctaatttctttcccactttctcaacaagcccaatattccctccaagttcttcttggtgctgagggctgtaggaattattgaaagcttctgcctcacttagtatcgtctggggcccagcacccagcaataactctaataatgtttcttaatggtatagcctcctgagattaaatgtaaaatcaaaaattaggaaatcttggagggagtcctcaagttgtattgctttgctgtgcttttggaagaagggacgacctggaggacacaggctcatgtgtgggtcttcatcctgcctgaccggcagatcttcctctacaccttgggcaaagtctatgcgaagatggtttcttagctctccatttgccatgattttcctcccattcatcatgagggagtttctcaaaccaggagtttatatttattttttagaaaatacacacttttcaggagaaacctgagcatgattttggattctccacctccccccagtctctgcacctgggattcagctcaaggattcagtgtcttcatttttacaaaagttcccccaagaaatcagcaaccagcctctgtttcatctgggagcccctcccttggccccctgggtttgggggtgctgccctactgggaacagcgggggtctgtcacccgtctgagccgcacccccctgtgtggatttcaggaagagcctccctttctttgcgtctccctttctttaattaacattttcaaaagtaataaattcttactgacgacttgtaacttagtcatattttatacttgtagcctttaataaagccatttaaaaaatgctatctctataagaagttctactttactttgatagacatatataaatacactcgagggggggcccgtacccatttctcccttttgtggtcggattacaatccctgggcgaggtttacaacgtgg

SEQ ID NO: 430005 - DNA, 3670 bp, Homo sapiens
agcggcgggcaggccgggcatggcgtccatggcggcggcgatcgcggcttcgcgctcggcggtcatgagcgggaaccggcctctggacgaccgggagcgaaagcgcttcacttacttctcgtcgctgagccccatggccaggaagatcatgcaggacaaggagaagatccgcgagaagtacgggcccgagtgggcgcggctgccgcccgcgcagcaggacgagatcatcgaccggtgcctggtggggccgcgcgccccggcgccccgagaccccggggactcggaggagctcacgcgcttccccggcttgcgcgggcccacgggccagaaggtggtgcgcttcggggacgaggatctaacttggcaagatgagcactctgcccctttctcctgggaaacaaagagtcagatggagttcagtatctccgccctatccatccaggagccgagcaacggcaccgccgccagcgagcccagaccactgtccaaagcttcccagggctcccaggccctcaagtcctcccaaggcagcaggtcctccagcctggacgccctgggccccaccaggaaggaggaggaagcgtcattctggaagatcaatgctgagcggtcccgaggggaggggcctgaggccgagttccagtcgctgacccctagccagatcaagtccatggagaagggggaaaaggtcttgcctccctgctaccggcaggaacctgccccgaaggacagggaggccaaggtggaaaggcccagcaccctccgtcaggagcagcgtcctcttcccaacgtgagcaccgaacgtgagagaccccagcctgtccaggccttcagcagtgcactgcacgaggctgccccctcccagctcgaggggaagctgccatctcctgatgtcaggcaggacgatggggaagacaccctgttctcggaacccaagtttgcacaggtcagctcaagtaatgtcgtcttgaagacgggatttgattttctggacaattggtaaaatgtattagaaaaatacaatgaagaaccctaaaatgttttccaaagtggtgtggtggaggaggataaaaagggccaccttttcctatgtattttactggtttcttgacactcttttcttaatcatttggaaactggtcaatactgccagatttttttcttttttggtagaaccagatatatatgctattttcagtgatttgataacagaagttttccatttggaatttttaaggtctgttaataattcaggagatcttgtaaataaaacttctgttcccagctccacccaactttccccctcctcaaaggatgtgtttcaaccatgtcacaaaaatcatataagtgatttccatctccttctccattattccccctcccccctccgctttttaccgtatgggttccttttggtgggtgattgagggtgatgttatcagccatgacatcagcatgctggctgtgaccccggaaagactggcccccagcgacgttctcagccagcgctcgcagctgtccggggcttctctggcagaagccatgtctctcacatcatgtgccagcctccaccctcacgccatttccagggaacagactgcgggtatgtagcagtgtagtctttaacctgctctgatacatattcagagtatggattgttgtttaaaaagagttgcatgtttaaagagttttgtactagcttttcattattttgtatctagattatcaacaatggggctaccactttccttggttttatatccatttcctcttggaagttcttgttgcttatgtgacctgttggttgttccccggactgggcacctgcaggagtcagggcagacggcagatgtggctggaggtcagggctcttctgcttagttgtgttagagtcttccagcatgggactgatgggagcagtgggcattctttatcccaagggctagccaggttgcgtcatgacggaccttccccagccctgaccaccaccagaagtggaagagtggagtttgcggtcaactcagcagtgcccatggagacctgcgtggtgtcagagcagcagtatctcttggagctggtgcagacaccaaggctgcccagtggtacaacgtggtccacctcccctagggaagctgctgcactcagaggctgtcctgcccagtggcccctgagccgtgtgagcctgcaggaggcgtctgagcagagcctcaagcccggtatggcgccatctccatgttgccatcactgcgttctcacctgaagccttaatctttgcgacacctgccagtgagcgctcggtttcaataccaaagtgtgtcttcttcttttttttttttttttaaatgcctgtttcataggaccttctgaaatgatttccagaatattttatctggctccaaaataaagcacatagcaactcacctcaacccctcatcatctccaggaaagtttctgccaaagctgtggcatagccaacttttgatttggttcttgccaattgttttatgtccctaaacctcatttggatccttggggtatagttttatctttctgcttcagtgatttactgtaacttttcaaatattggttctttctgtaccatttaagtatagttgatatatgtgaggcaaaaaaaggtttcagcatggtggtgagggaaaaaggagcttagaaatcccagttggcacagcctgggcaagcgccagctcccctcagggctaacggcactgttcacacagggatcctcagaatcagcggccacctgcctccaccttctgcctggagggcatggggctgttgtagaacctatggtagcaaatgtatatgtatgagtttgtattctgtagtgttggtgtagcacagaagaaagacctgtgtcctagagagtaggccaaggtgatctgcctcttctattgggagaaattctaatttctttcccactttctcaacaagcccaatattccctccaagttcttcttggtgctgagggctgtaggaattattgaaagcttctgcctcacttagtatcgtctggggcccagcacccagcaataactctaataatgtttcttaatggtatagcctcctgagattaaatgtaaaatcaaaaattaggaaatcttggagggagtcctcaagttgtattgctttgctgtgcttttggaagaagggacgacctggaggacacaggctcatgtgtgggtcttcatcctgcctgaccggcagatcttcctctacaccttgggcaaagtctatgcgaagatggtttcttagctctccatttgccatgattttcctcccattcatcatgagggagtttctcaaaccaggagtttatatttattttttagaaaatacacacttttcaggagaaacctgagcatgattttggattctccacctccccccagtctctgcacctgggattcagctcaaggattcagtgtcttcatttttacaaaagttcccccaagaaatcagcaaccagcctctgtttcatctgggagcccctcccttggccccctgtgtggatttcaggaagagcctccctttctttgcgtctccctttctttaattaacattttcaaaagtaataaattcttactgacgacttgtaacttagtcatattttatacttgtagcctttaataaagccatttaaaaaatgcta

SEQ ID NO: 430006 - DNA, 3567 bp, Homo sapiens
agcggcgggcaggccgggcatggcgtccatggcggcggcgatcgcggcttcgcgctcggcggtcatgagcgggaaccggcctctggacgaccgggagcgaaagcgcttcacttacttctcgtcgctgagccccatggccaggaagatcatgcaggacaaggagaagatccgcgagaagtacgggcccgagtgggcgcggctgccgcccgcgcagcaggacgagatcatcgaccggtgcctggtggggccgcgcgccccggcgccccgagaccccggggactcggaggagctcacgcgcttccccggcttgcgcgggcccacgggccagaaggtggtgcgcttcggggacgaggatctaacttggcaagatgagcactctgcccctttctcctgggaaacaaagagtcagatggagttcagtatctccgccctatccatccaggagccgagcaacggcaccgccgccagcgagcccagaccactgtccaaagcttcccagggctcccaggccctcaagtcctcccaaggcagcaggtcctccagcctggacgccctgggccccaccaggaaggaggaggaagcgtcattctggaagatcaatgctgagcggtcccgaggggaggggcctgaggccgagttccagtcgctgacccctagccagatcaagtccatggagaagggggaaaaggtcttgcctccctgctaccggcaggaacctgccccgaaggacagggaggccaaggtggaaaggcccagcaccctccgtcaggagcagcgtcctcttcccaacgtgagcaccgaacgtgagagaccccagcctgtccaggccttcagcagtgcactgcacgaggctgccccctcccagctcgaggggaagctgccatctcctgatgtcaggcaggacgatggggaagacaccctgttctcggaacccaagtttgcacaggtcagctcaagtaatgtcgtcttgaagacgggatttgattttctggacaattggtaaaatgtattagaaaaatacaatgaagaaccctaaaatgttttccaaagtggtgtggtggaggaggataaaaagggccaccttttcctatgtattttactggtttcttgacactcttttcttaatcatttggaaactggtcaatactgccagatttttttcttttttggtagaaccagatatatatgctattttcagtgatttgataacagaagttttccatttggaatttttaaggtctgttaataattcaggagatcttgtaaataaaacttctgttcccagctccacccaactttccccctcctcaaaggatgtgtttcaaccatgtcacaaaaatcatataagtgatttccatctccttctccattattccccctcccccctccgctttttaccgtatgggttccttttggtgggtgattgagggtgatgttatcagccatgacatcagcatgctggctgtgaccccggaaagactggcccccagcgacgttctcagccagcgctcgcagctgtccggggcttctctggcagaagccatgtctctcacatcatgtgccagcctccaccctcacgccatttccagggaacagactgcgggtatgtagcagtgtagtctttaacctgctctgatacatattcagagtatggattgttgtttaaaaagagttgcatgtttaaagagttttgtactagcttttcattattttgtatctagattatcaacaatggggctaccactttccttggttttatatccatttcctcttggaagttcttgttgcttatgtgacctgttggttgttccccggactgggcacctgcaggagtcagggcagacggcagatgtggctggaggtcagggctcttctgcttagttgtgttagagtcttccagcatgggactgatgggagcagtgggcattctttatcccaagggctagccaggttgcgtcatgacggaccttccccagccctgaccaccaccagaagtggaagagtggagtttgcggtcaactcagcagtgcccatggagacctgcgtggtgtcagagcagcagtatctcttggagctggtgcagacaccaaggctgcccagtggtacaacgtggtccacctcccctagggaagctgctgcactcagaggctgtcctgcccagtggcccctgagccgtgtgagcctgcaggaggcgtctgagcagagcctcaagcccggtatggcgccatctccatgttgccatcactgcgttctcacctgaagccttaatctttgcgacacctgccagtgagcgctcggtttcaataccaaagtgtgtcttcttcttttttttttttttttaaatgcctgtttcataggaccttctgaaatgatttccagaatattttatctggctccaaaataaagcacatagcaactcacctcaacccctcatcatctccaggaaagtttctgccaaagctgtggcatagccaacttttgatttggttcttgccaattgttttatgtccctaaacctcatttggatccttggggtatagttttatctttctgcttcagtgatttactgtaacttttcaaatattggttctttctgtaccatttaagtatagttgatatatgtgaggcaaaaaaaggtttcagcatggtggtgagggaaaaaggagcttagaaatcccagttggcacagcctgggcaagcgccagctcccctcagggctaacggcactgttcacacagggatcctcagaatcagcggccacctgcctccaccttctgcctggagggcatggggctgttgtagaacctatggtagcaaatgtatatgtatgagtttgtattctgtagtgttggtgtagcacagaagaaagacctgtgtcctagagagtaggccaaggtgatctgcctcttctattgggagaaattctaatttctttcccactttctcaacaagcccaatattccctccaagttcttcttggtgctgagggctgtaggaattattgaaagcttctgcctcacttagtatcgtctggggcccagcacccagcaataactctaataatgtttcttaatggtatagcctcctgagattaaatgtaaaatcaaaaattaggaaatcttggagggagtcctcaagttgtattgctttgctgtgcttttggaagaagggacgacctggaggacacaggctcatgtgtgggtcttcatcctgcctgaccggcagatcttcctctacaccttgggcaaagtctatgcgaagatggtttcttagctctccatttgccatgattttcctcccattcatcatgagggagtttctcaaaccaggagtttatatttattttttagaaatccttcttagcacatttaggcgtcttttagtcaatgaggaggctgagcctgtccctgcacctcccattgcaatggttggggcaataaccctcggtaatcctagctcagtgagtagcagggattgtcctccctacccaggagccatacattttggttgcaaagagccaggtcctgcgctcactctctgtacttccacagcctacccgtcttcctg

SEQ ID NO: 430007 - DNA, 3444 bp, Homo sapiens
agcggcgggcaggccgggcatggcgtccatggcggcggcgatcgcggcttcgcgctcggcggtcatgagcgggaaccggcctctggacgaccgggagcgaaagcgcttcacttacttctcgtcgctgagccccatggccaggaagatcatgcaggacaaggagaagatccgcgagaagtacgggcccgagtgggcgcggctgccgcccgcgcagcaggacgagatcatcgaccggtgcctggtggggccgcgcgccccggcgccccgagaccccggggactcggaggagctcacgcgcttccccggcttgcgcgggcccacgggccagaaggtggtgcgcttcggggacgaggatctaacttggcaagatgagcactctgcccctttctcctgggaaacaaagagtcagatggagttcagtatctccgccctatccatccaggagccgagcaacggcaccgccgccagcgagcccagaccactgtccaaagcttcccagggctcccaggccctcaagtcctcccaaggcagcaggtcctccagcctggacgccctgggccccaccaggaaggaggaggaagcgtcattctggaagatcaatgctgagcggtcccgaggggaggggcctgaggccgagttccagtcgctgacccctagccagatcaagtccatggagaagggggaaaaggtcttgcctccctgctaccggcaggaacctgccccgaaggacagggaggccaaggtggaaaggcccagcaccctccgtcaggagcagcgtcctcttcccaacgtgagcaccgaacgtgagagaccccagcctgtccaggccttcagcagtgcactgcacgaggctgccccctcccagctcgaggggaagctgccatctcctgatgtcaggcaggacgatggggaagacaccctgttctcggaacccaagtttgcacaggtcagctcaagtaatgtcgtcttgaagacgggatttgattttctggacaattggtaaaatgtattagaaaaatacaatgaagaaccctaaaatgttttccaaagtggtgtggtggaggaggataaaaagggccaccttttcctatgtattttactggtttcttgacactcttttcttaatcatttggaaactggtcaatactgccagatttttttcttttttggtagaaccagatatatatgctattttcagtgatttgataacagaagttttccatttggaatttttaaggtctgttaataattcaggagatcttgtaaataaaacttctgttcccagctccacccaactttccccctcctcaaaggatgtgtttcaaccatgtcacaaaaatcatataagtgatttccatctccttctccattattccccctcccccctccgctttttaccgtatgggttccttttggtgggtgattgagggtgatgttatcagccatgacatcagcatgctggctgtgaccccggaaagactggcccccagcgacgttctcagccagcgctcgcagctgtccggggcttctctggcagaagccatgtctctcacatcatgtgccagcctccaccctcacgccatttccagggaacagactgcgggtatgtagcagtgtagtctttaacctgctctgatacatattcagagtatggattgttgtttaaaaagagttgcatgtttaaagagttttgtactagcttttcattattttgtatctagattatcaacaatggggctaccactttccttggttttatatccatttcctcttggaagttcttgttgcttatgtgacctgttggttgttccccggactgggcacctgcaggagtcagggcagacggcagatgtggctggaggtcagggctcttctgcttagttgtgttagagtcttccagcatgggactgatgggagcagtgggcattctttatcccaagggctagccaggttgcgtcatgacggaccttccccagccctgaccaccaccagaagtggaagagtggagtttgcggtcaactcagcagtgcccatggagacctgcgtggtgtcagagcagcagtatctcttggagctggtgcagacaccaaggctgcccagtggtacaacgtggtccacctcccctagggaagctgctgcactcagaggctgtcctgcccagtggcccctgagccgtgtgagcctgcaggaggcgtctgagcagagcctcaagcccggtatggcgccatctccatgttgccatcactgcgttctcacctgaagccttaatctttgcgacacctgccagtgagcgctcggtttcaataccaaagtgtgtcttcttcttttttttttttttttaaatgcctgtttcataggaccttctgaaatgatttccagaatattttatctggctccaaaataaagcacatagcaactcacctcaacccctcatcatctccaggaaagtttctgccaaagctgtggcatagccaacttttgatttggttcttgccaattgttttatgtccctaaacctcatttggatccttggggtatagttttatctttctgcttcagtgatttactgtaacttttcaaatattggttctttctgtaccatttaagtatagttgatatatgtgaggcaaaaaaaggtttcagcatggtggtgagggaaaaaggagcttagaaatcccagttggcacagcctgggcaagcgccagctcccctcagggctaacggcactgttcacacagggatcctcagaatcagcggccacctgcctccaccttctgcctggagggcatggggctgttgtagaacctatggtagcaaatgtatatgtatgagtttgtattctgtagtgttggtgtagcacagaagaaagacctgtgtcctagagagtaggccaaggtgatctgcctcttctattgggagaaattctaatttctttcccactttctcaacaagcccaatattccctccaagttcttcttggtgctgagggctgtaggaattattgaaagcttctgcctcacttagtatcgtctggggcccagcacccagcaataactctaataatgtttcttaatggtatagcctcctgagattaaatgtaaaatcaaaaattaggaaatcttggagggagtcctcaagttgtattgctttgctgtgcttttggaagaagggacgacctggaggacacaggctcatgtgtgggtcttcatcctgcctgaccggcagatcttcctctacaccttgggcaaagtctatgcgaagatggtttcttagctctccatttgccatgattttcctcccattcatcatgagggagtttctcaaaccaggagtttatatttattttttagaaattttttttttcccttttttttttttttttttttttttctcgcatcccttttttaacttccttcttttttccctctcttttctcccattctc

SEQ ID NO: 430008 - DNA, 2968 bp, Homo sapiens
  misc_feature (2394)..(2394): n is a, c, g, or t
  misc_feature (2396)..(2396): n is a, c, g, or t
  misc_feature (2398)..(2398): n is a, c, g, or t
  misc_feature (2430)..(2430): n is a, c, g, or t
  misc_feature (2435)..(2435): n is a, c, g, or t
  misc_feature (2440)..(2440): n is a, c, g, or t
  misc_feature (2444)..(2444): n is a, c, g, or t
  misc_feature (2447)..(2447): n is a, c, g, or t
  misc_feature (2456)..(2456): n is a, c, g, or t
agcggcgggcaggccgggcatggcgtccatggcggcggcgatcgcggcttcgcgctcggcggtcatgagcgggaaccggcctctggacgaccgggagcgaaagcgcttcacttacttctcgtcgctgagccccatggccaggaagatcatgcaggacaaggagaagatccgcgagaagtacgggcccgagtgggcgcggctgccgcccgcgcagcaggacgagatcatcgaccggtgcctggtggggccgcgcgccccggcgccccgagaccccggggactcggaggagctcacgcgcttccccggcttgcgcgggcccacgggccagaaggtggtgcgcttcggggacgaggatctaacttggcaagatgagcactctgcccctttctcctgggaaacaaagagtcagatggagttcagtatctccgccctatccatccaggagccgagcaacggcaccgccgccagcgagcccagaccactgtccaaagcttcccagggctcccaggccctcaagtcctcccaaggcagcaggtcctccagcctggacgccctgggccccaccaggaaggaggaggaagcgtcattctggaagatcaatgctgagcggtcccgaggggaggggcctgaggccgagttccagtcgctgacccctagccagatcaagtccatggagaagggggaaaaggtcttgcctccctgctaccggcaggaacctgccccgaaggacagggaggccaaggtggaaaggcccagcaccctccgtcaggagcagcgtcctcttcccaacgtgagcaccgaacgtgagagaccccagcctgtccaggccttcagcagtgcactgcacgaggctgccccctcccagctcgaggggaagctgccatctcctgatgtcaggcaggacgatggggaagacaccctgttctcggaacccaagtttgcacaggtcagctcaagtaatgtcgtcttgaagacgggatttgattttctggacaattggtaaaatgtattagaaaaatacaatgaagaaccctaaaatgttttccaaagtggtgtggtggaggaggataaaaagggccaccttttcctatgtattttactggtttcttgacactcttttcttaatcatttggaaactggtcaatactgccagatttttttcttttttggtagaaccagatatatatgctattttcagtgatttgataacagaagttttccatttggaatttttaaggtctgttaataattcaggagatcttgtaaataaaacttctgttcccagctccacccaactttccccctcctcaaaggatgtgtttcaaccatgtcacaaaaatcatataagtgatttccatctccttctccattattccccctcccccctccgctttttaccgtatgggttccttttggtgggtgattgagggtgatgttatcagccatgacatcagcatgctggctgtgaccccggaaagactggcccccagcgacgttctcagccagcgctcgcagctgtccggggcttctctggcagaagccatgtctctcacatcatgtgccagcctccaccctcacgccatttccagggaacagactgcgggtatgtagcagtgtagtctttaacctgctctgatacatattcagagtatggattgttgtttaaaaagagttgcatgtttaaagagttttgtactagcttttcattattttgtatctagattatcaacaatggggctaccactttccttggttttatatccatttcctcttggaagttcttgttgcttatgtgacctgttggttgttccccggactgggcacctgcaggagtcagggcagacggcagatgtggctggaggtcagggctcttctgcttagttgtgttagagtcttccagcatgggactgatgggagcagtgggcattctttatcccaagggctagccaggttgcgtcatgacggaccttccccagccctgaccaccaccagaagtggaagagtggagtttgcggtcaactcagcagtgcccatggagacctgcgtggtgtcagagcagcagtatctcttggagctggtgcagacaccaaggctgcccagtggtacaacgtggtccacctcccctagggaagctgctgcactcagaggctgtcctgcccagtggcccctgagccgtgtgagcctgcaggaggcgtctgagcagagcctcaagcccggtatggcgccatctccatgttgccatcactgcgttctcacctgaagccttaatctttgcgacacctgccagtgagcgctcggtttcaataccaaagtgtgtcttcttcttttttttttttttttaaatgcctgtttcataggaccttctgaaatgatttccagaatattttaaaaaanananaaaaaaaaaaaaaaaaaaaaaacaaaaaaaanaaaanaaaanaaanaanaaaaaaaanaaaaaaaaaaaagaagaaaaaaaaaaagaagatggggggccggcgccggtccaacacatatcttccccgcgcgggggggcgcccagcatatgccgcggccgacccccttttttgttggaagacggcgggcgcctccactcttaggaggggggcttcattatatatagcagcgcgacgcgggcggcggttgttaaaaaaacagcgtgagggggggaggacaacaaccagctcggatcgatggggagatatcttcttctgagaagagaagagccccacatctctcgggggggggggcgagacacaaatggggggacaacacaccacaccaaaagaaattaatacccactgctacgagagggaaatataacactatgacgcaggcatgatagaggtgggggaaccaaccccgcacgagaaatgacggcggcgtcaacaaaaagaaaatgttggttagccagaaatatttagtgaagaacaaattttttcgcggcgcgttataataacaaggggaa

SEQ ID NO: 430009 - DNA, 1411 bp, Homo sapiens
agcggcgggcaggccgggcatggcgtccatggcggcggcgatcgcggcttcgcgctcggcggtcatgagcgggaaccggcctctggacgaccgggagcgaaagcgcttcacttacttctcgtcgctgagccccatggccaggaagatcatgcaggacaaggagaagatccgcgagaagtacgggcccgagtgggcgcggctgccgcccgcgcagcaggacgagatcatcgaccggtgcctggtggggccgcgcgccccggcgccccgagaccccggggactcggaggagctcacgcgcttccccggcttgcgcgggcccacgggccagaaggtggtgcgcttcggggacgaggatctaacttggcaagatgagcactctgcccctttctcctgggaaacaaagagtcagatggagttcagtatctccgccctatccatccaggagccgagcaacggcaccgccgccagcgagcccagaccactgtccaaagcttcccagggctcccaggccctcaagtcctcccaaggcagcaggtcctccagcctggacgccctgggccccaccaggaaggaggaggaagcgtcattctggaagatcaatgctgagcggtcccgaggggaggggcctgaggccgagttccagtcgctgacccctagccagatcaagtccatggagaagggggaaaaggtcttgcctccctgctaccggcaggaacctgccccgaaggacagggaggccaaggtggaaaggcccagcaccctccgtcaggagcagcgtcctcttcccaacgtgagcaccgaacgtgagagaccccagcctgtccaggccttcagcagtgcactgcacgaggctgccccctcccagctcgaggggaagctgccatctcctgatgtcaggcaggacgatggggaagacaccctgttctcggaacccaagtttgcacaggtgagtggcctttaccagcgcgtcctcagatgggatggtgccttattccacgggaaccgagagggtcccccacaaagcaggcaggccacaggtgcccatgctctttttcttctccttcccctgcctcttcctcagaggatgcctaggctcagggtgctgagccaccaacaaatatgcaacaagacaagttttgcgagtccatctgggtgccctaatttgtttaccagtcagggttccgtggcccactgcgctttccccagtgcgcgggctgctatcagaagaggcccctggaaggcgctgcgcccagggctgtcacagctcaaagctgtgttgggccttctttttgggagctgtccatagaggcaatggtctgttctttaggactggtctggatttgggccaggggagctgcctgttggcaaagcaggcaggcacacttgagaggcctcactgggtcttgcccct

SEQ ID NO: 430010 - DNA, 2121 bp, Homo sapiens
aggtcggcaactttgtccggcgctcccagcggcgctcggcttcctcctgtagtagttgagcgcaggccccgcctcccggccgtgttgtcaaaagggccggggtctcggattggtccagccgccgggacaacacctgctcgactccttcattcaagtgacaccagagcttccagggatatttgaggcaccatccctgccattgccgggcactcgcggcgctgctaacggcctggtcacatgctctccggagagctacgggagggcgctgggtaacctctatccgagccgcggccgcgaggaggagggaaaaggcgagcaaaaaggaagagtgggaggaggaggggaagcggcgaaggaggaagaggaggaggaggaagaggggagcacaaaggatccaggtctcccgacgggaggttaataccaagaaccatgtgtgccgagcggctgggccagttcatgaccctggctttggtgttggccacctttgacccggcgcgggggaccgacgccaccaacccacccgagggtccccaagacaggagctcccagcagaaaggccgcctgtccctgcagaatacagcggagatccagcactgtttggtcaacgctggcgatgtggggtgtggcgtgtttgaatgtttcgagaacaactcttgtgagattcggggcttacatgggatttgcatgacttttctgcacaacgctggaaaatttgatgcccagggcaagtcattcatcaaagacgccttgaaatgtaaggcccacgctctgcggcacaggttcggctgcataagccggaagtgcccggccatcagggaaatggtgtcccagttgcagcgggaatgctacctcaagcacgacctgtgcgcggctgcccaggagaacacccgggtgatagtggagatgatccatttcaaggacttgctgctgcacgaaccctacgtggacctcgtgaacttgctgctgacctgtggggaggaggtgaaggaggccatcacccacagcgtgcaggttcagtgtgagcagaactggggaagcctgtgctccatcttgagcttctgcacctcggccatccagaagcctcccacggcgccccccgagcgccagccccaggtggacagaaccaagctctccagggcccaccacggggaagcaggacatcacctcccagagcccagcagtagggagactggccgaggtgccaagggtgagcgaggtagcaagagccacccaaacgcccatgcccgaggcagagtcgggggccttggggctcagggaccttccggaagcagcgagtgggaagacgaacagtctgagtattctgatatccggaggtgaaatgaaaggcctggccacgaaatctttcctccacgccgtccattttcttatctatggacattccaaaacatttaccattagagaggggggatgtcacacgcaggattctgtggggactgtggacttcatcgaggtgtgtgttcgcggaacggacaggtgagatggagacccctggggccgtggggtctcaggggtgcctggtgaattctgcacttacacgtactcaagggagcgcgcccgcgttatcctcgtacctttgtcttctttccatctgtggagtcagtgggtgtcggccgctctgttgtgggggaggtgaaccagggaggggcagggcaaggcagggcccccagagctgggccacacagtgggtgctgggcctcgccccgaagcttctggtgcagcagcctctggtgctgtctccgcggaagtcagggcggctggattccaggacaggagtgaatgtaaaaataaatatcgcttagaatgcaggagaagggtggagaggaggcaggggccgagggggtgcttggtgccaaactgaaattcagtttcttgtgtggggccttgcggttcagagctcttggcgagggtggagggaggagtgtcatttctatgtgtaatttctgagccattgtactgtctgggctgggggggacactgtccaagggagtggcccctatgagtttatattttaaccactgcttcaaatctcgatttcactttttttatttatccagttatatctacatatctgtcatctaaataaatggctttcaaacaaag

SEQ ID NO: 430011 - DNA, 4478 bp, Homo sapiens
aggtcggcaactttgtccggcgctcccagcggcgctcggcttcctcctgtagtagttgagcgcaggccccgcctcccggccgtgttgtcaaaagggccggggtctcggattggtccagccgccgggacaacacctgctcgactccttcattcaagtgacaccagagcttccagggatatttgaggcaccatccctgccattgccgggcactcgcggcgctgctaacggcctggtcacatgctctccggagagctacgggagggcgctgggtaacctctatccgagccgcggccgcgaggaggagggaaaaggcgagcaaaaaggaagagtgggaggaggaggggaagcggcgaaggaggaagaggaggaggaggaagaggggagcacaaaggatccaggtctcccgacgggaggttaataccaagaaccatgtgtgccgagcggctgggccagttcatgaccctggctttggtgttggccacctttgacccggcgcgggggaccgacgccaccaacccacccgagggtccccaagacaggagctcccagcagaaaggccgcctgtccctgcagaatacagcggagatccagcactgtttggtcaacgctggcgatgtggggtgtggcgtgtttgaatgtttcgagaacaactcttgtgagattcggggcttacatgggatttgcatgacttttctgcacaacgctggaaaatttgatgcccagggcaagtcattcatcaaagacgccttgaaatgtaaggcccacgctctgcggcacaggttcggctgcataagccggaagtgcccggccatcagggaaatggtgtcccagttgcagcgggaatgctacctcaagcacgacctgtgcgcggctgcccaggagaacacccgggtgatagtggagatgatccatttcaaggacttgctgctgcacgaaccctacgtggacctcgtgaacttgctgctgacctgtggggaggaggtgaaggaggccatcacccacagcgtgcaggttcagtgtgagcagaactggggaagcctgtgctccatcttgagcttctgcacctcggccatccagaagcctcccacggcgccccccgagcgccagccccaggtggacagaaccaagctctccagggcccaccacggggaagcaggacatcacctcccagagcccagcagtagggagactggccgaggtgccaagggtgagcgaggtagcaagagccacccaaacgcccatgcccgaggcagagtcgggggccttggggctcagggaccttccggaagcagcgagtgggaagacgaacagtctgagtattctgatatccggaggtgaaatgaaaggcctggccacgaaatctttcctccacgccgtccattttcttatctatggacattccaaaacatttaccattagagaggggggatgtcacacgcaggattctgtggggactgtggacttcatcgaggtgtgtgttcgcggaacggacaggtgagatggagacccctggggccgtggggtctcaggggtgcctggtgaattctgcacttacacgtactcaagggagcgcgcccgcgttatcctcgtacctttgtcttctttccatctgtggagtcagtgggtgtcggccgctctgttgtgggggaggtgaaccagggaggggcagggcaaggcagggcccccagagctgggccacacagtgggtgctgggcctcgccccgaagcttctggtgcagcagcctctggtgctgtctccgcggaagtcagggcggctggattccaggacaggagtgaatgtaaaaataaatatcgcttagaatgcaggagaagggtggagaggaggcaggggccgagggggtgcttggtgccaaactgaaattcagtttcttgtgtggggccttgcggttcagagctcttggcgagggtggagggaggagtgtcatttctatgtgtaatttctgagccattgtactgtctgggctgggggggacactgtccaagggagtggcccctatgagtttatattttaaccactgcttcaaatctcgatttcactttttttatttatccagttatatctacatatctgtcatctaaataaatggctttcaaacaaagcaactgggtcattaaaaccagctcaaagggggtttaaaaaaaaaaaaccagcccatcctttgaggctgatttttcttttttttaagttctattttaaaagctatcaaacagcgacatagccatacatctgactgcctgacatggactcctgcccacttgggggaaaccttatacccagaggaaaatacacacctggggagtacatttgacaaatttcccttaggatttcgttatctcaccttgaccctcagccaagattggtaaagctgcgtcctggcgattccaggagacccagctggaaacctggcttctccatgtgaggggatgggaaaggaaagaagagaatgaagactacttagtaattcccatcaggaaatgctgaccttttacataaaatcaaggagactgctgaaaatctctaagggacaggattttccagatcctaattggaaatttagcaataaggagaggagtccaaggggacaaataaaggcagagagaagagacagaactaaaaatacgaggaaaggagagtgaggattttcattaaaagtctcagcagtgggtttcttgggttatttaaaacatcacctaaataggccttttcttcctaattggccatcaaattaaagcctatcctttctcaagcaggagctggtattgtagggagtggccgggtattctgggctgggctcttctggagtagggggtcagcaaacattgtctgcaaagggccagatactgaatccagtactttcagtttggcgagccgtgaggtctctgtcgaaactactcaactctgccgtcctagcacaaaagcagccatagacaacacacaaacgagagggcttggctcccttccaggaagatttatttaacaggctcccagctgaatttcactcacaggacacagtttactgatctctgttctagtgagtgggtcaaaaagcatatgcatccttatccgtcaactcatcagctcttcctcaaggcaacctgaggccagacaccaagaaaccaagcgtatctgctctaaaatgacttgttcctggggaatgccttcaaccaaaacacagctagtatttctatgccccaaatccaatcccagtctttcatgatccatgccggcggttgggtggggaggggaatcattggttgggggaagggaggaaaccccacctccagcccccgccaccgggctccctgggcacccagcaagatctggggctgcagagaacagaagagctggtgcacttaatccagctctgcccttggggggaggaggacctgtgtgtcaggctctgccatgggaacgagtgtaaaccgtggctgtctcctgcagtgagccaccgcggcaggcacgttgactgttttactgacatcactcaaaagctaaagcaataacattctcctgcgttgctgagtcagctgttcatttgtccgccagctcctggactggatgtgtgaaaggcatcacatttccattttcctccgtgtaaatgttttatgtgttcgcctactgatcccattcgttgcttctattgtaaatatttgtcatttgtatttattatctctgtgttttccccctaaggcataaaatggtttactgtgttcatttgaacccatttactgatctctgttgtatatttttcatgccactgctttgttttctcctcagaagtcgggtagatagcatttctatcccatccctcacgttattggaagcatgcaacagtatttattgctcagggtcttctgcttaaaactgaggaaggtccacattcctgcaagcattgattgagacatttgcacaatctaaaatgtaagcaaagtagtcattaaaaatacaccctctacttgggctttatactgcatacaaatttactcatgagccttcctttgaggaaggatgtggatctccaaataaagatttagtgtttattttgagctctgcatcttaacaagatgatctgaacacctctcctttgtatcaataaatagccctgttattctgaagtgagaggaccaagtatagtaaaatgctgacatctaaaactaaataaatagaaaacaccaggccagaactatagtcatactcacacaaagggagaaatttaaactcgaaccaagcaaaaggcttcacggaaatagcatggaaaaacaatgcttccagtggccacttcctaaggaggaacaaccccgtctgatctcagaattggcaccacgtgagcttgctaagtgataatatctgtttctactacggatttaggcaacaggacctgtacattgtcacattgcattatttttcttcaagcgttaataaaagttttaaataaatggcttccacttgagtagcg

SEQ ID NO: 430012 - DNA, 2672 bp, Homo sapiens
aggtcggcaactttgtccggcgctcccagcggcgctcggcttcctcctgtagtagttgagcgcaggccccgcctcccggccgtgttgtcaaaagggccggggtctcggattggtccagccgccgggacaacacctgctcgactccttcattcaagtgacaccagagcttccagggatatttgaggcaccatccctgccattgccgggcactcgcggcgctgctaacggcctggtcacatgctctccggagagctacgggagggcgctgggtaacctctatccgagccgcggccgcgaggaggagggaaaaggcgagcaaaaaggaagagtgggaggaggaggggaagcggcgaaggaggaagaggaggaggaggaagaggggagcacaaaggatccaggtctcccgacgggaggttaataccaagaaccatgtgtgccgagcggctgggccagttcatgaccctggctttggtgttggccacctttgacccggcgcgggggaccgacgccaccaacccacccgagggtccccaagacaggagctcccagcagaaaggccgcctgtccctgcagaatacagcggagatccagcactgtttggtcaacgctggcgatgtggggtgtggcgtgtttgaatgtttcgagaacaactcttgtgagattcggggcttacatgggatttgcatgacttttctgcacaacgctggaaaatttgatgcccagggcaagtcattcatcaaagacgccttgaaatgtaaggcccacgctctgcggcacaggttcggctgcataagccggaagtgcccggccatcagggaaatggtgtcccagttgcagcgggaatgctacctcaagcacgacctgtgcgcggctgcccaggagaacacccgggtgatagtggagatgatccatttcaaggacttgctgctgcacgaaccctacgtggacctcgtgaacttgctgctgacctgtggggaggaggtgaaggaggccatcacccacagcgtgcaggttcagtgtgagcagaactggggaagcctgtgctccatcttgagcttctgcacctcggccatccagaagcctcccacggcgccccccgagcgccagccccaggtggacagaaccaagctctccagggcccaccacggggaagcaggacatcacctcccagagcccagcagtagggagactggccgaggtgccaagggtgagcgaggtagcaagagccacccaaacgcccatgcccgaggcagagtcgggggccttggggctcagggaccttccggaagcagcgagtgggaagacgaacagtctgagtattctgatatccggaggtgaaatgaaaggcctggccacgaaatctttcctccacgccgtccattttcttatctatggacattccaaaacatttaccattagagaggggggatgtcacacgcaggattctgtggggactgtggacttcatcgaggtgtgtgttcgcggaacggacaggtgagatggagacccctggggccgtggggtctcaggggtgcctggtgaattctgcacttacacgtactcaagggagcgcgcccgcgttatcctcgtacctttgtcttctttccatctgtggagtcagtgggtgtcggccgctctgttgtgggggaggtgaaccagggaggggcagggcaaggcagggcccccagagctgggccacacagtgggtgctgggcctcgccccgaagcttctggtgcagcagcctctggtgctgtctccgcggaagtcagggcggctggattccaggacaggagtgaatgtaaaaataaatatcgcttagaatgcaggagaagggtggagaggaggcaggggccgagggggtgcttggtgccaaactgaaattcagtttcttgtgtggggccttgcggttcagagctcttggcgagggtggagggaggagtgtcatttctatgtgtaatttctgagccattgtactgtctgggctgggggggacactgtccaagggagtggcccctatgagtttatattttaaccactgcttcaaatctcgatttcactttttttatttatccagttatatctacatatctgtcatctaaataaatggctttcaaacaaagcaactgggtcattaaaaccagctcaaagggggtttaaaaaaaaaaaaccagcccatcctttgaggctgatttttcttttttttaagttctattttaaaagctatcaaacagcgacatagccatacatctgactgcctgacatggactcctgcccacttgggggaaaccttatacccagaggaaaatacacacctggggagtacatttgacaaatttcccttaggatttcgttatctcaccttgaccctcagccaagattggtaaagctgcgtcctggcgattccaggagacccagctggaaacctggcttctccatgtgaggggatgggaaaggaaagaagagaatgaagactacttagtaattcccatcaggaaatgctgaccttttacataaaatcaaggagactgctgaaaatctctaagggacaggattttccagatcctaattggaaatttagcaataaggagaggagtccaaggggacaaataaaggcagagagaagagacagaagggagaggaagaaaagagagagagaaaagagcctcgtgcc

SEQ ID NO: 430013 - DNA, 3856 bp, Homo sapiens
aggtcggcaactttgtccggcgctcccagcggcgctcggcttcctcctgtagtagttgagcgcaggccccgcctcccggccgtgttgtcaaaagggccggggtctcggattggtccagccgccgggacaacacctgctcgactccttcattcaagtgacaccagagcttccagggatatttgaggcaccatccctgccattgccgggcactcgcggcgctgctaacggcctggtcacatgctctccggagagctacgggagggcgctgggtaacctctatccgagccgcggccgcgaggaggagggaaaaggcgagcaaaaaggaagagtgggaggaggaggggaagcggcgaaggaggaagaggaggaggaggaagaggggagcacaaaggatccaggtctcccgacgggaggttaataccaagaaccatgtgtgccgagcggctgggccagttcatgaccctggctttggtgttggccacctttgacccggcgcgggggaccgacgccaccaacccacccgagggtccccaagacaggagctcccagcagaaaggccgcctgtccctgcagaatacagcggagatccagcactgtttggtcaacgctggcgatgtggggtgtggcgtgtttgaatgtttcgagaacaactcttgtgagattcggggcttacatgggatttgcatgacttttctgcacaacgctggaaaatttgatgcccagggcaagtcattcatcaaagacgccttgaaatgtaaggcccacgctctgcggcacaggttcggctgcataagccggaagtgcccggccatcagggaaatggtgtcccagttgcagcgggaatgctacctcaagcacgacctgtgcgcggctgcccaggagaacacccgggtgatagtggagatgatccatttcaaggacttgctgctgcacgaaccctacgtggacctcgtgaacttgctgctgacctgtggggaggaggtgaaggaggccatcacccacagcgtgcaggttcagtgtgagcagaactggggaagcctgtgctccatcttgagcttctgcacctcggccatccagaagcctcccacggcgccccccgagcgccagccccaggtggacagaaccaagctctccagggcccaccacggggaagcaggacatcacctcccagagcccagcagtagggagactggccgaggtgccaagggtgagcgaggtagcaagagccacccaaacgcccatgcccgaggcagagtcgggggccttggggctcagggaccttccggaagcagcgagtgggaagacgaacagtctgagtattctgatatccggaggtgaaatgaaaggcctggccacgaaatctttcctccacgccgtccattttcttatctatggacattccaaaacatttaccattagagaggggggatgtcacacgcaggattctgtggggactgtggacttcatcgaggtgtgtgttcgcggaacggacaggtgagatggagacccctggggccgtggggtctcaggggtgcctggtgaattctgcacttacacgtactcaagggagcgcgcccgcgttatcctcgtacctttgtcttctttccatctgtggagtcagtgggtgtcggccgctctgttgtgggggaggtgaaccagggaggggcagggcaaggcagggcccccagagctgggccacacagtgggtgctgggcctcgccccgaagcttctggtgcagcagcctctggtgctgtctccgcggaagtcagggcggctggattccaggacaggagtgaatgtaaaaataaatatcgcttagaatgcaggagaagggtggagaggaggcaggggccgagggggtgcttggtgccaaactgaaattcagtttcttgtgtggggccttgcggttcagagctcttggcgagggtggagggaggagtgtcatttctatgtgtaatttctgagccattgtactgtctgggctgggggggacactgtccaagggagtggcccctatgagtttatattttaaccactgcttcaaatctcgatttcactttttttatttatccagttatatctacatatctgtcatctaaataaatggctttcaaacaaagcaactgggtcattaaaaccagctcaaagggggtttaaaaaaaaaaaaccagcccatcctttgaggctgatttttcttttttttaagttctattttaaaagctatcaaacagcgacatagccatacatctgactgcctgacatggactcctgcccacttgggggaaaccttatacccagaggaaaatacacacctggggagtacatttgacaaatttcccttaggatttcgttatctcaccttgaccctcagccaagattggtaaagctgcgtcctggcgattccaggagacccagctggaaacctggcttctccatgtgaggggatgggaaaggaaagaagagaatgaagactacttagtaattcccatcaggaaatgctgaccttttacataaaatcaaggagactgctgaaaatctctaagggacaggattttccagatcctaattggaaatttagcaataaggagaggagtccaaggggacaaataaaggcagagagaagagacagaactaaaaatacgaggaaaggagagtgaggattttcattaaaagtctcagcagtgggtttcttgggttatttaaaacatcacctaaataggccttttcttcctaattggccatcaaattaaagcctatccttttctgcccttggggggaggaggacctgtgtgtcaggctctgccatgggaacgagtgtaaaccgtggctgtctcctgcagtgagccaccgcggcaggcacgttgactgttttactgacatcactcaaaagctaaagcaataacattctcctgcgttgctgagtcagctgttcatttgtccgccagctcctggactggatgtgtgaaaggcatcacatttccattttcctccgtgtaaatgttttatgtgttcgcctactgatcccattcgttgcttctattgtaaatatttgtcatttgtatttattatctctgtgttttccccctaaggcataaaatggtttactgtgttcatttgaacccatttactgatctctgttgtatatttttcatgccactgctttgttttctcctcagaagtcgggtagatagcatttctatcccatccctcacgttattggaagcatgcaacagtatttattgctcagggtcttctgcttaaaactgaggaaggtccacattcctgcaagcattgattgagacatttgcacaatctaaaatgtaagcaaagtagtcattaaaaatacaccctctacttgggctttatactgcatacaaatttactcatgagccttcctttgaggaaggatgtggatctccaaataaagatttagtgtttattttgagctctgcatcttaacaagatgatctgaacacctctcctttgtatcaataaatagccctgttattctgaagtgagaggaccaagtatagtaaaatgctgacatctaaaactaaataaatagaaaacaccaggccagaactatagtcatactcacacaaagggagaaatttaaactcgaaccaagcaaaaggcttcacggaaatagcatggaaaaacaatgcttccagtggccacttcctaaggaggaacaaccccgtctgatctcagaattggcaccacgtgagcttgctaagtgataatatctgtttctactacggatttaggcaacaggacctgtacattgtcacattgcattatttttcttcaagcgttaataaaagttttaaataaatggcttccacttgagtagcg

SEQ ID NO: 430014 - DNA, 3957 bp, Homo sapiens
aggtcggcaactttgtccggcgctcccagcggcgctcggcttcctcctgtagtagttgagcgcaggccccgcctcccggccgtgttgtcaaaagggccggggtctcggattggtccagccgccgggacaacacctgctcgactccttcattcaagtgacaccagagcttccagggatatttgaggcaccatccctgccattgccgggcactcgcggcgctgctaacggcctggtcacatgctctccggagagctacgggagggcgctgggtaacctctatccgagccgcggccgcgaggaggagggaaaaggcgagcaaaaaggaagagtgggaggaggaggggaagcggcgaaggaggaagaggaggaggaggaagaggggagcacaaaggatccaggtctcccgacgggaggttaataccaagaaccatgtgtgccgagcggctgggccagttcatgaccctggctttggtgttggccacctttgacccggcgcgggggaccgacgccaccaacccacccgagggtccccaagacaggagctcccagcagaaaggccgcctgtccctgcagaatacagcggagatccagcactgtttggtcaacgctggcgatgtggggtgtggcgtgtttgaatgtttcgagaacaactcttgtgagattcggggcttacatgggatttgcatgacttttctgcacaacgctggaaaatttgatgcccagggcaagtcattcatcaaagacgccttgaaatgtaaggcccacgctctgcggcacaggttcggctgcataagccggaagtgcccggccatcagggaaatggtgtcccagttgcagcgggaatgctacctcaagcacgacctgtgcgcggctgcccaggagaacacccgggtgatagtggagatgatccatttcaaggacttgctgctgcacgaaccctacgtggacctcgtgaacttgctgctgacctgtggggaggaggtgaaggaggccatcacccacagcgtgcaggttcagtgtgagcagaactggggaagcctgtgctccatcttgagcttctgcacctcggccatccagaagcctcccacggcgccccccgagcgccagccccaggtggacagaaccaagctctccagggcccaccacggggaagcaggacatcacctcccagagcccagcagtagggagactggccgaggtgccaagggtgagcgaggtagcaagagccacccaaacgcccatgcccgaggcagagtcgggggccttggggctcagggaccttccggaagcagcgagtgggaagacgaacagtctgagtattctgatatccggaggtgaaatgaaaggcctggccacgaaatctttcctccacgccgtccattttcttatctatggacattccaaaacatttaccattagagaggggggatgtcacacgcaggattctgtggggactgtggacttcatcgaggtgtgtgttcgcggaacggacaggtgagatggagacccctggggccgtggggtctcaggggtgcctggtgaattctgcacttacacgtactcaagggagcgcgcccgcgttatcctcgtacctttgtcttctttccatctgtggagtcagtgggtgtcggccgctctgttgtgggggaggtgaaccagggaggggcagggcaaggcagggcccccagagctgggccacacagtgggtgctgggcctcgccccgaagcttctggtgcagcagcctctggtgctgtctccgcggaagtcagggcggctggattccaggacaggagtgaatgtaaaaataaatatcgcttagaatgcaggagaagggtggagaggaggcaggggccgagggggtgcttggtgccaaactgaaattcagtttcttgtgtggggccttgcggttcagagctcttggcgagggtggagggaggagtgtcatttctatgtgtaatttctgagccattgtactgtctgggctgggggggacactgtccaagggagtggcccctatgagtttatattttaaccactgcttcaaatctcgatttcactttttttatttatccagttatatctacatatctgtcatctaaataaatggctttcaaacaaagcaactgggtcattaaaaccagctcaaagggggtttaaaaaaaaaaaaccagcccatcctttgaggctgatttttcttttttttaagttctattttaaaagctatcaaacagcgacatagccatacatctgactgcctgacatggactcctgcccacttgggggaaaccttatacccagaggaaaatacacacctggggagtacatttgacaaatttcccttaggatttcgttatctcaccttgaccctcagccaagattggtaaagctgcgtcctggcgattccaggagacccagctggaaacctggcttctccatgtgaggggatgggaaaggaaagaagagaatgaagactacttagtaattcccatcaggaaatgctgaccttttacataaaatcaaggagactgctgaaaatctctaagggacaggattttccagatcctaattggaaatttagcaataaggagaggagtccaaggggacaaataaaggcagagagaagagacagaactaaaatgacttgttcctggggaatgccttcaaccaaaacacagctagtatttctatgccccaaatccaatcccagtctttcatgatccatgccggcggttgggtggggaggggaatcattggttgggggaagggaggaaaccccacctccagcccccgccaccgggctccctgggcacccagcaagatctggggctgcagagaacagaagagctggtgcacttaatccagctctgcccttggggggaggaggacctgtgtgtcaggctctgccatgggaacgagtgtaaaccgtggctgtctcctgcagtgagccaccgcggcaggcacgttgactgttttactgacatcactcaaaagctaaagcaataacattctcctgcgttgctgagtcagctgttcatttgtccgccagctcctggactggatgtgtgaaaggcatcacatttccattttcctccgtgtaaatgttttatgtgttcgcctactgatcccattcgttgcttctattgtaaatatttgtcatttgtatttattatctctgtgttttccccctaaggcataaaatggtttactgtgttcatttgaacccatttactgatctctgttgtatatttttcatgccactgctttgttttctcctcagaagtcgggtagatagcatttctatcccatccctcacgttattggaagcatgcaacagtatttattgctcagggtcttctgcttaaaactgaggaaggtccacattcctgcaagcattgattgagacatttgcacaatctaaaatgtaagcaaagtagtcattaaaaatacaccctctacttgggctttatactgcatacaaatttactcatgagccttcctttgaggaaggatgtggatctccaaataaagatttagtgtttattttgagctctgcatcttaacaagatgatctgaacacctctcctttgtatcaataaatagccctgttattctgaagtgagaggaccaagtatagtaaaatgctgacatctaaaactaaataaatagaaaacaccaggccagaactatagtcatactcacacaaagggagaaatttaaactcgaaccaagcaaaaggcttcacggaaatagcatggaaaaacaatgcttccagtggccacttcctaaggaggaacaaccccgtctgatctcagaattggcaccacgtgagcttgctaagtgataatatctgtttctactacggatttaggcaacaggacctgtacattgtcacattgcattatttttcttcaagcgttaataaaagttttaaataaatggcttccacttgagtagcg

SEQ ID NO: 430015 - DNA, 3767 bp, Homo sapiens
aggtcggcaactttgtccggcgctcccagcggcgctcggcttcctcctgtagtagttgagcgcaggccccgcctcccggccgtgttgtcaaaagggccggggtctcggattggtccagccgccgggacaacacctgctcgactccttcattcaagtgacaccagagcttccagggatatttgaggcaccatccctgccattgccgggcactcgcggcgctgctaacggcctggtcacatgctctccggagagctacgggagggcgctgggtaacctctatccgagccgcggccgcgaggaggagggaaaaggcgagcaaaaaggaagagtgggaggaggaggggaagcggcgaaggaggaagaggaggaggaggaagaggggagcacaaaggatccaggtctcccgacgggaggttaataccaagaaccatgtgtgccgagcggctgggccagttcatgaccctggctttggtgttggccacctttgacccggcgcgggggaccgacgccaccaacccacccgagggtccccaagacaggagctcccagcagaaaggccgcctgtccctgcagaatacagcggagatccagcactgtttggtcaacgctggcgatgtggggtgtggcgtgtttgaatgtttcgagaacaactcttgtgagattcggggcttacatgggatttgcatgacttttctgcacaacgctggaaaatttgatgcccagggcaagtcattcatcaaagacgccttgaaatgtaaggcccacgctctgcggcacaggttcggctgcataagccggaagtgcccggccatcagggaaatggtgtcccagttgcagcgggaatgctacctcaagcacgacctgtgcgcggctgcccaggagaacacccgggtgatagtggagatgatccatttcaaggacttgctgctgcacgaaccctacgtggacctcgtgaacttgctgctgacctgtggggaggaggtgaaggaggccatcacccacagcgtgcaggttcagtgtgagcagaactggggaagcctgtgctccatcttgagcttctgcacctcggccatccagaagcctcccacggcgccccccgagcgccagccccaggtggacagaaccaagctctccagggcccaccacggggtgcttggtgccaaactgaaattcagtttcttgtgtggggccttgcggttcagagctcttggcgagggtggagggaggagtgtcatttctatgtgtaatttctgagccattgtactgtctgggctgggggggacactgtccaagggagtggcccctatgagtttatattttaaccactgcttcaaatctcgatttcactttttttatttatccagttatatctacatatctgtcatctaaataaatggctttcaaacaaagcaactgggtcattaaaaccagctcaaagggggtttaaaaaaaaaaaaccagcccatcctttgaggctgatttttcttttttttaagttctattttaaaagctatcaaacagcgacatagccatacatctgactgcctgacatggactcctgcccacttgggggaaaccttatacccagaggaaaatacacacctggggagtacatttgacaaatttcccttaggatttcgttatctcaccttgaccctcagccaagattggtaaagctgcgtcctggcgattccaggagacccagctggaaacctggcttctccatgtgaggggatgggaaaggaaagaagagaatgaagactacttagtaattcccatcaggaaatgctgaccttttacataaaatcaaggagactgctgaaaatctctaagggacaggattttccagatcctaattggaaatttagcaataaggagaggagtccaaggggacaaataaaggcagagagaagagacagaactaaaaatacgaggaaaggagagtgaggattttcattaaaagtctcagcagtgggtttcttgggttatttaaaacatcacctaaataggccttttcttcctaattggccatcaaattaaagcctatcctttctcaagcaggagctggtattgtagggagtggccgggtattctgggctgggctcttctggagtagggggtcagcaaacattgtctgcaaagggccagatactgaatccagtactttcagtttggcgagccgtgaggtctctgtcgaaactactcaactctgccgtcctagcacaaaagcagccatagacaacacacaaacgagagggcttggctcccttccaggaagatttatttaacaggctcccagctgaatttcactcacaggacacagtttactgatctctgttctagtgagtgggtcaaaaagcatatgcatccttatccgtcaactcatcagctcttcctcaaggcaacctgaggccagacaccaagaaaccaagcgtatctgctctaaaatgacttgttcctggggaatgccttcaaccaaaacacagctagtatttctatgccccaaatccaatcccagtctttcatgatccatgccggcggttgggtggggaggggaatcattggttgggggaagggaggaaaccccacctccagcccccgccaccgggctccctgggcacccagcaagatctggggctgcagagaacagaagagctggtgcacttaatccagctctgcccttggggggaggaggacctgtgtgtcaggctctgccatgggaacgagtgtaaaccgtggctgtctcctgcagtgagccaccgcggcaggcacgttgactgttttactgacatcactcaaaagctaaagcaataacattctcctgcgttgctgagtcagctgttcatttgtccgccagctcctggactggatgtgtgaaaggcatcacatttccattttcctccgtgtaaatgttttatgtgttcgcctactgatcccattcgttgcttctattgtaaatatttgtcatttgtatttattatctctgtgttttccccctaaggcataaaatggtttactgtgttcatttgaacccatttactgatctctgttgtatatttttcatgccactgctttgttttctcctcagaagtcgggtagatagcatttctatcccatccctcacgttattggaagcatgcaacagtatttattgctcagggtcttctgcttaaaactgaggaaggtccacattcctgcaagcattgattgagacatttgcacaatctaaaatgtaagcaaagtagtcattaaaaatacaccctctacttgggctttatactgcatacaaatttactcatgagccttcctttgaggaaggatgtggatctccaaataaagatttagtgtttattttgagctctgcatcttaacaagatgatctgaacacctctcctttgtatcaataaatagccctgttattctgaagtgagaggaccaagtatagtaaaatgctgacatctaaaactaaataaatagaaaacaccaggccagaactatagtcatactcacacaaagggagaaatttaaactcgaaccaagcaaaaggcttcacggaaatagcatggaaaaacaatgcttccagtggccacttcctaaggaggaacaaccccgtctgatctcagaattggcaccacgtgagcttgctaagtgataatatctgtttctactacggatttaggcaacaggacctgtacattgtcacattgcattatttttcttcaagcgttaataaaagttttaaataaatggcttccacttgagtagcg

SEQ ID NO: 430016 - DNA, 3805 bp, Homo sapiens
ccggggatgcaggacatcacctcccagagcccagcagtagggagactggccgaggtgccaagggtgagcgaggtagcaagagccacccaaacgctctgcggcacaggttcggctgcataagccggaagtgcccggccatcagggaaatggtgtcccagttgcagcgggaatgctacctcaagcacgacctgtgcgcggctgcccaggagaacacccgggtgatagtggagatgatccatttcaaggacttgctgctgcacgaaccctacgtggacctcgtgaacttgctgctgacctgtggggaggaggtgaaggaggccatcacccacagcgtgcaggttcagtgtgagcagaactggggaagcctgtgctccatcttgagcttctgcacctcggccatccagaagcctcccacggcgccccccgagcgccagccccaggtggacagaaccaagctctccagggcccaccacggggaagcaggacatcacctcccagagcccagcagtagggagactggccgaggtgccaagggtgagcgaggtagcaagagccacccaaacgcccatgcccgaggcagagtcgggggccttggggctcagggaccttccggaagcagcgagtgggaagacgaacagtctgagtattctgatatccggaggtgaaatgaaaggcctggccacgaaatctttcctccacgccgtccattttcttatctatggacattccaaaacatttaccattagagaggggggatgtcacacgcaggattctgtggggactgtggacttcatcgaggtgtgtgttcgcggaacggacaggtgagatggagacccctggggccgtggggtctcaggggtgcctggtgaattctgcacttacacgtactcaagggagcgcgcccgcgttatcctcgtacctttgtcttctttccatctgtggagtcagtgggtgtcggccgctctgttgtgggggaggtgaaccagggaggggcagggcaaggcagggcccccagagctgggccacacagtgggtgctgggcctcgccccgaagcttctggtgcagcagcctctggtgctgtctccgcggaagtcagggcggctggattccaggacaggagtgaatgtaaaaataaatatcgcttagaatgcaggagaagggtggagaggaggcaggggccgagggggtgcttggtgccaaactgaaattcagtttcttgtgtggggccttgcggttcagagctcttggcgagggtggagggaggagtgtcatttctatgtgtaatttctgagccattgtactgtctgggctgggggggacactgtccaagggagtggcccctatgagtttatattttaaccactgcttcaaatctcgatttcactttttttatttatccagttatatctacatatctgtcatctaaataaatggctttcaaacaaagcaactgggtcattaaaaccagctcaaagggggtttaaaaaaaaaaaaccagcccatcctttgaggctgatttttcttttttttaagttctattttaaaagctatcaaacagcgacatagccatacatctgactgcctgacatggactcctgcccacttgggggaaaccttatacccagaggaaaatacacacctggggagtacatttgacaaatttcccttaggatttcgttatctcaccttgaccctcagccaagattggtaaagctgcgtcctggcgattccaggagacccagctggaaacctggcttctccatgtgaggggatgggaaaggaaagaagagaatgaagactacttagtaattcccatcaggaaatgctgaccttttacataaaatcaaggagactgctgaaaatctctaagggacaggattttccagatcctaattggaaatttagcaataaggagaggagtccaaggggacaaataaaggcagagagaagagacagaactaaaaatacgaggaaaggagagtgaggattttcattaaaagtctcagcagtgggtttcttgggttatttaaaacatcacctaaataggccttttcttcctaattggccatcaaattaaagcctatcctttctcaagcaggagctggtattgtagggagtggccgggtattctgggctgggctcttctggagtagggggtcagcaaacattgtctgcaaagggccagatactgaatccagtactttcagtttggcgagccgtgaggtctctgtcgaaactactcaactctgccgtcctagcacaaaagcagccatagacaacacacaaacgagagggcttggctcccttccaggaagatttatttaacaggctcccagctgaatttcactcacaggacacagtttactgatctctgttctagtgagtgggtcaaaaagcatatgcatccttatccgtcaactcatcagctcttcctcaaggcaacctgaggccagacaccaagaaaccaagcgtatctgctctaaaatgacttgttcctggggaatgccttcaaccaaaacacagctagtatttctatgccccaaatccaatcccagtctttcatgatccatgccggcggttgggtggggaggggaatcattggttgggggaagggaggaaaccccacctccagcccccgccaccgggctccctgggcacccagcaagatctggggctgcagagaacagaagagctggtgcacttaatccagctctgcccttggggggaggaggacctgtgtgtcaggctctgccatgggaacgagtgtaaaccgtggctgtctcctgcagtgagccaccgcggcaggcacgttgactgttttactgacatcactcaaaagctaaagcaataacattctcctgcgttgctgagtcagctgttcatttgtccgccagctcctggactggatgtgtgaaaggcatcacatttccattttcctccgtgtaaatgttttatgtgttcgcctactgatcccattcgttgcttctattgtaaatatttgtcatttgtatttattatctctgtgttttccccctaaggcataaaatggtttactgtgttcatttgaacccatttactgatctctgttgtatatttttcatgccactgctttgttttctcctcagaagtcgggtagatagcatttctatcccatccctcacgttattggaagcatgcaacagtatttattgctcagggtcttctgcttaaaactgaggaaggtccacattcctgcaagcattgattgagacatttgcacaatctaaaatgtaagcaaagtagtcattaaaaatacaccctctacttgggctttatactgcatacaaatttactcatgagccttcctttgaggaaggatgtggatctccaaataaagatttagtgtttattttgagctctgcatcttaacaagatgatctgaacacctctcctttgtatcaataaatagccctgttattctgaagtgagaggaccaagtatagtaaaatgctgacatctaaaactaaataaatagaaaacaccaggccagaactatagtcatactcacacaaagggagaaatttaaactcgaaccaagcaaaaggcttcacggaaatagcatggaaaaacaatgcttccagtggccacttcctaaggaggaacaaccccgtctgatctcagaattggcaccacgtgagcttgctaagtgataatatctgtttctactacggatttaggcaacaggacctgtacattgtcacattgcattatttttcttcaagcgttaataaaagttttaaataaatggcttccacttgagtagcg

SEQ ID NO: 430017 - DNA, 4206 bp, Homo sapiens
aggtcggcaactttgtccggcgctcccagcggcgctcggcttcctcctgtagtagttgagcgcaggccccgcctcccggccgtgttgtcaaaagggccggggtctcggattggtccagccgccgggacaacacctgctcgactccttcattcaagtgacaccagagcttccagggatatttgaggcaccatccctgccattgccgggcactcgcggcgctgctaacggcctggtcacatgctctccggagagctacgggagggcgctgggtaacctctatccgagccgcggccgcgaggaggagggaaaaggcgagcaaaaaggaagagtgggaggaggaggggaagcggcgaaggaggaagaggaggaggaggaagaggggagcacaaaggatccaggtctcccgacgggaggttaataccaagaaccatgtgtgccgagcggctgggccagttcatgaccctggctttggtgttggccacctttgacccggcgcgggggaccgacgccaccaacccacccgagggtccccaagacaggagctcccagcagaaaggccgcctgtccctgcagaatacagcggagatccagcactgtttggtcaacgctggcgatgtggggtgtggcgtgtttgaatgtttcgagaacaactcttgtgagattcggggcttacatgggatttgcatgacttttctgcacaacgctggaaaatttgatgcccagggcaagtcattcatcaaagacgccttgaaatgtaaggcccacgctctgcggcacaggttcggctgcataagccggaagtgcccggccatcagggaaatggtgtcccagttgcagcgggaatgctacctcaagcctctccagggcccaccacggggaagcaggacatcacctcccagagcccagcagtagggagactggccgaggtgccaagggtgagcgaggtagcaagagccacccaaacgcccatgcccgaggcagagtcgggggccttggggctcagggaccttccggaagcagcgagtgggaagacgaacagtctgagtattctgatatccggaggtgaaatgaaaggcctggccacgaaatctttcctccacgccgtccattttcttatctatggacattccaaaacatttaccattagagaggggggatgtcacacgcaggattctgtggggactgtggacttcatcgaggtgtgtgttcgcggaacggacaggtgagatggagacccctggggccgtggggtctcaggggtgcctggtgaattctgcacttacacgtactcaagggagcgcgcccgcgttatcctcgtacctttgtcttctttccatctgtggagtcagtgggtgtcggccgctctgttgtgggggaggtgaaccagggaggggcagggcaaggcagggcccccagagctgggccacacagtgggtgctgggcctcgccccgaagcttctggtgcagcagcctctggtgctgtctccgcggaagtcagggcggctggattccaggacaggagtgaatgtaaaaataaatatcgcttagaatgcaggagaagggtggagaggaggcaggggccgagggggtgcttggtgccaaactgaaattcagtttcttgtgtggggccttgcggttcagagctcttggcgagggtggagggaggagtgtcatttctatgtgtaatttctgagccattgtactgtctgggctgggggggacactgtccaagggagtggcccctatgagtttatattttaaccactgcttcaaatctcgatttcactttttttatttatccagttatatctacatatctgtcatctaaataaatggctttcaaacaaagcaactgggtcattaaaaccagctcaaagggggtttaaaaaaaaaaaaccagcccatcctttgaggctgatttttcttttttttaagttctattttaaaagctatcaaacagcgacatagccatacatctgactgcctgacatggactcctgcccacttgggggaaaccttatacccagaggaaaatacacacctggggagtacatttgacaaatttcccttaggatttcgttatctcaccttgaccctcagccaagattggtaaagctgcgtcctggcgattccaggagacccagctggaaacctggcttctccatgtgaggggatgggaaaggaaagaagagaatgaagactacttagtaattcccatcaggaaatgctgaccttttacataaaatcaaggagactgctgaaaatctctaagggacaggattttccagatcctaattggaaatttagcaataaggagaggagtccaaggggacaaataaaggcagagagaagagacagaactaaaaatacgaggaaaggagagtgaggattttcattaaaagtctcagcagtgggtttcttgggttatttaaaacatcacctaaataggccttttcttcctaattggccatcaaattaaagcctatcctttctcaagcaggagctggtattgtagggagtggccgggtattctgggctgggctcttctggagtagggggtcagcaaacattgtctgcaaagggccagatactgaatccagtactttcagtttggcgagccgtgaggtctctgtcgaaactactcaactctgccgtcctagcacaaaagcagccatagacaacacacaaacgagagggcttggctcccttccaggaagatttatttaacaggctcccagctgaatttcactcacaggacacagtttactgatctctgttctagtgagtgggtcaaaaagcatatgcatccttatccgtcaactcatcagctcttcctcaaggcaacctgaggccagacaccaagaaaccaagcgtatctgctctaaaatgacttgttcctggggaatgccttcaaccaaaacacagctagtatttctatgccccaaatccaatcccagtctttcatgatccatgccggcggttgggtggggaggggaatcattggttgggggaagggaggaaaccccacctccagcccccgccaccgggctccctgggcacccagcaagatctggggctgcagagaacagaagagctggtgcacttaatccagctctgcccttggggggaggaggacctgtgtgtcaggctctgccatgggaacgagtgtaaaccgtggctgtctcctgcagtgagccaccgcggcaggcacgttgactgttttactgacatcactcaaaagctaaagcaataacattctcctgcgttgctgagtcagctgttcatttgtccgccagctcctggactggatgtgtgaaaggcatcacatttccattttcctccgtgtaaatgttttatgtgttcgcctactgatcccattcgttgcttctattgtaaatatttgtcatttgtatttattatctctgtgttttccccctaaggcataaaatggtttactgtgttcatttgaacccatttactgatctctgttgtatatttttcatgccactgctttgttttctcctcagaagtcgggtagatagcatttctatcccatccctcacgttattggaagcatgcaacagtatttattgctcagggtcttctgcttaaaactgaggaaggtccacattcctgcaagcattgattgagacatttgcacaatctaaaatgtaagcaaagtagtcattaaaaatacaccctctacttgggctttatactgcatacaaatttactcatgagccttcctttgaggaaggatgtggatctccaaataaagatttagtgtttattttgagctctgcatcttaacaagatgatctgaacacctctcctttgtatcaataaatagccctgttattctgaagtgagaggaccaagtatagtaaaatgctgacatctaaaactaaataaatagaaaacaccaggccagaactatagtcatactcacacaaagggagaaatttaaactcgaaccaagcaaaaggcttcacggaaatagcatggaaaaacaatgcttccagtggccacttcctaaggaggaacaaccccgtctgatctcagaattggcaccacgtgagcttgctaagtgataatatctgtttctactacggatttaggcaacaggacctgtacattgtcacattgcattatttttcttcaagcgttaataaaagttttaaataaatggcttccacttgagtagcg

SEQ ID NO: 430018 - DNA, 2479 bp, Homo sapiens
  misc_feature (2122)..(2122): n is a, c, g, or t
  misc_feature (2269)..(2269): n is a, c, g, or t
aggtcggcaactttgtccggcgctcccagcggcgctcggcttcctcctgtagtagttgagcgcaggccccgcctcccggccgtgttgtcaaaagggccggggtctcggattggtccagccgccgggacaacacctgctcgactccttcattcaagtgacaccagagcttccagggatatttgaggcaccatccctgccattgccgggcactcgcggcgctgctaacggcctggtcacatgctctccggagagctacgggagggcgctgggtaacctctatccgagccgcggccgcgaggaggagggaaaaggcgagcaaaaaggaagagtgggaggaggaggggaagcggcgaaggaggaagaggaggaggaggaagaggggagcacaaaggatccaggtctcccgacgggaggttaataccaagaaccatgtgtgccgagcggctgggccagttcatgaccctggctttggtgttggccacctttgacccggcgcgggggaccgacgccaccaacccacccgagggtccccaagacaggagctcccagcagaaaggccgcctgtccctgcagaatacagcggagatccagcactgtttggtcaacgctggcgatgtggggtgtggcgtgtttgaatgtttcgagaacaactcttgtgagattcggggcttacatgggatttgcatgacttttctgcacaacgctggaaaatttgatgcccagggcaagtcattcatcaaagacgccttgaaatgtaaggcccacgctctgcggcacaggttcggctgcataagccggaagtgcccggccatcagggaaatggtgtcccagttgcagcgggaatgctacctcaagcacgacctgtgcgcggctgcccaggagaacacccgggtgatagtggagatgatccatttcaaggacttgctgctgcacgaaccctacgtggacctcgtgaacttgctgctgacctgtggggaggaggtgaaggaggccatcacccacagcgtgcaggttcagtgtgagcagaactggggaagcctgtgctccatcttgagcttctgcacctcggccatccagaagcctcccacggcgccccccgagcgccagccccaggtggacagaaccaagctctccagggcccaccacggggaagcaggacatcacctcccagagcccagcagtagggagactggccgaggtgccaagggtgagcgaggtagcaagagccacccaaacgcccatgcccgaggcagagtcgggggccttggggctcagggaccttccggaagcagcgagtgggaagacgaacagtctgagtattctgatatccggaggtgaaatgaaaggcctggccacgaaatctttcctccacgccgtccattttcttatctatggacattccaaaacatttaccattagagaggggggatgtcacacgcaggattctgtggggactgtggacttcatcgaggtgtgtgttcgcggaacggacaggtgagatggagacccctggggccgtggggtctcaggggtgcctggtgaattctgcacttacacgtactcaagggagcgcgcccgcgttatcctcgtacctttgtcttctttccatctgtggagtcagtgggtgtcggccgctctgttgtgggggaggtgaaccagggaggggcagggcaaggcagggcccccagagctgggccacacagtgggtgctgggcctcgccccgaagcttctggtgcagcagcctctggtgctgtctccgcggaagtcagggcggctggattccaggacaggagtgaatgtaaaaataaatatcgcttagaatgcaggagaagggtggagaggaggcaggggccgagggggtgcttggtgccaaactgaaattcagtttcttgtgtggggccttgcggttcagagctcttggcgagggtggagggaggagtgtcatttctatgtgtaatttctgagccattgtactgtctgggctgggggggacactgtccaagggagtggcccctatgagtttatattttaaccactgcttcaaatctcgatttcactttttttatttatccagttatatctacatatctgtcatctaaataaatggctttcaaacaaagnaaaaaaaaaaaaaaaaaaaaaaaaaaaaaagggggggggggcccatagaatagtaaaacacgcgggagcattcggcacccgtaaaaagttggggggaagccacacgagcattttctcgctggggagcccactatcttcgggaaaaanaaacgctaaccgctctggaatgattaaacctccgccaagaaagctctgccttgtgaagaaaataaccattagcaggggccggaggacagctcaattttcatgtctgttcggagaacgagattttccccacggggggttaccccccggggggaccgagacaggcgtggagggggaattcttcatatttacccaagtggggcccctccaaag

SEQ ID NO: 430019 - DNA, 1891 bp, Homo sapiens
gaagatgctagacaggctgtgttgaatcggacgagggtactaaaacgtcacctaaataggcccactgctgaggattttcattaaaagtctcagcagtgggtttcttgggttatttaaaacatcacctaaataggccttttcttcctaattggccatcaaattaaagcctatcctttctcaagcaggagctggtattgtagggagtggccgggtattctgggctgggctcttctggagtagggggtcagcaaacattgtctgcaaagggccagatactgaatccagtactttcagtttggcgagccgtgaggtctctgtcgaaactactcaactctgccgtcctagcacaaaagcagccatagacaacacacaaacgagagggcttggctcccttccaggaagatttatttaacaggctcccagctgaatttcactcacaggacacagtttactgatctctgttctagtgagtgggtcaaaaagcatatgcatccttatccgtcaactcatcagctcttcctcaaggcaacctgaggccagacaccaagaaaccaagcgtatctgctctaaaatgacttgttcctggggaatgccttcaaccaaaacacagctagtatttctatgccccaaatccaatcccagtctttcatgatccatgccggcggttgggtggggaggggaatcattggttgggggaagggaggaaaccccacctccagcccccgccaccgggctccctgggcacccagcaagatctggggctgcagagaacagaagagctggtgcacttaatccagctctgcccttggggggaggaggacctgtgtgtcaggctctgccatgggaacgagtgtaaaccgtggctgtctcctgcagtgagccaccgcggcaggcacgttgactgttttactgacatcactcaaaagctaaagcaataacattctcctgcgttgctgagtcagctgttcatttgtccgccagctcctggactggatgtgtgaaaggcatcacatttccattttcctccgtgtaaatgttttatgtgttcgcctactgatcccattcgttgcttctattgtaaatatttgtcatttgtatttattatctctgtgttttccccctaaggcataaaatggtttactgtgttcatttgaacccatttactgatctctgttgtatatttttcatgccactgctttgttttctcctcagaagtcgggtagatagcatttctatcccatccctcacgttattggaagcatgcaacagtatttattgctcagggtcttctgcttaaaactgaggaaggtccacattcctgcaagcattgattgagacatttgcacaatctaaaatgtaagcaaagtagtcattaaaaatacaccctctacttgggctttatactgcatacaaatttactcatgagccttcctttgaggaaggatgtggatctccaaataaagatttagtgtttattttgagctctgcatcttaacaagatgatctgaacacctctcctttgtatcaataaatagccctgttattctgaagtgagaggaccaagtatagtaaaatgctgacatctaaaactaaataaatagaaaacaccaggccagaactatagtcatactcacacaaagggagaaatttaaactcgaaccaagcaaaaggcttcacggaaatagcatggaaaaacaatgcttccagtggccacttcctaaggaggaacaaccccgtctgatctcagaattggcaccacgtgagcttgctaagtgataatatctgtttctactacggatttaggcaacaggacctgtacattgtcacattgcattatttttcttcaagcgttaataaaagttttaaataaatggcttccacttgagtagcg

SEQ ID NO: 430020 - DNA, 1410 bp, Homo sapiens
aggtcggcaactttgtccggcgctcccagcggcgctcggcttcctcctgtagtagttgagcgcaggccccgcctcccggccgtgttgtcaaaagggccggggtctcggattggtccagccgccgggacaacacctgctcgactccttcattcaagtgacaccagagcttccagggatatttgaggcaccatccctgccattgccgggcactcgcggcgctgctaacggcctggtcacatgctctccggagagctacgggagggcgctgggtaacctctatccgagccgcggccgcgaggaggagggaaaaggcgagcaaaaaggaagagtgggaggaggaggggaagcggcgaaggaggaagaggaggaggaggaagaggggagcacaaaggatccaggtctcccgacgggaggttaataccaagaaccatgtgtgccgagcggctgggccagttcatgaccctggctttggtgttggccacctttgacccggcgcgggggaccgacgccaccaacccacccgagggtccccaagacaggagctcccagcagaaaggccgcctgtccctgcagaatacagcggagatccagcactgtttggtcaacgctggcgatgtggggtgtggcgtgtttgaatgtttcgagaacaactcttgtgagattcggggcttacatgggatttgcatgacttttctgcacaacgctggaaaatttgatgcccagggcaagtcattcatcaaagacgccttgaaatgtaaggcccacgctctgcggcacaggttcggctgcataagccggaagtgcccggccatcagggaaatggtgtcccagttgcagcgggaatgctacctcaagcacgacctgtgcgcggctgcccaggagaacacccgggtgatagtggagatgatccatttcaaggacttgctgctgcacgaaccctacgtggacctcgtgaacttgctgctgacctgtggggaggaggtgaaggaggccatcacccacagcgtgcaggttcagtgtgagcagaactggggaagcctgtgctccatcttgagcttctgcacctcggccatccagaagcctcccacggcgccccccgagcgccagccccaggtggacagaaccaagctctccagggcccaccacggggtgcttggtgccaaactgaaattcagtttcttgtgtggggccttgcggttcagagctcttggcgagggtggagggaggagtgtcatttctatgtgtaatttctgagccattgtactgtctgggctgggggggacactgtccaagggagtggcccctatgagtttatattttaaccactgcttcaaatctcgatttcactttttttatttatccagttatatctacatatctgtcatctaaataaatggctttcaaacaaag

SEQ ID NO: 430021 - DNA, 856 bp, Homo sapiens
  misc_feature (824)..(824): n is a, c, g, or t
  misc_feature (841)..(841): n is a, c, g, or t
  misc_feature (850)..(850): n is a, c, g, or t
aaaaggctgtatatatctgctttgcctgtccaaggaactaagtctccagtgctgtcatagagatcaggatcaaatattaagtttacactgaaggatatagatgtcatattatatggcgtgttttacaatcagctctcacttctcaccatggggtaatgtgtacaaagggtgccgtttcttacaattttagtgtcattagtgttggatttttagaggttagatgtgacatattgttgtctccccccacccatcccgagttggtgcttctgctttcatgtgacagtaataattctgtactttaaaacctctgatttaaaatacaaagtcttgctttaaaaacttttgattctaaaggtattattgtgaaatggttctcattatagtgctataggattttcagtaaataaaatttaagaatagctgggtgtggtggcatcagcttgaggcaagaggatcccttaagccagggagattgaggccagcctgggcaactagtgagaccttgtctcttaaaaaaaaaaaaagactagttcctttttgtcttcagtactttccaagtgacctgttttttaccttcttctttctgatagattaacttaagtttatgggctgtgcacccccatccccattaaaggctaatattcctttttcagggtatgttagagcccaccaaggaaccactgaaaccactttctgctgcagaaaaaatagcttccatcggtcagacagccaccatgtcaccagatatgaacacatgtacatctgatcagttccagagtctctaccacccgtccagtttgactggagtaaggccaagttggggnccccccttttttaaaanccccttttnaaaaaa

SEQ ID NO: 430022 - DNA, 4061 bp, Homo sapiens
ccgctgcatgatgggagagtgtgtggagtgggcggggggtctccgcggaggaggtggaggaggcggcggcggcggcggaagagggcggagggtagtgggatgggggtcccgcggcagcggtgaaactccgggtgggcgtccatggtgctgctgcgctgacagggctgtgagcagccggccttccgctctcaccagttccgcgtcggaatagacggtccttccccggggagtcagttcctccccgggcccctgagccatgcccatcgcagccgccccgaaggagccaggtgtaaattaattatttgaaagcaactgaacaatggagccagacatcattcgaatgtactcttcatccccaccaccattagacaatggagcagaggatgatgatgatgatgaatttggggaatttggtgggttttcagaagttagcccttctggtgtagggtttgttgatttcgatacaccagattatactcgtcccaaggaagagtttgtaccttcaaaccattttatgccaattcatgaattctcagaaaatgtagatagccttacaagctttaagtccattaaaaatggtaatgataaggacatcactgctgaactttctgctcctgtgaaaggacagtctgatgttttactttctaccaccagcaaagaaataatttcatctgaaatgttagctacttccattgatggcatggaaagaccaggaaatttaaataaagtagtggagcagagacagaatgttggaacacttgaaagtttctctccaggagattttagaactaatatgaatgtcgttcatcaaaacaagcagttagagagctgcaatggtgaaaagcctccttgtctggagattctaacaaatgggtttgcagtgttggaaactgtaaatcctcagggaacagatgatctggacaatgtagctgattcaaagggacggaagcctcttagcactcatagcactgagtataatttagactctgtacctagtcctgctgaggaatttgcagattttgccacattttccaaaaaggaaaggatacaattagaagaaatagaatgtgcagttttaaatgatagagaagcactaaccattcgggaaaacaataaaattaatagagtcaatgaactgaattctgtaaaagaagtggctttgggtagaagcttggataacaaaggagacactgatggagaggatcaggtttgtgtttcagaaataagcatagtgactaacagaggtttcagtgttgaaaaacaaggccttccaacactgcaacaggatgaatttttacagtcaggtgttcagtcaaaggcttggagtttggtagactcagctgataattcagaagccattaggagagaacaatgtaaaactgaagaaaaacttgacttacttacttctaaatgtgctcacctatgcatggattctgttaaaacttctgatgatgaagttggttctcccaaagaagaaagtagaaagtttactaatttccaaagcccaaacattgaccccacagaagaaaatgatttggatgattctttaagtgtaaaaaatggtgatagtagtaatgactttgtgacttgcaatgatatcaatgaagatgattttggtgattttggtgactttggctctgccagtggctcaactccaccttttgttactggtactcaagattcaatgagtgatgccacttttgaagagtcttcagagcactttccacattttagtgaaccaggtgatgactttggagaatttggggatataaatgctgtttcttgccaagaggagacaatattaacaaagtcagacctaaaacagacttctgataatttatcagaagaatgtcaattggcaagaaaatctagtggaacaggcactgaacctgttgcaaaacttaaaaatgggcaagaaggtgagattggacattttgattctgtgccaaatattcaggatgactgcaatggttttcaagactctgatgattttgcagacttcagttcagctggtcctagccaagttgtagattggaatgcttttgaggatgaacaaaaagatagttgttcttgggctgcttttggagaccagcaggctactgaatctcatcatcgaaaggaagcctggcagtcacataggacagatgaaaatattgatactccaggaacccccaaaacgcacagtgtaccttcagcaacttccaaaggagcagttgctagtggccatttacaggaatcagccacttcagttcagacagctttattaaaccgcctggagcgaattttcgaagcatgttttccttccatacttgtccctgatgctgaagaggaagttacttccctgaagcacttgctggaaacaagcactttgccaataaaaacgagagaggccttacctgaaagtggggaattgctagatgtgtggactgagctacaggatatccatgatgcacatggcttgagataccagtggggcggctcccatagcaacaagaagcttttgtcctccttgggaatagacacccgaaacattctcttcacgggcaataagaagcagcctgttatagtgcccatgtatgcagcaggattgggtatgttagagcccaccaaggaaccactgaaaccactttctgctgcagaaaaaatagcttccatcggtcagacagccaccatgtcaccagatatgaacacatgtacatctgatcagttccaggagtctctaccacccgtccagtttgactggagtagcagtggccttactaaccctttagatggtgtggatccggagttgtatgagttaacaacttctaagctggaaatctccacctcaagcctcaaagtgactgatgcatttgcaagactcatgtctacagtagagaagacaagcacatctaccagtaggaaaccgaaaagagaagagcacctaagtgaagaagctatcaaggtgatcgctggccttcctgacttaacattcatgcatgccaaggtgttgatgttcccagccacgttaacaccttccacaagctctcaagaaaaagcagacggataactgatgtgaattggacagtttctattgcttttccttttttccatcccttccctaccatcaaaagcatacctgctctaattaaaaaaaaaaaaaaaaaaaaattcaagttcagctgatttgttggtaagccgcactagaaaggtatacatagtaatgtatatttatttacatactgaagtcctaaatttatattagaaaaatgtaaataatcgggggtaaacatttttgaagatttattctttttgtgttgctggggtgtatacatttatgtctttgtgaaatacactggtggtgtccttcttacaaaacttttgaaataaaaaaaaaactcaaatcttcactgtctgtgaaatccccttcagtcttttcagattgcattgactgtcctcttgatttttcatattacatgtcaaattacttttgctatcataaataagctccaaagtcccccatttaatttttttttaattttgtgtatgatgggtttcagatctggcttttgttaacattttggggcttttttaatcttttcaatctggcgtattgctgtttgaccttttgcaaggtacttaattgctcttttgttatagggtatggatcattgtcagaacttgattggaggggtttaaagagattgtgtctgtttaaaatcagtatgattcagagaaggaccaaattatatgaatgtcttacaatggaatttacttgttactgatttttttgttctattgtaccactattttttgaggattttgcacagtgtaaaatgacataatcatagattgctatggtttaggctgtatatacagtgaaaactatgggttttaaatgtttggggaaattcctatggaaaaaagagagacatgtagaagaacctctaacaaggttaatgtgcatgcccaaggtcttttgaaatttcagtgtgtaaatttccttttagcttatacaaaaataaaataatttaaaagcatacctgctctaattcacaaagacaaacaaagaaaatccaggt

SEQ ID NO: 430023 - DNA, 4313 bp, Homo sapiens
ccgctgcatgatgggagagtgtgtggagtgggcggggggtctccgcggaggaggtggaggaggcggcggcggcggcggaagagggcggagggtagtgggatgggggtcccgcggcagcggtgaaactccgggtgggcgtccatggtgctgctgcgctgacagggctgtgagcagccggccttccgctctcaccagttccgcgtcggaatagacggtccttccccggggagtcagttcctccccgggcccctgagccatgcccatcgcagccgccccgaaggagccaggtaagcgccgccgctccgctcccctagctgcgccggggaaagagggtgcggggaccaggcccggcccagcagccagaccctcacccgggccgggagcatctgcccgccgcggagccgggagctgtgaggacggagctggctctgcgggcctgcgggctcccggctctgctctcttctgcggcgagtgcgggaacgccgctggtggcgcccgaagcgcacggccccctcctcgccatcccgggcaccggccgggtgtaaattaattatttgaaagcaactgaacaatggagccagacatcattcgaatgtactcttcatccccaccaccattagacaatggagcagaggatgatgatgatgatgaatttggggaatttggtgggttttcagaagttagcccttctggtgtagggtttgttgatttcgatacaccagattatactcgtcccaaggaagagtttgtaccttcaaaccattttatgccaattcatgaattctcagaaaatgtagatagccttacaagctttaagtccattaaaaatggtaatgataaggacatcactgctgaactttctgctcctgtgaaaggacagtctgatgttttactttctaccaccagcaaagaaataatttcatctgaaatgttagctacttccattgatggcatggaaagaccaggaaatttaaataaagtagtggagcagagacagaatgttggaacacttgaaagtttctctccaggagattttagaactaatatgaatgtcgttcatcaaaacaagcagttagagagctgcaatggtgaaaagcctccttgtctggagattctaacaaatgggtttgcagtgttggaaactgtaaatcctcagggaacagatgatctggacaatgtagctgattcaaagggacggaagcctcttagcactcatagcactgagtataatttagactctgtacctagtcctgctgaggaatttgcagattttgccacattttccaaaaaggaaaggatacaattagaagaaatagaatgtgcagttttaaatgatagagaagcactaaccattcgggaaaacaataaaattaatagagtcaatgaactgaattctgtaaaagaagtggctttgggtagaagcttggataacaaaggagacactgatggagaggatcaggtttgtgtttcagaaataagcatagtgactaacagaggtttcagtgttgaaaaacaaggccttccaacactgcaacaggatgaatttttacagtcaggtgttcagtcaaaggcttggagtttggtagactcagctgataattcagaagccattaggagagaacaatgtaaaactgaagaaaaacttgacttacttacttctaaatgtgctcacctatgcatggattctgttaaaacttctgatgatgaagttggttctcccaaagaagaaagtagaaagtttactaatttccaaagcccaaacattgaccccacagaagaaaatgatttggatgattctttaagtgtaaaaaatggtgatagtagtaatgactttgtgacttgcaatgatatcaatgaagatgattttggtgattttggtgactttggctctgccagtggctcaactccaccttttgttactggtactcaagattcaatgagtgatgccacttttgaagagtcttcagagcactttccacattttagtgaaccaggtgatgactttggagaatttggggatataaatgctgtttcttgccaagaggagacaatattaacaaagtcagacctaaaacagacttctgataatttatcagaagaatgtcaattggcaagaaaatctagtggaacaggcactgaacctgttgcaaaacttaaaaatgggcaagaaggtgagattggacattttgattctgtgccaaatattcaggatgactgcaatggttttcaagactctgatgattttgcagacttcagttcagctggtcctagccaagttgtagattggaatgcttttgaggatgaacaaaaagatagttgttcttgggctgcttttggagaccagcaggctactgaatctcatcatcgaaaggaagcctggcagtcacataggacagatgaaaatattgatactccaggaacccccaaaacgcacagtgtaccttcagcaacttccaaaggagcagttgctagtggccatttacaggaatcagccacttcagttcagacagctttattaaaccgcctggagcgaattttcgaagcatgttttccttccatacttgtccctgatgctgaagaggaagttacttccctgaagcacttgctggaaacaagcactttgccaataaaaacgagagaggccttacctgaaagtggggaattgctagatgtgtggactgagctacaggatatccatgatgcacatggcttgagataccagtggggcggctcccatagcaacaagaagcttttgtcctccttgggaatagacacccgaaacattctcttcacgggcaataagaagcagcctgttatagtgcccatgtatgcagcaggattgggtatgttagagcccaccaaggaaccactgaaaccactttctgctgcagaaaaaatagcttccatcggtcagacagccaccatgtcaccagatatgaacacatgtacatctgatcagttccaggagtctctaccacccgtccagtttgactggagtagcagtggccttactaaccctttagatggtgtggatccggagttgtatgagttaacaacttctaagctggaaatctccacctcaagcctcaaagtgactgatgcatttgcaagactcatgtctacagtagagaagacaagcacatctaccagtaggaaaccgaaaagagaagagcacctaagtgaagaagctatcaaggtgatcgctggccttcctgacttaacattcatgcatgccaaggtgttgatgttcccagccacgttaacaccttccacaagctctcaagaaaaagcagacggataactgatgtgaattggacagtttctattgcttttccttttttccatcccttccctaccatcaaaagcatacctgctctaattaaaaaaaaaaaaaaaaaaaaattcaagttcagctgatttgttggtaagccgcactagaaaggtatacatagtaatgtatatttatttacatactgaagtcctaaatttatattagaaaaatgtaaataatcgggggtaaacatttttgaagatttattctttttgtgttgctggggtgtatacatttatgtctttgtgaaatacactggtggtgtccttcttacaaaacttttgaaataaaaaaaaaactcaaatcttcactgtctgtgaaatccccttcagtcttttcagattgcattgactgtcctcttgatttttcatattacatgtcaaattacttttgctatcataaataagctccaaagtcccccatttaatttttttttaattttgtgtatgatgggtttcagatctggcttttgttaacattttggggcttttttaatcttttcaatctggcgtattgctgtttgaccttttgcaaggtacttaattgctcttttgttatagggtatggatcattgtcagaacttgattggaggggtttaaagagattgtgtctgtttaaaatcagtatgattcagagaaggaccaaattatatgaatgtcttacaatggaatttacttgttactgatttttttgttctattgtaccactattttttgaggattttgcacagtgtaaaatgacataatcatagattgctatggtttaggctgtatatacagtgaaaactatgggttttaaatgtttggggaaattcctatggaaaaaagagagacatgtagaagaacctctaacaaggttaatgtgcatgcccaaggtcttttgaaatttcagtgtgtaaatttccttttagcttatacaaaaataaaataatttaaaagcatacctgctctaattcacaaagacaaacaaagaaaatccaggt

SEQ ID NO: 430024 - DNA, 4145 bp, Homo sapiens
ccgctgcatgatgggagagtgtgtggagtgggcggggggtctccgcggaggaggtggaggaggcggcggcggcggcggaagagggcggagggtagtgggatgggggtcccgcggcagcggtgaaactccgggtgggcgtccatggtgctgctgcgctgacagggctgtgagcagccggccttccgctctcaccagttccgcgtcggaatagacggtccttccccggggagtcagttcctccccgggcccctgagccatgcccatcgcagccgccccgaaggagccaggtgtaaattaattatttgaaagcaactgaacaatggagccagacatcattcgaatgtactcttcatccccaccaccattagacaatggagcagaggatgatgatgatgatgaatttggggaatttggtgggttttcagaagttagcccttctggtgtagggtttgttgatttcgatacaccagattatactcgtcccaaggaagagtttgtaccttcaaaccattttatgccaattcatgaattctcagaaaatgtagatagccttacaagctttaagtccattaaaaatggtaatgataaggacatcactgctgaactttctgctcctgtgaaaggacagtctgatgttttactttctaccaccagcaaagaaataatttcatctgaaatgttagctacttccattgatggcatggaaagaccaggaaatttaaataaagtagtggagcagagacagaatgttggaacacttgaaagtttctctccaggagattttagaactaatatgaatgtcgttcatcaaaacaagcagttagagagctgcaatggtgaaaagcctccttgtctggagattctaacaaatgggtttgcagtgttggaaactgtaaatcctcagggaacagatgatctggacaatgtagctgattcaaagggacggaagcctcttagcactcatagcactgagtataatttagactctgtacctagtcctgctgaggaatttgcagattttgccacattttccaaaaaggaaaggatacaattagaagaaatagaatgtgcagttttaaatgatagagaagcactaaccattcgggaaaacaataaaattaatagagtcaatgaactgaattctgtaaaagaagtggctttgggtagaagcttggataacaaaggagacactgatggagaggatcaggtttgtgtttcagaaataagcatagtgactaacagaggtttcagtgttgaaaaacaaggccttccaacactgcaacaggatgaatttttacagtcaggtgttcagtcaaaggcttggagtttggtagactcagctgataattcagaagccattaggagagaacaatgtaaaactgaagaaaaacttgacttacttacttctaaatgtgctcacctatgcatggattctgttaaaacttctgatgatgaagttggttctcccaaagaagaaagtagaaagtttactaatttccaaagcccaaacattgaccccacagaagaaaatgatttggatgattctttaagtgtaaaaaatggtgatagtagtaatgactttgtgacttgcaatgatatcaatgaagatgattttggtgattttggtgactttggctctgccagtggctcaactccaccttttgttactggtactcaagattcaatgagtgatgccacttttgaagagtcttcagagcactttccacattttagtgaaccaggtgatgactttggagaatttggggatataaatgctgtttcttgccaagaggagacaatattaacaaagtcagacctaaaacagacttctgataatttatcagaagaatgtcaattggcaagaaaatctagtggaacaggcactgaacctgttgcaaaacttaaaaatgggcaagaaggtgagattggacattttgattctgtgccaaatattcaggatgactgcaatggttttcaagactctgatgattttgcagacttcagttcagctggtcctagccaagttgtagattggaatgcttttgaggatgaacaaaaagatagttgttcttgggctgcttttggagaccagcaggctactgaatctcatcatcgaaaggaagcctggcagtcacataggacagatgaaaatattgatactccaggaacccccaaaacgcacagtgtaccttcagcaacttccaaaggagcagttgctagtggccatttacaggaatcagccacttcagttcagacagctttattaaaccgcctggagcgaattttcgaagcatgttttccttccatacttgtccctgatgctgaagaggaagttacttccctgaagcacttgctggaaacaagcactttgccaataaaaacgagagaggccttacctgaaagtggggaattgctagatgtgtggactgagctacaggatatccatgatgcacatggcttgagataccagtggggcggctcccatagcaacaagaagcttttgtcctccttgggaatagacacccgaaacattctcttcacgggcaataagaagcagcctgttatagtgcccatgtatgcagcaggattgggtatgttagagcccaccaaggaaccactgaaaccactttctgctgcagaaaaaatagcttccatcggtcagacagccaccatgtcaccagatatgaacacatgtacatctgatcagttccaggagtctctaccacccgtccagtttgactggagtagcagtggccttactaaccctttagatgctagtggaggttccactcttctgaaccttgatttctttgggcccgtggatgacagtagctctagcagcagcaccacaatcccaggtgtggatccggagttgtatgagttaacaacttctaagctggaaatctccacctcaagcctcaaagtgactgatgcatttgcaagactcatgtctacagtagagaagacaagcacatctaccagtaggaaaccgaaaagagaagagcacctaagtgaagaagctatcaaggtgatcgctggccttcctgacttaacattcatgcatgccaaggtgttgatgttcccagccacgttaacaccttccacaagctctcaagaaaaagcagacggataactgatgtgaattggacagtttctattgcttttccttttttccatcccttccctaccatcaaaagcatacctgctctaattaaaaaaaaaaaaaaaaaaaaattcaagttcagctgatttgttggtaagccgcactagaaaggtatacatagtaatgtatatttatttacatactgaagtcctaaatttatattagaaaaatgtaaataatcgggggtaaacatttttgaagatttattctttttgtgttgctggggtgtatacatttatgtctttgtgaaatacactggtggtgtccttcttacaaaacttttgaaataaaaaaaaaactcaaatcttcactgtctgtgaaatccccttcagtcttttcagattgcattgactgtcctcttgatttttcatattacatgtcaaattacttttgctatcataaataagctccaaagtcccccatttaatttttttttaattttgtgtatgatgggtttcagatctggcttttgttaacattttggggcttttttaatcttttcaatctggcgtattgctgtttgaccttttgcaaggtacttaattgctcttttgttatagggtatggatcattgtcagaacttgattggaggggtttaaagagattgtgtctgtttaaaatcagtatgattcagagaaggaccaaattatatgaatgtcttacaatggaatttacttgttactgatttttttgttctattgtaccactattttttgaggattttgcacagtgtaaaatgacataatcatagattgctatggtttaggctgtatatacagtgaaaactatgggttttaaatgtttggggaaattcctatggaaaaaagagagacatgtagaagaacctctaacaaggttaatgtgcatgcccaaggtcttttgaaatttcagtgtgtaaatttccttttagcttatacaaaaataaaataatttaaaagcatacctgctctaattcacaaagacaaacaaagaaaatccaggt

SEQ ID NO: 430025 - DNA, 4007 bp, Homo sapiens
ccgctgcatgatgggagagtgtgtggagtgggcggggggtctccgcggaggaggtggaggaggcggcggcggcggcggaagagggcggagggtagtgggatgggggtcccgcggcagcggtgaaactccgggtgggcgtccatggtgctgctgcgctgacagggctgtgagcagccggccttccgctctcaccagttccgcgtcggaatagacggtccttccccggggagtcagttcctccccgggcccctgagccatgcccatcgcagccgccccgaaggagccaggtgtaaattaattatttgaaagcaactgaacaatggagccagacatcattcgaatgtactcttcatccccaccaccattagacaatggagcagaggatgatgatgatgatgaatttggggaatttggtgggttttcagaagttagcccttctggtgtagggtttgttgatttcgatacaccagattatactcgtcccaaggaagagtttgtaccttcaaaccattttatgccaattcatgaattctcagaaaatgtagatagccttacaagctttaagtccattaaaaatggtaatgataaggacatcactgctgaactttctgctcctgtgaaaggacagtctgatgttttactttctaccaccagcaaagaaataatttcatctgaaatgttagctacttccattgatggcatggaaagaccaggaaatttaaataaagtagtggagcagagacagaatgttggaacacttgaaagtttctctccaggagattttagaactaatatgaatgtcgttcatcaaaacaagcagttagagagctgcaatggtgaaaagcctccttgtctggagattctaacaaatgggtttgcagtgttggaaactgtaaatcctcagggaacagatgatctggacaatgtagctgattcaaagggacggaagcctcttagcactcatagcactgagtataatttagactctgtacctagtcctgctgaggaatttgcagattttgccacattttccaaaaaggaaaggatacaattagaagaaatagaatgtgcagttttaaatgatagagaagcactaaccattcgggaaaacaataaaattaatagagtcaatgaactgaattctgtaaaagaagtggctttgggtagaagcttggataacaaaggagacactgatggagaggatcaggtttgtgtttcagaaataagcatagtgactaacagaggtttcagtgttgaaaaacaaggccttccaacactgcaacaggatgaatttttacagtcaggtgttcagtcaaaggcttggagtttggtagactcagctgataattcagaagccattaggagagaacaatgtaaaactgaagaaaaacttgacttacttacttctaaatgtgctcacctatgcatggattctgttaaaacttctgatgatgaagttggttctcccaaagaagaaagtagaaagtttactaatttccaaagcccaaacattgaccccacagaagaaaatgatttggatgattctttaagtgtaaattttggtgattttggtgactttggctctgccagtggctcaactccaccttttgttactggtactcaagattcaatgagtgatgccacttttgaagagtcttcagagcactttccacattttagtgaaccaggtgatgactttggagaatttggggatataaatgctgtttcttgccaagaggagacaatattaacaaagtcagacctaaaacagacttctgataatttatcagaagaatgtcaattggcaagaaaatctagtggaacaggcactgaacctgttgcaaaacttaaaaatgggcaagaaggtgagattggacattttgattctgtgccaaatattcaggatgactgcaatggttttcaagactctgatgattttgcagacttcagttcagctggtcctagccaagttgtagattggaatgcttttgaggatgaacaaaaagatagttgttcttgggctgcttttggagaccagcaggctactgaatctcatcatcgaaaggaagcctggcagtcacataggacagatgaaaatattgatactccaggaacccccaaaacgcacagtgtaccttcagcaacttccaaaggagcagttgctagtggccatttacaggaatcagccacttcagttcagacagctttattaaaccgcctggagcgaattttcgaagcatgttttccttccatacttgtccctgatgctgaagaggaagttacttccctgaagcacttgctggaaacaagcactttgccaataaaaacgagagaggccttacctgaaagtggggaattgctagatgtgtggactgagctacaggatatccatgatgcacatggcttgagataccagtggggcggctcccatagcaacaagaagcttttgtcctccttgggaatagacacccgaaacattctcttcacgggcaataagaagcagcctgttatagtgcccatgtatgcagcaggattgggtatgttagagcccaccaaggaaccactgaaaccactttctgctgcagaaaaaatagcttccatcggtcagacagccaccatgtcaccagatatgaacacatgtacatctgatcagttccaggagtctctaccacccgtccagtttgactggagtagcagtggccttactaaccctttagatggtgtggatccggagttgtatgagttaacaacttctaagctggaaatctccacctcaagcctcaaagtgactgatgcatttgcaagactcatgtctacagtagagaagacaagcacatctaccagtaggaaaccgaaaagagaagagcacctaagtgaagaagctatcaaggtgatcgctggccttcctgacttaacattcatgcatgccaaggtgttgatgttcccagccacgttaacaccttccacaagctctcaagaaaaagcagacggataactgatgtgaattggacagtttctattgcttttccttttttccatcccttccctaccatcaaaagcatacctgctctaattaaaaaaaaaaaaaaaaaaaaattcaagttcagctgatttgttggtaagccgcactagaaaggtatacatagtaatgtatatttatttacatactgaagtcctaaatttatattagaaaaatgtaaataatcgggggtaaacatttttgaagatttattctttttgtgttgctggggtgtatacatttatgtctttgtgaaatacactggtggtgtccttcttacaaaacttttgaaataaaaaaaaaactcaaatcttcactgtctgtgaaatccccttcagtcttttcagattgcattgactgtcctcttgatttttcatattacatgtcaaattacttttgctatcataaataagctccaaagtcccccatttaatttttttttaattttgtgtatgatgggtttcagatctggcttttgttaacattttggggcttttttaatcttttcaatctggcgtattgctgtttgaccttttgcaaggtacttaattgctcttttgttatagggtatggatcattgtcagaacttgattggaggggtttaaagagattgtgtctgtttaaaatcagtatgattcagagaaggaccaaattatatgaatgtcttacaatggaatttacttgttactgatttttttgttctattgtaccactattttttgaggattttgcacagtgtaaaatgacataatcatagattgctatggtttaggctgtatatacagtgaaaactatgggttttaaatgtttggggaaattcctatggaaaaaagagagacatgtagaagaacctctaacaaggttaatgtgcatgcccaaggtcttttgaaatttcagtgtgtaaatttccttttagcttatacaaaaataaaataatttaaaagcatacctgctctaattcacaaagacaaacaaagaaaatccaggt

SEQ ID NO: 430026 - DNA, 2094 bp, Homo sapiens
ccgctgcatgatgggagagtgtgtggagtgggcggggggtctccgcggaggaggtggaggaggcggcggcggcggcggaagagggcggagggtagtgggatgggggtcccgcggcagcggtgaaactccgggtgggcgtccatggtgctgctgcgctgacagggctgtgagcagccggccttccgctctcaccagttccgcgtcggaatagacggtccttccccggggagtcagttcctccccgggcccctgagccatgcccatcgcagccgccccgaaggagccagacagctttattaaaccgcctggagcgaattttcgaagcatgttttccttccatacttgtccctgatgctgaagaggaagttacttccctgaagcacttgctggaaacaagcactttgccaataaaaacgagagaggccttacctgaaagtggggaattgctagatgtgtggactgagctacaggatatccatgatgcacatggcttgagataccagtggggcggctcccatagcaacaagaagcttttgtcctccttgggaatagacacccgaaacattctcttcacgggcaataagaagcagcctgttatagtgcccatgtatgcagcaggattgggtatgttagagcccaccaaggaaccactgaaaccactttctgctgcagaaaaaatagcttccatcggtcagacagccaccatgtcaccagatatgaacacatgtacatctgatcagttccaggagtctctaccacccgtccagtttgactggagtagcagtggccttactaaccctttagatggtgtggatccggagttgtatgagttaacaacttctaagctggaaatctccacctcaagcctcaaagtgactgatgcatttgcaagactcatgtctacagtagagaagacaagcacatctaccagtaggaaaccgaaaagagaagagcacctaagtgaagaagctatcaaggtgatcgctggccttcctgacttaacattcatgcatgccaaggtgttgatgttcccagccacgttaacaccttccacaagctctcaagaaaaagcagacggataactgatgtgaattggacagtttctattgcttttccttttttccatcccttccctaccatcaaaagcatacctgctctaattaaaaaaaaaaaaaaaaaaaaattcaagttcagctgatttgttggtaagccgcactagaaaggtatacatagtaatgtatatttatttacatactgaagtcctaaatttatattagaaaaatgtaaataatcgggggtaaacatttttgaagatttattctttttgtgttgctggggtgtatacatttatgtctttgtgaaatacactggtggtgtccttcttacaaaacttttgaaataaaaaaaaaactcaaatcttcactgtctgtgaaatccccttcagtcttttcagattgcattgactgtcctcttgatttttcatattacatgtcaaattacttttgctatcataaataagctccaaagtcccccatttaatttttttttaattttgtgtatgatgggtttcagatctggcttttgttaacattttggggcttttttaatcttttcaatctggcgtattgctgtttgaccttttgcaaggtacttaattgctcttttgttatagggtatggatcattgtcagaacttgattggaggggtttaaagagattgtgtctgtttaaaatcagtatgattcagagaaggaccaaattatatgaatgtcttacaatggaatttacttgttactgatttttttgttctattgtaccactattttttgaggattttgcacagtgtaaaatgacataatcatagattgctatggtttaggctgtatatacagtgaaaactatgggttttaaatgtttggggaaattcctatggaaaaaagagagacatgtagaagaacctctaacaaggttaatgtgcatgcccaaggtcttttgaaatttcagtgtgtaaatttccttttagcttatacaaaaataaaataatttaaaagcatacctgctctaattcacaaagacaaacaaagaaaatccaggt

SEQ ID NO: 430027 - DNA, 4000 bp, Homo sapiens
ccgctgcatgatgggagagtgtgtggagtgggcggggggtctccgcggaggaggtggaggaggcggcggcggcggcggaagagggcggagggtagtgggatgggggtcccgcggcagcggtgaaactccgggtgggcgtccatggtgctgctgcgctgacagggctgtgagcagccggccttccgctctcaccagttccgcgtcggaatagacggtccttccccggggagtcagttcctccccgggcccctgagccatgcccatcgcagccgccccgaaggagccaggtgtaaattaattatttgaaagcaactgaacaatggagccagacatcattcgaatgtactcttcatccccaccaccattagacaatggagcagaggatgatgatgatgatgaatttggggaatttggtgggttttcagaagttagcccttctggtgtagggtttgttgatttcgatacaccagattatactcgtcccaaggaagagtttgtaccttcaaaccattttatgccaattcatgaattctcagaaaatgtagatagccttacaagctttaagtccattaaaaatggtaatgataaggacatcactgctgaactttctgctcctgtgaaaggacagtctgatgttttactttctaccaccagcaaagaaataatttcatctgaaatgttagctacttccattgatggcatggaaagaccaggaaatttaaataaagtagtggagcagagacagaatgttggaacacttgaaagtttctctccaggagattttagaactaatatgaatgtcgttcatcaaaacaagcagttagagagctgcaatggtgaaaagcctccttgtctggagattctaacaaatgggtttgcagtgttggaaactgtaaatcctcagggaacagatgatctggacaatgtagctgattcaaagggacggaagcctcttagcactcatagcactgagtataatttagactctgtacctagtcctgctgaggaatttgcagattttgccacattttccaaaaaggaaaggatacaattagaagaaatagaatgtgcagttttaaatgatagagaagcactaaccattcgggaaaacaataaaattaatagagtcaatgaactgaattctgtaaaagaagtggctttgggtagaagcttggataacaaaggagacactgatggagaggatcaggtttgtgtttcagaaataagcatagtgactaacagaggtttcagtgttgaaaaacaaggccttccaacactgcaacaggatgaatttttacagtcaggtgttcagtcaaaggcttggagtttggtagactcagctgataattcagaagccattaggagagaacaatgtaaaactgaagaaaaacttgacttacttacttctaaatgtgctcacctatgcatggattctgttaaaacttctgatgatgaagttggttctcccaaagaagaaagtagaaagtttactaatttccaaagcccaaacattgaccccacagaagaaaatgatttggatgattctttaagtgtaaaaaatggtgatagtagtaatgactttgtgacttgcaatgatatcaatgaagatgattttggtgattttggtgactttggctctgccagtggctcaactccaccttttgttactggtactcaagattcaatgagtgatgccacttttgaagagtcttcagagcactttccacattttagtgaaccaggtgatgactttggagaatttggggatataaatgctgtttcttgccaagaggagacaatattaacaaagtcagacctaaaacagacttctgataatttatcagaagaatgtcaattggcaagaaaatctagtggaacaggcactgaacctgttgcaaaacttaaaaatgggcaagaaggtgagattggacattttgattctgtgccaaatattcaggatgactgcaatggttttcaagactctgatgattttgcagacttcagttcagctggtcctagccaagttgtagattggaatgcttttgaggatgaacaaaaagatagttgttcttgggctgcttttggagaccagcaggctactgaatctcatcatcgaaaggaagcctggcagtcacataggacagatgaaaatattgatactccaggaacccccaaaacgcacagtgtaccttcagcaacttccaaaggagcagttgctagtggccatttacaggaatcagccacttcagttcagacagctttattaaaccgcctggagcgaattttcgaagcatgttttccttccatacttgtccctgatgctgaagaggaagttacttccctgaagcacttgctggaaacaagcactttgccaataaaaacgagagaggccttacctgaaagtggggaattgctagatgtgtggactgagctacaggatatccatgatgcacatggcttgagataccagtggggcggctcccatagcaacaagaagcttttgtcctccttgggaatagacacccgaaacattctcttcacgggcaataagaagcagcctgttatagtgcccatgtatgcagcaggattgggtatgttagagcccaccaaggaaccactgaaaccactttctgctgcagaaaaaatagcttccatcggtcagacagccaccatgtcaccagatatgaacacatgtacatctgatcagttccaggtgtggatccggagttgtatgagttaacaacttctaagctggaaatctccacctcaagcctcaaagtgactgatgcatttgcaagactcatgtctacagtagagaagacaagcacatctaccagtaggaaaccgaaaagagaagagcacctaagtgaagaagctatcaaggtgatcgctggccttcctgacttaacattcatgcatgccaaggtgttgatgttcccagccacgttaacaccttccacaagctctcaagaaaaagcagacggataactgatgtgaattggacagtttctattgcttttccttttttccatcccttccctaccatcaaaagcatacctgctctaattaaaaaaaaaaaaaaaaaaaaattcaagttcagctgatttgttggtaagccgcactagaaaggtatacatagtaatgtatatttatttacatactgaagtcctaaatttatattagaaaaatgtaaataatcgggggtaaacatttttgaagatttattctttttgtgttgctggggtgtatacatttatgtctttgtgaaatacactggtggtgtccttcttacaaaacttttgaaataaaaaaaaaactcaaatcttcactgtctgtgaaatccccttcagtcttttcagattgcattgactgtcctcttgatttttcatattacatgtcaaattacttttgctatcataaataagctccaaagtcccccatttaatttttttttaattttgtgtatgatgggtttcagatctggcttttgttaacattttggggcttttttaatcttttcaatctggcgtattgctgtttgaccttttgcaaggtacttaattgctcttttgttatagggtatggatcattgtcagaacttgattggaggggtttaaagagattgtgtctgtttaaaatcagtatgattcagagaaggaccaaattatatgaatgtcttacaatggaatttacttgttactgatttttttgttctattgtaccactattttttgaggattttgcacagtgtaaaatgacataatcatagattgctatggtttaggctgtatatacagtgaaaactatgggttttaaatgtttggggaaattcctatggaaaaaagagagacatgtagaagaacctctaacaaggttaatgtgcatgcccaaggtcttttgaaatttcagtgtgtaaatttccttttagcttatacaaaaataaaataatttaaaagcatacctgctctaattcacaaagacaaacaaagaaaatccaggt

SEQ ID NO: 430028 - DNA, 2124 bp, Homo sapiens
aaaaggctgtatatatctgctttgcctgtccaaggaactaagtctccagtgctgtcatagagatcaggatcaaatattaagtttacactgaaggatatagatgtcatattatatggcgtgttttacaatcagctctcacttctcaccatggggtaatgtgtacaaagggtgccgtttcttacaattttagtgtcattagtgttggatttttagaggttagatgtgacatattgttgtctccccccacccatcccgagttggtgcttctgctttcatgtgacagtaataattctgtactttaaaacctctgatttaaaatacaaagtcttgctttaaaaacttttgattctaaaggtattattgtgaaatggttctcattatagtgctataggattttcagtaaataaaatttaagaatagctgggtgtggtggcatcagcttgaggcaagaggatcccttaagccagggagattgaggccagcctgggcaactagtgagaccttgtctcttaaaaaaaaaaaaagactagttcctttttgtcttcagtactttccaagtgacctgttttttaccttcttctttctgatagattaacttaagtttatgggctgtgcacccccatccccattaaaggctaatattcctttttcagggtatgttagagcccaccaaggaaccactgaaaccactttctgctgcagaaaaaatagcttccatcggtcagacagccaccatgtcaccagatatgaacacatgtacatctgatcagttccaggagtctctaccacccgtccagtttgactggagtagcagtggccttactaaccctttagatggtgtggatccggagttgtatgagttaacaacttctaagctggaaatctccacctcaagcctcaaagtgactgatgcatttgcaagactcatgtctacagtagagaagacaagcacatctaccagtaggaaaccgaaaagagaagagcacctaagtgaagaagctatcaaggtgatcgctggccttcctgacttaacattcatgcatgccaaggtgttgatgttcccagccacgttaacaccttccacaagctctcaagaaaaagcagacggataactgatgtgaattggacagtttctattgcttttccttttttccatcccttccctaccatcaaaagcatacctgctctaattaaaaaaaaaaaaaaaaaaaaattcaagttcagctgatttgttggtaagccgcactagaaaggtatacatagtaatgtatatttatttacatactgaagtcctaaatttatattagaaaaatgtaaataatcgggggtaaacatttttgaagatttattctttttgtgttgctggggtgtatacatttatgtctttgtgaaatacactggtggtgtccttcttacaaaacttttgaaataaaaaaaaaactcaaatcttcactgtctgtgaaatccccttcagtcttttcagattgcattgactgtcctcttgatttttcatattacatgtcaaattacttttgctatcataaataagctccaaagtcccccatttaatttttttttaattttgtgtatgatgggtttcagatctggcttttgttaacattttggggcttttttaatcttttcaatctggcgtattgctgtttgaccttttgcaaggtacttaattgctcttttgttatagggtatggatcattgtcagaacttgattggaggggtttaaagagattgtgtctgtttaaaatcagtatgattcagagaaggaccaaattatatgaatgtcttacaatggaatttacttgttactgatttttttgttctattgtaccactattttttgaggattttgcacagtgtaaaatgacataatcatagattgctatggtttaggctgtatatacagtgaaaactatgggttttaaatgtttggggaaattcctatggaaaaaagagagacatgtagaagaacctctaacaaggttaatgtgcatgcccaaggtcttttgaaatttcagtgtgtaaatttccttttagcttatacaaaaataaaataatttaaaagcatacctgctctaattcacaaagacaaacaaagaaaatccaggt

SEQ ID NO: 430029 - DNA, 1475 bp, Homo sapiens
cctgcatgttcaagtgtgtgtcttacccctttttacacataacccctcctcccttggcttaccttctgtgtggctgcctaccaacacggtcactgaatttcaagctagtggaggttccactcttctgaaccttgatttctttgggcccgtggatgacagtagctctagcagcagcaccacaatcccaggtgtggatccggagttgtatgagttaacaacttctaagctggaaatctccacctcaagcctcaaagtgactgatgcatttgcaagactcatgtctacagtagagaagacaagcacatctaccagtaggaaaccgaaaagagaagagcacctaagtgaagaagctatcaaggtgatcgctggccttcctgacttaacattcatgcatgccaaggtgttgatgttcccagccacgttaacaccttccacaagctctcaagaaaaagcagacggataactgatgtgaattggacagtttctattgcttttccttttttccatcccttccctaccatcaaaagcatacctgctctaattaaaaaaaaaaaaaaaaaaaaattcaagttcagctgatttgttggtaagccgcactagaaaggtatacatagtaatgtatatttatttacatactgaagtcctaaatttatattagaaaaatgtaaataatcgggggtaaacatttttgaagatttattctttttgtgttgctggggtgtatacatttatgtctttgtgaaatacactggtggtgtccttcttacaaaacttttgaaataaaaaaaaaactcaaatcttcactgtctgtgaaatccccttcagtcttttcagattgcattgactgtcctcttgatttttcatattacatgtcaaattacttttgctatcataaataagctccaaagtcccccatttaatttttttttaattttgtgtatgatgggtttcagatctggcttttgttaacattttggggcttttttaatcttttcaatctggcgtattgctgtttgaccttttgcaaggtacttaattgctcttttgttatagggtatggatcattgtcagaacttgattggaggggtttaaagagattgtgtctgtttaaaatcagtatgattcagagaaggaccaaattatatgaatgtcttacaatggaatttacttgttactgatttttttgttctattgtaccactattttttgaggattttgcacagtgtaaaatgacataatcatagattgctatggtttaggctgtatatacagtgaaaactatgggttttaaatgtttggggaaattcctatggaaaaaagagagacatgtagaagaacctctaacaaggttaatgtgcatgcccaaggtcttttgaaatttcagtgtgtaaatttccttttagcttatacaaaaataaaataatttaaaagcatacctgctctaattcacaaagacaaacaaagaaaatccaggt

SEQ ID NO: 430030 - DNA, 2063 bp, Homo sapiens
aaaaggctgtatatatctgctttgcctgtccaaggaactaagtctccagtgctgtcatagagatcaggatcaaatattaagtttacactgaaggatatagatgtcatattatatggcgtgttttacaatcagctctcacttctcaccatggggtaatgtgtacaaagggtgccgtttcttacaattttagtgtcattagtgttggatttttagaggttagatgtgacatattgttgtctccccccacccatcccgagttggtgcttctgctttcatgtgacagtaataattctgtactttaaaacctctgatttaaaatacaaagtcttgctttaaaaacttttgattctaaaggtattattgtgaaatggttctcattatagtgctataggattttcagtaaataaaatttaagaatagctgggtgtggtggcatcagcttgaggcaagaggatcccttaagccagggagattgaggccagcctgggcaactagtgagaccttgtctcttaaaaaaaaaaaaagactagttcctttttgtcttcagtactttccaagtgacctgttttttaccttcttctttctgatagattaacttaagtttatgggctgtgcacccccatccccattaaaggctaatattcctttttcagggtatgttagagcccaccaaggaaccactgaaaccactttctgctgcagaaaaaatagcttccatcggtcagacagccaccatgtcaccagatatgaacacatgtacatctgatcagttccaggtgtggatccggagttgtatgagttaacaacttctaagctggaaatctccacctcaagcctcaaagtgactgatgcatttgcaagactcatgtctacagtagagaagacaagcacatctaccagtaggaaaccgaaaagagaagagcacctaagtgaagaagctatcaaggtgatcgctggccttcctgacttaacattcatgcatgccaaggtgttgatgttcccagccacgttaacaccttccacaagctctcaagaaaaagcagacggataactgatgtgaattggacagtttctattgcttttccttttttccatcccttccctaccatcaaaagcatacctgctctaattaaaaaaaaaaaaaaaaaaaaattcaagttcagctgatttgttggtaagccgcactagaaaggtatacatagtaatgtatatttatttacatactgaagtcctaaatttatattagaaaaatgtaaataatcgggggtaaacatttttgaagatttattctttttgtgttgctggggtgtatacatttatgtctttgtgaaatacactggtggtgtccttcttacaaaacttttgaaataaaaaaaaaactcaaatcttcactgtctgtgaaatccccttcagtcttttcagattgcattgactgtcctcttgatttttcatattacatgtcaaattacttttgctatcataaataagctccaaagtcccccatttaatttttttttaattttgtgtatgatgggtttcagatctggcttttgttaacattttggggcttttttaatcttttcaatctggcgtattgctgtttgaccttttgcaaggtacttaattgctcttttgttatagggtatggatcattgtcagaacttgattggaggggtttaaagagattgtgtctgtttaaaatcagtatgattcagagaaggaccaaattatatgaatgtcttacaatggaatttacttgttactgatttttttgttctattgtaccactattttttgaggattttgcacagtgtaaaatgacataatcatagattgctatggtttaggctgtatatacagtgaaaactatgggttttaaatgtttggggaaattcctatggaaaaaagagagacatgtagaagaacctctaacaaggttaatgtgcatgcccaaggtcttttgaaatttcagtgtgtaaatttccttttagcttatacaaaaataaaataatttaaaagcatacctgctctaattcacaaagacaaacaaagaaaatccaggt

SEQ ID NO: 430031 - DNA, 1712 bp, Homo sapiens
gctgtctgtatcccaacaggctgagactgggtcttctgagctgagagctttctctcctggaattccccactgggaataaagagagcctgaggttaaaatgacttagtctttccctgggcacactttgtttcaggctgaggtagttttagcgggtggaggggcagggaaaaacccagttaggtggagtgttactaaggcttcagatttatatttctgtttagtaacattttaaaattatgcctgggtagatgcttctagcctaatgtaaaggctagaaagtacacgagctgtctaggtgtgcatgtgagtatctgtgtgtgcatgcctagctttaatgaacataaataggccgcatgtcactcttcatgagatttggcatttggcacaggaagcatactgcacaaaagtattacaagattcaggaactagcagaggaaaaaatactcaagtccccacagattgctaactgtctaccttgagagtggattgtctcccattttacctacagcaaagtcacattaacacacttgtctttttttcatttgtcagtaggaaaccgaaaagagaagagcacctaagtgaagaagctatcaaggtgatcgctggccttcctgacttaacattcatgcatgccaaggtgttgatgttcccagccacgttaacaccttccacaagctctcaagaaaaagcagacggataactgatgtgaattggacagtttctattgcttttccttttttccatcccttccctaccatcaaaagcatacctgctctaattaaaaaaaaaaaaaaaaaaaaattcaagttcagctgatttgttggtaagccgcactagaaaggtatacatagtaatgtatatttatttacatactgaagtcctaaatttatattagaaaaatgtaaataatcgggggtaaacatttttgaagatttattctttttgtgttgctggggtgtatacatttatgtctttgtgaaatacactggtggtgtccttcttacaaaacttttgaaataaaaaaaaaactcaaatcttcactgtctgtgaaatccccttcagtcttttcagattgcattgactgtcctcttgatttttcatattacatgtcaaattacttttgctatcataaataagctccaaagtcccccatttaatttttttttaattttgtgtatgatgggtttcagatctggcttttgttaacattttggggcttttttaatcttttcaatctggcgtattgctgtttgaccttttgcaaggtacttaattgctcttttgttatagggtatggatcattgtcagaacttgattggaggggtttaaagagattgtgtctgtttaaaatcagtatgattcagagaaggaccaaattatatgaatgtcttacaatggaatttacttgttactgatttttttgttctattgtaccactattttttgaggattttgcacagtgtaaaatgacataatcatagattgctatggtttaggctgtatatacagtgaaaactatgggttttaaatgtttggggaaattcctatggaaaaaagagagacatgtagaagaacctctaacaaggttaatgtgcatgcccaaggtcttttgaaatttcagtgtgtaaatttccttttagcttatacaaaaataaaataatttaaaagcatacctgctctaattcacaaagacaaacaaagaaaatccaggt

SEQ ID NO: 430032 - DNA, 1230 bp, Homo sapiens
gatttgctggtgcagtacaactaggcttaatagggacatgtctacagtagagaagacaagccatctctaggaaaccgaaaagagaagagcacctaagtgaagaagctatcaaggtgatcgctggccttcctgacttaacattcatgcatgccaaggtgttgatgttcccagccacgttaacaccttccacaagctctcaagaaaaagcagacggataactgatgtgaattggacagtttctattgcttttccttttttccatcccttccctaccatcaaaagcatacctgctctaattaaaaaaaaaaaaaaaaaaaaattcaagttcagctgatttgttggtaagccgcactagaaaggtatacatagtaatgtatatttatttacatactgaagtcctaaatttatattagaaaaatgtaaataatcgggggtaaacatttttgaagatttattctttttgtgttgctggggtgtatacatttatgtctttgtgaaatacactggtggtgtccttcttacaaaacttttgaaataaaaaaaaaactcaaatcttcactgtctgtgaaatccccttcagtcttttcagattgcattgactgtcctcttgatttttcatattacatgtcaaattacttttgctatcataaataagctccaaagtcccccatttaatttttttttaattttgtgtatgatgggtttcagatctggcttttgttaacattttggggcttttttaatcttttcaatctggcgtattgctgtttgaccttttgcaaggtacttaattgctcttttgttatagggtatggatcattgtcagaacttgattggaggggtttaaagagattgtgtctgtttaaaatcagtatgattcagagaaggaccaaattatatgaatgtcttacaatggaatttacttgttactgatttttttgttctattgtaccactattttttgaggattttgcacagtgtaaaatgacataatcatagattgctatggtttaggctgtatatacagtgaaaactatgggttttaaatgtttggggaaattcctatggaaaaaagagagacatgtagaagaacctctaacaaggttaatgtgcatgcccaaggtcttttgaaatttcagtgtgtaaatttccttttagcttatacaaaaataaaataatttaaaagcatacctgctctaattcacaaagacaaacaaagaaaatccaggt

SEQ ID NO: 430033 - DNA, 1014 bp, Homo sapiens
agtaaaggcagtcttcagaaagggcaactgggtgtgccacaccataagtgacttgctgaaagccatgagaaattatacctgccctcaaggaactcatagttcccagggagtttcagaccccaagaccgattacacccttcctactcagaaaaggccgttacattggtatgaccccgagacatccacataacccgggtttgacgggagaagttccccgaagctgcacccactgccacccccaagccatcctagcacctgatgagctaattaatccccattattattgatgttgtgtaaactgattaatccgtttaccccaaaaaaaaaaaactcaaatcttcactgtctgtgaaatccccttcagtcttttcagattgcattgactgtcctcttgatttttcatattacatgtcaaattacttttgctatcataaataagctccaaagtcccccatttaatttttttttaattttgtgtatgatgggtttcagatctggcttttgttaacattttggggcttttttaatcttttcaatctggcgtattgctgtttgaccttttgcaaggtacttaattgctcttttgttatagggtatggatcattgtcagaacttgattggaggggtttaaagagattgtgtctgtttaaaatcagtatgattcagagaaggaccaaattatatgaatgtcttacaatggaatttacttgttactgatttttttgttctattgtaccactattttttgaggattttgcacagtgtaaaatgacataatcatagattgctatggtttaggctgtatatacagtgaaaactatgggttttaaatgtttggggaaattcctatggaaaaaagagagacatgtagaagaacctctaacaaggttaatgtgcatgcccaaggtcttttgaaatttcagtgtgtaaatttccttttagcttatacaaaaataaaataatttaaaagcatacctgctctaattcacaaagacaaacaaagaaaatccaggt

SEQ ID NO: 430034 - DNA, 466 bp, Homo sapiens
taaataaaatttaagaatagctgggtgtggtggcatcagcttgaggcaagaggatcccttaagccagggagattgaggccagcctgggcaactagtgagaccttgtctcttaaaaaaaaaaaaagactagttcctttttgtcttcagtactttccaagtgacctgttttttaccttcttctttctgatagattaacttaagtttatgggctgtgcacccccatccccattaaaggctaatattcctttttcagggtatgttagagcccaccaaggaaccactgaaaccactttctgctgcagaaaaaatagcttccatcggtcagacagccaccatgtcaccagatatgaacacatgtacatctgatcagttccaggtaaaaatatctatatgtgtataaatatgtttatgcgtgtatatacacatatatccacacatactgcctttttccttcatttatgactgt

SEQ ID NO: 430035 - DNA, 438 bp, Homo sapiens
tttaaaagacccagggatttcaactagaaaattgtattgaataaatctatttctttcccaaatgaaaagtgacaaagttaaggcccttagttagaaaagtatcacgatggcaatttcttttctaattagtgaaaaatgtgccattggcctttctctgaaatgtaactagtattatttttcgtattcaggagggaccttgtggtggcagcccagaattttttctgtgccggctgtggaactccagtagagcctagtaagtacggataatggatcgcctgcttatgatgtgatgacaaggtccagaatagcaaagtagggcagcgcattgcttgtgtgagagatgcctttgatgagaagttgttataagagcttcagagaagtttgccctccttttcatgaggagtccatcatgactgacaaggctgtgtgatcaactag

SEQ ID NO: 430036 - DNA, 287 bp, Homo sapiens
tcggccgccgggattccttcggccgccgggattccttcggccgccgggattccttcggccgccgggattccttcggccgccgggattcctccagggcctttgctgcagcttatatgttcactagtaatctggcctgtgcctaccttttaatcccagctggaaaatctcagtaagaatgatggtaagctttgagattggtatctcttcccttaaatgtttttggaaattgattttattgtttgtacctaagtatctctgattcaaaggaccccctttgtgacagtggc

SEQ ID NO: 430037 - DNA, 2863 bp, Homo sapiens
cgcataggtgcgtggtgctgggcccgggcgccgcggcaccggtgtaggagcgcgcatctccagagtttcttccatctgggcgacgtctcggtgcctgcggcgggaacggcgctttgcttccctgaggagcttctagagagctacggtggcccccgtgtgggaggcggggggcgtggcggcgtcggggcgtcgctgtcccctcctcggtagctctcctccctcccctttctgctgttaccgggagcgcggtggccacggaacgctgcccggagccgcgcgagggaggacccgacgcgcggcgtttacccagcgcagcgttccaccgctcgggtttggctggaatagctctccagacccccagctggccatgtggtgagttcagggcccaaatcaagtagtaccagcaatcagggaactcctatctgttttgaatggattcacaccagccacaagcctggaaagatggtgtcacaatctacagtcaggcaggattctcctgtggagccctgggaagggatcagcgatcactctggcattattgatggttcgcccagactcctgaacactgaccatcctccttgccaattagacatcaggctcatgaggcacaaagctgtctggattaacccccaggatgtgcagcaacagccgcaggacttgcaatctcaggtgccagcagcagggaacagtgggacccattttgtgacagatgctgcctctccctcaggcccttcaccttcgtgcctcggggactccctggcagagacaacgttgtctgaggataccacagactccgttggcagcgcttctccccatggctcgagtgaaaagagtagcagcttctctctgtcctcaacagaggtacacatggtccgcccaggatactctcatcgggtgtctctgcccacaagccctaggattttggccacctccccatatcctgagactgacagtgctttttttgagccttcccatctgacatctgctgctgatgaaggtgctgttcaagtcagtagaagaaccatttcttcgaattccttctcaccagaggtatttgtgctgcctgttgatgtagaaaaggaaaatgcccacttttatgttgcagatatgattatatcagcaatggagaaaatgaagtgtaacattctgagtcaacagcagacagagagctggagtaaagaagtcagtgggttacttgggagtgatcagcctgactctgaaatgacttttgataccaacataaagcaagagtctgggtcttctacttcttcatacagtggctatgaaggttgtgctgtgttacaggtcagcccagtgactgaaacacgtacttaccatgatgtgaaagagatttgcaaatgcgatgttgatgaatttgttattttagagcttggagattttaatgatatcacagaaacctgtagctgttcctgcagctcctctaagagtgtcacttatgagccagacttcaattctgcagaactattagccaaagagctgtaccgcgtgttccagaagtgctggatactgtcagtagttaattctcagctggcaggttccctgagtgcagctggctcgatagtcgtaaatgaagagtgtgtccgaaaagactttgaatccagtatgaatgtagtacaggaaattaaatttaagtctaggatcagagggactgaagactgggctcctcctagatttcaaatcatatttaatattcatccaccactcaagagggaccttgtggtggcagcccagaattttttctgtgccggctgtggaactccagtagagcctaagtttgtgaagcggctccggtactgcgaatacctagggaagtatttctgtgactgctgccactcatatgcagagtcgtgcatccctgcccgaatcctgatgatgtgggacttcaagaagtactacgtcagcaatttctccaaacagctgctcgacagcatatggcaccagcccattttcaatttgctgagcatcggccaaagcctgtatgcgaaagccaaggagctggacagagtgaaggaaattcaggagcagctcttccatatcaagaagctgttgaagacctgtaggtttgctaacagctgtgtcaaggaaagggctttatttgtgaattttgccagaatacgactgtcatcttcccatttcagacagcaacatgtagaagatgttcagcgtgcagggcttgctttcacaaacagtgcttccagtcctccgagtgcccccggtgtgcgaggatcacagcgaggagaaaacttctggaaagtgtggcctctgcagcaacatgatgcccctgagtactgtgaaaaagactgttcaacatgccttatgataacaccgatttgtgtctattattggtgacattgttttagatattgggtattgtatattaaggaaaaagatggtctatattctctttattgcatatacttaatgtttcaaaagaatgcagattctgtgtttaagcacagggctgatagttgtggttttgtttacaaatgttctgttttggctgctattggttttttaaagaggttttttatacttttgtatttgaatagttatgtttcactgatgctgagccagtttgtatgtgtgtgcatatatgtgaactgtaactgacaagatgaattactcagtttctctttctctaaagcttgtttgatgaaactggttggtcctttcagtgaacaaaaatatgaccccaaaaaaaaaaaaaaaaaaaaaaagcaatgcgaaggtgctaatcctgacgctcgtggtggccgcctgcggcttcgtcctctggagcagcaatgggcgacaaaggaagaacgaggccctcgccccaccgttgctggacgccgaacccgcg

SEQ ID NO: 430038 - DNA, 3682 bp, Homo sapiens
cgcataggtgcgtggtgctgggcccgggcgccgcggcaccggtgtaggagcgcgcatctccagagtttcttccatctgggcgacgtctcggtgcctgcggcgggaacggcgctttgcttccctgaggagcttctagagagctacggtggcccccgtgtgggaggcggggggcgtggcggcgtcggggcgtcgctgtcccctcctcggtagctctcctccctcccctttctgctgttaccgggagcgcggtggccacggaacgctgcccggagccgcgcgagggaggacccgacgcgcggcgtttacccagcgcagcgttccaccgctcgggtttggctggaatagctctccagacccccagctggccatgtggtgagttcagggcccaaatcaagtagtaccagcaatcagggaactcctatctgttttgaatggattcacaccagccacaagcctggaaagatggtgtcacaatctacagtcaggcaggattctcctgtggagccctgggaagggatcagcgatcactctggcattattgatggttcgcccagactcctgaacactgaccatcctccttgccaattagacatcaggctcatgaggcacaaagctgtctggattaacccccaggatgtgcagcaacagccgcaggacttgcaatctcaggtgccagcagcagggaacagtgggacccattttgtgacagatgctgcctctccctcaggcccttcaccttcgtgcctcggggactccctggcagagacaacgttgtctgaggataccacagactccgttggcagcgcttctccccatggctcgagtgaaaagagtagcagcttctctctgtcctcaacagaggtacacatggtccgcccaggatactctcatcgggtgtctctgcccacaagccctaggattttggccacctccccatatcctgagactgacagtgctttttttgagccttcccatctgacatctgctgctgatgaaggtgctgttcaagtcagtagaagaaccatttcttcgaattccttctcaccagaggtatttgtgctgcctgttgatgtagaaaaggaaaatgcccacttttatgttgcagatatgattatatcagcaatggagaaaatgaagtgtaacattctgagtcaacagcagacagagagctggagtaaagaagtcagtgggttacttgggagtgatcagcctgactctgaaatgacttttgataccaacataaagcaagagtctgggtcttctacttcttcatacagtggctatgaaggttgtgctgtgttacaggtcagcccagtgactgaaacacgtacttaccatgatgtgaaagagatttgcaaatgcgatgttgatgaatttgttattttagagcttggagattttaatgatatcacagaaacctgtagctgttcctgcagctcctctaagagtgtcacttatgagccagacttcaattctgcagaactattagccaaagagctgtaccgcgtgttccagaagtgctggatactgtcagtagttaattctcagctggcaggttccctgagtgcagctggctcgatagtcgtaaatgaagagtgtgtccgaaaagactttgaatccagtatgaatgtagtacaggaaattaaatttaagtctaggatcagagggactgaagactgggctcctcctagatttcaaatcatatttaatattcatccaccactcaagagggaccttgtggtggcagcccagaattttttctgtgccggctgtggaactccagtagagcctaagtttgtgaagcggctccggtactgcgaatacctagggaagtatttctgtgactgctgccactcatatgcagagtcgtgcatccctgcccgaatcctgatgatgtgggacttcaagaagtactacgtcagcaatttctccaaacagctgctcgacagcatatggcaccagcccattttcaatttgctgagcatcggccaaagcctgtatgcgaaagccaaggagctggacagagtgaaggaaattcaggagcagctcttccatatcaagaagctgttgaagacctgtaggtttgctaacagctgtgtcaaggaaagggctttatttgtgaattttgccagaatacgactgtcatcttcccatttcagacagcaacatgtagaagatgttcagcgtgcagggcttgctttcacaaacagtgcttccagtcctccgagtgcccccggtgtgcgaggatcacagcgaggagaaaacttctggaaagtgtggcctctgcagcaacatgatgcccctgagtactgtgaaaaagactgttcaacatgccttatgataacaccgatttgtgtctattattggtgacattgttttagatattgggtattgtatattaaggaaaaagatggtctatattctctttattgcatatacttaatgtttcaaaagaatgcagattctgtgtttaagcacagggctgatagttgtggttttgtttacaaatgttctgttttggctgctattggttttttaaagaggttttttatacttttgtatttgaatagttatgtttcactgatgctgagccagtttgtatgtgtgtgcatatatgtgaactgtaactgacaagatgaattactcagtttctctttctctaaagcttgtttgatgaaactggttggtcctttcagtgaacaaaaatatgaccccaaatctgtttgctctggcttttatttcttcaggaagcagacttccacttaaatgccattttgtgattgtgtcaatcatacacattttatttacttcagagtttgaatagagagtacacatttcttctgcagatttatttcatgatgagtttgagttgcttagcagggcgtgtgggtcccgttgaagtgcagtttgaagcaactgcttctagatggcactctttcaggtggcacaaattgaacctgtatttgtcatctctgttccacacactgcaatgtcaagggatgcagaagtgagtagaattccatccctgcccttgaggatcttgctttaacagatgtaaaactgaacataaggtatttgcagatttaaacgaactgggggaaataatgaacagtgtgattctagtaataacattaaaatcatagacattgactaataaggttaaatgaatcacaaaacctttatgaatttcttttttctaatagttcttatatgttttcctgaaacatgtgagcctattcttttttcttctactttctatatactttctcccacttgagaaaggggccttgaggctgggtcccttcatggtatacctttagactgaacggtttgcaacctagggcttgggcattacattccctgggattcacatgccctaactaaacctaccttgattttctcagacagcacaggcaggcaataaagcgtcacagattgtcccctaaccccatccagccatgtgtatgagtgtgttttattcaatgggatagtactgagcacatgaaagaaatgaatgacttctgtcaatctcttttcattcagtcttctcattctgtcaattgttttctcatccgcagtgcctctgccagaactgtgctcacatccattatttaagccagatcttttctaagtattatagaagtgtagaggcacatagaataaataaaaccagacttcaaac

SEQ ID NO: 430039 - DNA, 3133 bp, Homo sapiens
cgcataggtgcgtggtgctgggcccgggcgccgcggcaccggtgtaggagcgcgcatctccagagtttcttccatctgggcgacgtctcggtgcctgcggcgggaacggcgctttgcttccctgaggagcttctagagagctacggtggcccccgtgtgggaggcggggggcgtggcggcgtcggggcgtcgctgtcccctcctcggtagctctcctccctcccctttctgctgttaccgggagcgcggtggccacggaacgctgcccggagccgcgcgagggaggacccgacgcgcggcgtttacccagcgcagcgttccaccgctcgggtttggctggataaaataaaaaatggggatattgacctcctgtcactactgcatggactttgatggtttccaatcattactttctcctctgtgtcaatctgcctcttcgagaaattcatactcctgaatagctctccagacccccagctggccatgtggtgagttcagggcccaaatcaagtagtaccagcaatcagggaactcctatctgttttgaatggattcacaccagccacaagcctggaaagatggtgtcacaatctacagtcaggcaggattctcctgtggagccctgggaagggatcagcgatcactctggcattattgatggttcgcccagactcctgaacactgaccatcctccttgccaattagacatcaggctcatgaggcacaaagctgtctggattaacccccaggatgtgcagcaacagccgcaggacttgcaatctcaggtgccagcagcagggaacagtgggacccattttgtgacagatgctgcctctccctcaggcccttcaccttcgtgcctcggggactccctggcagagacaacgttgtctgaggataccacagactccgttggcagcgcttctccccatggctcgagtgaaaagagtagcagcttctctctgtcctcaacagaggtacacatggtccgcccaggatactctcatcgggtgtctctgcccacaagccctaggattttggccacctccccatatcctgagactgacagtgctttttttgagccttcccatctgacatctgctgctgatgaaggtgctgttcaagtcagtagaagaaccatttcttcgaattccttctcaccagaggtatttgtgctgcctgttgatgtagaaaaggaaaatgcccacttttatgttgcagatatgattatatcagcaatggagaaaatgaagtgtaacattctgagtcaacagcagacagagagctggagtaaagaagtcagtgggttacttgggagtgatcagcctgactctgaaatgacttttgataccaacataaagcaagagtctgggtcttctacttcttcatacagtggctatgaaggttgtgctgtgttacaggtcagcccagtgactgaaacacgtacttaccatgatgtgaaagagatttgcaaatgcgatgttgatgaatttgttattttagagcttggagattttaatgatatcacagaaacctgtagctgttcctgcagctcctctaagagtgtcacttatgagccagacttcaattctgcagaactattagccaaagagctgtaccgcgtgttccagaagtgctggatactgtcagtagttaattctcagctggcaggttccctgagtgcagctggctcgatagtcgtaaatgaagagtgtgtccgaaaagactttgaatccagtatgaatgtagtacaggaaattaaatttaagtctaggatcagagggactgaagactgggctcctcctagatttcaaatcatatttaatattcatccaccactcaagagggaccttgtggtggcagcccagaattttttctgtgccggctgtggaactccagtagagcctaagtttgtgaagcggctccggtactgcgaatacctagggaagtatttctgtgactgctgccactcatatgcagagtcgtgcatccctgcccgaatcctgatgatgtgggacttcaagaagtactacgtcagcaatttctccaaacagctgctcgacagcatatggcaccagcccattttcaatttgctgagcatcggccaaagcctgtatgcgaaagccaaggagctggacagagtgaaggaaattcaggagcagctcttccatatcaagaagctgttgaagacctgtaggtttgctaacagtgcattaaaggagttcgagcaggtgccgggacacttgactgatgagctccacctgttctcccttgaggacctggtcaggatcaagaaagggctgctggcacccttactcaaggacattctgaaagcttcccttgcacatgtggctggctgtgagctgtgtcaaggaaagggctttatttgtgaattttgccagaatacgactgtcatcttcccatttcagacagcaacatgtagaagatgttcagcgtgcagggcttgctttcacaaacagtgcttccagtcctccgagtgcccccggtgtgcgaggatcacagcgaggagaaaacttctggaaagtgtggcctctgcagcaacatgatgcccctgagtactgtgaaaaagactgttcaacatgccttatgataacaccgatttgtgtctattattggtgacattgttttagatattgggtattgtatattaaggaaaaagatggtctatattctctttattgcatatacttaatgtttcaaaagaatgcagattctgtgtttaagcacagggctgatagttgtggttttgtttacaaatgttctgttttggctgctattggttttttaaagaggttttttatacttttgtatttgaatagttatgtttcactgatgctgagccagtttgtatgtgtgtgcatatatgtgaactgtaactgacaagatgaattactcagtttctctttctctaaagcttgtttgatgaaactggttggtcctttcagtgaacaaaaatatgaccccaaaaaaaaaaaaaaaaaaaaaaagcaatgcgaaggtgctaatcctgacgctcgtggtggccgcctgcggcttcgtcctctggagcagcaatgggcgacaaaggaagaacgaggccctcgccccaccgttgctggacgccgaacccgcg

SEQ ID NO: 430040 - DNA, 2727 bp, Homo sapiens
tccaggtgaagcagccagcagaggtcagagagagacagctcacgttccggaatagctctccagacccccagctggccatgtggtgagttcagggcccaaatcaagtagtaccagcaatcagggaactcctatctgttttgaatggattcacaccagccacaagcctggaaagatggtgtcacaatctacagtcaggcaggattctcctgtggagccctgggaagggatcagcgatcactctggcattattgatggttcgcccagactcctgaacactgaccatcctccttgccaattagacatcaggctcatgaggcacaaagctgtctggattaacccccaggatgtgcagcaacagccgcaggacttgcaatctcaggtgccagcagcagggaacagtgggacccattttgtgacagatgctgcctctccctcaggcccttcaccttcgtgcctcggggactccctggcagagacaacgttgtctgaggataccacagactccgttggcagcgcttctccccatggctcgagtgaaaagagtagcagcttctctctgtcctcaacagaggtacacatggtccgcccaggatactctcatcgggtgtctctgcccacaagccctaggattttggccacctccccatatcctgagactgacagtgctttttttgagccttcccatctgacatctgctgctgatgaaggtgctgttcaagtcagtagaagaaccatttcttcgaattccttctcaccagaggtatttgtgctgcctgttgatgtagaaaaggaaaatgcccacttttatgttgcagatatgattatatcagcaatggagaaaatgaagtgtaacattctgagtcaacagcagacagagagctggagtaaagaagtcagtgggttacttgggagtgatcagcctgactctgaaatgacttttgataccaacataaagcaagagtctgggtcttctacttcttcatacagtggctatgaaggttgtgctgtgttacaggtcagcccagtgactgaaacacgtacttaccatgatgtgaaagagatttgcaaatgcgatgttgatgaatttgttattttagagcttggagattttaatgatatcacagaaacctgtagctgttcctgcagctcctctaagagtgtcacttatgagccagacttcaattctgcagaactattagccaaagagctgtaccgcgtgttccagaagtgctggatactgtcagtagttaattctcagctggcaggttccctgagtgcagctggctcgatagtcgtaaatgaagagtgtgtccgaaaagactttgaatccagtatgaatgtagtacaggaaattaaatttaagtctaggatcagagggactgaagactgggctcctcctagatttcaaatcatatttaatattcatccaccactcaagagggaccttgtggtggcagcccagaattttttctgtgccggctgtggaactccagtagagcctaagtttgtgaagcggctccggtactgcgaatacctagggaagtatttctgtgactgctgccactcatatgcagagtcgtgcatccctgcccgaatcctgatgatgtgggacttcaagaagtactacgtcagcaatttctccaaacagctgctcgacagcatatggcaccagcccattttcaatttgctgagcatcggccaaagcctgtatgcgaaagccaaggagctggacagagtgaaggaaattcaggagcagctcttccatatcaagaagctgttgaagacctgtaggtttgctaacagtgcattaaaggagttcgagcaggtgccgggacacttgactgatgagctccacctgttctcccttgaggacctggtcaggatcaagaaagggctgctggcacccttactcaaggacattctgaaagcttcccttgcacatgtggctggctgtgagctgtgtcaaggaaagggctttatttgtgaattttgccagaatacgactgtcatcttcccatttcagacagcaacatgtagaagatgttcagcgtgcagggcttgctttcacaaacagtgcttccagtcctccgagtgcccccggtgtgcgaggatcacagcgaggagaaaacttctggaaagtgtggcctctgcagcaacatgatgcccctgagtactgtgaaaaagactgttcaacatgccttatgataacaccgatttgtgtctattattggtgacattgttttagatattgggtattgtatattaaggaaaaagatggtctatattctctttattgcatatacttaatgtttcaaaagaatgcagattctgtgtttaagcacagggctgatagttgtggttttgtttacaaatgttctgttttggctgctattggttttttaaagaggttttttatacttttgtatttgaatagttatgtttcactgatgctgagccagtttgtatgtgtgtgcatatatgtgaactgtaactgacaagatgaattactcagtttctctttctctaaagcttgtttgatgaaactggttggtcctttcagtgaacaaaaatatgaccccaaaaaaaaaaaaaaaaaaaaaaagcaatgcgaaggtgctaatcctgacgctcgtggtggccgcctgcggcttcgtcctctggagcagcaatgggcgacaaaggaagaacgaggccctcgccccaccgttgctggacgccgaacccgcg

SEQ ID NO: 430041 - DNA, 2746 bp, Homo sapiens
cgcataggtgcgtggtgctgggcccgggcgccgcggcaccggtgtaggagcgcgcatctccagagtttcttccatctgggcgacgtctcggtgcctgcggcgggaacggcgctttgcttccctgaggagcttctagagagctacggtggcccccgtgtgggaggcggggggcgtggcggcgtcggggcgtcgctgtcccctcctcggtagctctcctccctcccctttctgctgttaccgggagcgcggtggccacggaacgctgcccggagccgcgcgagggaggacccgacgcgcggcgtttacccagcgcagcgttccaccgctcgggtttggctggataaaataaaaaatggggatattgacctcctgtcactactgcatggactttgatggtttccaatcattactttctcctctgtgtcaatctgcctcttcgagaaattcatactcctggcccttcaccttcgtgcctcggggactccctggcagagacaacgttgtctgaggataccacagactccgttggcagcgcttctccccatggctcgagtgaaaagagtagcagcttctctctgtcctcaacagaggtacacatggtccgcccaggatactctcatcgggtgtctctgcccacaagccctaggattttggccacctccccatatcctgagactgacagtgctttttttgagccttcccatctgacatctgctgctgatgaaggtgctgttcaagtcagtagaagaaccatttcttcgaattccttctcaccagaggtatttgtgctgcctgttgatgtagaaaaggaaaatgcccacttttatgttgcagatatgattatatcagcaatggagaaaatgaagtgtaacattctgagtcaacagcagacagagagctggagtaaagaagtcagtgggttacttgggagtgatcagcctgactctgaaatgacttttgataccaacataaagcaagagtctgggtcttctacttcttcatacagtggctatgaaggttgtgctgtgttacaggtcagcccagtgactgaaacacgtacttaccatgatgtgaaagagatttgcaaatgcgatgttgatgaatttgttattttagagcttggagattttaatgatatcacagaaacctgtagctgttcctgcagctcctctaagagtgtcacttatgagccagacttcaattctgcagaactattagccaaagagctgtaccgcgtgttccagaagtgctggatactgtcagtagttaattctcagctggcaggttccctgagtgcagctggctcgatagtcgtaaatgaagagtgtgtccgaaaagactttgaatccagtatgaatgtagtacaggaaattaaatttaagtctaggatcagagggactgaagactgggctcctcctagatttcaaatcatatttaatattcatccaccactcaagagggaccttgtggtggcagcccagaattttttctgtgccggctgtggaactccagtagagcctaagtttgtgaagcggctccggtactgcgaatacctagggaagtatttctgtgactgctgccactcatatgcagagtcgtgcatccctgcccgaatcctgatgatgtgggacttcaagaagtactacgtcagcaatttctccaaacagctgctcgacagcatatggcaccagcccattttcaatttgctgagcatcggccaaagcctgtatgcgaaagccaaggagctggacagagtgaaggaaattcaggagcagctcttccatatcaagaagctgttgaagacctgtaggtttgctaacagtgcattaaaggagttcgagcaggtgccgggacacttgactgatgagctccacctgttctcccttgaggacctggtcaggatcaagaaagggctgctggcacccttactcaaggacattctgaaagcttcccttgcacatgtggctggctgtgagctgtgtcaaggaaagggctttatttgtgaattttgccagaatacgactgtcatcttcccatttcagacagcaacatgtagaagatgttcagcgtgcagggcttgctttcacaaacagtgcttccagtcctccgagtgcccccggtgtgcgaggatcacagcgaggagaaaacttctggaaagtgtggcctctgcagcaacatgatgcccctgagtactgtgaaaaagactgttcaacatgccttatgataacaccgatttgtgtctattattggtgacattgttttagatattgggtattgtatattaaggaaaaagatggtctatattctctttattgcatatacttaatgtttcaaaagaatgcagattctgtgtttaagcacagggctgatagttgtggttttgtttacaaatgttctgttttggctgctattggttttttaaagaggttttttatacttttgtatttgaatagttatgtttcactgatgctgagccagtttgtatgtgtgtgcatatatgtgaactgtaactgacaagatgaattactcagtttctctttctctaaagcttgtttgatgaaactggttggtcctttcagtgaacaaaaatatgaccccaaaaaaaaaaaaaaaaaaaaaaagcaatgcgaaggtgctaatcctgacgctcgtggtggccgcctgcggcttcgtcctctggagcagcaatgggcgacaaaggaagaacgaggccctcgccccaccgttgctggacgccgaacccgcg

SEQ ID NO: 430042 - DNA, 2756 bp, Homo sapiens
gttggggcttatggatgctggatgaagataagtgagagaggtttacagggacagcatcatgtcaggccttgagggcaagaatagctctccagacccccagctggccatgtggtgagttcagggcccaaatcaagtagtaccagcaatcagggaactcctatctgttttgaatggattcacaccagccacaagcctggaaagatggtgtcacaatctacagtcaggcaggattctcctgtggagccctgggaagggatcagcgatcactctggcattattgatggttcgcccagactcctgaacactgaccatcctccttgccaattagacatcaggctcatgaggcacaaagctgtctggattaacccccaggatgtgcagcaacagccgcaggacttgcaatctcaggtgccagcagcagggaacagtgggacccattttgtgacagatgctgcctctccctcaggcccttcaccttcgtgcctcggggactccctggcagagacaacgttgtctgaggataccacagactccgttggcagcgcttctccccatggctcgagtgaaaagagtagcagcttctctctgtcctcaacagaggtacacatggtccgcccaggatactctcatcgggtgtctctgcccacaagccctaggattttggccacctccccatatcctgagactgacagtgctttttttgagccttcccatctgacatctgctgctgatgaaggtgctgttcaagtcagtagaagaaccatttcttcgaattccttctcaccagaggtatttgtgctgcctgttgatgtagaaaaggaaaatgcccacttttatgttgcagatatgattatatcagcaatggagaaaatgaagtgtaacattctgagtcaacagcagacagagagctggagtaaagaagtcagtgggttacttgggagtgatcagcctgactctgaaatgacttttgataccaacataaagcaagagtctgggtcttctacttcttcatacagtggctatgaaggttgtgctgtgttacaggtcagcccagtgactgaaacacgtacttaccatgatgtgaaagagatttgcaaatgcgatgttgatgaatttgttattttagagcttggagattttaatgatatcacagaaacctgtagctgttcctgcagctcctctaagagtgtcacttatgagccagacttcaattctgcagaactattagccaaagagctgtaccgcgtgttccagaagtgctggatactgtcagtagttaattctcagctggcaggttccctgagtgcagctggctcgatagtcgtaaatgaagagtgtgtccgaaaagactttgaatccagtatgaatgtagtacaggaaattaaatttaagtctaggatcagagggactgaagactgggctcctcctagatttcaaatcatatttaatattcatccaccactcaagagggaccttgtggtggcagcccagaattttttctgtgccggctgtggaactccagtagagcctaagtttgtgaagcggctccggtactgcgaatacctagggaagtatttctgtgactgctgccactcatatgcagagtcgtgcatccctgcccgaatcctgatgatgtgggacttcaagaagtactacgtcagcaatttctccaaacagctgctcgacagcatatggcaccagcccattttcaatttgctgagcatcggccaaagcctgtatgcgaaagccaaggagctggacagagtgaaggaaattcaggagcagctcttccatatcaagaagctgttgaagacctgtaggtttgctaacagtgcattaaaggagttcgagcaggtgccgggacacttgactgatgagctccacctgttctcccttgaggacctggtcaggatcaagaaagggctgctggcacccttactcaaggacattctgaaagcttcccttgcacatgtggctggctgtgagctgtgtcaaggaaagggctttatttgtgaattttgccagaatacgactgtcatcttcccatttcagacagcaacatgtagaagatgttcagcgtgcagggcttgctttcacaaacagtgcttccagtcctccgagtgcccccggtgtgcgaggatcacagcgaggagaaaacttctggaaagtgtggcctctgcagcaacatgatgcccctgagtactgtgaaaaagactgttcaacatgccttatgataacaccgatttgtgtctattattggtgacattgttttagatattgggtattgtatattaaggaaaaagatggtctatattctctttattgcatatacttaatgtttcaaaagaatgcagattctgtgtttaagcacagggctgatagttgtggttttgtttacaaatgttctgttttggctgctattggttttttaaagaggttttttatacttttgtatttgaatagttatgtttcactgatgctgagccagtttgtatgtgtgtgcatatatgtgaactgtaactgacaagatgaattactcagtttctctttctctaaagcttgtttgatgaaactggttggtcctttcagtgaacaaaaatatgaccccaaaaaaaaaaaaaaaaaaaaaaagcaatgcgaaggtgctaatcctgacgctcgtggtggccgcctgcggcttcgtcctctggagcagcaatgggcgacaaaggaagaacgaggccctcgccccaccgttgctggacgccgaacccgcg

SEQ ID NO: 430043 - DNA, 2630 bp, Homo sapiens
cgcataggtgcgtggtgctgggcccgggcgccgcggcaccggtgtaggagcgcgcatctccagagtttcttccatctgggcgacgtctcggtgcctgcggcgggaacggcgctttgcttccctgaggagcttctagagagctacggtggcccccgtgtgggaggcggggggcgtggcggcgtcggggcgtcgctgtcccctcctcggtagctctcctccctcccctttctgctgttaccgggagcgcggtggccacggaacgctgcccggagccgcgcgagggaggacccgacgcgcggcgtttacccagcgcagcgttccaccgctcgggtttggctgggcccttcaccttcgtgcctcggggactccctggcagagacaacgttgtctgaggataccacagactccgttggcagcgcttctccccatggctcgagtgaaaagagtagcagcttctctctgtcctcaacagaggtacacatggtccgcccaggatactctcatcgggtgtctctgcccacaagccctaggattttggccacctccccatatcctgagactgacagtgctttttttgagccttcccatctgacatctgctgctgatgaaggtgctgttcaagtcagtagaagaaccatttcttcgaattccttctcaccagaggtatttgtgctgcctgttgatgtagaaaaggaaaatgcccacttttatgttgcagatatgattatatcagcaatggagaaaatgaagtgtaacattctgagtcaacagcagacagagagctggagtaaagaagtcagtgggttacttgggagtgatcagcctgactctgaaatgacttttgataccaacataaagcaagagtctgggtcttctacttcttcatacagtggctatgaaggttgtgctgtgttacaggtcagcccagtgactgaaacacgtacttaccatgatgtgaaagagatttgcaaatgcgatgttgatgaatttgttattttagagcttggagattttaatgatatcacagaaacctgtagctgttcctgcagctcctctaagagtgtcacttatgagccagacttcaattctgcagaactattagccaaagagctgtaccgcgtgttccagaagtgctggatactgtcagtagttaattctcagctggcaggttccctgagtgcagctggctcgatagtcgtaaatgaagagtgtgtccgaaaagactttgaatccagtatgaatgtagtacaggaaattaaatttaagtctaggatcagagggactgaagactgggctcctcctagatttcaaatcatatttaatattcatccaccactcaagagggaccttgtggtggcagcccagaattttttctgtgccggctgtggaactccagtagagcctaagtttgtgaagcggctccggtactgcgaatacctagggaagtatttctgtgactgctgccactcatatgcagagtcgtgcatccctgcccgaatcctgatgatgtgggacttcaagaagtactacgtcagcaatttctccaaacagctgctcgacagcatatggcaccagcccattttcaatttgctgagcatcggccaaagcctgtatgcgaaagccaaggagctggacagagtgaaggaaattcaggagcagctcttccatatcaagaagctgttgaagacctgtaggtttgctaacagtgcattaaaggagttcgagcaggtgccgggacacttgactgatgagctccacctgttctcccttgaggacctggtcaggatcaagaaagggctgctggcacccttactcaaggacattctgaaagcttcccttgcacatgtggctggctgtgagctgtgtcaaggaaagggctttatttgtgaattttgccagaatacgactgtcatcttcccatttcagacagcaacatgtagaagatgttcagcgtgcagggcttgctttcacaaacagtgcttccagtcctccgagtgcccccggtgtgcgaggatcacagcgaggagaaaacttctggaaagtgtggcctctgcagcaacatgatgcccctgagtactgtgaaaaagactgttcaacatgccttatgataacaccgatttgtgtctattattggtgacattgttttagatattgggtattgtatattaaggaaaaagatggtctatattctctttattgcatatacttaatgtttcaaaagaatgcagattctgtgtttaagcacagggctgatagttgtggttttgtttacaaatgttctgttttggctgctattggttttttaaagaggttttttatacttttgtatttgaatagttatgtttcactgatgctgagccagtttgtatgtgtgtgcatatatgtgaactgtaactgacaagatgaattactcagtttctctttctctaaagcttgtttgatgaaactggttggtcctttcagtgaacaaaaatatgaccccaaaaaaaaaaaaaaaaaaaaaaagcaatgcgaaggtgctaatcctgacgctcgtggtggccgcctgcggcttcgtcctctggagcagcaatgggcgacaaaggaagaacgaggccctcgccccaccgttgctggacgccgaacccgcg

SEQ ID NO: 430044 - DNA, 1891 bp, Homo sapiens
cgcataggtgcgtggtgctgggcccgggcgccgcggcaccggtgtaggagcgcgcatctccagagtttcttccatctgggcgacgtctcggtgcctgcggcgggaacggcgctttgcttccctgaggagcttctagagagctacggtggcccccgtgtgggaggcggggggcgtggcggcgtcggggcgtcgctgtcccctcctcggtagctctcctccctcccctttctgctgttaccgggagcgcggtggccacggaacgctgcccggagccgcgcgagggaggacccgacgcgcggcgtttacccagcgcagcgttccaccgctcgggtttggctggaatagctctccagacccccagctggccatgtggtgagttcagggcccaaatcaagtagtaccagcaatcagggaactcctatctgttttgaatggattcacaccagccacaagcctggaaagatggtgtcacaatctacagtcaggcaggattctcctgtggagccctgggaagggatcagcgatcactctggcattattgatggttcgcccagactcctgaacactgaccatcctccttgccaattagacatcaggctcatgaggcacaaagctgtctggattaacccccaggatgtgcagcaacagccgcaggacttgcaatctcaggtgccagcagcagggaacagtgggacccattttgtgacagatgctgcctctccctcaggcccttcaccttcgtgcctcggggactccctggcagagacaacgttgtctgaggataccacagactccgttggcagcgcttctccccatggctcgagtgaaaagagtagcagcttctctctgtcctcaacagaggtcaaagcctgtatgcgaaagccaaggagctggacagagtgaaggaaattcaggagcagctcttccatatcaagaagctgttgaagacctgtaggtttgctaacagtgcattaaaggagttcgagcaggtgccgggacacttgactgatgagctccacctgttctcccttgaggacctggtcaggatcaagaaagggctgctggcacccttactcaaggacattctgaaagcttcccttgcacatgtggctggctgtgagctgtgtcaaggaaagggctttatttgtgaattttgccagaatacgactgtcatcttcccatttcagacagcaacatgtagaagatgttcagcgtgcagggcttgctttcacaaacagtgcttccagtcctccgagtgcccccggtgtgcgaggatcacagcgaggagaaaacttctggaaagtgtggcctctgcagcaacatgatgcccctgagtactgtgaaaaagactgttcaacatgccttatgataacaccgatttgtgtctattattggtgacattgttttagatattgggtattgtatattaaggaaaaagatggtctatattctctttattgcatatacttaatgtttcaaaagaatgcagattctgtgtttaagcacagggctgatagttgtggttttgtttacaaatgttctgttttggctgctattggttttttaaagaggttttttatacttttgtatttgaatagttatgtttcactgatgctgagccagtttgtatgtgtgtgcatatatgtgaactgtaactgacaagatgaattactcagtttctctttctctaaagcttgtttgatgaaactggttggtcctttcagtgaacaaaaatatgaccccaaaaaaaaaaaaaaaaaaaaaaagcaatgcgaaggtgctaatcctgacgctcgtggtggccgcctgcggcttcgtcctctggagcagcaatgggcgacaaaggaagaacgaggccctcgccccaccgttgctggacgccgaacccgcg

SEQ ID NO: 430045 - DNA, 1903 bp, Homo sapiens
cgcataggtgcgtggtgctgggcccgggcgccgcggcaccggtgtaggagcgcgcatctccagagtttcttccatctgggcgacgtctcggtgcctgcggcgggaacggcgctttgcttccctgaggagcttctagagagctacggtggcccccgtgtgggaggcggggggcgtggcggcgtcggggcgtcgctgtcccctcctcggtagctctcctccctcccctttctgctgttaccgggagcgcggtggccacggaacgctgcccggagccgcgcgagggaggacccgacgcgcggcgtttacccagcgcagcgttccaccgctcgggtttggctggaatagctctccagacccccagctggccatgtggtgagttcagggcccaaatcaagtagtaccagcaatcagggaactcctatctgttttgaatggattcacaccagccacaagcctggaaagatggtgtcacaatctacagtcaggcaggattctcctgtggagccctgggaagggatcagcgatcactctggcattattgatggttcgcccagactcctgaacactgaccatcctccttgccaattagacatcaggctcatgaggcacaaagctgtctggattaacccccaggatgtgcagcaacagccgcaggacttgcaatctcaggtgccagcagcagggaacagtgggacccattttgtgacagatgctgcctctccctcaggcccttcaccttcgtgcctcggggactccctggcagagacaacgttgtctgaggataccacagactccgttggcagcgcttctccccatggctcgagtgaaaagagtagcagcttctctctgtcctcaacagaggtacacatggtccgcccaggatactctcatcgggtgtctctgcccacaagccctaggattttggccacctccccatatcctgagactgacagtgctttttttgagccttcccatctgacatctgctgctgatgaaggtgctgttcaagtcagtagaagaaccatttcttcgaattccttctcaccagaggtatttgtgctgcctgttgatgtagaaaaggaaaatgcccacttttatgttgcagatatgattatatcagcaatggagaaaatgaagtgtaacattctgagtcaacagcagacagagagctggagtaaagaagtcagtgggttacttgggagtgatcagcctgactctgaaatgacttttgataccaacataaagcaagagtctgggtcttctacttcttcatacagtggctatgaaggttgtgctgtgttacaggtcagcccagtgactgaaacacgtacttaccatgatgtgaaagagatttgcaaatgcgatgttgatgaatttgttattttagagcttggagattttaatgatatcacagaaacctgtagctgttcctgcagctcctctaagaggtatctgtcttctgtgcacagtgcacatagacccttgggctgtcacctctgaggcagtgtgaaacctaggcctctgacattctgggcccactttagctagttccagtgatttgttcccatgaatctaggagagtatcacctagaaatgaaacaatcacccccaaagtttctatagtgttttacaatatataaaaggcttttgtatgcattttcatttaatcctcatttcagttaaacaggttgggtgaattttatgtatgcatgtgtgtgtatatttatgtttttgttgttgttgtttttgagaccgagttttgctcttgtcacccagggaggcagaggttgcagtgagctgagattgcaccagtgcactccagcttgggtgacagagcgagactcgatctcaaaaccaacaaaagaaatgtaacaaaatgtaaataaaaatatgtttgttctct

SEQ ID NO: 430046 - DNA, 3017 bp, Homo sapiens
cgcataggtgcgtggtgctgggcccgggcgccgcggcaccggtgtaggagcgcgcatctccagagtttcttccatctgggcgacgtctcggtgcctgcggcgggaacggcgctttgcttccctgaggagcttctagagagctacggtggcccccgtgtgggaggcggggggcgtggcggcgtcggggcgtcgctgtcccctcctcggtagctctcctccctcccctttctgctgttaccgggagcgcggtggccacggaacgctgcccggagccgcgcgagggaggacccgacgcgcggcgtttacccagcgcagcgttccaccgctcgggtttggctggaatagctctccagacccccagctggccatgtggtgagttcagggcccaaatcaagtagtaccagcaatcagggaactcctatctgttttgaatggattcacaccagccacaagcctggaaagatggtgtcacaatctacagtcaggcaggattctcctgtggagccctgggaagggatcagcgatcactctggcattattgatggttcgcccagactcctgaacactgaccatcctccttgccaattagacatcaggctcatgaggcacaaagctgtctggattaacccccaggatgtgcagcaacagccgcaggacttgcaatctcaggtgccagcagcagggaacagtgggacccattttgtgacagatgctgcctctccctcaggcccttcaccttcgtgcctcggggactccctggcagagacaacgttgtctgaggataccacagactccgttggcagcgcttctccccatggctcgagtgaaaagagtagcagcttctctctgtcctcaacagaggtacacatggtccgcccaggatactctcatcgggtgtctctgcccacaagccctaggattttggccacctccccatatcctgagactgacagtgctttttttgagccttcccatctgacatctgctgctgatgaaggtgctgttcaagtcagtagaagaaccatttcttcgaattccttctcaccagaggtatttgtgctgcctgttgatgtagaaaaggaaaatgcccacttttatgttgcagatatgattatatcagcaatggagaaaatgaagtgtaacattctgagtcaacagcagacagagagctggagtaaagaagtcagtgggttacttgggagtgatcagcctgactctgaaatgacttttgataccaacataaagcaagagtctgggtcttctacttcttcatacagtggctatgaaggttgtgctgtgttacaggtcagcccagtgactgaaacacgtacttaccatgatgtgaaagagatttgcaaatgcgatgttgatgaatttgttattttagagcttggagattttaatgatatcacagaaacctgtagctgttcctgcagctcctctaagagtgtcacttatgagccagacttcaattctgcagaactattagccaaagagctgtaccgcgtgttccagaagtgctggatactgtcagtagttaattctcagctggcaggttccctgagtgcagctggctcgatagtcgtaaatgaagagtgtgtccgaaaagactttgaatccagtatgaatgtagtacaggaaattaaatttaagtctaggatcagagggactgaagactgggctcctcctagatttcaaatcatatttaatattcatccaccactcaagagggaccttgtggtggcagcccagaattttttctgtgccggctgtggaactccagtagagcctaagtttgtgaagcggctccggtactgcgaatacctagggaagtatttctgtgactgctgccactcatatgcagagtcgtgcatccctgcccgaatcctgatgatgtgggacttcaagaagtactacgtcagcaatttctccaaacagctgctcgacagcatatggcaccagcccattttcaatttgctgagcatcggccaaagcctgtatgcgaaagccaaggagctggacagagtgaaggaaattcaggagcagctcttccatatcaagaagctgttgaagacctgtaggtttgctaacagtgcattaaaggagttcgagcaggtgccgggacacttgactgatgagctccacctgttctcccttgaggacctggtcaggatcaagaaagggctgctggcacccttactcaaggacattctgaaagcttcccttgcacatgtggctggctgtgagctgtgtcaaggaaagggctttatttgtgaattttgccagaatacgactgtcatcttcccatttcagacagcaacatgtagaagatgttcagcgtgcagggcttgctttcacaaacagtgcttccagtcctccgagtgcccccggtgtgcgaggatcacagcgaggagaaaacttctggaaagtgtggcctctgcagcaacatgatgcccctgagtactgtgaaaaagactgttcaacatgccttatgataacaccgatttgtgtctattattggtgacattgttttagatattgggtattgtatattaaggaaaaagatggtctatattctctttattgcatatacttaatgtttcaaaagaatgcagattctgtgtttaagcacagggctgatagttgtggttttgtttacaaatgttctgttttggctgctattggttttttaaagaggttttttatacttttgtatttgaatagttatgtttcactgatgctgagccagtttgtatgtgtgtgcatatatgtgaactgtaactgacaagatgaattactcagtttctctttctctaaagcttgtttgatgaaactggttggtcctttcagtgaacaaaaatatgaccccaaaaaaaaaaaaaaaaaaaaaaagcaatgcgaaggtgctaatcctgacgctcgtggtggccgcctgcggcttcgtcctctggagcagcaatgggcgacaaaggaagaacgaggccctcgccccaccgttgctggacgccgaacccgcg

SEQ ID NO: 430047 - DNA, 2906 bp, Homo sapiens
tgtcctgaagtctcttgtttgtccagggcctttgctgcagcttatatgttcactagtaatctggcctgtgcctaccttttaatcccagctggaaaatctcagtaagaatgatgataaaataaaaaatggggatattgacctcctgtcactactgcatggactttgatggtttccaatcattactttctcctctgtgtcaatctgcctcttcgagaaattcatactcctgaatagctctccagacccccagctggccatgtggtgagttcagggcccaaatcaagtagtaccagcaatcagggaactcctatctgttttgaatggattcacaccagccacaagcctggaaagatggtgtcacaatctacagtcaggcaggattctcctgtggagccctgggaagggatcagcgatcactctggcattattgatggttcgcccagactcctgaacactgaccatcctccttgccaattagacatcaggctcatgaggcacaaagctgtctggattaacccccaggatgtgcagcaacagccgcaggacttgcaatctcaggtgccagcagcagggaacagtgggacccattttgtgacagatgctgcctctccctcaggcccttcaccttcgtgcctcggggactccctggcagagacaacgttgtctgaggataccacagactccgttggcagcgcttctccccatggctcgagtgaaaagagtagcagcttctctctgtcctcaacagaggtacacatggtccgcccaggatactctcatcgggtgtctctgcccacaagccctaggattttggccacctccccatatcctgagactgacagtgctttttttgagccttcccatctgacatctgctgctgatgaaggtgctgttcaagtcagtagaagaaccatttcttcgaattccttctcaccagaggtatttgtgctgcctgttgatgtagaaaaggaaaatgcccacttttatgttgcagatatgattatatcagcaatggagaaaatgaagtgtaacattctgagtcaacagcagacagagagctggagtaaagaagtcagtgggttacttgggagtgatcagcctgactctgaaatgacttttgataccaacataaagcaagagtctgggtcttctacttcttcatacagtggctatgaaggttgtgctgtgttacaggtcagcccagtgactgaaacacgtacttaccatgatgtgaaagagatttgcaaatgcgatgttgatgaatttgttattttagagcttggagattttaatgatatcacagaaacctgtagctgttcctgcagctcctctaagagtgtcacttatgagccagacttcaattctgcagaactattagccaaagagctgtaccgcgtgttccagaagtgctggatactgtcagtagttaattctcagctggcaggttccctgagtgcagctggctcgatagtcgtaaatgaagagtgtgtccgaaaagactttgaatccagtatgaatgtagtacaggaaattaaatttaagtctaggatcagagggactgaagactgggctcctcctagatttcaaatcatatttaatattcatccaccactcaagagggaccttgtggtggcagcccagaattttttctgtgccggctgtggaactccagtagagcctaagtttgtgaagcggctccggtactgcgaatacctagggaagtatttctgtgactgctgccactcatatgcagagtcgtgcatccctgcccgaatcctgatgatgtgggacttcaagaagtactacgtcagcaatttctccaaacagctgctcgacagcatatggcaccagcccattttcaatttgctgagcatcggccaaagcctgtatgcgaaagccaaggagctggacagagtgaaggaaattcaggagcagctcttccatatcaagaagctgttgaagacctgtaggtttgctaacagtgcattaaaggagttcgagcaggtgccgggacacttgactgatgagctccacctgttctcccttgaggacctggtcaggatcaagaaagggctgctggcacccttactcaaggacattctgaaagcttcccttgcacatgtggctggctgtgagctgtgtcaaggaaagggctttatttgtgaattttgccagaatacgactgtcatcttcccatttcagacagcaacatgtagaagatgttcagcgtgcagggcttgctttcacaaacagtgcttccagtcctccgagtgcccccggtgtgcgaggatcacagcgaggagaaaacttctggaaagtgtggcctctgcagcaacatgatgcccctgagtactgtgaaaaagactgttcaacatgccttatgataacaccgatttgtgtctattattggtgacattgttttagatattgggtattgtatattaaggaaaaagatggtctatattctctttattgcatatacttaatgtttcaaaagaatgcagattctgtgtttaagcacagggctgatagttgtggttttgtttacaaatgttctgttttggctgctattggttttttaaagaggttttttatacttttgtatttgaatagttatgtttcactgatgctgagccagtttgtatgtgtgtgcatatatgtgaactgtaactgacaagatgaattactcagtttctctttctctaaagcttgtttgatgaaactggttggtcctttcagtgaacaaaaatatgaccccaaaaaaaaaaaaaaaaaaaaaaagcaatgcgaaggtgctaatcctgacgctcgtggtggccgcctgcggcttcgtcctctggagcagcaatgggcgacaaaggaagaacgaggccctcgccccaccgttgctggacgccgaacccgcg

SEQ ID NO: 430048 - DNA, 2890 bp, Homo sapiens
cccctgcgaacttgatgctgtccgcttggaaaacgtggagaactttcagaggaggggttatttcgccttgagtgaaaattaagactcaaaggaaaagataaaataaaaaatggggatattgacctcctgtcactactgcatggactttgatggtttccaatcattactttctcctctgtgtcaatctgcctcttcgagaaattcatactcctgaatagctctccagacccccagctggccatgtggtgagttcagggcccaaatcaagtagtaccagcaatcagggaactcctatctgttttgaatggattcacaccagccacaagcctggaaagatggtgtcacaatctacagtcaggcaggattctcctgtggagccctgggaagggatcagcgatcactctggcattattgatggttcgcccagactcctgaacactgaccatcctccttgccaattagacatcaggctcatgaggcacaaagctgtctggattaacccccaggatgtgcagcaacagccgcaggacttgcaatctcaggtgccagcagcagggaacagtgggacccattttgtgacagatgctgcctctccctcaggcccttcaccttcgtgcctcggggactccctggcagagacaacgttgtctgaggataccacagactccgttggcagcgcttctccccatggctcgagtgaaaagagtagcagcttctctctgtcctcaacagaggtacacatggtccgcccaggatactctcatcgggtgtctctgcccacaagccctaggattttggccacctccccatatcctgagactgacagtgctttttttgagccttcccatctgacatctgctgctgatgaaggtgctgttcaagtcagtagaagaaccatttcttcgaattccttctcaccagaggtatttgtgctgcctgttgatgtagaaaaggaaaatgcccacttttatgttgcagatatgattatatcagcaatggagaaaatgaagtgtaacattctgagtcaacagcagacagagagctggagtaaagaagtcagtgggttacttgggagtgatcagcctgactctgaaatgacttttgataccaacataaagcaagagtctgggtcttctacttcttcatacagtggctatgaaggttgtgctgtgttacaggtcagcccagtgactgaaacacgtacttaccatgatgtgaaagagatttgcaaatgcgatgttgatgaatttgttattttagagcttggagattttaatgatatcacagaaacctgtagctgttcctgcagctcctctaagagtgtcacttatgagccagacttcaattctgcagaactattagccaaagagctgtaccgcgtgttccagaagtgctggatactgtcagtagttaattctcagctggcaggttccctgagtgcagctggctcgatagtcgtaaatgaagagtgtgtccgaaaagactttgaatccagtatgaatgtagtacaggaaattaaatttaagtctaggatcagagggactgaagactgggctcctcctagatttcaaatcatatttaatattcatccaccactcaagagggaccttgtggtggcagcccagaattttttctgtgccggctgtggaactccagtagagcctaagtttgtgaagcggctccggtactgcgaatacctagggaagtatttctgtgactgctgccactcatatgcagagtcgtgcatccctgcccgaatcctgatgatgtgggacttcaagaagtactacgtcagcaatttctccaaacagctgctcgacagcatatggcaccagcccattttcaatttgctgagcatcggccaaagcctgtatgcgaaagccaaggagctggacagagtgaaggaaattcaggagcagctcttccatatcaagaagctgttgaagacctgtaggtttgctaacagtgcattaaaggagttcgagcaggtgccgggacacttgactgatgagctccacctgttctcccttgaggacctggtcaggatcaagaaagggctgctggcacccttactcaaggacattctgaaagcttcccttgcacatgtggctggctgtgagctgtgtcaaggaaagggctttatttgtgaattttgccagaatacgactgtcatcttcccatttcagacagcaacatgtagaagatgttcagcgtgcagggcttgctttcacaaacagtgcttccagtcctccgagtgcccccggtgtgcgaggatcacagcgaggagaaaacttctggaaagtgtggcctctgcagcaacatgatgcccctgagtactgtgaaaaagactgttcaacatgccttatgataacaccgatttgtgtctattattggtgacattgttttagatattgggtattgtatattaaggaaaaagatggtctatattctctttattgcatatacttaatgtttcaaaagaatgcagattctgtgtttaagcacagggctgatagttgtggttttgtttacaaatgttctgttttggctgctattggttttttaaagaggttttttatacttttgtatttgaatagttatgtttcactgatgctgagccagtttgtatgtgtgtgcatatatgtgaactgtaactgacaagatgaattactcagtttctctttctctaaagcttgtttgatgaaactggttggtcctttcagtgaacaaaaatatgaccccaaaaaaaaaaaaaaaaaaaaaaagcaatgcgaaggtgctaatcctgacgctcgtggtggccgcctgcggcttcgtcctctggagcagcaatgggcgacaaaggaagaacgaggccctcgccccaccgttgctggacgccgaacccgcg

SEQ ID NO: 430049 - DNA, 2494 bp, Homo sapiens
cgcataggtgcgtggtgctgggcccgggcgccgcggcaccggtgtaggagcgcgcatctccagagtttcttccatctgggcgacgtctcggtgcctgcggcgggaacggcgctttgcttccctgaggagcttctagagagctacggtggcccccgtgtgggaggcggggggcgtggcggcgtcggggcgtcgctgtcccctcctcggtagctctcctccctcccctttctgctgttaccgggagcgcggtggccacggaacgctgcccggagccgcgcgagggaggacccgacgcgcggcgtttacccagcgcagcgttccaccgctcgggtttggctggacacatggtccgcccaggatactctcatcgggtgtctctgcccacaagccctaggattttggccacctccccatatcctgagactgacagtgctttttttgagccttcccatctgacatctgctgctgatgaaggtgctgttcaagtcagtagaagaaccatttcttcgaattccttctcaccagaggtatttgtgctgcctgttgatgtagaaaaggaaaatgcccacttttatgttgcagatatgattatatcagcaatggagaaaatgaagtgtaacattctgagtcaacagcagacagagagctggagtaaagaagtcagtgggttacttgggagtgatcagcctgactctgaaatgacttttgataccaacataaagcaagagtctgggtcttctacttcttcatacagtggctatgaaggttgtgctgtgttacaggtcagcccagtgactgaaacacgtacttaccatgatgtgaaagagatttgcaaatgcgatgttgatgaatttgttattttagagcttggagattttaatgatatcacagaaacctgtagctgttcctgcagctcctctaagagtgtcacttatgagccagacttcaattctgcagaactattagccaaagagctgtaccgcgtgttccagaagtgctggatactgtcagtagttaattctcagctggcaggttccctgagtgcagctggctcgatagtcgtaaatgaagagtgtgtccgaaaagactttgaatccagtatgaatgtagtacaggaaattaaatttaagtctaggatcagagggactgaagactgggctcctcctagatttcaaatcatatttaatattcatccaccactcaagagggaccttgtggtggcagcccagaattttttctgtgccggctgtggaactccagtagagcctaagtttgtgaagcggctccggtactgcgaatacctagggaagtatttctgtgactgctgccactcatatgcagagtcgtgcatccctgcccgaatcctgatgatgtgggacttcaagaagtactacgtcagcaatttctccaaacagctgctcgacagcatatggcaccagcccattttcaatttgctgagcatcggccaaagcctgtatgcgaaagccaaggagctggacagagtgaaggaaattcaggagcagctcttccatatcaagaagctgttgaagacctgtaggtttgctaacagtgcattaaaggagttcgagcaggtgccgggacacttgactgatgagctccacctgttctcccttgaggacctggtcaggatcaagaaagggctgctggcacccttactcaaggacattctgaaagcttcccttgcacatgtggctggctgtgagctgtgtcaaggaaagggctttatttgtgaattttgccagaatacgactgtcatcttcccatttcagacagcaacatgtagaagatgttcagcgtgcagggcttgctttcacaaacagtgcttccagtcctccgagtgcccccggtgtgcgaggatcacagcgaggagaaaacttctggaaagtgtggcctctgcagcaacatgatgcccctgagtactgtgaaaaagactgttcaacatgccttatgataacaccgatttgtgtctattattggtgacattgttttagatattgggtattgtatattaaggaaaaagatggtctatattctctttattgcatatacttaatgtttcaaaagaatgcagattctgtgtttaagcacagggctgatagttgtggttttgtttacaaatgttctgttttggctgctattggttttttaaagaggttttttatacttttgtatttgaatagttatgtttcactgatgctgagccagtttgtatgtgtgtgcatatatgtgaactgtaactgacaagatgaattactcagtttctctttctctaaagcttgtttgatgaaactggttggtcctttcagtgaacaaaaatatgaccccaaaaaaaaaaaaaaaaaaaaaaagcaatgcgaaggtgctaatcctgacgctcgtggtggccgcctgcggcttcgtcctctggagcagcaatgggcgacaaaggaagaacgaggccctcgccccaccgttgctggacgccgaacccgcg

SEQ ID NO: 430050 - DNA, 1520 bp, Homo sapiens
gttccttttgctacactgcagtttgcaatttccatcttccaaatccaggagtattttgggaaggttttgtttttctgacgtctgttccacaagagcagagctcatgaatggccatgatttaattccccaagtctctgctggagccttcccagctgtcatgaggttgagtatggctttatcatcatgaaacaagtcatcagagtctttgaatcttgcgtaggaattggaagtcggggtataccaggataggttttcagcaccaggtgtggcactcaccctccggtatgcttggcagagtttgtgaagcggctccggtactgcgaatacctagggaagtatttctgtgactgctgccactcatatgcagagtcgtgcatccctgcccgaatcctgatgatgtgggacttcaagaagtactacgtcagcaatttctccaaacagctgctcgacagcatatggcaccagcccattttcaatttgctgagcatcggccaaagcctgtatgcgaaagccaaggagctggacagagtgaaggaaattcaggagcagctcttccatatcaagaagctgttgaagacctgtaggtttgctaacagtgcattaaaggagttcgagcaggtgccgggacacttgactgatgagctccacctgttctcccttgaggacctggtcaggatcaagaaagggctgctggcacccttactcaaggacattctgaaagcttcccttgcacatgtggctggctgtgagctgtgtcaaggaaagggctttatttgtgaattttgccagaatacgactgtcatcttcccatttcagacagcaacatgtagaagatgttcagcgtgcagggcttgctttcacaaacagtgcttccagtcctccgagtgcccccggtgtgcgaggatcacagcgaggagaaaacttctggaaagtgtggcctctgcagcaacatgatgcccctgagtactgtgaaaaagactgttcaacatgccttatgataacaccgatttgtgtctattattggtgacattgttttagatattgggtattgtatattaaggaaaaagatggtctatattctctttattgcatatacttaatgtttcaaaagaatgcagattctgtgtttaagcacagggctgatagttgtggttttgtttacaaatgttctgttttggctgctattggttttttaaagaggttttttatacttttgtatttgaatagttatgtttcactgatgctgagccagtttgtatgtgtgtgcatatatgtgaactgtaactgacaagatgaattactcagtttctctttctctaaagcttgtttgatgaaactggttggtcctttcagtgaacaaaaatatgaccccaaaaaaaaaaaaaaaaaaaaaaagcaatgcgaaggtgctaatcctgacgctcgtggtggccgcctgcggcttcgtcctctggagcagcaatgggcgacaaaggaagaacgaggccctcgccccaccgttgctggacgccgaacccgcg

SEQ ID NO: 430051 - DNA, 1622 bp, Homo sapiens
cgcataggtgcgtggtgctgggcccgggcgccgcggcaccggtgtaggagcgcgcatctccagagtttcttccatctgggcgacgtctcggtgcctgcggcgggaacggcgctttgcttccctgaggagcttctagagagctacggtggcccccgtgtgggaggcggggggcgtggcggcgtcggggcgtcgctgtcccctcctcggtagctctcctccctcccctttctgctgttaccgggagcgcggtggccacggaacgctgcccggagccgcgcgagggaggacccgacgcgcggcgtttacccagcgcagcgttccaccgctcgggtttggctggaatagctctccagacccccagctggccatgtggtgagttcagggcccaaatcaagtagtaccagcaatcagggaactcctatctgttttgaatggattcacaccagccacaagcctggaaagatggtgtcacaatctacagtcaggcaggattctcctgtggagccctgggaagggatcagcgatcactctggcattattgatggttcgcccagactcctgaacactgaccatcctccttgccaattagacatcaggctcatgaggcacaaagctgtctggattaacccccaggatgtgcagcaacagccgcaggacttgcaatctcaggtgccagcagcagggaacagtgggacccattttgtgacagatgctgcctctccctcaggcccttcaccttcgtgcctcggggactccctggcagagacaacgttgtctgaggataccacagactccgttggcagcgcttctccccatggctcgagtgaaaagagtagcagcttctctctgtcctcaacagaggtacacatggtccgcccaggatactctcatcgggtgtctctgcccacaagccctaggattttggccacctccccatatcctgagactgacagtgctttttttgagccttcccatctgacatctgctgctgatgaaggtaattttagtaggtgacctccctcattcctctctgttcacacccttgcttcgccttgctctaaagcctgccttgttgtcttccccatgggacaatgcattgcctcatctaatattgtcagcagcccagccatctgggcggtcacaacaggtgaaatcaaatattggctttctccttagactgcagagaattgttatctttttagcttaatgtagttgataatcagtgccatgtgccatctttaagctggcgtctgccttcaggaacttagagctcattaaattgtctacaggggagagcatcggaagcactctcaagtcagtgtggaggttggaggtgtttccagacagccacggggtctgcatttcacaccagtacctagtaggtggtgaagtcacttcacttgttatatttacctgtatagaatctgacaggaaaatggtaagatttttaaacaataactacagtttcccctgaagactatacaaaacccctttttattaaaacaagggctctcactgctatgaagtaatgtacatattcctaagaccctaaaattcctaaaaattggataatccgtgcgaagtactactcaagagtcaataaattagctattattgttata

SEQ ID NO: 430052 - DNA, 2067 bp, Homo sapiens
  misc_feature (4)..(4): n is a, c, g, or t
ggcncgagcgcgcgctgtgcagaggtagccgtggaaggcggctcccggcgctggcaggcggccgcccccagacccgcagtgccatgcgcaggtgcttgcgcccgttcttcagttagcgatcttttggttaggaacgcaggtggacctgcttgtttggccatttgcattccggagtctgcctctggccgcggcctgtgggatggtcgttgggcttcctcgttcgttcagatgcttcgcgatttagcttgctacggacgccagcagccagcgcttgcagagagcgcggtccactctgctctgagggctttacaggggcaggcgctgctatttcccggcattttcctcgaggaaataggcacagagaggttagtcgcgcgctgaaggtcacacagccggcgggtgggcaagtcaggatctggccctgggcctgcagccctggagcttgggccccagggcgcgccctgcctctgtggctctgcctgtggatcgcagtcgcaggctcgctccttgtggggcctctagcctcccggcctggggctaatcctgggaggtgcgtggcatggggcactggctttgctgatgaggagaccagacttcagaggccgtgtcacctggcctgggccgcacagctggtgcatgccaagctcgcgtgcagacgaagctccagaggcctggctgtcaggagggttcctccccgaggacacacacgcaacctcctggaccgccaggctttagacttttaaaacttccatatgcaggaaaccccacaggacgcagccagcatctcgggtcatgggtgcacctgtcaccgcagtcctgggctaaacagtgaacaggagctctgtgtctctgtggtcgttacagttgtagtgaatgttccctgggagagtcctcttcagaagatatttgcggtattttcaacaaaggactctccaggatggaggagcaactacaagtcaggaaggaaaaggctgacaacccagttttttaaaaaacgggcaaaggacgtgaacagacaccatgcaatggcccagagtgcacaaatcatcatttctcccaggaatggggtgcccgagcccccaggcggctgaacttgagacttgtcacgtagtgttggtggaatgcagagcagctggagatcacctgctgcaggtgggtgcgtaactccgcacggccaagccgtttggaaagctgtagcatatgcatgagagtccggaaagttccgagagaaagtgtgtggatgcacccgccaaggacacacccaccgaggccacagctgcgatttcatagtgtgggaccccactggcaaagacacgctggctgctgtggccgtggtttctgtcccagccgtctgtttccatagaaaaagacccgtgcctgtatattccacgctttgcgcacctgctggaattcggggagaagaaccacgaggtgtccatgactgccctgaggctcctacagaggatgaagcgggactggatgcacacaggccggcgcccctcgggcctctgcggagcagcgctcctggttgcagccagaatgcatgacttcaggaggactgtgaaggaggtcatcagtgtggtcaaagtgtgtgagtccacgctgcggaagaggctcacggaatttgaagacacccccaccagtcagttgaccattgatgagttcatgaagatcgacctggaggaggagtgcgacccccccatcgaggagggagggcagacggaggcccgagagcctccccaggcctcttcgtgggaaggccccagtaccactcgtaggaggtctcagctctggcatggctgccccggatgtggccgagggggcttcaccctgtgtccttaggagggggtggccttgaggcagagccgtgcctcactgacccccaggggcctcatcctccccatggaatgggctgtatgtcctgccccaacttggcccgcagcaggccagacccccctacccccgcccagagctcagtagccagcctgggtcctgccagggcttctcgagggcttgggggaagaatagatttagtaaagcaggaagatctgttgttacttaacagaa

SEQ ID NO: 430053 - DNA, 174 bp, Homo sapiens
agagaaaaaaagcaaacatttccttaaataccaatgctgtttctggttgtgatctctccatctcaggtgaatgtgtacgtgcttggaaagacgtttcttctcttggcaagagagctctgcatcaatgcgccggccataggtaggcatctgggtgagatgctggggtgtccggca

SEQ ID NO: 430054 - DNA, 3976 bp, Homo sapiens
gggctgagtcctcaccccaggcctcgctcgccgctggagaccgcgctcactatccgaggaggaccctcctctgccccgcgtccagctttagtccccgactgcgttcatcgccaagggcccgcccactgccttaggtcgcgtcgccagccttgggtcccgtcgccagccttgggtcccgtccccggctgcactcaccgcgaggccccacccttagctctagtccccggtgtcgcccaccgacgaggccccgccccaaactccagtcccgggctgcgctcaccgccgtggccccgcccccaagcggccgcgtcgactcggctgcgctcaccggtaggccccgctcgggttccgccgaagcccagcccccgcaggtcgcccctccgacgccggcgcgccgcaagggaggccagctcgctcgcagtggggaggtcgcggctccagtcctcgcgtccccgccgtggtcccggtgcctgtcccatcccgcgggcgcggccgttgcgggcggcgcggcccgggcgcgcgcggcgaatctgcggctgcgaatcggctggagcggggcctcgcgagagcggcgaggcctgggcggctgggcctgggcgggcggcgcgggctgctccggaggctcgggtggcttgagagtcttgggaggctccgggcgctgcccgcgcggtcgccggcatgacgggccgcgtgtgccgcggttgcggcggcacggacatcgagctggacgcggcgcgcggggacgcggtgtgcaccgcctgcggctcagtgctggaggacaacatcatcgtgtccgaggtgcagttcgtggagagcagcggcggcggctcctcggccgtgggccagttcgtgtccctggacggtgctggcaaaaccccgactctgggtggcggcttccacgtgaatctggggaaggagtcgagagcgcagaccctgcagaatgggaggcgccacatccaccacctggggaaccagctgcagctgaaccagcactgcctggacaccgccttcaacttcttcaagatggccgtgagcaggcacctgacccgcggccggaagatggcccacgtgattgctgcctgcctctacctggtctgccgtacggagggcacgccgcacatgctcctggacctcagcgacctgctccaggtgaatgtgtacgtgcttggaaagacgtttcttctcttggcaagagagctctgcatcaatgcgccggccatagacccgtgcctgtatattccacgctttgcgcacctgctggaattcggggagaagaaccacgaggtgtccatgactgccctgaggctcctacagaggatgaagcgggactggatgcacacaggccggcgcccctcgggcctctgcggagcagcgctcctggttgcagccagaatgcatgacttcaggaggactgtgaaggaggtcatcagtgtggtcaaagtgtgtgagtccacgctgcggaagaggctcacggaatttgaagacacccccaccagtcagttgaccattgatgagttcatgaagatcgacctggaggaggagtgcgaccccccctcgtacacagctgggcagaggaagctgcggatgaagcagcttgaacaagtcctgtcaaaaaaactggaggaggttgaaggtgaaatatccagttaccaggatgcaattgagattgaactagaaaacagccggccaaaggccaaggggggcctggccagcctggcaaaagatggctccaccgaggacaccgcgtccagcttgtgtggcgaggaggacacagaggacgaggagctggaagccgcggccagccacctgaacaaagacttataccgggagctccttggtggtgcccccggcagctcggaagcagcaggaagccccgagtggggcggcagacctccggccctggggtccctgctggaccccctccccactgcagccagcctgggcatctcagactccatccgcgaatgcatctcctctcagagcagcgaccccaaagatgcttcaggagacggtgagctggacctcagtggcattgatgacctggagattgacaggtacatcctgaatgagtcggaagcccgcgtgaaggccgagctgtggatgagggagaacgccgagtacctgcgggaacagagggaaaaagaagcaagaatagcgaaagagaaggagctcggcatctacaaggaacacaagcccaagaagtcttgcaagcgacgggagccaattcaggccagtaccgccagggaggccatcgagaagatgctggagcagaagaagatctccagcaagatcaattatagcgtgctccggggcctcagcagcgccggcgggggcagtccgcacagggaggatgcacagcccgagcatagcgccagtgccaggaagctgtcacgaaggaggacgccggccagcagaagtggggctgaccctgtgaccagtgtggggaaaaggttgaggcctctggtgtctacgcagccagcaaagaaggtggccacgggagaggctttgctcccaagctctcccaccctcggagctgagcctgccaggccccaggcggtgctggtggagagcgggcccgtgtcataccacgccgacgaggaggctgacgaggaggagcctgacgaggaggacggggagccctgcgtcagtgccctgcagatgatgggcagcaacgactatggctgtgatggcgatgaggacgacggctactgaagtgtggcctccaggcaggtgatgtcctggcagggggcctcgcgggtctcctcagcatcagacgggcttccaggaccgcagcaggcaggccccagcgccgagactcctggtgacaggtggcacctgtcccacagccctcgtcccatgtggaacttaccattgggattgtgtttctattcagcaagggaaaccggaccaagcgtctgcatgtgtgtgatcagatgtgggccgggtgtgtgcagggctgggtcccgctgcctgccgtcgactcatccaaggaccctccaaggctggcagtgtggtgttgctactattaaggaaacaggcttggggcagccccactgctggtccaagtgtgtggagggctgagtgtgctggccctgtgactcaggaccagctctggagtctccagcccaccctccgcaccgtcccctcctgagcagcactcggcgccagcagcctctgccagagtggaagccagagccctgcaggtgtccggcgcagccgtgggagctgaggatctggcacttgagaggcagcagctccttgaaggtcctctgcctccagctgtggccctgcatccagatacctgcctcgtccgaggcagacacccccacccctgcctcctccagacccccctccccgctgcctgcaccgcctggagcagcatgggggtcagacccctgctccagggccacttgagttgtgggcccaggagccctgcggctgccggcaggtgaactgagtgcccgacagctgagaccggcgcccacccgtcctgagcatagctctgtaggcagtgcgggcatagcctgcatagtgtcctggcgctgggagttgcccgtggacagagccagagggcagtggcgctccctgtcagagctggatcaggccccccatcgaggagggagggcagacggaggcccgagagcctccccaggcctcttcgtgggaaggccccagtaccactcgtaggaggtctcagctctggcatggctgccccggatgtggccgagggggcttcaccctgtgtccttaggagggggtggccttgaggcagagccgtgcctcactgacccccaggggcctcatcctccccatggaatgggctgtatgtcctgccccaacttggcccgcagcaggccagacccccctacccccgcccagagctcagtagccagcctgggtcctgccagggcttctcgagggcttgggggaagaatagatttagtaaagcaggaagatctgttgttacttaacagaa

SEQ ID NO: 430055 - DNA, 4123 bp, Homo sapiens
  misc_feature (4)..(4): n is a, c, g, or t
ggcncgagcgcgcgctgtgcagaggtagccgtggaaggcggctcccggcgctggcaggcggccgcccccagacccgcagtgccatgcgcaggtgcttgcgcccgttcttcagttagcgatcttttggttaggaacgcaggtggacctgcttgtttggccatttgcattccggagtctgcctctggccgcggcctgtgggatggtcgttgggcttcctcgttcgttcagatgcttcgcgatttagcttgctacggacgccagcagccagcgcttgcagagagcgcggtccactctgctctgagggctttacaggggcaggcgctgctatttcccggcattttcctcgaggaaataggcacagagaggttagtcgcgcgctgaaggtcacacagccggcgggtgggcaagtcaggatctggccctgggcctgcagccctggagcttgggccccagggcgcgccctgcctctgtggctctgcctgtggatcgcagtcgcaggctcgctccttgtggggcctctagcctcccggcctggggctaatcctgggaggtgcgtggcatggggcactggctttgctgatgaggagaccagacttcagaggccgtgtcacctggcctgggccgcacagctggtgcatgccaagctcgcgtgcagacgaagctccagaggcctggctgtcaggagggttcctccccgaggacacacacgcaacctcctggaccgccaggctttagacttttaaaacttccatatgcaggaaaccccacaggacgcagccagcatctcgggtcatgggtgcacctgtcaccgcagtcctgggctaaacagtgaacaggagctctgtgtctctgtggtcgttacagttgtagtgaatgttccctgggagagtcctcttcagaagatatttgcggtattttcaacaaaggactctccaggatggaggagcaactacaagtcaggaaggaaaaggctgacaacccagttttttaaaaaacgggcaaaggacgtgaacagacaccatgcaatggcccagagtgcacaaatcatcatttctcccaggaatggggtgcccgagcccccaggcggctgaacttgagacttgtcacgtagtgttggtggaatgcagagcagctggagatcacctgctgcaggtgggtgcgtaactccgcacggccaagccgtttggaaagctgtagcatatgcatgagagtccggaaagttccgagagaaagtgtgtggatgcacccgccaaggacacacccaccgaggccacagctgcgatttcatagtgtgggaccccactggcaaagacacgctggctgctgtggccgtggtttctgtcccagccgtctgtttccatagaaaaagacccgtgcctgtatattccacgctttgcgcacctgctggaattcggggagaagaaccacgaggtgtccatgactgccctgaggctcctacagaggatgaagcgggactggatgcacacaggccggcgcccctcgggcctctgcggagcagcgctcctggttgcagccagaatgcatgacttcaggaggactgtgaaggaggtcatcagtgtggtcaaagtgtgtgagtccacgctgcggaagaggctcacggaatttgaagacacccccaccagtcagttgaccattgatgagttcatgaagatcgacctggaggaggagtgcgaccccccctcgtacacagctgggcagaggaagctgcggatgaagcagcttgaacaagtcctgtcaaaaaaactggaggaggttgaaggtgaaatatccagttaccaggatgcaattgagattgaactagaaaacagccggccaaaggccaaggggggcctggccagcctggcaaaagatggctccaccgaggacaccgcgtccagcttgtgtggcgaggaggacacagaggacgaggagctggaagccgcggccagccacctgaacaaagacttataccgggagctccttggtggtgcccccggcagctcggaagcagcaggaagccccgagtggggcggcagacctccggccctggggtccctgctggaccccctccccactgcagccagcctgggcatctcagactccatccgcgaatgcatctcctctcagagcagcgaccccaaagatgcttcaggagacggtgagctggacctcagtggcattgatgacctggagattgacaggtacatcctgaatgagtcggaagcccgcgtgaaggccgagctgtggatgagggagaacgccgagtacctgcgggaacagagggaaaaagaagcaagaatagcgaaagagaaggagctcggcatctacaaggaacacaagcccaagaagtcttgcaagcgacgggagccaattcaggccagtaccgccagggaggccatcgagaagatgctggagcagaagaagatctccagcaagatcaattatagcgtgctccggggcctcagcagcgccggcgggggcagtccgcacagggaggatgcacagcccgagcatagcgccagtgccaggaagctgtcacgaaggaggacgccggccagcagaagtggggctgaccctgtgaccagtgtggggaaaaggttgaggcctctggtgtctacgcagccagcaaagaaggtggccacgggagaggctttgctcccaagctctcccaccctcggagctgagcctgccaggccccaggcggtgctggtggagagcgggcccgtgtcataccacgccgacgaggaggctgacgaggaggagcctgacgaggaggacggggagccctgcgtcagtgccctgcagatgatgggcagcaacgactatggctgtgatggcgatgaggacgacggctactgaagtgtggcctccaggcaggtgatgtcctggcagggggcctcgcgggtctcctcagcatcagacgggcttccaggaccgcagcaggcaggccccagcgccgagactcctggtgacaggtggcacctgtcccacagccctcgtcccatgtggaacttaccattgggattgtgtttctattcagcaagggaaaccggaccaagcgtctgcatgtgtgtgatcagatgtgggccgggtgtgtgcagggctgggtcccgctgcctgccgtcgactcatccaaggaccctccaaggctggcagtgtggtgttgctactattaaggaaacaggcttggggcagccccactgctggtccaagtgtgtggagggctgagtgtgctggccctgtgactcaggaccagctctggagtctccagcccaccctccgcaccgtcccctcctgagcagcactcggcgccagcagcctctgccagagtggaagccagagccctgcaggtgtccggcgcagccgtgggagctgaggatctggcacttgagaggcagcagctccttgaaggtcctctgcctccagctgtggccctgcatccagatacctgcctcgtccgaggcagacacccccacccctgcctcctccagacccccctccccgctgcctgcaccgcctggagcagcatgggggtcagacccctgctccagggccacttgagttgtgggcccaggagccctgcggctgccggcaggtgaactgagtgcccgacagctgagaccggcgcccacccgtcctgagcatagctctgtaggcagtgcgggcatagcctgcatagtgtcctggcgctgggagttgcccgtggacagagccagagggcagtggcgctccctgtcagagctggatcaggccccccatcgaggagggagggcagacggaggcccgagagcctccccaggcctcttcgtgggaaggccccagtaccactcgtaggaggtctcagctctggcatggctgccccggatgtggccgagggggcttcaccctgtgtccttaggagggggtggccttgaggcagagccgtgcctcactgacccccaggggcctcatcctccccatggaatgggctgtatgtcctgccccaacttggcccgcagcaggccagacccccctacccccgcccagagctcagtagccagcctgggtcctgccagggcttctcgagggcttgggggaagaatagatttagtaaagcaggaagatctgttgttacttaacagaa

SEQ ID NO: 430056 - DNA, 3119 bp, Homo sapiens
  misc_feature (4)..(4): n is a, c, g, or t
ggcncgagcgcgcgctgtgcagaggtagccgtggaaggcggctcccggcgctggcaggcggccgcccccagacccgcagtgccatgcgcaggtgcttgcgcccgttcttcagttagcgatcttttggttaggaacgcaggtggacctgcttgtttggccatttgcattccggagtctgcctctggccgcggcctgtgggatggtcgttgggcttcctcgttcgttcagatgcttcgcgatttagcttgctacggacgccagcagccagcgcttgcagagagcgcggtccactctgctctgagggctttacaggggcaggcgctgctatttcccggcattttcctcgaggaaataggcacagagagacccgtgcctgtatattccacgctttgcgcacctgctggaattcggggagaagaaccacgaggtgtccatgactgccctgaggctcctacagaggatgaagcgggactggatgcacacaggccggcgcccctcgggcctctgcggagcagcgctcctggttgcagccagaatgcatgacttcaggaggactgtgaaggaggtcatcagtgtggtcaaagtgtgtgagtccacgctgcggaagaggctcacggaatttgaagacacccccaccagtcagttgaccattgatgagttcatgaagatcgacctggaggaggagtgcgaccccccctcgtacacagctgggcagaggaagctgcggatgaagcagcttgaacaagtcctgtcaaaaaaactggaggaggttgaaggtgaaatatccagttaccaggatgcaattgagattgaactagaaaacagccggccaaaggccaaggggggcctggccagcctggcaaaagatggctccaccgaggacaccgcgtccagcttgtgtggcgaggaggacacagaggacgaggagctggaagccgcggccagccacctgaacaaagacttataccgggagctccttggtggtgcccccggcagctcggaagcagcaggaagccccgagtggggcggcagacctccggccctggggtccctgctggaccccctccccactgcagccagcctgggcatctcagactccatccgcgaatgcatctcctctcagagcagcgaccccaaagatgcttcaggagacggtgagctggacctcagtggcattgatgacctggagattgacaggtacatcctgaatgagtcggaagcccgcgtgaaggccgagctgtggatgagggagaacgccgagtacctgcgggaacagagggaaaaagaagcaagaatagcgaaagagaaggagctcggcatctacaaggaacacaagcccaagaagtcttgcaagcgacgggagccaattcaggccagtaccgccagggaggccatcgagaagatgctggagcagaagaagatctccagcaagatcaattatagcgtgctccggggcctcagcagcgccggcgggggcagtccgcacagggaggatgcacagcccgagcatagcgccagtgccaggaagctgtcacgaaggaggacgccggccagcagaagtggggctgaccctgtgaccagtgtggggaaaaggttgaggcctctggtgtctacgcagccagcaaagaaggtggccacgggagaggctttgctcccaagctctcccaccctcggagctgagcctgccaggccccaggcggtgctggtggagagcgggcccgtgtcataccacgccgacgaggaggctgacgaggaggagcctgacgaggaggacggggagccctgcgtcagtgccctgcagatgatgggcagcaacgactatggctgtgatggcgatgaggacgacggctactgaagtgtggcctccaggcaggtgatgtcctggcagggggcctcgcgggtctcctcagcatcagacgggcttccaggaccgcagcaggcaggccccagcgccgagactcctggtgacaggtggcacctgtcccacagccctcgtcccatgtggaacttaccattgggattgtgtttctattcagcaagggaaaccggaccaagcgtctgcatgtgtgtgatcagatgtgggccgggtgtgtgcagggctgggtcccgctgcctgccgtcgactcatccaaggaccctccaaggctggcagtgtggtgttgctactattaaggaaacaggcttggggcagccccactgctggtccaagtgtgtggagggctgagtgtgctggccctgtgactcaggaccagctctggagtctccagcccaccctccgcaccgtcccctcctgagcagcactcggcgccagcagcctctgccagagtggaagccagagccctgcaggtgtccggcgcagccgtgggagctgaggatctggcacttgagaggcagcagctccttgaaggtcctctgcctccagctgtggccctgcatccagatacctgcctcgtccgaggcagacacccccacccctgcctcctccagacccccctccccgctgcctgcaccgcctggagcagcatgggggtcagacccctgctccagggccacttgagttgtgggcccaggagccctgcggctgccggcaggtgaactgagtgcccgacagctgagaccggcgcccacccgtcctgagcatagctctgtaggcagtgcgggcatagcctgcatagtgtcctggcgctgggagttgcccgtggacagagccagagggcagtggcgctccctgtcagagctggatcaggccccccatcgaggagggagggcagacggaggcccgagagcctccccaggcctcttcgtgggaaggccccagtaccactcgtaggaggtctcagctctggcatggctgccccggatgtggccgagggggcttcaccctgtgtccttaggagggggtggccttgaggcagagccgtgcctcactgacccccaggggcctcatcctccccatggaatgggctgtatgtcctgccccaacttggcccgcagcaggccagacccccctacccccgcccagagctcagtagccagcctgggtcctgccagggcttctcgagggcttgggggaagaatagatttagtaaagcaggaagatctgttgttacttaacagaa

SEQ ID NO: 430057 - DNA, 2709 bp, Homo sapiens
gtgggctgtcttcattgtcttaacgatgtctttcaaagggcagttcttaattttttggaaatccgttttatcagtgttttatggattctgcttttagaaccattagaaatgtttgccttatccaaggtcacaaagtttttcttttacgtttttgtctgaaatgtctgtactttaactctccccctaggtctgtgatctgctttgagctaacttccgcgtgcagtgcgaggtgtgggcttggagggggctcccgatttcctttttggccaccctggaaccggcccagggggggggggggggggggggggggggggggggggggggggggggggggggggggggcaccgtgcactgacagccgttctatgggttacctggcagcttggtagcatgttttttgtcacaaaagcgggcaccctggccctctgcctggttaacaggtggattgtgtacacctaggctccaccgaggacaccgcgtccagcttgtgtggcgaggaggacacagaggacgaggagctggaagccgcggccagccacctgaacaaagacttataccgggagctccttggtggtgcccccggcagctcggaagcagcaggaagccccgagtggggcggcagacctccggccctggggtccctgctggaccccctccccactgcagccagcctgggcatctcagactccatccgcgaatgcatctcctctcagagcagcgaccccaaagatgcttcaggagacggtgagctggacctcagtggcattgatgacctggagattgacaggtacatcctgaatgagtcggaagcccgcgtgaaggccgagctgtggatgagggagaacgccgagtacctgcgggaacagagggaaaaagaagcaagaatagcgaaagagaaggagctcggcatctacaaggaacacaagcccaagaagtcttgcaagcgacgggagccaattcaggccagtaccgccagggaggccatcgagaagatgctggagcagaagaagatctccagcaagatcaattatagcgtgctccggggcctcagcagcgccggcgggggcagtccgcacagggaggatgcacagcccgagcatagcgccagtgccaggaagctgtcacgaaggaggacgccggccagcagaagtggggctgaccctgtgaccagtgtggggaaaaggttgaggcctctggtgtctacgcagccagcaaagaaggtggccacgggagaggctttgctcccaagctctcccaccctcggagctgagcctgccaggccccaggcggtgctggtggagagcgggcccgtgtcataccacgccgacgaggaggctgacgaggaggagcctgacgaggaggacggggagccctgcgtcagtgccctgcagatgatgggcagcaacgactatggctgtgatggcgatgaggacgacggctactgaagtgtggcctccaggcaggtgatgtcctggcagggggcctcgcgggtctcctcagcatcagacgggcttccaggaccgcagcaggcaggccccagcgccgagactcctggtgacaggtggcacctgtcccacagccctcgtcccatgtggaacttaccattgggattgtgtttctattcagcaagggaaaccggaccaagcgtctgcatgtgtgtgatcagatgtgggccgggtgtgtgcagggctgggtcccgctgcctgccgtcgactcatccaaggaccctccaaggctggcagtgtggtgttgctactattaaggaaacaggcttggggcagccccactgctggtccaagtgtgtggagggctgagtgtgctggccctgtgactcaggaccagctctggagtctccagcccaccctccgcaccgtcccctcctgagcagcactcggcgccagcagcctctgccagagtggaagccagagccctgcaggtgtccggcgcagccgtgggagctgaggatctggcacttgagaggcagcagctccttgaaggtcctctgcctccagctgtggccctgcatccagatacctgcctcgtccgaggcagacacccccacccctgcctcctccagacccccctccccgctgcctgcaccgcctggagcagcatgggggtcagacccctgctccagggccacttgagttgtgggcccaggagccctgcggctgccggcaggtgaactgagtgcccgacagctgagaccggcgcccacccgtcctgagcatagctctgtaggcagtgcgggcatagcctgcatagtgtcctggcgctgggagttgcccgtggacagagccagagggcagtggcgctccctgtcagagctggatcaggccccccatcgaggagggagggcagacggaggcccgagagcctccccaggcctcttcgtgggaaggccccagtaccactcgtaggaggtctcagctctggcatggctgccccggatgtggccgagggggcttcaccctgtgtccttaggagggggtggccttgaggcagagccgtgcctcactgacccccaggggcctcatcctccccatggaatgggctgtatgtcctgccccaacttggcccgcagcaggccagacccccctacccccgcccagagctcagtagccagcctgggtcctgccagggcttctcgagggcttgggggaagaatagatttagtaaagcaggaagatctgttgttacttaacagaa

SEQ ID NO: 430058 - DNA, 2702 bp, Homo sapiens
gtgggctgtcttcattgtcttaacgatgtctttcaaagggcagttcttaattttttggaaatccgttttatcagtgttttatggattctgcttttagaaccattagaaatgtttgccttatccaaggtcacaaagtttttcttttacgtttttgtctgaaatgtctgtactttaactctccccctaggtctgtgatctgctttgagctaacttccgcgtgcagtgcgaggtgtgggctgaggctcgttctttggcacctgaccgccaggcaccgtgcactgacagccgttctatgggttacctggcagcttggtagcatgttttttgtcacaaaagcgggcaccctggccctctgcctggttaacaggtggattgtgtacacctaggctccaccgaggacaccgcgtccagcttgtgtggcgaggaggacacagaggacgaggagctggaagccgcggccagccacctgaacaaagacttataccgggagctccttggtggtgcccccggcagctcggaagcagcaggaagccccgagtggggcggcagacctccggccctggggtccctgctggaccccctccccactgcagccagcctgggcatctcagactccatccgcgaatgcatctcctctcagagcagcgaccccaaagatgcttcaggagacggtgagctggacctcagtggcattgatgacctggagattgacaggcgcgaccttagcatgccccggtgtgcgaaggctaaaagccagccccacttccctgtgctcgcccagtacatcctgaatgagtcggaagcccgcgtgaaggccgagctgtggatgagggagaacgccgagtacctgcgggaacagagggaaaaagaagcaagaatagcgaaagagaaggagctcggcatctacaaggaacacaagcccaagaagtcttgcaagcgacgggagccaattcaggccagtaccgccagggaggccatcgagaagatgctggagcagaagaagatctccagcaagatcaattatagcgtgctccggggcctcagcagcgccggcgggggcagtccgcacagggaggatgcacagcccgagcatagcgccagtgccaggaagctgtcacgaaggaggacgccggccagcagaagtggggctgaccctgtgaccagtgtggggaaaaggttgaggcctctggtgtctacgcagccagcaaagaaggtggccacgggagaggctttgctcccaagctctcccaccctcggagctgagcctgccaggccccaggcggtgctggtggagagcgggcccgtgtcataccacgccgacgaggaggctgacgaggaggagcctgacgaggaggacggggagccctgcgtcagtgccctgcagatgatgggcagcaacgactatggctgtgatggcgatgaggacgacggctactgaagtgtggcctccaggcaggtgatgtcctggcagggggcctcgcgggtctcctcagcatcagacgggcttccaggaccgcagcaggcaggccccagcgccgagactcctggtgacaggtggcacctgtcccacagccctcgtcccatgtggaacttaccattgggattgtgtttctattcagcaagggaaaccggaccaagcgtctgcatgtgtgtgatcagatgtgggccgggtgtgtgcagggctgggtcccgctgcctgccgtcgactcatccaaggaccctccaaggctggcagtgtggtgttgctactattaaggaaacaggcttggggcagccccactgctggtccaagtgtgtggagggctgagtgtgctggccctgtgactcaggaccagctctggagtctccagcccaccctccgcaccgtcccctcctgagcagcactcggcgccagcagcctctgccagagtggaagccagagccctgcaggtgtccggcgcagccgtgggagctgaggatctggcacttgagaggcagcagctccttgaaggtcctctgcctccagctgtggccctgcatccagatacctgcctcgtccgaggcagacacccccacccctgcctcctccagacccccctccccgctgcctgcaccgcctggagcagcatgggggtcagacccctgctccagggccacttgagttgtgggcccaggagccctgcggctgccggcaggtgaactgagtgcccgacagctgagaccggcgcccacccgtcctgagcatagctctgtaggcagtgcgggcatagcctgcatagtgtcctggcgctgggagttgcccgtggacagagccagagggcagtggcgctccctgtcagagctggatcaggccccccatcgaggagggagggcagacggaggcccgagagcctccccaggcctcttcgtgggaaggccccagtaccactcgtaggaggtctcagctctggcatggctgccccggatgtggccgagggggcttcaccctgtgtccttaggagggggtggccttgaggcagagccgtgcctcactgacccccaggggcctcatcctccccatggaatgggctgtatgtcctgccccaacttggcccgcagcaggccagacccccctacccccgcccagagctcagtagccagcctgggtcctgccagggcttctcgagggcttgggggaagaatagatttagtaaagcaggaagatctgttgttacttaacagaa

SEQ ID NO: 430059 - DNA, 1906 bp, Homo sapiens
gggctgagtcctcaccccaggcctcgctcgccgctggagaacgccgagtacctgcgggaacagagggaaaaagaagcaagaatagcgaaagagaaggagctcggcatctacaaggaacacaagcccaagaagtcttgcaagcgacgggagccaattcaggccagtaccgccagggaggccatcgagaagatgctggagcagaagaagatctccagcaagatcaattatagcgtgctccggggcctcagcagcgccggcgggggcagtccgcacagggaggatgcacagcccgagcatagcgccagtgccaggaagctgtcacgaaggaggacgccggccagcagaagtggggctgaccctgtgaccagtgtggggaaaaggttgaggcctctggtgtctacgcagccagcaaagaaggtggccacgggagaggctttgctcccaagctctcccaccctcggagctgagcctgccaggccccaggcggtgctggtggagagcgggcccgtgtcataccacgccgacgaggaggctgacgaggaggagcctgacgaggaggacggggagccctgcgtcagtgccctgcagatgatgggcagcaacgactatggctgtgatggcgatgaggacgacggctactgaagtgtggcctccaggcaggtgatgtcctggcagggggcctcgcgggtctcctcagcatcagacgggcttccaggaccgcagcaggcaggccccagcgccgagactcctggtgacaggtggcacctgtcccacagccctcgtcccatgtggaacttaccattgggattgtgtttctattcagcaagggaaaccggaccaagcgtctgcatgtgtgtgatcagatgtgggccgggtgtgtgcagggctgggtcccgctgcctgccgtcgactcatccaaggaccctccaaggctggcagtgtggtgttgctactattaaggaaacaggcttggggcagccccactgctggtccaagtgtgtggagggctgagtgtgctggccctgtgactcaggaccagctctggagtctccagcccaccctccgcaccgtcccctcctgagcagcactcggcgccagcagcctctgccagagtggaagccagagccctgcaggtgtccggcgcagccgtgggagctgaggatctggcacttgagaggcagcagctccttgaaggtcctctgcctccagctgtggccctgcatccagatacctgcctcgtccgaggcagacacccccacccctgcctcctccagacccccctccccgctgcctgcaccgcctggagcagcatgggggtcagacccctgctccagggccacttgagttgtgggcccaggagccctgcggctgccggcaggtgaactgagtgcccgacagctgagaccggcgcccacccgtcctgagcatagctctgtaggcagtgcgggcatagcctgcatagtgtcctggcgctgggagttgcccgtggacagagccagagggcagtggcgctccctgtcagagctggatcaggccccccatcgaggagggagggcagacggaggcccgagagcctccccaggcctcttcgtgggaaggccccagtaccactcgtaggaggtctcagctctggcatggctgccccggatgtggccgagggggcttcaccctgtgtccttaggagggggtggccttgaggcagagccgtgcctcactgacccccaggggcctcatcctccccatggaatgggctgtatgtcctgccccaacttggcccgcagcaggccagacccccctacccccgcccagagctcagtagccagcctgggtcctgccagggcttctcgagggcttgggggaagaatagatttagtaaagcaggaagatctgttgttacttaacagaa

SEQ ID NO: 430060 - DNA, 1589 bp, Homo sapiens
aaagatagctagtcgagccgcgtgttatcggcgagggacctgctggacagttgtggggaaaaggttgaggcctctggtgtctacgcagccagcaaagaaggtggccacgggagaggctttgctcccaagctctcccaccctcggagctgagcctgccaggccccaggcggtgctggtggagagcgggcccgtgtcataccacgccgacgaggaggctgacgaggaggagcctgacgaggaggacggggagccctgcgtcagtgccctgcagatgatgggcagcaacgactatggctgtgatggcgatgaggacgacggctactgaagtgtggcctccaggcaggtgatgtcctggcagggggcctcgcgggtctcctcagcatcagacgggcttccaggaccgcagcaggcaggccccagcgccgagactcctggtgacaggtggcacctgtcccacagccctcgtcccatgtggaacttaccattgggattgtgtttctattcagcaagggaaaccggaccaagcgtctgcatgtgtgtgatcagatgtgggccgggtgtgtgcagggctgggtcccgctgcctgccgtcgactcatccaaggaccctccaaggctggcagtgtggtgttgctactattaaggaaacaggcttggggcagccccactgctggtccaagtgtgtggagggctgagtgtgctggccctgtgactcaggaccagctctggagtctccagcccaccctccgcaccgtcccctcctgagcagcactcggcgccagcagcctctgccagagtggaagccagagccctgcaggtgtccggcgcagccgtgggagctgaggatctggcacttgagaggcagcagctccttgaaggtcctctgcctccagctgtggccctgcatccagatacctgcctcgtccgaggcagacacccccacccctgcctcctccagacccccctccccgctgcctgcaccgcctggagcagcatgggggtcagacccctgctccagggccacttgagttgtgggcccaggagccctgcggctgccggcaggtgaactgagtgcccgacagctgagaccggcgcccacccgtcctgagcatagctctgtaggcagtgcgggcatagcctgcatagtgtcctggcgctgggagttgcccgtggacagagccagagggcagtggcgctccctgtcagagctggatcaggccccccatcgaggagggagggcagacggaggcccgagagcctccccaggcctcttcgtgggaaggccccagtaccactcgtaggaggtctcagctctggcatggctgccccggatgtggccgagggggcttcaccctgtgtccttaggagggggtggccttgaggcagagccgtgcctcactgacccccaggggcctcatcctccccatggaatgggctgtatgtcctgccccaacttggcccgcagcaggccagacccccctacccccgcccagagctcagtagccagcctgggtcctgccagggcttctcgagggcttgggggaagaatagatttagtaaagcaggaagatctgttgttacttaacagaa

SEQ ID NO: 430061 - DNA, 3157 bp, Homo sapiens
gggctgagtcctcaccccaggcctcgctcgccgctggagaccgcgctcactatccgaggaggaccctcctctgccccgcgtccagctttagtccccgactgcgttcatcgccaagggcccgcccactgccttaggtcgcgtcgccagccttgggtcccgtcgccagccttgggtcccgtccccggctgcactcaccgcgaggccccacccttagctctagtccccggtgtcgcccaccgacgaggccccgccccaaactccagtcccgggctgcgctcaccgccgtggccccgcccccaagcggccgcgtcgactcggctgcgctcaccggtaggccccgctcgggttccgccgaagcccagcccccgcaggtcgcccctccgacgccggcgcgccgcaagggaggccagctcgctcgcagtggggaggtcgcggctccagtcctcgcgtccccgccgtggtcccggtgcctgtcccatcccgcgggcgcggccgttgcgggcggcgcggcccgggcgcgcgcggcgaatctgcggctgcgaatcggctggagcggggcctcgcgagagcggcgaggcctgggcggctgggcctgggcgggcggcgcgggctgctccggaggctcgggtggcttgagagtcttgggaggctccgggcgctgcccgcgcggtcgccggcatgacgggccgcgtgtgccgcggttgcggcggcacggacatcgagctggacgcggcgcgcggggacgcggtgtgcaccgcctgcggctcagtgctggaggacaacatcatcgtgtccgaggtgcagttcgtggagagcagcggcggcggctcctcggccgtgggccagttcgtgtccctggacggtgctggcaaaaccccgactctgggtggcggcttccacgtgaatctggggaaggagtcgagagcgcagaccctgcagaatgggaggcgccacatccaccacctggggaaccagctgcagctgaaccagcactgcctggacaccgccttcaacttcttcaagatggccgtgagcaggcacctgacccgcggccggaagatggcccacgtgattgctgcctgcctctacctggtctgccgtacggagggcacgccgcacatgctcctggacctcagcgacctgctccaggtgaatgtgtacgtgcttggaaagacgtttcttctcttggcaagagagctctgcatcaatgcgccggccatagacccgtgcctgtatattccacgctttgcgcacctgctggaattcggggagaagaaccacgaggtgtccatgactgccctgaggctcctacagaggatgaagcgggactggatgcacacaggccggcgcccctcgggcctctgcggagcagcgctcctggttgcagccagaatgcatgacttcaggaggactgtgaaggaggtcatcagtgtggtcaaagtgtgtgagtccacgctgcggaagaggctcacggaatttgaagacacccccaccagtcagttgaccattgatgagttcatgaagatcgacctggaggaggagtgcgaccccccctcgtacacagctgggcagaggaagctgcggatgaagcagcttgaacaagtcctgtcaaaaaaactggaggaggttgaaggtgaaatatccagttaccaggatgcaattgagattgaactagaaaacagccggccaaaggccaaggggggcctggccagcctggcaaaagatggctccaccgaggacaccgcgtccagcttgtgtggcgaggaggacacagaggacgaggagctggaagccgcggccagccacctgaacaaagacttataccgggagctccttggtggtgcccccggcagctcggaagcagcaggaagccccgagtggggcggcagacctccggccctggggtccctgctggaccccctccccactgcagccagcctgggcatctcagactccatccgcgaatgcatctcctctcagagcagcgaccccaaagatgcttcaggagacggtgagctggacctcagtggcattgatgacctggagattgacaggtacatcctgaatgagtcggaagcccgcgtgaaggccgagctgtggatgagggagaacgccgagtacctgcgggaacagagggaaaaagaagcaagaatagcgaaagagaaggagctcggcatctacaaggaacacaagcccaagaagtcttgcaagcgacgggagccaattcaggccagtaccgccagggaggccatcgagaagatgctggagcagaagaagatctccagcaagatcaattatagcgtgctccggggcctcagcagcgccggcgggggcagtccgcacagggaggatgcacagcccgagcatagcgccagtgccaggaagctgtcacgaaggaggacgccggccagcagaagtggggctgaccctgtgaccagtgtggggaaaaggttgaggcctctggtgtctacgcagccagcaaagaaggtggccacgggagaggctttgctcccaagctctcccaccctcggagctgagcctgccaggccccaggcggtgctggtggagagcgggcccgtgtcataccacgccgacgaggaggctgacgaggaggagcctgacgaggaggacggggagccctgcgtcagtgccctgcagatgatgggcagcaacgactatggctgtgatggcgatgaggacgacggctactgaagtgtggcctccaggcaggtgatgtcctggcagggggcctcgcgggtctcctcagcatcagacgggcttccaggaccgcagcaggcaggccccagcgccgagactcctggtgacaggtggcacctgtcccacagccctcgtcccatgtggaacttaccattgggattgtgtttctattcagcaagggaaaccggaccaagcgtctgcatgtgtgtgatcagatgtgggccgggtgtgtgcagggctgggtcccgctgcctgccgtcgactcatcctccccatggaatgggctgtatgtcctgccccaacttggcccgcagcaggccagacccccctacccccgcccagagctcagtagccagcctgggtcctgccagggcttctcgagggcttgggggaagaatagatttagtaaagcaggaagatctgttgttacttaacagaa

SEQ ID NO: 430062 - DNA, 2912 bp, Homo sapiens
gggctgagtcctcaccccaggcctcgctcgccgctggagaccgcgctcactatccgaggaggaccctcctctgccccgcgtccagctttagtccccgactgcgttcatcgccaagggcccgcccactgccttaggtcgcgtcgccagccttgggtcccgtcgccagccttgggtcccgtccccggctgcactcaccgcgaggccccacccttagctctagtccccggtgtcgcccaccgacgaggccccgccccaaactccagtcccgggctgcgctcaccgccgtggccccgcccccaagcggccgcgtcgactcggctgcgctcaccggtaggccccgctcgggttccgccgaagcccagcccccgcaggtcgcccctccgacgccggcgcgccgcaagggaggccagctcgctcgcagtggggaggtcgcggctccagtcctcgcgtccccgccgtggtcccggtgcctgtcccatcccgcgggcgcggccgttgcgggcggcgcggcccgggcgcgcgcggcgaatctgcggctgcgaatcggctggagcggggcctcgcgagagcggcgaggcctgggcggctgggcctgggcgggcggcgcgggctgctccggaggctcgggtggcttgagagtcttgggaggctccgggcgctgcccgcgcggtcgccggcatgacgggccgcgtgtgccgcggttgcggcggcacggacatcgagctggacgcggcgcgcggggacgcggtgtgcaccgcctgcggctcagtgctggaggacaacatcatcgtgtccgaggtgcagttcgtggagagcagcggcggcggctcctcggccgtgggccagttcgtgtccctggacggtgctggcaaaaccccgactctgggtggcggcttccacgtgaatctggggaaggagtcgagagcgcagaccctgcagaatgggaggcgccacatccaccacctggggaaccagctgcagctgaaccagcactgcctggacaccgccttcaacttcttcaagatggccgtgagcaggcacctgacccgcggccggaagatggcccacgtgattgctgcctgcctctacctggtctgccgtacggagggcacgccgcacatgctcctggacctcagcgacctgctccaggtgaatgtgtacgtgcttggaaagacgtttcttctcttggcaagagagctctgcatcaatgcgccggccatagacccgtgcctgtatattccacgctttgcgcacctgctggaattcggggagaagaaccacgaggtgtccatgactgccctgaggctcctacagaggatgaagcgggactggatgcacacaggccggcgcccctcgggcctctgcggagcagcgctcctggttgcagccagaatgcatgacttcaggaggactgtgaaggaggtcatcagtgtggtcaaagtgtgtgagtccacgctgcggaagaggctcacggaatttgaagacacccccaccagtcagttgaccattgatgagttcatgaagatcgacctggaggaggagtgcgaccccccctcgtacacagctgggcagaggaagctgcggatgaagcagcttgaacaagtcctgtcaaaaaaactggaggaggttgaaggtgaaatatccagttaccaggatgcaattgagattgaactagaaaacagccggccaaaggccaaggggggcctggccagcctggcaaaagatggctccaccgaggacaccgcgtccagcttgtgtggcgaggaggacacagaggacgaggagctggaagccgcggccagccacctgaacaaagacttataccgggagctccttggtggtgcccccggcagctcggaagcagcaggaagccccgagtggggcggcagacctccggccctggggtccctgctggaccccctccccactgcagccagcctgggcatctcagactccatccgcgaatgcatctcctctcagagcagcgaccccaaagatgcttcaggagacggtgagctggacctcagtggcattgatgacctggagattgacaggtacatcctgaatgagtcggaagcccgcgtgaaggccgagctgtggatgagggagaacgccgagtacctgcgggaacagagggaaaaagaagcaagaatagcgaaagagaaggagctcggcatctacaaggaacacaagcccaagaagtcttgcaagcgacgggagccaattcaggccagtaccgccagggaggccatcgagaagatgctggagcagaagaagatctccagcaagatcaattatagcgtgctccggggcctcagcagcgccggcgggggcagtccgcacagggaggatgcacagcccgagcatagcgccagtgccaggaagctgtcacgaaggaggacgccggccagcagaagtggggctgaccctgtgaccagtgtggggaaaaggttgaggcctctggtgtctacgcagccagcaaagaaggtggccacgggagaggctttgctcccaagctctcccaccctcggagctgagcctgccaggccccaggcggtgctggtggagagcgggcccgtgtcataccacgccgacgaggaggctgacgaggaggagcctgacgaggaggacggggagccctgcgtcagtgccctgcagatgatgggcagcaacgcctgtgtccttaggagggggtggccttgaggcagagccgtgcctcactgacccccaggggcctcatcctccccatggaatgggctgtatgtcctgccccaacttggcccgcagcaggccagacccccctacccccgcccagagctcagtagccagcctgggtcctgccagggcttctcgagggcttgggggaagaatagatttagtaaagcaggaagatctgttgttacttaacagaa

SEQ ID NO: 430063 - DNA, 2484 bp, Homo sapiens
gggctgagtcctcaccccaggcctcgctcgccgctggagaccgcgctcactatccgaggaggaccctcctctgccccgcgtccagctttagtccccgactgcgttcatcgccaagggcccgcccactgccttaggtcgcgtcgccagccttgggtcccgtcgccagccttgggtcccgtccccggctgcactcaccgcgaggccccacccttagctctagtccccggtgtcgcccaccgacgaggccccgccccaaactccagtcccgggctgcgctcaccgccgtggccccgcccccaagcggccgcgtcgactcggctgcgctcaccggtaggccccgctcgggttccgccgaagcccagcccccgcaggtcgcccctccgacgccggcgcgccgcaagggaggccagctcgctcgcagtggggaggtcgcggctccagtcctcgcgtccccgccgtggtcccggtgcctgtcccatcccgcgggcgcggccgttgcgggcggcgcggcccgggcgcgcgcggcgaatctgcggctgcgaatcggctggagcggggcctcgcgagagcggcgaggcctgggcggctgggcctgggcgggcggcgcgggctgctccggaggctcgggtggcttgagagtcttgggaggctccgggcgctgcccgcgcggtcgccggcatgacgggccgcgtgtgccgcggttgcggcggcacggacatcgagctggacgcggcgcgcggggacgcggtgtgcaccgcctgcggctcagtgctggaggacaacatcatcgtgtccgaggtgcagttcgtggagagcagcggcggcggctcctcggccgtgggccagttcgtgtccctggacggtgctggcaaaaccccgactctgggtggcggcttccacgtgaatctggggaaggagtcgagagcgcagaccctgcagaatgggaggcgccacatccaccacctggggaaccagctgcagctgaaccagcactgcctggacaccgccttcaacttcttcaagatggccgtgagcaggcacctgacccgcggccggaagatggcccacgtgattgctgcctgcctctacctggtctgccgtacggagggcacgccgcacatgctcctggacctcagcgacctgctccaggtgaatgtgtacgtgcttggaaagacgtttcttctcttggcaagagagctctgcatcaatgcgccggccatagacccgtgcctgtatattccacgctttgcgcacctgctggaattcggggagaagaaccacgaggtgtccatgactgccctgaggctcctacagaggatgaagcgggactggatgcacacaggccggcgcccctcgggcctctgcggagcagcgctcctggttgcagccagaatgcatgacttcaggaggactgtgaaggaggtcatcagtgtggtcaaagtgtgtgagtccacgctgcggaagaggctcacggaatttgaagacacccccaccagtcagttgaccattgatgagttcatgaagatcgacctggaggaggagtgcgaccccccctcgtacacagctgggcagaggaagctgcggatgaagcagcttgaacaagtcctgtcaaaaaaactggaggaggttgaaggtgaaatatccagttaccaggatgcaattgagattgaactagaaaacagccggccaaaggccaaggggggcctggccagcctggcaaaagatggctccaccgaggacaccgcgtccagcttgtgtggcgaggaggacacagaggacgaggagctggaagccgcggccagccacctgaacaaagacttataccgggagctccttggtggtgcccccggcagctcggaagcagcaggaagccccgagtggggcggcagacctccggccctggggtccctgctggaccccctccccactgcagccagcctgggcatctcagactccatccgcgaatgcatctcctctcagagcagcgaccccaaagatgcttcaggagacggtgagctggacctcagtggcattgatgacctggagattgacaggtacatcctgaatgagtcggaagcccgcgtgaaggccgagctgtggatgagggagaacgccgagtacctgcgggaacagagggaaaaagaagcaagaatagcgaaagagaaggagctcggcatctacaaggaacacaagcccaagaagtcttgcaagcgacgggagccaattcaggccagtaccgccagggaggccatcgagaagatgctggagcagaagaagatctccagcaagatcaattatagcgtgctccggggcctcagcagcgccggcgggggcagtcctgccccaacttggcccgcagcaggccagacccccctacccccgcccagagctcagtagccagcctgggtcctgccagggcttctcgagggcttgggggaagaatagatttagtaaagcaggaagatctgttgttacttaacagaa

SEQ ID NO: 430064 - DNA, 1485 bp, Homo sapiens
gggctgagtcctcaccccaggcctcgctcgccgctggagaccgcgctcactatccgaggaggaccctcctctgccccgcgtccagctttagtccccgactgcgttcatcgccaagggcccgcccactgccttaggtcgcgtcgccagccttgggtcccgtcgccagccttgggtcccgtccccggctgcactcaccgcgaggccccacccttagctctagtccccggtgtcgcccaccgacgaggccccgccccaaactccagtcccgggctgcgctcaccgccgtggccccgcccccaagcggccgcgtcgactcggctgcgctcaccggtaggccccgctcgggttccgccgaagcccagcccccgcaggtcgcccctccgacgccggcgcgccgcaagggaggccagctcgctcgcagtggggaggtcgcggctccagtcctcgcgtccccgccgtggtcccggtgcctgtcccatcccgcgggcgcggccgttgcgggcggcgcggcccgggcgcgcgcggcgaatctgcggctgcgaatcggctggagcggggcctcgcgagagcggcgaggcctgggcggctgggcctgggcgggcggcgcgggctgctccggaggctcgggtggcttgagagtcttgggaggctccgggcgctgcccgcgcggtcgccggcatgacgggccgcgtgtgccgcggttgcggcggcacggacatcgagctggacgcggcgcgcggggacgcggtgtgcaccgcctgcggctcagtgctggaggacaacatcatcgtgtccgaggtgcagttcgtggagagcagcggcggcggctcctcggccgtgggccagttcgtgtccctggacggtgctggcaaaaccccgactctgggtggcggcttccacgtgaatctggggaaggagtcgagagcgcagaccctgcagaatgggaggcgccacatccaccacctggggaaccagctgcagctgaaccagcactgcctggacaccgccttcaacttcttcaagatggccgtgagcaggcacctgacccgcggccggaagatggcccacgtgattgctgcctgcctctacctggtctgccgtacggagggcacgccgcacatgctcctggacctcagcgacctgctccaggtagacagcctccgtcctgcatctttccccacctggggttgtgacctgggggttgtgaccagggttgtgaccggggtgtaccccaggtgcctccacgcatctcagtggccggtctgtgctgcctgcccagtcaggaagttttggtctgtaggatgaggggccttcatgacatgggggtcacagtccgagacttgtgggagtgtgggtctccatggcaggagggcacctgccaatgctgggcacggttgggtgttagctaggcctgggtgaacagtgaacttttgtcctacacaaaggagattattttcaattaaaaaatttttttgtgagtaaaaa

SEQ ID NO: 430065 - DNA, 2298 bp, Homo sapiens
aggcggcggcggcggcggcggcggcggcggctcctcagagtccggctcaggctccggctgcggctccagcccgcgatgccccattccgtgaccctgcgcgggccttcgccctggggcttccgcctggtgggcggccgggacttcagcgcgcccctcaccatctcacgggtccatgctggcagcaaggctgcattggctgccctgtgcccaggagacctgatccaggccatcaatggtgagagcacagagctcatgacacacctggaggcacagaaccgcatcaagggctgccacgatcacctcacactgtctgtgagcaggcctgagggcaggagctggcccagtgcccctgatgacagcaaggctcaggcacacaggatccacatcgatcctgagatccaggacggcagcccaacaaccagcaggcggccctcaggcaccgggactgggccagaagatggcagaccaagcctgggatctccatatggacaaccccctcgctttccagtccctcacaatggcagcagcgaggccaccctgccagcccagatgagcaccctgcatgtgtctccaccccccagcgctgacccagccagaggcctcccgcggagccgggactgcagagtcgacctgggctccgaggtgtacaggatgctgcgggagccagccgagcccgtggccgcggagcccaagcagtcaggctccttccgctacttgcagggcatgctagaggccggcgagggcggggattggcccgggcctggcggcccccggaacctcaagcccacggccagcaagctgggcgctccgctgagcggcctgcaggggctgcccgagtgcacgcgctgcggccacggcatcgtgggcaccatcgtcaaggcacgggacaagctctaccatcccgagtgcttcatgtgcagtgactgcggcctgaacctcaagcagcgtggttacttctttctggacgagcggctctactgtgagagccacgccaaggcgcgcgtgaagccgcccgagggctacgacgtggtggcggtgtaccccaatgccaaggtggaactcgtctgagctgggaccctgctcccacgcctgcttcttaaggtccctgctcggccggtgtaaatatgtttcaccctgtccctctaataaagctcctctgctccaccttgaacctgtcacctggcctgccaccctcctgcgcaggccatgcatggctcccgagtacagtagtatctgcttaggtgccaggcatgtcctaggctctgggtgcagtagtgagcaggacgggtaccatgctgccctgaagggggccacagcctgggtggaaggcagacctgaatcacaacgggccagctctagtaatacgaaggtgaggtctgggatgctgcgtgcggcgcgacgacaggaggtatgacctgggtggggtcagggaaagtcttagctgagaactaagagatgagggaggcacaaactctgcacgggggaactgtgtgtgcaaaggtgagctgggggcgagaaaggcctctgtggccgtcatcggcactagcgggttgggggtggtggtggggtgctggcagcctcaggagcgatcgctcccctggagagggtgattgagtgtggagatcaccggggccgccgcgggccgtctgcacttctgttccaggtttttctggcattttctgttccaggtttcttccacccacgagcactttattctcctccgagacccccttttcttccccttcctctctcccccaccagggggcgcgcttaaatttccagacagagaccagaaggaaggtttagaaagaaaagaacacttgcccagggcagctttgccctccaagaggctccctcctgtctctaagtcaattccacccctcctcgaagtcccggcttccacccctctcctcagagtcccggcgtttacctcgtggtgtgtttgccttgggcctttcatgccccggctgcacacatcgtctgtgaattgtggctgttcactcccgaggatgtgtcctagactccgggtcgcgtggatctaccctctagtttacttgctcgggagaagaaactgactcgttttatttagtgcctatttagcgagcccagagtaacgtacatttgtgctgttttcaattttgtgctatcgcaaatcacaaaaaaactgttatcaattcacattcatcatcagcacgagacccatttccttgtgctcctgccagctcaggatattatgtttcttttttcatttttgccagtctgttaagtaaaatgtcatatgcgtttgttttaatttgc

SEQ ID NO: 430066 - DNA, 2224 bp, Homo sapiens
gcttccaggagttcccaccagtaggagctcccacccaaaagaatggggtcactggcagcttttgaaccagctgggcactggctggagaggctgggtccatgctggcagcaaggctgcattggctgccctgtgcccaggagacctgatccaggccatcaatggtgagagcacagagctcatgacacacctggaggcacagaaccgcatcaagggctgccacgatcacctcacactgtctgtgagcaggcctgagggcaggagctggcccagtgcccctgatgacagcaaggctcaggcacacaggatccacatcgatcctgagatccaggacggcagcccaacaaccagcaggcggccctcaggcaccgggactgggccagaagatggcagaccaagcctgggatctccatatggacaaccccctcgctttccagtccctcacaatggcagcagcgaggccaccctgccagcccagatgagcaccctgcatgtgtctccaccccccagcgctgacccagccagaggcctcccgcggagccgggactgcagagtcgacctgggctccgaggtgtacaggatgctgcgggagccagccgagcccgtggccgcggagcccaagcagtcaggctccttccgctacttgcagggcatgctagaggccggcgagggcggggattggcccgggcctggcggcccccggaacctcaagcccacggccagcaagctgggcgctccgctgagcggcctgcaggggctgcccgagtgcacgcgctgcggccacggcatcgtgggcaccatcgtcaaggcacgggacaagctctaccatcccgagtgcttcatgtgcagtgactgcggcctgaacctcaagcagcgtggttacttctttctggacgagcggctctactgtgagagccacgccaaggcgcgcgtgaagccgcccgagggctacgacgtggtggcggtgtaccccaatgccaaggtggaactcgtctgagctgggaccctgctcccacgcctgcttcttaaggtccctgctcggccggtgtaaatatgtttcaccctgtccctctaataaagctcctctgctccaccttgaacctgtcacctggcctgccaccctcctgcgcaggccatgcatggctcccgagtacagtagtatctgcttaggtgccaggcatgtcctaggctctgggtgcagtagtgagcaggacgggtaccatgctgccctgaagggggccacagcctgggtggaaggcagacctgaatcacaacgggccagctctagtaatacgaaggtgaggtctgggatgctgcgtgcggcgcgacgacaggaggtatgacctgggtggggtcagggaaagtcttagctgagaactaagagatgagggaggcacaaactctgcacgggggaactgtgtgtgcaaaggtgagctgggggcgagaaaggcctctgtggccgtcatcggcactagcgggttgggggtggtggtggggtgctggcagcctcaggagcgatcgctcccctggagagggtgattgagtgtggagatcaccggggccgccgcgggccgtctgcacttctgttccaggtttttctggcattttctgttccaggtttcttccacccacgagcactttattctcctccgagacccccttttcttccccttcctctctcccccaccagggggcgcgcttaaatttccagacagagaccagaaggaaggtttagaaagaaaagaacacttgcccagggcagctttgccctccaagaggctccctcctgtctctaagtcaattccacccctcctcgaagtcccggcttccacccctctcctcagagtcccggcgtttacctcgtggtgtgtttgccttgggcctttcatgccccggctgcacacatcgtctgtgaattgtggctgttcactcccgaggatgtgtcctagactccgggtcgcgtggatctaccctctagtttacttgctcgggagaagaaactgactcgttttatttagtgcctatttagcgagcccagagtaacgtacatttgtgctgttttcaattttgtgctatcgcaaatcacaaaaaaactgttatcaattcacattcatcatcagcacgagacccatttccttgtgctcctgccagctcaggatattatgtttcttttttcatttttgccagtctgttaagtaaaatgtcatatgcgtttgttttaatttgc

SEQ ID NO: 430067 - DNA, 1050 bp, Homo sapiens
aggcggcggcggcggcggcggcggcggcggctcctcagagtccggctcaggctccggctgcggctccagcccgcgatgccccattccgtgaccctgcgcgggccttcgccctggggcttccgcctggtgggcggccgggacttcagcgcgcccctcaccatctcacgggtccatgctggcagcaaggctgcattggctgccctgtgcccaggagacctgatccaggccatcaatggtgagagcacagagctcatgacacacctggaggcacagaaccgcatcaagggctgccacgatcacctcacactgtctgtgagcaggcctgagggcaggagctggcccagtgcccctgatgacagcaaggctcaggcacacaggatccacatcgatcctgagatccaggacggcagcccaacaaccagcaggcggccctcaggcaccgggactgggccagaagatggcagaccaagcctgggatctccatatggacaaccccctcgctttccagtccctcacaatggcagcagcgaggccaccctgccagcccagatgagcaccctgcatgtgtctccaccccccagcgctgacccagccagaggcctcccgcggagccgggactgcagagtcgacctgggctccgaggtgtacaggatgctgcgggagccagccgagcccgtggccgcggagcccaagcagtcaggctccttccgctacttgcagggcatgctagaggccggcgagggcggggcaccatcgtcaaggcacgggacaagctctaccatcccgagtgcttcatgtgcagtgactgcggcctgaacctcaagcagcgtggttacttctttctggacgagcggctctactgtgagagccacgccaaggcgcgcgtgaagccgcccgagggctacgacgtggtggcggtgtaccccaatgccaaggtggaactcgtctgagctgggaccctgctcccacgcctgcttcttaaggtccctgctcggccggtgtaaatatgtttcaccctgtccctctaataaagctcctctgctccacctt

SEQ ID NO: 430068 - DNA, 1204 bp, Homo sapiens
  misc_feature (1186)..(1186): n is a, c, g, or t
aggcggcggcggcggcggcggcggcggcggctcctcagagtccggctcaggctccggctgcggctccagcccgcgatgccccattccgtgaccctgcgcgggccttcgccctggggcttccgcctggtgggcggccgggacttcagcgcgcccctcaccatctcacgggtccatgctggcagcaaggctgcattggctgccctgtgcccaggagacctgatccaggccatcaatggtgagagcacagagctcatgacacacctggaggcacagaaccgcatcaagggctgccacgatcacctcacactgtctgtgagcaggcctgagggcaggagctggcccagtgcccctgatgacagcaaggctcaggcacacaggatccacatcgatcctgagatccaggacggcagcccaacaaccagcaggcggccctcaggcaccgggactgggccagaagatggcagaccaagcctgggatctccatatggacaaccccctcgctttccagtccctcacaatggcagcagcgaggccaccctgccagcccagatgagcaccctgcatgtgtctccaccccccagcgctgacccagccagaggcctcccgcggagccgggactgcagagtcgacctgggctccgaggtgtacaggatgctgcgggagccagccgagcccgtggccgcggagcccaagcagtcaggctccttccgctacttgcagggcatgctagaggccggcgagggcggggattggcccgggcctggcggcccccggaacctcaagcccacggccagcaagctgggcgctccgctgagcggcctgcaggggctgcccgagtgcacgcgctgcggccacggcatcgtgggcaccatcgtcaaggcacgggacaagctctaccatcccgagtgcttcatgtgcagtgactgcggcctgaacctcaagcagcgtggttacttctttctggacgagcggctctactgtgagagccacgccaaggcgcgcgtgaagccgcccgagggctacgacgtggtggcggtgtaccccaatgccaaggtggaactcgtctgagctgggaccctgctcccacgcctgcttcttaaggtccctgctcggccggtgtaaatatgtttcaccctgtccctctaataaagctcctctgctccaccttaaaaaaaaaacaaagganaaaaaaaagtcgtatcga

SEQ ID NO: 430069 - DNA, 1207 bp, Homo sapiens
aggcggcggcggcggcggcggcggcggcggctcctcagagtccggctcaggctccggctgcggctccagcccgcgatgccccattccgtgaccctgcgcgggccttcgccctggggcttccgcctggtgggcggccgggacttcagcgcgcccctcaccatctcacgggtccatgctggcagcaaggctgcattggctgccctgtgcccaggagacctgatccaggccatcaatggtgagagcacagagctcatgacacacctggaggcacagaaccgcatcaagggctgccacgatcacctcacactgtctgtgagcaggcctgagggcaggagctggcccagtgcccctgatgacagcaaggctcaggcacacaggatccacatcgatcctgagatccaggacggcagcccaacaaccagcaggcggccctcaggcaccgggactgggccagaagatggcagaccaagcctgggatctccatatggacaaccccctcgctttccagtccctcacaatggcagcagcgaggccaccctgccagcccagatgagcaccctgcatgtgtctccaccccccagcgctgacccagccagaggcctcccgcggagccgggactgcagagtcgacctgggctccgaggtgtacaggatgctgcgggagccagccgagcccgtggccgcggagcccaagcagtcaggctccttccgctacttgcagggcatgctagaggccggcgagggcggggattggcccgggcctggcggcccccggaacctcaagcccacggccagcaagctgggcgctccgctgagcggcctgcaggggctgcccgagtgcacgcgctgcggccacggcatcgtgggcaccatcgtcaaggcacgggacaagctctaccatcccgagtgcttcatgtgcagtgactgcggcctgaacctcaagcagcgtggttacttctttctggacgagcggctctactgtgagagccacgccaaggcgcgcgtgaagccgcccgagggctacgacgtggtggcggtgtaccccaatgccaaggtggaactcgtctgagctgggaccctgctcccacgcctgcttcttaaggtccctgctcggccggtgtaaatatgtttcaccctgtccctctaataaagctcctctgctccaccttaaaaaaaaaaataataatagttagataaggtcgtatcga

SEQ ID NO: 430070 - DNA, 970 bp, Homo sapiens
  misc_feature (952)..(952): n is a, c, g, or t
aggcggcggcggcggcggcggcggcggcggctcctcagagtccggctcaggctccggctgcggctccagcccgcgatgccccattccgtgaccctgcgcgggccttcgccctggggcttccgcctggtgggcggccgggacttcagcgcgcccctcaccatctcacgggacggcagcccaacaaccagcaggcggccctcaggcaccgggactgggccagaagatggcagaccaagcctgggatctccatatggacaaccccctcgctttccagtccctcacaatggcagcagcgaggccaccctgccagcccagatgagcaccctgcatgtgtctccaccccccagcgctgacccagccagaggcctcccgcggagccgggactgcagagtcgacctgggctccgaggtgtacaggatgctgcgggagccagccgagcccgtggccgcggagcccaagcagtcaggctccttccgctacttgcagggcatgctagaggccggcgagggcggggattggcccgggcctggcggcccccggaacctcaagcccacggccagcaagctgggcgctccgctgagcggcctgcaggggctgcccgagtgcacgcgctgcggccacggcatcgtgggcaccatcgtcaaggcacgggacaagctctaccatcccgagtgcttcatgtgcagtgactgcggcctgaacctcaagcagcgtggttacttctttctggacgagcggctctactgtgagagccacgccaaggcgcgcgtgaagccgcccgagggctacgacgtggtggcggtgtaccccaatgccaaggtggaactcgtctgagctgggaccctgctcccacgcctgcttcttaaggtccctgctcggccggtgtaaatatgtttcaccctgtccctctaataaagctcctctgctccaccttaaaaaaaaaacaaagganaaaaaaaagtcgtatcga

SEQ ID NO: 430071 - DNA, 155 bp, Homo sapiens
gatccctcaaatctcacccagtcccactctgacccctgacacttgatccttgggtcttagctggttgcattctgactcataagccttaccagaccccaagtccacagggtgaaggctggaactgcatcccttcctcctctatttctttctccctc

SEQ ID NO: 430072 - DNA, 1168 bp, Homo sapiens
aggcggcggcggcggcggcggcggcggcggctcctcagagtccggctcaggctccggctgcggctccagcccgcgatgccccattccgtgaccctgcgcgggccttcgccctggggcttccgcctggtgggcggccgggacttcagcgcgcccctcaccatctcacgggtccatgctggcagcaaggctgcattggctgccctgtgcccaggagacctgatccaggccatcaatggtgagagcacagagctcatgacacacctggaggcacagaaccgcatcaagggctgccacgatcacctcacactgtctgtgagcaggcctgagggcaggagctggcccagtgcccctgatgacagcaaggctcaggcacacaggatccacatcgatcctgagatccaggacggcagcccaacaaccagcaggcggccctcaggcaccgggactgggccagaagatggcagaccaagcctgggatctccatatggacaaccccctcgctttccagtccctcacaatggcagcagcgaggccaccctgccagcccagatgagcaccctgcatgtgtctccaccccccagcgctgacccagccagaggcctcccgcggagccgggactgcagagtcgacctgggctccgaggtgtacaggatgctgcgggagccagccgagcccgtggccgcggagcccaagcagtcaggctccttccgctacttgcagggcatgctagaggccggcgagggcggggattggcccgggcctggcggcccccggaacctcaagcccacggccagcaagctgggcgctccgctgagcggcctgcaggggctgcccgagtgcacgcgctgcggccacggcatcgtgggcaccatcgtcaaggcacgggacaagctctaccatcccgagtgcttcatgtgcagtgactgcggcctgaacctcaagcagcgtggttacttctttctggacgagcggctctactgtgagagccacgccaaggcgcgcgtgaagccgcccgagggctacgacgtggtggcggtgtaccccaatgccaaggtggaactcgtctgagctgggaccctgctcccacgcctgcttcttaaggtccctgctcggccggtgtaaatatgtttcaccctgtccctctaataaagctcctctgctccacctt

SEQ ID NO: 430073 - DNA, 1967 bp, Homo sapiens
tgtaggacaggagttacgttttttgagttcccagccatgggcctacccagtacccaccacagttcaggaaggacggcagcccaacaaccagcaggcggccctcaggcaccgggactgggccagaagatggcagaccaagcctgggatctccatatggacaaccccctcgctttccagtccctcacaatggcagcagcgaggccaccctgccagcccagatgagcaccctgcatgtgtctccaccccccagcgctgacccagccagaggcctcccgcggagccgggactgcagagtcgacctgggctccgaggtgtacaggatgctgcgggagccagccgagcccgtggccgcggagcccaagcagtcaggctccttccgctacttgcagggcatgctagaggccggcgagggcggggattggcccgggcctggcggcccccggaacctcaagcccacggccagcaagctgggcgctccgctgagcggcctgcaggggctgcccgagtgcacgcgctgcggccacggcatcgtgggcaccatcgtcaaggcacgggacaagctctaccatcccgagtgcttcatgtgcagtgactgcggcctgaacctcaagcagcgtggttacttctttctggacgagcggctctactgtgagagccacgccaaggcgcgcgtgaagccgcccgagggctacgacgtggtggcggtgtaccccaatgccaaggtggaactcgtctgagctgggaccctgctcccacgcctgcttcttaaggtccctgctcggccggtgtaaatatgtttcaccctgtccctctaataaagctcctctgctccaccttgaacctgtcacctggcctgccaccctcctgcgcaggccatgcatggctcccgagtacagtagtatctgcttaggtgccaggcatgtcctaggctctgggtgcagtagtgagcaggacgggtaccatgctgccctgaagggggccacagcctgggtggaaggcagacctgaatcacaacgggccagctctagtaatacgaaggtgaggtctgggatgctgcgtgcggcgcgacgacaggaggtatgacctgggtggggtcagggaaagtcttagctgagaactaagagatgagggaggcacaaactctgcacgggggaactgtgtgtgcaaaggtgagctgggggcgagaaaggcctctgtggccgtcatcggcactagcgggttgggggtggtggtggggtgctggcagcctcaggagcgatcgctcccctggagagggtgattgagtgtggagatcaccggggccgccgcgggccgtctgcacttctgttccaggtttttctggcattttctgttccaggtttcttccacccacgagcactttattctcctccgagacccccttttcttccccttcctctctcccccaccagggggcgcgcttaaatttccagacagagaccagaaggaaggtttagaaagaaaagaacacttgcccagggcagctttgccctccaagaggctccctcctgtctctaagtcaattccacccctcctcgaagtcccggcttccacccctctcctcagagtcccggcgtttacctcgtggtgtgtttgccttgggcctttcatgccccggctgcacacatcgtctgtgaattgtggctgttcactcccgaggatgtgtcctagactccgggtcgcgtggatctaccctctagtttacttgctcgggagaagaaactgactcgttttatttagtgcctatttagcgagcccagagtaacgtacatttgtgctgttttcaattttgtgctatcgcaaatcacaaaaaaactgttatcaattcacattcatcatcagcacgagacccatttccttgtgctcctgccagctcaggatattatgtttcttttttcatttttgccagtctgttaagtaaaatgtcatatgcgtttgttttaatttgc

SEQ ID NO: 430074 - DNA, 1493 bp, Homo sapiens
aggcggcggcggcggcggcggcggcggcggctcctcagagtccggctcaggctccggctgcggctccagcccgcgatgccccattccgtgaccctgcgcgggccttcgccctggggcttccgcctggtgggcggccgggacttcagcgcgcccctcaccatctcacgggtccatgctggcagcaaggctgcattggctgccctgtgcccaggagacctgatccaggccatcaatggtgagagcacagagctcatgacacacctggaggcacagaaccgcatcaagggctgccacgatcacctcacactgtctgtgagcaggcctgagggcaggagctggcccagtgcccctgatgacagcaaggctcaggcacacaggatccacatcgatcctgagatccaggacggcagcccaacaaccagcaggcggccctcaggcaccgggactgggccagaagatggcagaccaagcctgggatctccatatggacaaccccctcgctttccagtccctcacaatggcagcagcgaggccaccctgccagcccagatgagcaccctgcatgtgtctccaccccccagcgctgacccagccagaggcctcccgcggagccgggactgcagagtcgacctgggctccgaggtgtacaggatgctgcgggagccagccgagcccgtggccgcggagcccaagcagtcaggctccttccgctacttgcagggcatgctagaggccggcgagggcgggtaagacgcctgccacctgtccccatctgccttcccactccctgcagtgcccaggttgccccctagcgaccccacgtcccgcctcgcagtcacctgccctcttcggtctctgcggcccggtcccacgcccttgctacaaccttgctacgccctggcttcccgattccctctccaccccctgtcgctgcccctcaccccacgcccgccaaacccgttccccagtctcgggtgccgatggcccgtctggcgcccaaccaaacaccccgcagaaatggagttctgacctcctcaccccgttcatgccacctacgctccgggtttcaggggattggcccgggcctggcggcccccggaacctcaagcccacggccagcaagctgggcgctccgctgagcggcctgcaggggctgcccgagtgcacgcgctgcggccacggcatcgtgggcaccatcgtcaaggcacgggacaagctctaccatcccgagtgcttcatgtgcagtgactgcggcctgaacctcaagcagcgtggttacttctttctggacgagcggctctactgtgagagccacgccaaggcgcgcgtgaagccgcccgagggctacgacgtggtggcggtgtaccccaatgccaaggtggaactcgtctgagctgggaccctgctcccacgcctgcttcttaaggtccctgctcggccggtgtaaatatgtttcaccctgtccctctaataaagctcctctgctccacctt

SEQ ID NO: 430075 - DNA, 1007 bp, Homo sapiens
aggcggcggcggcggcggcggcggcggcggctcctcagagtccggctcaggctccggctgcggctccagcccgcgatgccccattccgtgaccctgcgcgggccttcgccctggggcttccgcctggtgggcggccgggacttcagcgcgcccctcaccatctcacgggtccatgctggcagcaaggctgcattggctgccctgtgcccaggagacctgatccaggccatcaatggtgagagcacagagctcatgacacacctggaggcacagaaccgcatcaagggctgccacgatcacctcacactgtctgtgagcaggcctgagggcaggagctggcccagtgcccctgatgacagcaaggctcaggcacacaggatccacatcgatcctgagatccaggacggcagcccaacaaccagcaggcggccctcaggcaccgggactgggccagaagatggcagaccaagcctgggatctccatatggacaaccccctcgctttccagtccctcacaatggcagcagcgaggccaccctgccagcccagatgagcaccctgcatgtgtctccaccccccagcgctgacccagccagaggcctcccgcggagccgggactgcagagtcgacctgggctccgaggtgtacaggatgctgcgggagccagccgagcccgtggccgcggagcccaagcagtcaggctccttccgctacttgcagggcatgctagaggccggcgagggcgcggatggccggctgggggccggaactagccacggcagaagcgggggcccgtgaaggcgcagggtgcgaagagcccgtgcgccggtcggggccacgtaggcggcaagctccaccagggtagggaggatgggcaaacacaggggacttgcaacggtcagtaaacccggggacgcccggactggggcccacagaggcagcgcgccaggtaagggggaacgcaaaaacggcgcccagcatagtggctgcggcggcgggtgggggta

SEQ ID NO: 430076 - DNA, 597 bp, Homo sapiens
atggcgcagctatctagtagaaagccacggtcaccgtgggttgacagtggcttagtgaagttaaacaaacattgggataccgacacagacaacttgagacagtttttttaatcttttaatcagtgtagctatgtgctgctgctgctcaagagctggatccatacaggttgtgtgtcatctgtcctcttgaggttcaggagattctaaattgaatattccacggtttgggacagcatccggaagttttccctatgactttatattttgtattatgtcaaatgttatggcagggcccaaatagcatagccacaagtttggtttatgtgggcataaaattctaaccaaaccccagacatagggagtcatttggagaaagcctgtatgtggtgttttaacctaataaagttgatgagagagaaggggagaggaagcgaacataaagcgggtcaagtgtagtgcatcttttgtatctcaggcgtggcttcttcagtggaccaagctgcaatgcagtattgacttgacagagcctctacttctgtctcaaaatggctccaaatgatttctgtactgcaaaataaagccaaattctggaaacta

SEQ ID NO: 430077 - DNA, 963 bp, Homo sapiens
ccccccccccaggctacttcggctaggtacgaggctgcgtggtgtgaatcggccgaggtggcggtcggtctcgccttgtcgccagctccattttcctctctttctcttcccctttccttcgcgcccaagagcgcctcccagcctcgtagggtggtcacggagcccctgcgccttttccttgctcgggtcctgcgtccgcgcctgccccgccatgaatgaggagtacgacgtgatcgtgctgggcaccggcctgacggaatgtatcctgtcaggtataatgtcagtgaatggcaagaaagttcttcatatggatcgaaacccttactacggaggagagagtgcatctataacaccattggaagatttatacaaaagatttaaaataccaggatcaccacccgagtcaatggggagaggaagagactggaatgttgacttgattcccaagttccttatggctaatggtcagctggttaagatgctgctttatacagaggtaactcgctatctggattttaaagtgactgaagggagctttgtctataagggtggaaaaatctacaaggttccttccactgaagcagaagccctggcatctagcctaatgggattgtttgaaaaacgtcgcttcaggaaattcctagtgtatgttgccaacttcgatgaaaaagatccaagaacttttgaaggcattgatcctaagaagaccacaatgcgagatgtgtataagaaatttgatttgggtcaagacgttatagattttactggtcatgctcttgcactttacagaactgatgattacttagatcaacggttatgaaccttatagattaacttaacgggaacctgggcaaatgggaaagccaaactatcacctaggctggagaatgcccagatgacgcagcgacaaggcgccaagcggacctggaattgtcacaggaaacgtaaaaaacaaacgtacaa

SEQ ID NO: 430078 - DNA, 386 bp, Homo sapiens
gtatcatttgtttctagatatctacgtctgcatgatctcctttgcgcacaatgtagcagcacaagggaagtacattgctatagttagtacaactgtggaaaccaaggagcctgagaaggaaatcagaccagctttggagctcttggaaccaattgaacagaaatttgttagcatcagtgacctcctggtaccaaaagacttgggaacagaaagccagatctttatttcccgcacatatgatgccaccactcattttgagacaacgtgtgatgacattaaaaacatcttttggtggcagggatagaagttacctcaatatctttaggttgtgacagaaagtattattagataagagcctgactagacaggaattctggcggggatcc

SEQ ID NO: 430079 - DNA, 699 bp, Homo sapiens
tggatgcgagggtttatttctggctctctcctcgtttcattggtccatacgtttgtcattatgccagtaccacactgaattgatcactgtagctttttagtgagtgagtcctccagctttgctgttcttcttttaagattgttttggttgttccagaattcaatcccttgggaaccaatatgaacttgaggatggtttttgatatcttaacaatactaagtcttccaaactatgaacatgggatgtgtttccctatatccttgtccgcttcagtgtcttcttaaatgctttgttatagattgctcgctgtaagcagctcatctgtgaccccagctacgtaaaagatcgggtagaaaaagtgggccaggtgatcagagttatttgcatcctcagccaccccatcaagaacaccaatgatgccaactcctgccagatcattattccacagaaccaagtcaatcgaaagtcaggtgaggtttgaagaccagcagatgttggtagaattttgtaagatataatttgctttgtgttttatcccaaattcctaattttgtatgctgtattagtgaacagaccttggtttacatatgggggaaaaaaatctttgtacctcctcctgctccggcagcattgtgtcaacgcggacagattcaactcggagccagccttggacttgtgtccatcacctgtagaatgaac

SEQ ID NO: 430080 - DNA, 3920 bp, Homo sapiens
tggcaattgtgaaaaaagctctttattgttattgctaataaaaaaaaaagggccaatagtcaggtgtggtggcctgtacctcttgtccctgctactggggagactgaggtgggaggatggcttgagcccaggagatcaaggctgcagtgaggcatgattacaccgctgcactccagcctggacgacagggtgagattgtctcagaaaaataaagaaaaagggttatttcatattggttcaaaaatataggtagtatgaccccctgatgacttgaagacagagcaacagaaggaccttctttagtcatcattagcttagccaaaagaaaagtcagttacactcactgttgcataatcagttgtatggtcaactgtgcactaattcatttggtcacaaatatatacaatcaaattaaggttgaatgtaaatttaaactttacttttgctttcttctcccctcccccccagaaagatccatggtccaatataacatatcttcttcaagtatttatggggtaagaaacattttaaaaagttgttacattctttcctctatcttaatgatttaaatatgagcaagttcggtctatcaaggcaggctctgaatagctactatcgagaagtatttgaggagttcttgaatgccaaatcttcattgtctgctgactctgcagatttatcacgtgctgaaagcacaggttttccaactgtcaacgtctttacgaaattcacctgcttaggctttcgtggggtcggcctcttggagctgagaacacagcttctgcttacacctgtgtcctcaatgaagctagagattcctaagagaattctagaaaaagaggagcggggtagaaggcaagcaaggaacagtttctaagcttagggcctaaacctttgcatacaaggatcagctaccacgtttacagcggctttaagttacagccctcggtaggtgcagatcggcttcccaatgaaacctggctttcactgttcatctctgttaagggttaccttttcaaaagaagccgcttttcctcctaccaatttcctaaagcgcccaccggcaacgcactaaacaaggagggcacagagcgggaaaaaggacacgtgtgatttccgaactcttcccggcgggctccgggccccggcaagcccagccccgcgggaggaaccaaggccgccacccccgagaggcagcccggcccgcgctcctcgcccacgtggccgccgcacgcgcccgctcaaagtccaagggcggcgatccggctctgggaccttggaccgagcgagctcccgccccgacggcgggagtcagaacggtggtggccagcagtccccgcccgcggctccgtgcacctccaccccggcccgcgcgccgcctcccgaaccaccgtggcagaggccgcaaggggaaccggaagccaaaatggcgacgccccgcccttttcctctcgcgagaggcggggaaggaaaaaaagttgtgcgagcgacggggacgtaaccaattagagtgccgggagcgcctgattggcggccctcccggcgcctgcaggccccgccccggctgcggaggctcagtcacagccctcccctcctcgctccctcccctcctctccccgcccagttcttctcttcccgtctgaggtggcggtcggtctcgccttgtcgccagctccattttcctctctttctcttcccctttccttcgcgcccaagagcgcctcccagcctcgtagggtggtcacggagcccctgcgccttttccttgctcgggtcctgcgtccgcgcctgccccgccatgaatgaggagtacgacgtgatcgtgctgggcaccggcctgacggaatgtatcctgtcaggtataatgtcagtgaatggcaagaaagttcttcatatggatcgaaacccttactacggaggagagagtgcatctataacaccattggaagatttatacaaaagatttaaaataccaggatcaccacccgagtcaatggggagaggaagagactggaatgttgacttgattcccaagttccttatggctaatggtcagctggttaagatgctgctttatacagaggtaactcgctatctggattttaaagtgactgaagggagctttgtctataagggtggaaaaatctacaaggttccttccactgaagcagaagccctggcatctagcctaatgggattgtttgaaaaacgtcgcttcaggaaattcctagtgtatgttgccaacttcgatgaaaaagatccaagaacttttgaaggcattgatcctaagaagaccacaatgcgagatgtgtataagaaatttgatttgggtcaagacgttatagattttactggtcatgctcttgcactttacagaactgatgattacttagatcaaccgtgttatgaaaccattaatagaattaaactttacagtgaatctttggcaagatatggcaaaagcccatacctttatccactctatggccttggagaactgccccaaggatttgcaaggctaagtgctatttatggaggtacctatatgctgaataaacccattgaagaaatcattgtacagaatggaaaagtaattggtgtaaaatctgaaggagaaattgctcgctgtaagcagctcatctgtgaccccagctacgtaaaagatcgggtagaaaaagtgggccaggtgatcagagttatttgcatcctcagccaccccatcaagaacaccaatgatgccaactcctgccagatcattattccacagaaccaagtcaatcgaaagtcagatatctacgtctgcatgatctcctttgcgcacaatgtagcagcacaagggaagtacattgctatagttagtacaactgtggaaaccaaggagcctgagaaggaaatcagaccagctttggagctcttggaaccaattgaacagaaatttgttagcatcagtgacctcctggtaccaaaagacttgggaacagaaagccagatctttatttcccgcacatatgatgccaccactcattttgagacaacgtgtgatgacattaaaaacatctataagaggatgacaggatcagagtttgactttgaggaaatgaagcgcaagaagaatgacatctatggggaagactaacagcagtacatgttattatgtaattaggacacatttaaaatttggcaaataatgcatataatgaaatcaatattgtaaggcctgcttttgtaatgaaaatggagagaatgaagagcgctgtgccagtaaatactccccttcacctttctaattattaacttgttttcatggagtggctattcagcattggcagttaccacattctgttcaatttaaccaaactggcttttttttttttctagtgaagttaaacaaacattgggataccgacacagacaacttgagacagtttttttaatcttttaatcagtgtagctatgtgctgctgctgctcaagagctggatccatacaggttgtgtgtcatctgtcctcttgaggttcaggagattctaaattgaatattccacggtttgggacagcatccggaagttttccctatgactttatattttgtattatgtcaaatgttatggcagggcccaaatagcatagccacaagtttggtttatgtgggcataaaattctaaccaaaccccagacatagggagtcatttggagaaagcctgtatgtggtgttttaacctaataaagttgatgagagagaaggggagaggaagcgaacataaagcgggtcaagtgtagtgcatcttttgtatctcaggcgtggcttcttcagtggaccaagctgcaatgcagtattgacttgacagagcctctacttctgtctcaaaatggctccaaatgatttctgtactgcaaaataaagccaaattctggaaacta

SEQ ID NO: 430081 - DNA, 4080 bp, Homo sapiens
tggcaattgtgaaaaaagctctttattgttattgctaataaaaaaaaaagggccaatagtcaggtgtggtggcctgtacctcttgtccctgctactggggagactgaggtgggaggatggcttgagcccaggagatcaaggctgcagtgaggcatgattacaccgctgcactccagcctggacgacagggtgagattgtctcagaaaaataaagaaaaagggttatttcatattggttcaaaaatataggtagtatgaccccctgatgacttgaagacagagcaacagaaggaccttctttagtcatcattagcttagccaaaagaaaagtcagttacactcactgttgcataatcagttgtatggtcaactgtgcactaattcatttggtcacaaatatatacaatcaaattaaggttgaatgtaaatttaaactttacttttgctttcttctcccctcccccccagaaagatccatggtccaatataacatatcttcttcaagtatttatggggtaagaaacattttaaaaagttgttacattctttcctctatcttaatgatttaaatatgagcaagttcggtctatcaaggcaggctctgaatagctactatcgagaagtatttgaggagttcttgaatgccaaatcttcattgtctgctgactctgcagatttatcacgtgctgaaagcacaggttttccaactgtcaacgtctttacgaaattcacctgcttaggctttcgtggggtcggcctcttggagctgagaacacagcttctgcttacacctgtgtcctcaatgaagctagagattcctaagagaattctagaaaaagaggagcggggtagaaggcaagcaaggaacagtttctaagcttagggcctaaacctttgcatacaaggatcagctaccacgtttacagcggctttaagttacagccctcggtaggtgcagatcggcttcccaatgaaacctggctttcactgttcatctctgttaagggttaccttttcaaaagaagccgcttttcctcctaccaatttcctaaagcgcccaccggcaacgcactaaacaaggagggcacagagcgggaaaaaggacacgtgtgatttccgaactcttcccggcgggctccgggccccggcaagcccagccccgcgggaggaaccaaggccgccacccccgagaggcagcccggcccgcgctcctcgcccacgtggccgccgcacgcgcccgctcaaagtccaagggcggcgatccggctctgggaccttggaccgagcgagctcccgccccgacggcgggagtcagaacggtggtggccagcagtccccgcccgcggctccgtgcacctccaccccggcccgcgcgccgcctcccgaaccaccgtggcagaggccgcaaggggaaccggaagccaaaatggcgacgccccgcccttttcctctcgcgagaggcggggaaggaaaaaaagttgtgcgagcgacggggacgtaaccaattagagtgccgggagcgcctgattggcggccctcccggcgcctgcaggccccgccccggctgcggaggctcagtcacagccctcccctcctcgctccctcccctcctctccccgcccagttcttctcttcccgtctgaggtggcggtcggtctcgccttgtcgccagctccattttcctctctttctcttcccctttccttcgcgcccaagagcgcctcccagcctcgtagggtggtcacggagcccctgcgccttttccttgctcgggtcctgcgtccgcgcctgccccgccatgaatgaggagtacgacgtgatcgtgctgggcaccggcctgacggaatgtatcctgtcaggtataatgtcagtgaatggcaagaaagttcttcatatggatcgaaacccttactacggaggagagagtgcatctataacaccattggaagatttatacaaaagatttaaaataccaggatcaccacccgagtcaatggggagaggaagagactggaatgttgacttgattcccaagttccttatggctaatggtcagctggttaagatgctgctttatacagaggtaactcgctatctggattttaaagtgactgaagggagctttgtctataagggtggaaaaatctacaaggttccttccactgaagcagaagccctggcatctagcctaatgggattgtttgaaaaacgtcgcttcaggaaattcctagtgtatgttgccaacttcgatgaaaaagatccaagaacttttgaaggcattgatcctaagaagaccacaatgcgagatgtgtataagaaatttgatttgggtcaagacgttatagattttactggtcatgctcttgcactttacagaactgatgattacttagatcaaccgtgttatgaaaccattaatagaattaaactttacagtgaatctttggcaagatatggcaaaagcccatacctttatccactctatggccttggagaactgccccaaggatttgcaaggctaagtgctatttatggaggtacctatatgctgaataaacccattgaagaaatcattgtacagaatggaaaagtaattggtgtaaaatctgaaggagaaattgctcgctgtaagcagctcatctgtgaccccagctacgtaaaagatcgggtagaaaaagtgggccaggtgatcagagttatttgcatcctcagccaccccatcaagaacaccaatgatgccaactcctgccagatcattattccacagaaccaagtcaatcgaaagtcagatatctacgtctgcatgatctcctttgcgcacaatgtagcagcacaagggaagtacattgctatagttagtacaactgtggaaaccaaggagcctgagaaggaaatcagaccagctttggagctcttggaaccaattgaacagaaatttgttagcatcagtgacctcctggtaccaaaagacttgggaacagaaagccagatctttatttcccgcacatatgatgccaccactcattttgagacaacgtgtgatgacattaaaaacatctataagaggatgacaggatcagagtttgactttgaggaaatgaagcgcaagaagaatgacatctatggggaagactaacagcagtacatgttattatgtaattaggacacatttaaaatttggcaaataatgcatataatgaaatcaatattgtaaggcctgcttttgtaatgaaaatggagagaatgaagagcgctgtgccagtaaatactccccttcacctttctaattattaacttgttttcatggagtggctattcagcattggcagttaccacattctgttcaatttaaccaaactggcttttttttttttctagtgaagttaaacaaacattgggataccgacacagacaacttgagacagtttttttaatcttttaatcagtgtagctatgtgctgctgctgctcaagagctggatccatacaggttgtgtgtcatctgtcctcttgaggttcaggagattctaaattgaatattccacggtttgggacagcatccggaagttttccctatgactttatattttgtattatgtcaaatgttatggcagggcccaaatagcatagccacaagtttggtttatgtgggcataaaattctaaccaaaccccagacatagggagtcatttggagaaagcctgtatgtggtgttttaacctaataaagttgatgagagagaaggggagaggaagcgaacataaagcgggtcaagtgtagtgcatcttttgtatctcaggcgtggcttcttcagtggaccaagctgcaatgcagtattgacttgacagagcctctacttctgtctcaaaatggctccaaatgatttctgtactgcaaaataaagccaaattctggaaactaaaaaaaggggggggttaaaattaccctgaggggcagttacctgtcccgtttggtgaagggccaaggggggtaaaaaagcggggggttaaagtgtggaaaggctggttttggagacctctgtgcagggccacgaacgggaaagttgagtttgttgtaacag

SEQ ID NO: 430082 - DNA, 4043 bp, Homo sapiens
tggcaattgtgaaaaaagctctttattgttattgctaataaaaaaaaaagggccaatagtcaggtgtggtggcctgtacctcttgtccctgctactggggagactgaggtgggaggatggcttgagcccaggagatcaaggctgcagtgaggcatgattacaccgctgcactccagcctggacgacagggtgagattgtctcagaaaaataaagaaaaagggttatttcatattggttcaaaaatataggtagtatgaccccctgatgacttgaagacagagcaacagaaggaccttctttagtcatcattagcttagccaaaagaaaagtcagttacactcactgttgcataatcagttgtatggtcaactgtgcactaattcatttggtcacaaatatatacaatcaaattaaggttgaatgtaaatttaaactttacttttgctttcttctcccctcccccccagaaagatccatggtccaatataacatatcttcttcaagtatttatggggtaagaaacattttaaaaagttgttacattctttcctctatcttaatgatttaaatatgagcaagttcggtctatcaaggcaggctctgaatagctactatcgagaagtatttgaggagttcttgaatgccaaatcttcattgtctgctgactctgcagatttatcacgtgctgaaagcacaggttttccaactgtcaacgtctttacgaaattcacctgcttaggctttcgtggggtcggcctcttggagctgagaacacagcttctgcttacacctgtgtcctcaatgaagctagagattcctaagagaattctagaaaaagaggagcggggtagaaggcaagcaaggaacagtttctaagcttagggcctaaacctttgcatacaaggatcagctaccacgtttacagcggctttaagttacagccctcggtaggtgcagatcggcttcccaatgaaacctggctttcactgttcatctctgttaagggttaccttttcaaaagaagccgcttttcctcctaccaatttcctaaagcgcccaccggcaacgcactaaacaaggagggcacagagcgggaaaaaggacacgtgtgatttccgaactcttcccggcgggctccgggccccggcaagcccagccccgcgggaggaaccaaggccgccacccccgagaggcagcccggcccgcgctcctcgcccacgtggccgccgcacgcgcccgctcaaagtccaagggcggcgatccggctctgggaccttggaccgagcgagctcccgccccgacggcgggagtcagaacggtggtggccagcagtccccgcccgcggctccgtgcacctccaccccggcccgcgcgccgcctcccgaaccaccgtggcagaggccgcaaggggaaccggaagccaaaatggcgacgccccgcccttttcctctcgcgagaggcggggaaggaaaaaaagttgtgcgagcgacggggacgtaaccaattagagtgccgggagcgcctgattggcggccctcccggcgcctgcaggccccgccccggctgcggaggctcagtcacagccctcccctcctcgctccctcccctcctctccccgcccagttcttctcttcccgtctgaggtggcggtcggtctcgccttgtcgccagctccattttcctctctttctcttcccctttccttcgcgcccaagagcgcctcccagcctcgtagggtggtcacggagcccctgcgccttttccttgctcgggtcctgcgtccgcgcctgccccgccatgaatgaggagtacgacgtgatcgtgctgggcaccggcctgacggaatgtatcctgtcaggtataatgtcagtgaatggcaagaaagttcttcatatggatcgaaacccttactacggaggagagagtgcatctataacaccattggaagatttatacaaaagatttaaaataccaggatcaccacccgagtcaatggggagaggaagagactggaatgttgacttgattcccaagttccttatggctaatggtcagctggttaagatgctgctttatacagaggtaactcgctatctggattttaaagtgactgaagggagctttgtctataagggtggaaaaatctacaaggttccttccactgaagcagaagccctggcatctagcctaatgggattgtttgaaaaacgtcgcttcaggaaattcctagtgtatgttgccaacttcgatgaaaaagatccaagaacttttgaaggcattgatcctaagaagaccacaatgcgagatgtgtataagaaatttgatttgggtcaagacgttatagattttactggtcatgctcttgcactttacagaactgatgattacttagatcaaccgtgttatgaaaccattaatagaattaaactttacagtgaatctttggcaagatatggcaaaagcccatacctttatccactctatggccttggagaactgccccaaggatttgcaaggctaagtgctatttatggaggtacctatatgctgaataaacccattgaagaaatcattgtacagaatggaaaagtaattggtgtaaaatctgaaggagaaattgctcgctgtaagcagctcatctgtgaccccagctacgtaaaagatcgggtagaaaaagtgggccaggtgatcagagttatttgcatcctcagccaccccatcaagaacaccaatgatgccaactcctgccagatcattattccacagaaccaagtcaatcgaaagtcagatatctacgtctgcatgatctcctttgcgcacaatgtagcagcacaagggaagtacattgctatagttagtacaactgtggaaaccaaggagcctgagaaggaaatcagaccagctttggagctcttggaaccaattgaacagaaatttgttagcatcagtgacctcctggtaccaaaagacttgggaacagaaagccagatctttatttcccgcacatatgatgccaccactcattttgagacaacgtgtgatgacattaaaaacatctataagaggatgacaggatcagagtttgactttgaggaaatgaagcgcaagaagaatgacatctatggggaagactaacagcagtacatgttattatgtaattaggacacatttaaaatttggcaaataatgcatataatgaaatcaatattgtaaggcctgcttttgtaatgaaaatggagagaatgaagagcgctgtgccagtaaatactccccttcacctttctaattattaacttgttttcatggagtggctattcagcattggcagttaccacattctgttcaatttaaccaaactggcttttttttttttctagtgaagttaaacaaacattgggataccgacacagacaacttgagacagtttttttaatcttttaatcagtgtagctatgtgctgctgctgctcaagagctggatccatacaggttgtgtgtcatctgtcctcttgaggttcaggagattctaaattgaatattccacggtttgggacagcatccggaagttttccctatgactttatattttgtattatgtcaaatgttatggcagggcccaaatagcatagccacaagtttggtttatgtgggcataaaattctaaccaaaccccagacatagggagtcatttggagaaagcctgtatgtggtgttttaacctaataaagttgatgagagagaaggggagaggaagcgaacataaagcgggtcaagtgtagtgcatcttttgtatctcaggcgtggcttcttcagtggaccaagctgcaatgcagtattgacttgacagagcctctacttctgtctcaaaatggctccaaatgatttctgtactgcaaaataaagccaaattctggaaactaaaaaaaatcaacccatcacatcccacaacacccccgcacaagacctaactccatacacaacaagcggctgctctcccggacccacatccaaaagctcagactaagcggcacgagaccatctac

SEQ ID NO: 430083 - DNA, 4324 bp, Homo sapiens
tggcaattgtgaaaaaagctctttattgttattgctaataaaaaaaaaagggccaatagtcaggtgtggtggcctgtacctcttgtccctgctactggggagactgaggtgggaggatggcttgagcccaggagatcaaggctgcagtgaggcatgattacaccgctgcactccagcctggacgacagggtgagattgtctcagaaaaataaagaaaaagggttatttcatattggttcaaaaatataggtagtatgaccccctgatgacttgaagacagagcaacagaaggaccttctttagtcatcattagcttagccaaaagaaaagtcagttacactcactgttgcataatcagttgtatggtcaactgtgcactaattcatttggtcacaaatatatacaatcaaattaaggttgaatgtaaatttaaactttacttttgctttcttctcccctcccccccagaaagatccatggtccaatataacatatcttcttcaagtatttatggggtaagaaacattttaaaaagttgttacattctttcctctatcttaatgatttaaatatgagcaagttcggtctatcaaggcaggctctgaatagctactatcgagaagtatttgaggagttcttgaatgccaaatcttcattgtctgctgactctgcagatttatcacgtgctgaaagcacaggttttccaactgtcaacgtctttacgaaattcacctgcttaggctttcgtggggtcggcctcttggagctgagaacacagcttctgcttacacctgtgtcctcaatgaagctagagattcctaagagaattctagaaaaagaggagcggggtagaaggcaagcaaggaacagtttctaagcttagggcctaaacctttgcatacaaggatcagctaccacgtttacagcggctttaagttacagccctcggtaggtgcagatcggcttcccaatgaaacctggctttcactgttcatctctgttaagggttaccttttcaaaagaagccgcttttcctcctaccaatttcctaaagcgcccaccggcaacgcactaaacaaggagggcacagagcgggaaaaaggacacgtgtgatttccgaactcttcccggcgggctccgggccccggcaagcccagccccgcgggaggaaccaaggccgccacccccgagaggcagcccggcccgcgctcctcgcccacgtggccgccgcacgcgcccgctcaaagtccaagggcggcgatccggctctgggaccttggaccgagcgagctcccgccccgacggcgggagtcagaacggtggtggccagcagtccccgcccgcggctccgtgcacctccaccccggcccgcgcgccgcctcccgaaccaccgtggcagaggccgcaaggggaaccggaagccaaaatggcgacgccccgcccttttcctctcgcgagaggcggggaaggaaaaaaagttgtgcgagcgacggggacgtaaccaattagagtgccgggagcgcctgattggcggccctcccggcgcctgcaggccccgccccggctgcggaggctcagtcacagccctcccctcctcgctccctcccctcctctccccgcccagttcttctcttcccgtctgaggtggcggtcggtctcgccttgtcgccagctccattttcctctctttctcttcccctttccttcgcgcccaagagcgcctcccagcctcgtagggtggtcacggagcccctgcgccttttccttgctcgggtcctgcgtccgcgcctgccccgccatgaatgaggagtacgacgtgatcgtgctgggcaccggcctgacggaatgtatcctgtcaggtataatgtcagtgaatggcaagaaagttcttcatatggatcgaaacccttactacggaggagagagtgcatctataacaccattggaagatttatacaaaagatttaaaataccaggatcaccacccgagtcaatggggagaggaagagactggaatgttgacttgattcccaagttccttatggctaatggtcagctggttaagatgctgctttatacagaggtaactcgctatctggattttaaagtgactgaagggagctttgtctataagggtggaaaaatctacaaggttccttccactgaagcagaagccctggcatctagcctaatgggattgtttgaaaaacgtcgcttcaggaaattcctagtgtatgttgccaacttcgatgaaaaagatccaagaacttttgaaggcattgatcctaagaagaccacaatgcgagatgtgtataagaaatttgatttgggtcaagacgttatagattttactggtcatgctcttgcactttacagaactgatgattacttagatcaaccgtgttatgaaaccattaatagaattaaactttacagtgaatctttggcaagatatggcaaaagcccatacctttatccactctatggccttggagaactgccccaaggatttgcaaggctaagtgctatttatggaggtacctatatgctgaataaacccattgaagaaatcattgtacagaatggaaaagtaattggtgtaaaatctgaaggagaaattgctcgctgtaagcagctcatctgtgaccccagctacgtaaaagatcgggtagaaaaagtgggccaggtgatcagagttatttgcatcctcagccaccccatcaagaacaccaatgatgccaactcctgccagatcattattccacagaaccaagtcaatcgaaagtcagatatctacgtctgcatgatctcctttgcgcacaatgtagcagcacaagggaagtacattgctatagttagtacaactgtggaaaccaaggagcctgagaaggaaatcagaccagctttggagctcttggaaccaattgaacagaaatttgttagcatcagtgacctcctggtaccaaaagacttgggaacagaaagccagatctttatttcccgcacatatgatgccaccactcattttgagacaacgtgtgatgacattaaaaacatctataagaggatgacaggatcagagtttgactttgaggaaatgaagcgcaagaagaatgacatctatggggaagactaacagcagtacatgttattatgtaattaggacacatttaaaatttggcaaataatgcatataatgaaatcaatattgtaaggcctgcttttgtaatgaaaatggagagaatgaagagcgctgtgccagtaaatactccccttcacctttctaattattaacttgttttcatggagtggctattcagcattggcagttaccacattctgttcaatttaaccaaactggcttttttttttttctagtgaagttaaacaaacattgggataccgacacagacaacttgagacagtttttttaatcttttaatcagtgtagctatgtgctgctgctgctcaagagctggatccatacaggttgtgtgtcatctgtcctcttgaggttcaggagattctaaattgaatattccacggtttgggacagcatccggaagttttccctatgactttatattttgtattatgtcaaatgttatggcagggcccaaatagcatagccacaagtttggtttatgtgggcataaaattctaaccaaaccccagacatagggagtcatttggagaaagcctgtatgtggtgttttaacctaataaagttgatgagagagaaggggagaggaagcgaacataaagcgggtcaagtgtagtgcatcttttgtatctcaggcgtggcttcttcagtggaccaagctgcaatgcagtattgacttgacagagcctctacttctgtctcaaaatggctccaaatgatttctgtactgcaaaataaagccaaattctggaaactataaaaaagagaagaaaagaaacaacaaaacaaacaaaaacattgtgtgtggggcggcctgtggggcccgccgggaaaagagttttttgagagaacccatttctgttgtgggggcgcggggccccagtggggttgagggcgacaccacgtggccccatacgcggtggttgaccagagggaaaaactccgcgggccaatgacagcaagacgcgcgggggtatctctgcacgccattcaaaaaacgcgccgccggggtgggaacaccacgaagggttttcgtggcaaaccaaaatcgccgagaagggggagcatcccgagaggggtacaatcagcgggggagaccttcatccaccggagggagtccacaggggagatctgcaagattacagatttgaggccccgcga

SEQ ID NO: 430084 - DNA, 3827 bp, Homo sapiens
tggcaattgtgaaaaaagctctttattgttattgctaataaaaaaaaaagggccaatagtcaggtgtggtggcctgtacctcttgtccctgctactggggagactgaggtgggaggatggcttgagcccaggagatcaaggctgcagtgaggcatgattacaccgctgcactccagcctggacgacagggtgagattgtctcagaaaaataaagaaaaagggttatttcatattggttcaaaaatataggtagtatgaccccctgatgacttgaagacagagcaacagaaggaccttctttagtcatcattagcttagccaaaagaaaagtcagttacactcactgttgcataatcagttgtatggtcaactgtgcactaattcatttggtcacaaatatatacaatcaaattaaggttgaatgtaaatttaaactttacttttgctttcttctcccctcccccccagaaagatccatggtccaatataacatatcttcttcaagtatttatggggtaagaaacattttaaaaagttgttacattctttcctctatcttaatgatttaaatatgagcaagttcggtctatcaaggcaggctctgaatagctactatcgagaagtatttgaggagttcttgaatgccaaatcttcattgtctgctgactctgcagatttatcacgtgctgaaagcacaggttttccaactgtcaacgtctttacgaaattcacctgcttaggctttcgtggggtcggcctcttggagctgagaacacagcttctgcttacacctgtgtcctcaatgaagctagagattcctaagagaattctagaaaaagaggagcggggtagaaggcaagcaaggaacagtttctaagcttagggcctaaacctttgcatacaaggatcagctaccacgtttacagcggctttaagttacagccctcggtaggtgcagatcggcttcccaatgaaacctggctttcactgttcatctctgttaagggttaccttttcaaaagaagccgcttttcctcctaccaatttcctaaagcgcccaccggcaacgcactaaacaaggagggcacagagcgggaaaaaggacacgtgtgatttccgaactcttcccggcgggctccgggccccggcaagcccagccccgcgggaggaaccaaggccgccacccccgagaggcagcccggcccgcgctcctcgcccacgtggccgccgcacgcgcccgctcaaagtccaagggcggcgatccggctctgggaccttggaccgagcgagctcccgccccgacggcgggagtcagaacggtggtggccagcagtccccgcccgcggctccgtgcacctccaccccggcccgcgcgccgcctcccgaaccaccgtggcagaggccgcaaggggaaccggaagccaaaatggcgacgccccgcccttttcctctcgcgagaggcggggaaggaaaaaaagttgtgcgagcgacggggacgtaaccaattagagtgccgggagcgcctgattggcggccctcccggcgcctgcaggccccgccccggctgcggaggctcagtcacagccctcccctcctcgctccctcccctcctctccccgcccagttcttctcttcccgtctgaggtggcggtcggtctcgccttgtcgccagctccattttcctctctttctcttcccctttccttcgcgcccaagagcgcctcccagcctcgtagggtggtcacggagcccctgcgccttttccttgctcgggtcctgcgtccgcgcctgccccgccatgaatgaggagtacgacgtgatcgtgctgggcaccggcctgacggaatgtatcctgtcaggtataatgtcagtgaatggcaagaaagttcttcatatggatcgaaacccttactacggaggagagagtgcatctataacaccattggaagatttatacaaaagatttaaaataccaggatcaccacccgagtcaatggggagaggaagagactggaatgttgacttgattcccaagttccttatggctaatggtcagctggttaagatgctgctttatacagaggtaactcgctatctggattttaaagtgactgaagggagctttgtctataagggtggaaaaatctacaaggttccttccactgaagcagaagccctggcatctagcctaatgggattgtttgaaaaacgtcgcttcaggaaattcctagtgtatgttgccaacttcgatgaaaaagatccaagaacttttgaaggcattgatcctaagaagaccacaatgcgagatgtgtataagaaatttgatttgggtcaagacgttatagattttactggtcatgctcttgcactttacagaactgatgattacttagatcaaccgtgttatgaaaccattaatagaattaaactttacagtgaatctttggcaagatatggcaaaagcccatacctttatccactctatggccttggagaactgccccaaggatttgcaaggctaagtgctatttatggaggtacctatatgctgaataaacccattgaagaaatcattgtacagaatggaaaagtaattggtgtaaaatctgaaggagaaattgctcgctgtaagcagctcatctgtgaccccagctacgtaaaagatcgggtagaaaaagtgggccaggtgatcagagttatttgcatcctcagccaccccatcaagaacaccaatgatgccaactcctgccagatcattattccacagaaccaagtcaatcgaaagtcagatatctacgtctgcatgatctcctttgcgcacaatgtagcagcacaagggaagtacattgctatagttagtacaactgtggaaaccaaggagcctgagaaggaaatcagaccagctttggagctcttggaaccaattgaacagaaatttgttagcatcagtgacctcctggtaccaaaagacttgggaacagaaagccagatctttatttcccgcacatatgatgccaccactcattttgagacaacgtgtgatgacattaaaaacatctataagaggatgacaggatcagagtttgactttgaggaaatgaagcgcaagaagaatgacatctatggggaagactaacagcagtacatgttattatgtaattaggacacatttaaaatttggcaaataatgcatataatgaaatcaatattgtaaggcctgcttttgtaatgaaaatggagagaatgaagagcgctgtgccagtaaatactccccttcacctttctaattattaacttgttttcatggagtggctattcagcattggcagttaccacattctgttcaatttaaccaaactggcttttttttttttctagtgaagttaaacaaacattgggataccgacacagacaacttgagacagtttttttaatcttttaatcagtgtagctatgtgctgctgctgctcaagagctggatccatacaggttgtgtgtcatctgtcctcttgaggttcaggagattctaaattgaatattccacggtttgggacagcatccggaagttttccctatgactttatattttgtattatgtcaaatgttatggcagggcccaaatagcatagccacaagtttggtttatgtgggcataaaattctaaccaaaccccagacatagggagtcatttggagaaagcctgtatgtggtgttttaacctaataaagttgatgagagagaaggggagaggaatagagagattaaggatagagagattaaggatagagagattaaggatagagagattaaggatagagagatgggta

SEQ ID NO: 430085 - DNA, 3866 bp, Homo sapiens
tggcaattgtgaaaaaagctctttattgttattgctaataaaaaaaaaagggccaatagtcaggtgtggtggcctgtacctcttgtccctgctactggggagactgaggtgggaggatggcttgagcccaggagatcaaggctgcagtgaggcatgattacaccgctgcactccagcctggacgacagggtgagattgtctcagaaaaataaagaaaaagggttatttcatattggttcaaaaatataggtagtatgaccccctgatgacttgaagacagagcaacagaaggaccttctttagtcatcattagcttagccaaaagaaaagtcagttacactcactgttgcataatcagttgtatggtcaactgtgcactaattcatttggtcacaaatatatacaatcaaattaaggttgaatgtaaatttaaactttacttttgctttcttctcccctcccccccagaaagatccatggtccaatataacatatcttcttcaagtatttatggggtaagaaacattttaaaaagttgttacattctttcctctatcttaatgatttaaatatgagcaagttcggtctatcaaggcaggctctgaatagctactatcgagaagtatttgaggagttcttgaatgccaaatcttcattgtctgctgactctgcagatttatcacgtgctgaaagcacaggttttccaactgtcaacgtctttacgaaattcacctgcttaggctttcgtggggtcggcctcttggagctgagaacacagcttctgcttacacctgtgtcctcaatgaagctagagattcctaagagaattctagaaaaagaggagcggggtagaaggcaagcaaggaacagtttctaagcttagggcctaaacctttgcatacaaggatcagctaccacgtttacagcggctttaagttacagccctcggtaggtgcagatcggcttcccaatgaaacctggctttcactgttcatctctgttaagggttaccttttcaaaagaagccgcttttcctcctaccaatttcctaaagcgcccaccggcaacgcactaaacaaggagggcacagagcgggaaaaaggacacgtgtgatttccgaactcttcccggcgggctccgggccccggcaagcccagccccgcgggaggaaccaaggccgccacccccgagaggcagcccggcccgcgctcctcgcccacgtggccgccgcacgcgcccgctcaaagtccaagggcggcgatccggctctgggaccttggaccgagcgagctcccgccccgacggcgggagtcagaacggtggtggccagcagtccccgcccgcggctccgtgcacctccaccccggcccgcgcgccgcctcccgaaccaccgtggcagaggccgcaaggggaaccggaagccaaaatggcgacgccccgcccttttcctctcgcgagaggcggggaaggaaaaaaagttgtgcgagcgacggggacgtaaccaattagagtgccgggagcgcctgattggcggccctcccggcgcctgcaggccccgccccggctgcggaggctcagtcacagccctcccctcctcgctccctcccctcctctccccgcccagttcttctcttcccgtctgaggtggcggtcggtctcgccttgtcgccagctccattttcctctctttctcttcccctttccttcgcgcccaagagcgcctcccagcctcgtagggtggtcacggagcccctgcgccttttccttgctcgggtcctgcgtccgcgcctgccccgccatgaatgaggagtacgacgtgatcgtgctgggcaccggcctgacggaatgtatcctgtcaggtataatgtcagtgaatggcaagaaagttcttcatatggatcgaaacccttactacggaggagagagtgcatctataacaccattggaagatttatacaaaagatttaaaataccaggatcaccacccgagtcaatggggagaggaagagactggaatgttgacttgattcccaagttccttatggctaatggtcagctggttaagatgctgctttatacagaggtaactcgctatctggattttaaagtgactgaagggagctttgtctataagggtggaaaaatctacaaggttccttccactgaagcagaagccctggcatctagcctaatgggattgtttgaaaaacgtcgcttcaggaaattcctagtgtatgttgccaacttcgatgaaaaagatccaagaacttttgaaggcattgatcctaagaagaccacaatgcgagatgtgtataagaaatttgatttgggtcaagacgttatagattttactggtcatgctcttgcactttacagaactgatgattacttagatcaaccgtgttatgaaaccattaatagaattaaactttacagtgaatctttggcaagatatggcaaaagcccatacctttatccactctatggccttggagaactgccccaaggatttgcaaggctaagtgctatttatggaggtacctatatgctgaataaacccattgaagaaatcattgtacagaatggaaaagtaattggtgtaaaatctgaaggagaaattgctcgctgtaagcagctcatctgtgaccccagctacgtaaaagatcgggtagaaaaagtgggccaggtgatcagagttatttgcatcctcagccaccccatcaagaacaccaatgatgccaactcctgccagatcattattccacagaaccaagtcaatcgaaagtcagatatctacgtctgcatgatctcctttgcgcacaatgtagcagcacaagggaagtacattgctatagttagtacaactgtggaaaccaaggagcctgagaaggaaatcagaccagctttggagctcttggaaccaattgaacagaaatttgttagcatcagtgacctcctggtaccaaaagacttgggaacagaaagccagatctttatttcccgcacatatgatgccaccactcattttgagacaacgtgtgatgacattaaaaacatctataagaggatgacaggatcagagtttgactttgaggaaatgaagcgcaagaagaatgacatctatggggaagactaacagcagtacatgttattatgtaattaggacacatttaaaatttggcaaataatgcatataatgaaatcaatattgtaaggcctgcttttgtaatgaattattaacttgttttcatggagtggctattcagcattggcagttaccacattctgttcaatttaaccaaactggcttttttttttttctagtgaagttaaacaaacattgggataccgacacagacaacttgagacagtttttttaatcttttaatcagtgtagctatgtgctgctgctgctcaagagctggatccatacaggttgtgtgtcatctgtcctcttgaggttcaggagattctaaattgaatattccacggtttgggacagcatccggaagttttccctatgactttatattttgtattatgtcaaatgttatggcagggcccaaatagcatagccacaagtttggtttatgtgggcataaaattctaaccaaaccccagacatagggagtcatttggagaaagcctgtatgtggtgttttaacctaataaagttgatgagagagaaggggagaggaagcgaacataaagcgggtcaagtgtagtgcatcttttgtatctcaggcgtggcttcttcagtggaccaagctgcaatgcagtattgacttgacagagcctctacttctgtctcaaaatggctccaaatgatttctgtactgcaaaataaagccaaattctggaaacta

SEQ ID NO: 430086 - DNA, 2323 bp, Homo sapiens
cattgtgcttttcccgtatgatgctgggcggttgtgtctcggctgtgtgtgcagggtcctcttgtacctctcgttatctcttccacctttcctttcgcagccctaagtaacggacttctctctagtcacttctgatagcggtggtcacggagcccctgcgccttttccttgctcgggtcctgcgtccgcgcctgccccgccatgaatgaggagtacgacgtgatcgtgctgggcaccggcctgacggaatgtatcctgtcaggtataatgtcagtgaatggcaagaaagttcttcatatggatcgaaacccttactacggaggagagagtgcatctataacaccattggaagatttatacaaaagatttaaaataccaggatcaccacccgagtcaatggggagaggaagagactggaatgttgacttgattcccaagttccttatggctaatggtcagctggttaagatgctgctttatacagaggtaactcgctatctggattttaaagtgactgaagggagctttgtctataagggtggaaaaatctacaaggttccttccactgaagcagaagccctggcatctagcctaatgggattgtttgaaaaacgtcgcttcaggaaattcctagtgtatgttgccaacttcgatgaaaaagatccaagaacttttgaaggcattgatcctaagaagaccacaatgcgagatgtgtataagaaatttgatttgggtcaagacgttatagattttactggtcatgctcttgcactttacagaactgatgattacttagatcaaccgtgttatgaaaccattaatagaattaaactttacagtgaatctttggcaagatatggcaaaagcccatacctttatccactctatggccttggagaactgccccaaggatttgcaaggctaagtgctatttatggaggtacctatatgctgaataaacccattgaagaaatcattgtacagaatggaaaagtaattggtgtaaaatctgaaggagaaattgctcgctgtaagcagctcatctgtgaccccagctacgtaaaagatcgggtagaaaaagtgggccaggtgatcagagttatttgcatcctcagccaccccatcaagaacaccaatgatgccaactcctgccagatcattattccacagaaccaagtcaatcgaaagtcagatatctacgtctgcatgatctcctttgcgcacaatgtagcagcacaagggaagtacattgctatagttagtacaactgtggaaaccaaggagcctgagaaggaaatcagaccagctttggagctcttggaaccaattgaacagaaatttgttagcatcagtgacctcctggtaccaaaagacttgggaacagaaagccagatctttatttcccgcacatatgatgccaccactcattttgagacaacgtgtgatgacattaaaaacatctataagaggatgacaggatcagagtttgactttgaggaaatgaagcgcaagaagaatgacatctatggggaagactaacagcagtacatgttattatgtaattaggacacatttaaaatttggcaaataatgcatataatgaaatcaatattgtaaggcctgcttttgtaatgaaaatggagagaatgaagagcgctgtgccagtaaatactccccttcacctttctaattattaacttgttttcatggagtggctattcagcattggcagttaccacattctgttcaatttaaccaaactggcttttttttttttctagtgaagttaaacaaacattgggataccgacacagacaacttgagacagtttttttaatcttttaatcagtgtagctatgtgctgctgctgctcaagagctggatccatacaggttgtgtgtcatctgtcctcttgaggttcaggagattctaaattgaatattccacggtttgggacagcatccggaagttttccctatgactttatattttgtattatgtcaaatgttatggcagggcccaaatagcatagccacaagtttggtttatgtgggcataaaattctaaccaaaccccagacatagggagtcatttggagaaagcctgtatgtggtgttttaacctaataaagttgatgagagagaaggggagaggaagcgaacataaagcgggtcaagtgtagtgcatcttttgtatctcaggcgtggcttcttcagtggaccaagctgcaatgcagtattgacttgacagagcctctacttctgtctcaaaatggctccaaatgatttctgtactgcaaaataaagccaaattctggaaacta

SEQ ID NO: 430087 - DNA, 3693 bp, Homo sapiens
tggcaattgtgaaaaaagctctttattgttattgctaataaaaaaaaaagggccaatagtcaggtgtggtggcctgtacctcttgtccctgctactggggagactgaggtgggaggatggcttgagcccaggagatcaaggctgcagtgaggcatgattacaccgctgcactccagcctggacgacagggtgagattgtctcagaaaaataaagaaaaagggttatttcatattggttcaaaaatataggtagtatgaccccctgatgacttgaagacagagcaacagaaggaccttctttagtcatcattagcttagccaaaagaaaagtcagttacactcactgttgcataatcagttgtatggtcaactgtgcactaattcatttggtcacaaatatatacaatcaaattaaggttgaatgtaaatttaaactttacttttgctttcttctcccctcccccccagaaagatccatggtccaatataacatatcttcttcaagtatttatggggtaagaaacattttaaaaagttgttacattctttcctctatcttaatgatttaaatatgagcaagttcggtctatcaaggcaggctctgaatagctactatcgagaagtatttgaggagttcttgaatgccaaatcttcattgtctgctgactctgcagatttatcacgtgctgaaagcacaggttttccaactgtcaacgtctttacgaaattcacctgcttaggctttcgtggggtcggcctcttggagctgagaacacagcttctgcttacacctgtgtcctcaatgaagctagagattcctaagagaattctagaaaaagaggagcggggtagaaggcaagcaaggaacagtttctaagcttagggcctaaacctttgcatacaaggatcagctaccacgtttacagcggctttaagttacagccctcggtaggtgcagatcggcttcccaatgaaacctggctttcactgttcatctctgttaagggttaccttttcaaaagaagccgcttttcctcctaccaatttcctaaagcgcccaccggcaacgcactaaacaaggagggcacagagcgggaaaaaggacacgtgtgatttccgaactcttcccggcgggctccgggccccggcaagcccagccccgcgggaggaaccaaggccgccacccccgagaggcagcccggcccgcgctcctcgcccacgtggccgccgcacgcgcccgctcaaagtccaagggcggcgatccggctctgggaccttggaccgagcgagctcccgccccgacggcgggagtcagaacggtggtggccagcagtccccgcccgcggctccgtgcacctccaccccggcccgcgcgccgcctcccgaaccaccgtggcagaggccgcaaggggaaccggaagccaaaatggcgacgccccgcccttttcctctcgcgagaggcggggaaggaaaaaaagttgtgcgagcgacggggacgtaaccaattagagtgccgggagcgcctgattggcggccctcccggcgcctgcaggccccgccccggctgcggaggctcagtcacagccctcccctcctcgctccctcccctcctctccccgcccagttcttctcttcccgtctgaggtggcggtcggtctcgccttgtcgccagctccattttcctctctttctcttcccctttccttcgcgcccaagagcgcctcccagcctcgtagggtggtcacggagcccctgcgccttttccttgctcgggtcctgcgtccgcgcctgccccgccatgaatgaggagtacgacgtgatcgtgctgggcaccggcctgacggaatgtatcctgtcaggtataatgtcagtgaatggcaagaaagttcttcatatggatcgaaacccttactacggaggagagagtgcatctataacaccattggaagatttatacaaaagatttaaaataccaggatcaccacccgagtcaatggggagaggaagagactggaatgttgacttgattcccaagttccttatggctaatggtcagctggttaagatgctgctttatacagaggtaactcgctatctggattttaaagtgactgaagggagctttgtctataagggtggaaaaatctacaaggttccttccactgaagcagaagccctggcatctagcctaatgggattgtttgaaaaacgtcgcttcaggaaattcctagtgtatgttgccaacttcgatgaaaaagatccaagaacttttgaaggcattgatcctaagaagaccacaatgcgagatgtgtataagaaatttgatttgggtcaagacgttatagattttactggtcatgctcttgcactttacagaactgatgattacttagatcaaccgtgttatgaaaccattaatagaattaaactttacagtgaatctttggcaagatatggcaaaagcccatacctttatccactctatggccttggagaactgccccaaggatttgcaaggctaagtgctatttatggaggtacctatatgctgaataaacccattgaagaaatcattgtacagaatggaaaagtaattggtgtaaaatctgaaggagaaattgctcgctgtaagcagctcatctgtgaccccagctacgtaaaagatcgggtagaaaaagtgggccaggtgatcagagttatttgcatcctcagccaccccatcaagaacaccaatgatgccaactcctgccagatcattattccacagaaccaagtcaatcgaaagtcagatatctacgtctgcatgatctcctttgcgcacaatgtagcagcacaagggaagtacattgctatagttagtacaactgtggaaaccaaggagcctgagaaggaaatcagaccagctttggagctcttggaaccaattgaacagaaatttgttagcatcagtgacctcctggtaccaaaagacttgggaacagaaagccagatctttatttcccgcacatatgatgccaccactcattttgagacaacgtgtgatgacattaaaaacatctataagaggatgacaggatcagagtttgactttgaggaaatgaagcgcaagaagaatgacatctatggggaagactaacagcagtacatgttattatgtaattaggacacatttaaaatttggcaaataatgcatataatgaaatcaatattgtaaggcctgcttttgtaatgaaaatggagagaatgaagagcgctgtgccagtaaatactccccttcacctttctaattattaacttgttttcatggagtggctattcagcattggcagttaccacattctgttcaatttaaccaaactggcttttttttttttctagtgaagttaaacaaacattgggataccgacacagacaacttgagacagtttttttaatcttttaatcagtgtagctatgtgctgctgctgctcaagagctggatccatacaggttgtgtgtcatctgtcctcttgaggttcaggagattctaaattgaatattccacggtttgggacagcatccggaagttttccctatgtctggggtttggttagaattttatgcccacataaaccaaacttgtggctatgctatttgggccctgcataacatttgacataatacaaaatataaagtcatagggaaaagtcgacg

SEQ ID NO: 430088 - DNA, 2197 bp, Homo sapiens
cgggcgagacaaataattgactgaggtgccgaggactcgtgtttttaatttcagaggatcgatggatggcccgccatgaatgaggagtacgacgtgatcgtgctgggcaccggcctgacggaatgtatcctgtcaggtataatgtcagtgaatggcaagaaagttcttcatatggatcgaaacccttactacggaggagagagtgcatctataacaccattggaagatttatacaaaagatttaaaataccaggatcaccacccgagtcaatggggagaggaagagactggaatgttgacttgattcccaagttccttatggctaatggtcagctggttaagatgctgctttatacagaggtaactcgctatctggattttaaagtgactgaagggagctttgtctataagggtggaaaaatctacaaggttccttccactgaagcagaagccctggcatctagcctaatgggattgtttgaaaaacgtcgcttcaggaaattcctagtgtatgttgccaacttcgatgaaaaagatccaagaacttttgaaggcattgatcctaagaagaccacaatgcgagatgtgtataagaaatttgatttgggtcaagacgttatagattttactggtcatgctcttgcactttacagaactgatgattacttagatcaaccgtgttatgaaaccattaatagaattaaactttacagtgaatctttggcaagatatggcaaaagcccatacctttatccactctatggccttggagaactgccccaaggatttgcaaggctaagtgctatttatggaggtacctatatgctgaataaacccattgaagaaatcattgtacagaatggaaaagtaattggtgtaaaatctgaaggagaaattgctcgctgtaagcagctcatctgtgaccccagctacgtaaaagatcgggtagaaaaagtgggccaggtgatcagagttatttgcatcctcagccaccccatcaagaacaccaatgatgccaactcctgccagatcattattccacagaaccaagtcaatcgaaagtcagatatctacgtctgcatgatctcctttgcgcacaatgtagcagcacaagggaagtacattgctatagttagtacaactgtggaaaccaaggagcctgagaaggaaatcagaccagctttggagctcttggaaccaattgaacagaaatttgttagcatcagtgacctcctggtaccaaaagacttgggaacagaaagccagatctttatttcccgcacatatgatgccaccactcattttgagacaacgtgtgatgacattaaaaacatctataagaggatgacaggatcagagtttgactttgaggaaatgaagcgcaagaagaatgacatctatggggaagactaacagcagtacatgttattatgtaattaggacacatttaaaatttggcaaataatgcatataatgaaatcaatattgtaaggcctgcttttgtaatgaaaatggagagaatgaagagcgctgtgccagtaaatactccccttcacctttctaattattaacttgttttcatggagtggctattcagcattggcagttaccacattctgttcaatttaaccaaactggcttttttttttttctagtgaagttaaacaaacattgggataccgacacagacaacttgagacagtttttttaatcttttaatcagtgtagctatgtgctgctgctgctcaagagctggatccatacaggttgtgtgtcatctgtcctcttgaggttcaggagattctaaattgaatattccacggtttgggacagcatccggaagttttccctatgactttatattttgtattatgtcaaatgttatggcagggcccaaatagcatagccacaagtttggtttatgtgggcataaaattctaaccaaaccccagacatagggagtcatttggagaaagcctgtatgtggtgttttaacctaataaagttgatgagagagaaggggagaggaagcgaacataaagcgggtcaagtgtagtgcatcttttgtatctcaggcgtggcttcttcagtggaccaagctgcaatgcagtattgacttgacagagcctctacttctgtctcaaaatggctccaaatgatttctgtactgcaaaataaagccaaattctggaaacta

SEQ ID NO: 430089 - DNA, 4196 bp, Homo sapiens
tggcaattgtgaaaaaagctctttattgttattgctaataaaaaaaaaagggccaatagtcaggtgtggtggcctgtacctcttgtccctgctactggggagactgaggtgggaggatggcttgagcccaggagatcaaggctgcagtgaggcatgattacaccgctgcactccagcctggacgacagggtgagattgtctcagaaaaataaagaaaaagggttatttcatattggttcaaaaatataggtagtatgaccccctgatgacttgaagacagagcaacagaaggaccttctttagtcatcattagcttagccaaaagaaaagtcagttacactcactgttgcataatcagttgtatggtcaactgtgcactaattcatttggtcacaaatatatacaatcaaattaaggttgaatgtaaatttaaactttacttttgctttcttctcccctcccccccagaaagatccatggtccaatataacatatcttcttcaagtatttatggggtaagaaacattttaaaaagttgttacattctttcctctatcttaatgatttaaatatgagcaagttcggtctatcaaggcaggctctgaatagctactatcgagaagtatttgaggagttcttgaatgccaaatcttcattgtctgctgactctgcagatttatcacgtgctgaaagcacaggttttccaactgtcaacgtctttacgaaattcacctgcttaggctttcgtggggtcggcctcttggagctgagaacacagcttctgcttacacctgtgtcctcaatgaagctagagattcctaagagaattctagaaaaagaggagcggggtagaaggcaagcaaggaacagtttctaagcttagggcctaaacctttgcatacaaggatcagctaccacgtttacagcggctttaagttacagccctcggtaggtgcagatcggcttcccaatgaaacctggctttcactgttcatctctgttaagggttaccttttcaaaagaagccgcttttcctcctaccaatttcctaaagcgcccaccggcaacgcactaaacaaggagggcacagagcgggaaaaaggacacgtgtgatttccgaactcttcccggcgggctccgggccccggcaagcccagccccgcgggaggaaccaaggccgccacccccgagaggcagcccggcccgcgctcctcgcccacgtggccgccgcacgcgcccgctcaaagtccaagggcggcgatccggctctgggaccttggaccgagcgagctcccgccccgacggcgggagtcagaacggtggtggccagcagtccccgcccgcggctccgtgcacctccaccccggcccgcgcgccgcctcccgaaccaccgtggcagaggccgcaaggggaaccggaagccaaaatggcgacgccccgcccttttcctctcgcgagaggcggggaaggaaaaaaagttgtgcgagcgacggggacgtaaccaattagagtgccgggagcgcctgattggcggccctcccggcgcctgcaggccccgccccggctgcggaggctcagtcacagccctcccctcctcgctccctcccctcctctccccgcccagttcttctcttcccgtctgaggtggcggtcggtctcgccttgtcgccagctccattttcctctctttctcttcccctttccttcgcgcccaagagcgcctcccagcctcgtagggtggtcacggagcccctgcgccttttccttgctcgggtcctgcgtccgcgcctgccccgccatgaatgaggagtacgacgtgatcgtgctgggcaccggcctgacgaaatgcacacttagaagacacatgcgagaatgttgatagagcattatttgtaatagtgaaaaactggaaactatccaaatatccaccaggagtaaaatggagaagtaaattgtggtatagtcattcagtggaatcgtctacagctgtgttacccaaagtgtgctgcatagatcagctgcatctgcaacacctgagaatttaccagaaatgcggaagtttaggccccaactcggatattacacagaatcagaatctacagtttaacaggatctccaggaatgtatcctgtcaggtataatgtcagtgaatggcaagaaagttcttcatatggatcgaaacccttactacggaggagagagtgcatctataacaccattggaagatttatacaaaagatttaaaataccaggatcaccacccgagtcaatggggagaggaagagactggaatgttgacttgattcccaagttccttatggctaatggtcagctggttaagatgctgctttatacagaggtaactcgctatctggattttaaagtgactgaagggagctttgtctataagggtggaaaaatctacaaggttccttccactgaagcagaagccctggcatctagcctaatgggattgtttgaaaaacgtcgcttcaggaaattcctagtgtatgttgccaacttcgatgaaaaagatccaagaacttttgaaggcattgatcctaagaagaccacaatgcgagatgtgtataagaaatttgatttgggtcaagacgttatagattttactggtcatgctcttgcactttacagaactgatgattacttagatcaaccgtgttatgaaaccattaatagaattaaactttacagtgaatctttggcaagatatggcaaaagcccatacctttatccactctatggccttggagaactgccccaaggatttgcaaggctaagtgctatttatggaggtacctatatgctgaataaacccattgaagaaatcattgtacagaatggaaaagtaattggtgtaaaatctgaaggagaaattgctcgctgtaagcagctcatctgtgaccccagctacgtaaaagatcgggtagaaaaagtgggccaggtgatcagagttatttgcatcctcagccaccccatcaagaacaccaatgatgccaactcctgccagatcattattccacagaaccaagtcaatcgaaagtcagatatctacgtctgcatgatctcctttgcgcacaatgtagcagcacaagggaagtacattgctatagttagtacaactgtggaaaccaaggagcctgagaaggaaatcagaccagctttggagctcttggaaccaattgaacagaaatttgttagcatcagtgacctcctggtaccaaaagacttgggaacagaaagccagatctttatttcccgcacatatgatgccaccactcattttgagacaacgtgtgatgacattaaaaacatctataagaggatgacaggatcagagtttgactttgaggaaatgaagcgcaagaagaatgacatctatggggaagactaacagcagtacatgttattatgtaattaggacacatttaaaatttggcaaataatgcatataatgaaatcaatattgtaaggcctgcttttgtaatgaaaatggagagaatgaagagcgctgtgccagtaaatactccccttcacctttctaattattaacttgttttcatggagtggctattcagcattggcagttaccacattctgttcaatttaaccaaactggcttttttttttttctagtgaagttaaacaaacattgggataccgacacagacaacttgagacagtttttttaatcttttaatcagtgtagctatgtgctgctgctgctcaagagctggatccatacaggttgtgtgtcatctgtcctcttgaggttcaggagattctaaattgaatattccacggtttgggacagcatccggaagttttccctatgactttatattttgtattatgtcaaatgttatggcagggcccaaatagcatagccacaagtttggtttatgtgggcataaaattctaaccaaaccccagacatagggagtcatttggagaaagcctgtatgtggtgttttaacctaataaagttgatgagagagaaggggagaggaagcgaacataaagcgggtcaagtgtagtgcatcttttgtatctcaggcgtggcttcttcagtggaccaagctgcaatgcagtattgacttgacagagcctctacttctgtctcaaaatggctccaaatgatttctgtactgcaaaataaagccaaattctggaaacta

SEQ ID NO: 430090 - DNA, 3775 bp, Homo sapiens
tggcaattgtgaaaaaagctctttattgttattgctaataaaaaaaaaagggccaatagtcaggtgtggtggcctgtacctcttgtccctgctactggggagactgaggtgggaggatggcttgagcccaggagatcaaggctgcagtgaggcatgattacaccgctgcactccagcctggacgacagggtgagattgtctcagaaaaataaagaaaaagggttatttcatattggttcaaaaatataggtagtatgaccccctgatgacttgaagacagagcaacagaaggaccttctttagtcatcattagcttagccaaaagaaaagtcagttacactcactgttgcataatcagttgtatggtcaactgtgcactaattcatttggtcacaaatatatacaatcaaattaaggttgaatgtaaatttaaactttacttttgctttcttctcccctcccccccagaaagatccatggtccaatataacatatcttcttcaagtatttatggggtaagaaacattttaaaaagttgttacattctttcctctatcttaatgatttaaatatgagcaagttcggtctatcaaggcaggctctgaatagctactatcgagaagtatttgaggagttcttgaatgccaaatcttcattgtctgctgactctgcagatttatcacgtgctgaaagcacaggttttccaactgtcaacgtctttacgaaattcacctgcttaggctttcgtggggtcggcctcttggagctgagaacacagcttctgcttacacctgtgtcctcaatgaagctagagattcctaagagaattctagaaaaagaggagcggggtagaaggcaagcaaggaacagtttctaagcttagggcctaaacctttgcatacaaggatcagctaccacgtttacagcggctttaagttacagccctcggtaggtgcagatcggcttcccaatgaaacctggctttcactgttcatctctgttaagggttaccttttcaaaagaagccgcttttcctcctaccaatttcctaaagcgcccaccggcaacgcactaaacaaggagggcacagagcgggaaaaaggacacgtgtgatttccgaactcttcccggcgggctccgggccccggcaagcccagccccgcgggaggaaccaaggccgccacccccgagaggcagcccggcccgcgctcctcgcccacgtggccgccgcacgcgcccgctcaaagtccaagggcggcgatccggctctgggaccttggaccgagcgagctcccgccccgacggcgggagtcagaacggtggtggccagcagtccccgcccgcggctccgtgcacctccaccccggcccgcgcgccgcctcccgaaccaccgtggcagaggccgcaaggggaaccggaagccaaaatggcgacgccccgcccttttcctctcgcgagaggcggggaaggaaaaaaagttgtgcgagcgacggggacgtaaccaattagagtgccgggagcgcctgattggcggccctcccggcgcctgcaggccccgccccggctgcggaggctcagtcacagccctcccctcctcgctccctcccctcctctccccgcccagttcttctcttcccgtctgaggtggcggtcggtctcgccttgtcgccagctccattttcctctctttctcttcccctttccttcgcgcccaagagcgcctcccagcctcgtagggtggtcacggagcccctgcgccttttccttgctcgggtcctgcgtccgcgcctgccccgccatgaatgaggagtacgacgtgatcgtgctgggcaccggcctgacggaatgtatcctgtcaggtataatgtcagtgaatggcaagaaagttcttcatatggatcgaaacccttactacggaggagagagtgcatctataacaccattggaagatttatacaaaagatttaaaataccaggatcaccacccgagtcaatggggagaggaagagactggaatgttgacttgattcccaagttccttatggctaatggtcagctggttaagatgctgctttatacagaggtaactcgctatctggattttaaagtgactgaagggagctttgtctataagggtggaaaaatctacaaggttccttccactgaagcagaagccctggcatctagcctaatgggattgtttgaaaaacgtcgcttcaggaaattcctagtgtatgttgccaacttcgatgaaaaagatccaagaacttttgaaggcattgatcctaagaagaccacaatgcgagatgtgtataagaaatttgatttgggtcaagacgttatagattttactggtcatgctcttgcactttacagaactgatgattacttagatcaaccgtgttatgaaaccattaatagaattaaactttacagtgaatctttggcaagatatggcaaaagcccatacctttatccactctatggccttggagaactgccccaaggatttgcaaggctaagtgctatttatggaggtacctatatgctgaataaacccattgaagaaatcattgtacagaatggaaaagtaattggtgtaaaatctgaaggagaaattgctcgctgtaagcagctcatctgtgaccccagctacgtaaaagatcgggtagaaaaagtgggccaggtgatcagagttatttgcatcctcagccaccccatcaagaacaccaatgatgccaactcctgccagatcattattccacagaaccaagtcaatcgaaagtcagatttgttagcatcagtgacctcctggtaccaaaagacttgggaacagaaagccagatctttatttcccgcacatatgatgccaccactcattttgagacaacgtgtgatgacattaaaaacatctataagaggatgacaggatcagagtttgactttgaggaaatgaagcgcaagaagaatgacatctatggggaagactaacagcagtacatgttattatgtaattaggacacatttaaaatttggcaaataatgcatataatgaaatcaatattgtaaggcctgcttttgtaatgaaaatggagagaatgaagagcgctgtgccagtaaatactccccttcacctttctaattattaacttgttttcatggagtggctattcagcattggcagttaccacattctgttcaatttaaccaaactggcttttttttttttctagtgaagttaaacaaacattgggataccgacacagacaacttgagacagtttttttaatcttttaatcagtgtagctatgtgctgctgctgctcaagagctggatccatacaggttgtgtgtcatctgtcctcttgaggttcaggagattctaaattgaatattccacggtttgggacagcatccggaagttttccctatgactttatattttgtattatgtcaaatgttatggcagggcccaaatagcatagccacaagtttggtttatgtgggcataaaattctaaccaaaccccagacatagggagtcatttggagaaagcctgtatgtggtgttttaacctaataaagttgatgagagagaaggggagaggaagcgaacataaagcgggtcaagtgtagtgcatcttttgtatctcaggcgtggcttcttcagtggaccaagctgcaatgcagtattgacttgacagagcctctacttctgtctcaaaatggctccaaatgatttctgtactgcaaaataaagccaaattctggaaacta

SEQ ID NO: 430091 - DNA, 3866 bp, Homo sapiens
tggcaattgtgaaaaaagctctttattgttattgctaataaaaaaaaaagggccaatagtcaggtgtggtggcctgtacctcttgtccctgctactggggagactgaggtgggaggatggcttgagcccaggagatcaaggctgcagtgaggcatgattacaccgctgcactccagcctggacgacagggtgagattgtctcagaaaaataaagaaaaagggttatttcatattggttcaaaaatataggtagtatgaccccctgatgacttgaagacagagcaacagaaggaccttctttagtcatcattagcttagccaaaagaaaagtcagttacactcactgttgcataatcagttgtatggtcaactgtgcactaattcatttggtcacaaatatatacaatcaaattaaggttgaatgtaaatttaaactttacttttgctttcttctcccctcccccccagaaagatccatggtccaatataacatatcttcttcaagtatttatggggtaagaaacattttaaaaagttgttacattctttcctctatcttaatgatttaaatatgagcaagttcggtctatcaaggcaggctctgaatagctactatcgagaagtatttgaggagttcttgaatgccaaatcttcattgtctgctgactctgcagatttatcacgtgctgaaagcacaggttttccaactgtcaacgtctttacgaaattcacctgcttaggctttcgtggggtcggcctcttggagctgagaacacagcttctgcttacacctgtgtcctcaatgaagctagagattcctaagagaattctagaaaaagaggagcggggtagaaggcaagcaaggaacagtttctaagcttagggcctaaacctttgcatacaaggatcagctaccacgtttacagcggctttaagttacagccctcggtaggtgcagatcggcttcccaatgaaacctggctttcactgttcatctctgttaagggttaccttttcaaaagaagccgcttttcctcctaccaatttcctaaagcgcccaccggcaacgcactaaacaaggagggcacagagcgggaaaaaggacacgtgtgatttccgaactcttcccggcgggctccgggccccggcaagcccagccccgcgggaggaaccaaggccgccacccccgagaggcagcccggcccgcgctcctcgcccacgtggccgccgcacgcgcccgctcaaagtccaagggcggcgatccggctctgggaccttggaccgagcgagctcccgccccgacggcgggagtcagaacggtggtggccagcagtccccgcccgcggctccgtgcacctccaccccggcccgcgcgccgcctcccgaaccaccgtggcagaggccgcaaggggaaccggaagccaaaatggcgacgccccgcccttttcctctcgcgagaggcggggaaggaaaaaaagttgtgcgagcgacggggacgtaaccaattagagtgccgggagcgcctgattggcggccctcccggcgcctgcaggccccgccccggctgcggaggctcagtcacagccctcccctcctcgctccctcccctcctctccccgcccagttcttctcttcccgtctgaggtggcggtcggtctcgccttgtcgccagctccattttcctctctttctcttcccctttccttcgcgcccaagagcgcctcccagcctcgtagggtggtcacggagcccctgcgccttttccttgctcgggtcctgcgtccgcgcctgccccgccatgaatgaggagtacgacgtgatcgtgctgggcaccggcctgacggaatgtatcctgtcaggtataatgtcagtgaatggcaagaaagttcttcatatggatcgaaacccttactacggaggagagagtgcatctataacaccattggaagatttatacaaaagatttaaaataccaggatcaccacccgagtcaatggggagaggaagagactggaatgttgacttgattcccaagttccttatggctaatggtcagctggttaagatgctgctttatacagaggtaactcgctatctggattttaaagtgactgaagggagctttgtctataagggtggaaaaatctacaaggttccttccactgaagcagaagccctggcatctagcctaatgggattgtttgaaaaacgtcgcttcaggaaattcctagtgtatgttgccaacttcgatgaaaaagatccaagaacttttgaaggcattgatcctaagaagaccacaatgcgagatgtgtataagaaatttgatttgggtcaagacgttatagattttactggtcatgctcttgcactttacagaactgatgattacttagatcaaccgtgttatgaaaccattaatagaattaaactttacagtgaatctttggcaagatatggcaaaagcccatacctttatccactctatggccttggagaactgccccaaggatttgcaaggctaagtgctatttatggaggtacctatatgctgaataaacccattgaagaaatcattgtacagaatggaaaagtaattggtgtaaaatctgaaggagaaattgctcgctgtaagcagctcatctgtgaccccagctacgtaaaagatcgggtagaaaaagtgggccaggtgatcagagttatttgcatcctcagccaccccatcaagaacaccaatgatgccaactcctgccagatcattattccacagaaccaagtcaatcgaaagtcagatatctacgtctgcatgatctcctttgcgcacaatgtagcagcacaagggaagtacattgctatagttagtacaactgtggaaaccaaggagcctgagaaggaaatcagaccagctttggagctcttggaaccaattgaacagaaatttgttagcatcagtgacctcctggtaccaaaagacttgggaacagaaagccagatctttatttcccgcacatatgatgccaccactcattttgagacaacgtgtgatgacattaaaaacaagaatgacatctatggggaagactaacagcagtacatgttattatgtaattaggacacatttaaaatttggcaaataatgcatataatgaaatcaatattgtaaggcctgcttttgtaatgaaaatggagagaatgaagagcgctgtgccagtaaatactccccttcacctttctaattattaacttgttttcatggagtggctattcagcattggcagttaccacattctgttcaatttaaccaaactggcttttttttttttctagtgaagttaaacaaacattgggataccgacacagacaacttgagacagtttttttaatcttttaatcagtgtagctatgtgctgctgctgctcaagagctggatccatacaggttgtgtgtcatctgtcctcttgaggttcaggagattctaaattgaatattccacggtttgggacagcatccggaagttttccctatgactttatattttgtattatgtcaaatgttatggcagggcccaaatagcatagccacaagtttggtttatgtgggcataaaattctaaccaaaccccagacatagggagtcatttggagaaagcctgtatgtggtgttttaacctaataaagttgatgagagagaaggggagaggaagcgaacataaagcgggtcaagtgtagtgcatcttttgtatctcaggcgtggcttcttcagtggaccaagctgcaatgcagtattgacttgacagagcctctacttctgtctcaaaatggctccaaatgatttctgtactgcaaaataaagccaaattctggaaacta

SEQ ID NO: 430092 - DNA, 2273 bp, Homo sapiens
gaagcccccggaagcctccccagaagctgttgccggtgctatgcgacctgtacagcctgcagaaccaaagatccatggtccaatataacatatcttcttcaagtatttatggggtaacatcccaaaataacacttttagatgtctctaggcaagagaaaaccttcgaacttttatttggctaattttttaggaaaggaatgtatcctgtcaggtataatgtcagtgaatggcaagaaagttcttcatatggatcgaaacccttactacggaggagagagtgcatctataacaccattggaagatttatacaaaagatttaaaataccaggatcaccacccgagtcaatggggagaggaagagactggaatgttgacttgattcccaagttccttatggctaatggtcagctggttaagatgctgctttatacagaggtaactcgctatctggattttaaagtgactgaagggagctttgtctataagggtggaaaaatctacaaggttccttccactgaagcagaagccctggcatctagcctaatgggattgtttgaaaaacgtcgcttcaggaaattcctagtgtatgttgccaacttcgatgaaaaagatccaagaacttttgaaggcattgatcctaagaagaccacaatgcgagatgtgtataagaaatttgatttgggtcaagacgttatagattttactggtcatgctcttgcactttacagaactgatgattacttagatcaaccgtgttatgaaaccattaatagaattaaactttacagtgaatctttggcaagatatggcaaaagcccatacctttatccactctatggccttggagaactgccccaaggatttgcaaggctaagtgctatttatggaggtacctatatgctgaataaacccattgaagaaatcattgtacagaatggaaaagtaattggtgtaaaatctgaaggagaaattgctcgctgtaagcagctcatctgtgaccccagctacgtaaaagatcgggtagaaaaagtgggccaggtgatcagagttatttgcatcctcagccaccccatcaagaacaccaatgatgccaactcctgccagatcattattccacagaaccaagtcaatcgaaagtcagatatctacgtctgcatgatctcctttgcgcacaatgtagcagcacaagggaagtacattgctatagttagtacaactgtggaaaccaaggagcctgagaaggaaatcagaccagctttggagctcttggaaccaattgaacagaaatttgttagcatcagtgacctcctggtaccaaaagacttgggaacagaaagccagatctttatttcccgcacatatgatgccaccactcattttgagacaacgtgtgatgacattaaaaacatctataagaggatgacaggatcagagtttgactttgaggaaatgaagcgcaagaagaatgacatctatggggaagactaacagcagtacatgttattatgtaattaggacacatttaaaatttggcaaataatgcatataatgaaatcaatattgtaaggcctgcttttgtaatgaaaatggagagaatgaagagcgctgtgccagtaaatactccccttcacctttctaattattaacttgttttcatggagtggctattcagcattggcagttaccacattctgttcaatttaaccaaactggcttttttttttttctagtgaagttaaacaaacattgggataccgacacagacaacttgagacagtttttttaatcttttaatcagtgtagctatgtgctgctgctgctcaagagctggatccatacaggttgtgtgtcatctgtcctcttgaggttcaggagattctaaattgaatattccacggtttgggacagcatccggaagttttccctatgactttatattttgtattatgtcaaatgttatggcagggcccaaatagcatagccacaagtttggtttatgtgggcataaaattctaaccaaaccccagacatagggagtcatttggagaaagcctgtatgtggtgttttaacctaataaagttgatgagagagaaggggagaggaagcgaacataaagcgggtcaagtgtagtgcatcttttgtatctcaggcgtggcttcttcagtggaccaagctgcaatgcagtattgacttgacagagcctctacttctgtctcaaaatggctccaaatgatttctgtactgcaaaataaagccaaattctggaaacta

SEQ ID NO: 430093 - DNA, 4499 bp, Homo sapiens
tggcaattgtgaaaaaagctctttattgttattgctaataaaaaaaaaagggccaatagtcaggtgtggtggcctgtacctcttgtccctgctactggggagactgaggtgggaggatggcttgagcccaggagatcaaggctgcagtgaggcatgattacaccgctgcactccagcctggacgacagggtgagattgtctcagaaaaataaagaaaaagggttatttcatattggttcaaaaatataggtagtatgaccccctgatgacttgaagacagagcaacagaaggaccttctttagtcatcattagcttagccaaaagaaaagtcagttacactcactgttgcataatcagttgtatggtcaactgtgcactaattcatttggtcacaaatatatacaatcaaattaaggttgaatgtaaatttaaactttacttttgctttcttctcccctcccccccagaaagatccatggtccaatataacatatcttcttcaagtatttatggggtaagaaacattttaaaaagttgttacattctttcctctatcttaatgatttaaatatgagcaagttcggtctatcaaggcaggctctgaatagctactatcgagaagtatttgaggagttcttgaatgccaaatcttcattgtctgctgactctgcagatttatcacgtgctgaaagcacaggttttccaactgtcaacgtctttacgaaattcacctgcttaggctttcgtggggtcggcctcttggagctgagaacacagcttctgcttacacctgtgtcctcaatgaagctagagattcctaagagaattctagaaaaagaggagcggggtagaaggcaagcaaggaacagtttctaagcttagggcctaaacctttgcatacaaggatcagctaccacgtttacagcggctttaagttacagccctcggtaggtgcagatcggcttcccaatgaaacctggctttcactgttcatctctgttaagggttaccttttcaaaagaagccgcttttcctcctaccaatttcctaaagcgcccaccggcaacgcactaaacaaggagggcacagagcgggaaaaaggacacgtgtgatttccgaactcttcccggcgggctccgggccccggcaagcccagccccgcgggaggaaccaaggccgccacccccgagaggcagcccggcccgcgctcctcgcccacgtggccgccgcacgcgcccgctcaaagtccaagggcggcgatccggctctgggaccttggaccgagcgagctcccgccccgacggcgggagtcagaacggtggtggccagcagtccccgcccgcggctccgtgcacctccaccccggcccgcgcgccgcctcccgaaccaccgtggcagaggccgcaaggggaaccggaagccaaaatggcgacgccccgcccttttcctctcgcgagaggcggggaaggaaaaaaagttgtgcgagcgacggggacgtaaccaattagagtgccgggagcgcctgattggcggccctcccggcgcctgcaggccccgccccggctgcggaggctcagtcacagccctcccctcctcgctccctcccctcctctccccgcccagttcttctcttcccgtctgaggtggcggtcggtctcgccttgtcgccagctccattttcctctctttctcttcccctttccttcgcgcccaagagcgcctcccagcctcgtagggtggtcacggagcccctgcgccttttccttgctcgggtcctgcgtccgcgcctgccccgccatgaatgaggagtacgacgtgatcgtgctgggcaccggcctgacggaatgtatcctgtcaggtataatgtcagtgaatggcaagaaagttcttcatatggatcgaaacccttactacggaggagagagtgcatctataacaccattggaagatttatacaaaagatttaaaataccaggatcaccacccgagtcaatggggagaggaagagactggaatgttgacttgattcccaagttccttatggctaatggtcagctggttaagatgctgctttatacagaggtaactcgctatctggattttaaagtgactgaagggagctttgtctataagggtggaaaaatctacaaggttccttccactgaagcagaagccctggcatctagcctaatgggattgtttgaaaaacgtcgcttcaggaaattcctagtgtatgttgccaacttcgatgaaaaagatccaagaacttttgaaggcattgatcctaagaagaccacaatgcgagatgtgtataagaaatttgatttgggtcaagacgttatagattttactggtcatgctcttgcactttacagaactgatgagtaagtattttggtttttagatttgtatttttcttgaaattctcactaaatttcccaagtcttccaagtggaaattctaacaaaacaaatacttagccatattgcactatgaatgaagaggttctagttgaaattagtgttgggaccttttaagtgatttaaatataaaggtagtgggccaggtgtggtggctcacgcctgtgatcccagcactttgggaggccaagttgggtggatcatttgaggtcaggagttcaagaccagcctggccaacatggtgaaaccccctctctactaaaaatgcaaaaattagttgggcggtagtggtgcgtccctgtaattccagccacttgggaggctgaggcagaagaatcacttgagcctgggaggtggaagttgtggggagccgagattgcaccactgcactccagtctgggcgacagagtgagaccctgtctcaaaaaaacaaaaaaacaaaaaagaagatagcggattgaaatcgcttcaaaaaaaattataaattgaacaccatgaatgaaaactaaagccctttcctaatactcatttcctttcttccagttacttagatcaaccgtgttatgaaaccattaatagaattaaactttacagtgaatctttggcaagatatggcaaaagcccatacctttatccactctatggccttggagaactgccccaaggatttgcaaggctaagtgctatttatggaggtacctatatgctgaataaacccattgaagaaatcattgtacagaatggaaaagtaattggtgtaaaatctgaaggagaaattgctcgctgtaagcagctcatctgtgaccccagctacgtaaaagatcgggtagaaaaagtgggccaggtgatcagagttatttgcatcctcagccaccccatcaagaacaccaatgatgccaactcctgccagatcattattccacagaaccaagtcaatcgaaagtcagatatctacgtctgcatgatctcctttgcgcacaatgtagcagcacaagggaagtacattgctatagttagtacaactgtggaaaccaaggagcctgagaaggaaatcagaccagctttggagctcttggaaccaattgaacagaaatttgttagcatcagtgacctcctggtaccaaaagacttgggaacagaaagccagatctttatttcccgcacatatgatgccaccactcattttgagacaacgtgtgatgacattaaaaacatctataagaggatgacaggatcagagtttgactttgaggaaatgaagcgcaagaagaatgacatctatggggaagactaacagcagtacatgttattatgtaattaggacacatttaaaatttggcaaataatgcatataatgaaatcaatattgtaaggcctgcttttgtaatgaaaatggagagaatgaagagcgctgtgccagtaaatactccccttcacctttctaattattaacttgttttcatggagtggctattcagcattggcagttaccacattctgttcaatttaaccaaactggcttttttttttttctagtgaagttaaacaaacattgggataccgacacagacaacttgagacagtttttttaatcttttaatcagtgtagctatgtgctgctgctgctcaagagctggatccatacaggttgtgtgtcatctgtcctcttgaggttcaggagattctaaattgaatattccacggtttgggacagcatccggaagttttccctatgactttatattttgtattatgtcaaatgttatggcagggcccaaatagcatagccacaagtttggtttatgtgggcataaaattctaaccaaaccccagacatagggagtcatttggagaaagcctgtatgtggtgttttaacctaataaagttgatgagagagaaggggagaggaagcgaacataaagcgggtcaagtgtagtgcatcttttgtatctcaggcgtggcttcttcagtggaccaagctgcaatgcagtattgacttgacagagcctctacttctgtctcaaaatggctccaaatgatttctgtactgcaaaataaagccaaattctggaaacta

SEQ ID NO: 430094 - DNA, 3862 bp, Homo sapiens
tggcaattgtgaaaaaagctctttattgttattgctaataaaaaaaaaagggccaatagtcaggtgtggtggcctgtacctcttgtccctgctactggggagactgaggtgggaggatggcttgagcccaggagatcaaggctgcagtgaggcatgattacaccgctgcactccagcctggacgacagggtgagattgtctcagaaaaataaagaaaaagggttatttcatattggttcaaaaatataggtagtatgaccccctgatgacttgaagacagagcaacagaaggaccttctttagtcatcattagcttagccaaaagaaaagtcagttacactcactgttgcataatcagttgtatggtcaactgtgcactaattcatttggtcacaaatatatacaatcaaattaaggttgaatgtaaatttaaactttacttttgctttcttctcccctcccccccagaaagatccatggtccaatataacatatcttcttcaagtatttatggggtaagaaacattttaaaaagttgttacattctttcctctatcttaatgatttaaatatgagcaagttcggtctatcaaggcaggctctgaatagctactatcgagaagtatttgaggagttcttgaatgccaaatcttcattgtctgctgactctgcagatttatcacgtgctgaaagcacaggttttccaactgtcaacgtctttacgaaattcacctgcttaggctttcgtggggtcggcctcttggagctgagaacacagcttctgcttacacctgtgtcctcaatgaagctagagattcctaagagaattctagaaaaagaggagcggggtagaaggcaagcaaggaacagtttctaagcttagggcctaaacctttgcatacaaggatcagctaccacgtttacagcggctttaagttacagccctcggtaggtgcagatcggcttcccaatgaaacctggctttcactgttcatctctgttaagggttaccttttcaaaagaagccgcttttcctcctaccaatttcctaaagcgcccaccggcaacgcactaaacaaggagggcacagagcgggaaaaaggacacgtgtgatttccgaactcttcccggcgggctccgggccccggcaagcccagccccgcgggaggaaccaaggccgccacccccgagaggcagcccggcccgcgctcctcgcccacgtggccgccgcacgcgcccgctcaaagtccaagggcggcgatccggctctgggaccttggaccgagcgagctcccgccccgacggcgggagtcagaacggtggtggccagcagtccccgcccgcggctccgtgcacctccaccccggcccgcgcgccgcctcccgaaccaccgtggcagaggccgcaaggggaaccggaagccaaaatggcgacgccccgcccttttcctctcgcgagaggcggggaaggaaaaaaagttgtgcgagcgacggggacgtaaccaattagagtgccgggagcgcctgattggcggccctcccggcgcctgcaggccccgccccggctgcggaggctcagtcacagccctcccctcctcgctccctcccctcctctccccgcccagttcttctcttcccgtctgaggtggcggtcggtctcgccttgtcgccagctccattttcctctctttctcttcccctttccttcgcgcccaagagcgcctcccagcctcgtagggtggtcacggagcccctgcgccttttccttgctcgggtcctgcgtccgcgcctgccccgccatgaatgaggagtacgacgtgatcgtgctgggcaccggcctgacggaatgtatcctgtcaggtataatgtcagtgaatggcaagaaagttcttcatatggatcgaaacccttactacggaggagagagtgcatctataacaccattggaagatactggaatgttgacttgattcccaagttccttatggctaatggtcagctggttaagatgctgctttatacagaggtaactcgctatctggattttaaagtgactgaagggagctttgtctataagggtggaaaaatctacaaggttccttccactgaagcagaagccctggcatctagcctaatgggattgtttgaaaaacgtcgcttcaggaaattcctagtgtatgttgccaacttcgatgaaaaagatccaagaacttttgaaggcattgatcctaagaagaccacaatgcgagatgtgtataagaaatttgatttgggtcaagacgttatagattttactggtcatgctcttgcactttacagaactgatgattacttagatcaaccgtgttatgaaaccattaatagaattaaactttacagtgaatctttggcaagatatggcaaaagcccatacctttatccactctatggccttggagaactgccccaaggatttgcaaggctaagtgctatttatggaggtacctatatgctgaataaacccattgaagaaatcattgtacagaatggaaaagtaattggtgtaaaatctgaaggagaaattgctcgctgtaagcagctcatctgtgaccccagctacgtaaaagatcgggtagaaaaagtgggccaggtgatcagagttatttgcatcctcagccaccccatcaagaacaccaatgatgccaactcctgccagatcattattccacagaaccaagtcaatcgaaagtcagatatctacgtctgcatgatctcctttgcgcacaatgtagcagcacaagggaagtacattgctatagttagtacaactgtggaaaccaaggagcctgagaaggaaatcagaccagctttggagctcttggaaccaattgaacagaaatttgttagcatcagtgacctcctggtaccaaaagacttgggaacagaaagccagatctttatttcccgcacatatgatgccaccactcattttgagacaacgtgtgatgacattaaaaacatctataagaggatgacaggatcagagtttgactttgaggaaatgaagcgcaagaagaatgacatctatggggaagactaacagcagtacatgttattatgtaattaggacacatttaaaatttggcaaataatgcatataatgaaatcaatattgtaaggcctgcttttgtaatgaaaatggagagaatgaagagcgctgtgccagtaaatactccccttcacctttctaattattaacttgttttcatggagtggctattcagcattggcagttaccacattctgttcaatttaaccaaactggcttttttttttttctagtgaagttaaacaaacattgggataccgacacagacaacttgagacagtttttttaatcttttaatcagtgtagctatgtgctgctgctgctcaagagctggatccatacaggttgtgtgtcatctgtcctcttgaggttcaggagattctaaattgaatattccacggtttgggacagcatccggaagttttccctatgactttatattttgtattatgtcaaatgttatggcagggcccaaatagcatagccacaagtttggtttatgtgggcataaaattctaaccaaaccccagacatagggagtcatttggagaaagcctgtatgtggtgttttaacctaataaagttgatgagagagaaggggagaggaagcgaacataaagcgggtcaagtgtagtgcatcttttgtatctcaggcgtggcttcttcagtggaccaagctgcaatgcagtattgacttgacagagcctctacttctgtctcaaaatggctccaaatgatttctgtactgcaaaataaagccaaattctggaaacta

SEQ ID NO: 430095 - DNA, 3785 bp, Homo sapiens
tggcaattgtgaaaaaagctctttattgttattgctaataaaaaaaaaagggccaatagtcaggtgtggtggcctgtacctcttgtccctgctactggggagactgaggtgggaggatggcttgagcccaggagatcaaggctgcagtgaggcatgattacaccgctgcactccagcctggacgacagggtgagattgtctcagaaaaataaagaaaaagggttatttcatattggttcaaaaatataggtagtatgaccccctgatgacttgaagacagagcaacagaaggaccttctttagtcatcattagcttagccaaaagaaaagtcagttacactcactgttgcataatcagttgtatggtcaactgtgcactaattcatttggtcacaaatatatacaatcaaattaaggttgaatgtaaatttaaactttacttttgctttcttctcccctcccccccagaaagatccatggtccaatataacatatcttcttcaagtatttatggggtaagaaacattttaaaaagttgttacattctttcctctatcttaatgatttaaatatgagcaagttcggtctatcaaggcaggctctgaatagctactatcgagaagtatttgaggagttcttgaatgccaaatcttcattgtctgctgactctgcagatttatcacgtgctgaaagcacaggttttccaactgtcaacgtctttacgaaattcacctgcttaggctttcgtggggtcggcctcttggagctgagaacacagcttctgcttacacctgtgtcctcaatgaagctagagattcctaagagaattctagaaaaagaggagcggggtagaaggcaagcaaggaacagtttctaagcttagggcctaaacctttgcatacaaggatcagctaccacgtttacagcggctttaagttacagccctcggtaggtgcagatcggcttcccaatgaaacctggctttcactgttcatctctgttaagggttaccttttcaaaagaagccgcttttcctcctaccaatttcctaaagcgcccaccggcaacgcactaaacaaggagggcacagagcgggaaaaaggacacgtgtgatttccgaactcttcccggcgggctccgggccccggcaagcccagccccgcgggaggaaccaaggccgccacccccgagaggcagcccggcccgcgctcctcgcccacgtggccgccgcacgcgcccgctcaaagtccaagggcggcgatccggctctgggaccttggaccgagcgagctcccgccccgacggcgggagtcagaacggtggtggccagcagtccccgcccgcggctccgtgcacctccaccccggcccgcgcgccgcctcccgaaccaccgtggcagaggccgcaaggggaaccggaagccaaaatggcgacgccccgcccttttcctctcgcgagaggcggggaaggaaaaaaagttgtgcgagcgacggggacgtaaccaattagagtgccgggagcgcctgattggcggccctcccggcgcctgcaggccccgccccggctgcggaggctcagtcacagccctcccctcctcgctccctcccctcctctccccgcccagttcttctcttcccgtctgaggtggcggtcggtctcgccttgtcgccagctccattttcctctctttctcttcccctttccttcgcgcccaagagcgcctcccagcctcgtagggtggtcacggagcccctgcgccttttccttgctcgggtcctgcgtccgcgcctgccccgccatgaatgaggagtacgacgtgatcgtgctgggcaccggcctgacggaatgtatcctgtcaggtataatgtcagtgaatggcaagaaagttcttcatatggatcgaaacccttactacggaggagagagtgcatctataacaccattggaagatttatacaaaagatttaaaataccaggatcaccacccgagtcaatggggagaggaagagactggaatgttgacttgattcccaagttccttatggctaatggcctaatgggattgtttgaaaaacgtcgcttcaggaaattcctagtgtatgttgccaacttcgatgaaaaagatccaagaacttttgaaggcattgatcctaagaagaccacaatgcgagatgtgtataagaaatttgatttgggtcaagacgttatagattttactggtcatgctcttgcactttacagaactgatgattacttagatcaaccgtgttatgaaaccattaatagaattaaactttacagtgaatctttggcaagatatggcaaaagcccatacctttatccactctatggccttggagaactgccccaaggatttgcaaggctaagtgctatttatggaggtacctatatgctgaataaacccattgaagaaatcattgtacagaatggaaaagtaattggtgtaaaatctgaaggagaaattgctcgctgtaagcagctcatctgtgaccccagctacgtaaaagatcgggtagaaaaagtgggccaggtgatcagagttatttgcatcctcagccaccccatcaagaacaccaatgatgccaactcctgccagatcattattccacagaaccaagtcaatcgaaagtcagatatctacgtctgcatgatctcctttgcgcacaatgtagcagcacaagggaagtacattgctatagttagtacaactgtggaaaccaaggagcctgagaaggaaatcagaccagctttggagctcttggaaccaattgaacagaaatttgttagcatcagtgacctcctggtaccaaaagacttgggaacagaaagccagatctttatttcccgcacatatgatgccaccactcattttgagacaacgtgtgatgacattaaaaacatctataagaggatgacaggatcagagtttgactttgaggaaatgaagcgcaagaagaatgacatctatggggaagactaacagcagtacatgttattatgtaattaggacacatttaaaatttggcaaataatgcatataatgaaatcaatattgtaaggcctgcttttgtaatgaaaatggagagaatgaagagcgctgtgccagtaaatactccccttcacctttctaattattaacttgttttcatggagtggctattcagcattggcagttaccacattctgttcaatttaaccaaactggcttttttttttttctagtgaagttaaacaaacattgggataccgacacagacaacttgagacagtttttttaatcttttaatcagtgtagctatgtgctgctgctgctcaagagctggatccatacaggttgtgtgtcatctgtcctcttgaggttcaggagattctaaattgaatattccacggtttgggacagcatccggaagttttccctatgactttatattttgtattatgtcaaatgttatggcagggcccaaatagcatagccacaagtttggtttatgtgggcataaaattctaaccaaaccccagacatagggagtcatttggagaaagcctgtatgtggtgttttaacctaataaagttgatgagagagaaggggagaggaagcgaacataaagcgggtcaagtgtagtgcatcttttgtatctcaggcgtggcttcttcagtggaccaagctgcaatgcagtattgacttgacagagcctctacttctgtctcaaaatggctccaaatgatttctgtactgcaaaataaagccaaattctggaaacta

SEQ ID NO: 430096 - DNA, 3340 bp, Homo sapiens
tggcaattgtgaaaaaagctctttattgttattgctaataaaaaaaaaagggccaatagtcaggtgtggtggcctgtacctcttgtccctgctactggggagactgaggtgggaggatggcttgagcccaggagatcaaggctgcagtgaggcatgattacaccgctgcactccagcctggacgacagggtgagattgtctcagaaaaataaagaaaaagggttatttcatattggttcaaaaatataggtagtatgaccccctgatgacttgaagacagagcaacagaaggaccttctttagtcatcattagcttagccaaaagaaaagtcagttacactcactgttgcataatcagttgtatggtcaactgtgcactaattcatttggtcacaaatatatacaatcaaattaaggttgaatgtaaatttaaactttacttttgctttcttctcccctcccccccagaaagatccatggtccaatataacatatcttcttcaagtatttatggggtaagaaacattttaaaaagttgttacattctttcctctatcttaatgatttaaatatgagcaagttcggtctatcaaggcaggctctgaatagctactatcgagaagtatttgaggagttcttgaatgccaaatcttcattgtctgctgactctgcagatttatcacgtgctgaaagcacaggttttccaactgtcaacgtctttacgaaattcacctgcttaggctttcgtggggtcggcctcttggagctgagaacacagcttctgcttacacctgtgtcctcaatgaagctagagattcctaagagaattctagaaaaagaggagcggggtagaaggcaagcaaggaacagtttctaagcttagggcctaaacctttgcatacaaggatcagctaccacgtttacagcggctttaagttacagccctcggtaggtgcagatcggcttcccaatgaaacctggctttcactgttcatctctgttaagggttaccttttcaaaagaagccgcttttcctcctaccaatttcctaaagcgcccaccggcaacgcactaaacaaggagggcacagagcgggaaaaaggacacgtgtgatttccgaactcttcccggcgggctccgggccccggcaagcccagccccgcgggaggaaccaaggccgccacccccgagaggcagcccggcccgcgctcctcgcccacgtggccgccgcacgcgcccgctcaaagtccaagggcggcgatccggctctgggaccttggaccgagcgagctcccgccccgacggcgggagtcagaacggtggtggccagcagtccccgcccgcggctccgtgcacctccaccccggcccgcgcgccgcctcccgaaccaccgtggcagaggccgcaaggggaaccggaagccaaaatggcgacgccccgcccttttcctctcgcgagaggcggggaaggaaaaaaagttgtgcgagcgacggggacgtaaccaattagagtgccgggagcgcctgattggcggccctcccggcgcctgcaggccccgccccggctgcggaggctcagtcacagccctcccctcctcgctccctcccctcctctccccgcccagttcttctcttcccgtctgaggtggcggtcggtctcgccttgtcgccagctccattttcctctctttctcttcccctttccttcgcgcccaagagcgcctcccagcctcgtagggtggtcacggagcccctgcgccttttccttgctcgggtcctgcgtccgcgcctgccccgccatgaatgaggagtacgacgtgatcgtgctgggcaccggcctgacggaatgtatcctgtcaggtataatgtcagtgaatggcaagaaagttcttcatatggatcgaaacccttactacggaggagagagtgcatctataacaccattggaagatttatacaaaagatttaaaataccaggatcaccacccgagtcaatggggagaggaagagactggaatgttgacttgattcccaagttccttatggctaatggtcagctggttaagatgctgctttatacagaggtaactcgctatctggattttaaagtgactgaagggagctttgtctataagggtggaaaaatctacaaggttccttccactgaagcagaagccctggcatctagcctaatgggattgtttgaaaaacgtcgcttcaggaaattcctagtgtatgttgccaacttcgatgaaaaagatccaagaacttttgaaggcattgatcctaagaagaccacaatgcgagatgtgtataagaaatttgatttgggtcaagacgttatagattttactggtcatgctcttgcactttacagaactgatgattacttagatcaaccgtgttatgaaaccattaatagaattaaactttacagtgaatctttggcaagatatggcaaaagcccatacctttatccactctatggccttggagaactgccccaaggatttgcaaggctaagtgctatttatggaggtacctatatgctgaataaacccattgaagaaatcattgtacagaatggaaaagtaattggtgtaaaatctgaaggagaaattgctcgctgtaagcagctcatctgtgaccccagctacgtaaaagatcgggtagaaaaagtgggccaggtgatcagagttatttgcatcctcagccaccccatcaagaacaccaatgatgccaactcctgccagatcattattccacagaaccaagtcaatcgaaagtcagatatctacgtctgcatgatctcctttgcgcacaatgtagcagcacaagggaagtacattgctatagttagtacaactgtggaaaccaaggagcctgagaaggaaatcagaccagctttggagctcttggaaccaattgaacagaaatttgttagcatcagtgacctcctggtaccaaaagacttgggaacagaaagccagatctttatttcccgcacatatgatgccaccactcattttgagacaacgtgtgatgacattaaaaacatctataagaggatgacaggatcagagtttgactttgaggaaatgaagcgcaagaagaatgacatctatggggaagactaacagcagtacatgttattatgtaattaggacacatttaaaatttggcaaataatgcatataatgaaatcaatattgtaaggcctgcttttgtaatgaaaatggagagaatgaagagcgctgtgccagcctctctttgacaagagaaattggctggagacatgaaaagtatagtagtcgtcacagaaaaagtagcgacagcaggca

SEQ ID NO: 430097 - DNA, 3277 bp, Homo sapiens
tggcaattgtgaaaaaagctctttattgttattgctaataaaaaaaaaagggccaatagtcaggtgtggtggcctgtacctcttgtccctgctactggggagactgaggtgggaggatggcttgagcccaggagatcaaggctgcagtgaggcatgattacaccgctgcactccagcctggacgacagggtgagattgtctcagaaaaataaagaaaaagggttatttcatattggttcaaaaatataggtagtatgaccccctgatgacttgaagacagagcaacagaaggaccttctttagtcatcattagcttagccaaaagaaaagtcagttacactcactgttgcataatcagttgtatggtcaactgtgcactaattcatttggtcacaaatatatacaatcaaattaaggttgaatgtaaatttaaactttacttttgctttcttctcccctcccccccagaaagatccatggtccaatataacatatcttcttcaagtatttatggggtaagaaacattttaaaaagttgttacattctttcctctatcttaatgatttaaatatgagcaagttcggtctatcaaggcaggctctgaatagctactatcgagaagtatttgaggagttcttgaatgccaaatcttcattgtctgctgactctgcagatttatcacgtgctgaaagcacaggttttccaactgtcaacgtctttacgaaattcacctgcttaggctttcgtggggtcggcctcttggagctgagaacacagcttctgcttacacctgtgtcctcaatgaagctagagattcctaagagaattctagaaaaagaggagcggggtagaaggcaagcaaggaacagtttctaagcttagggcctaaacctttgcatacaaggatcagctaccacgtttacagcggctttaagttacagccctcggtaggtgcagatcggcttcccaatgaaacctggctttcactgttcatctctgttaagggttaccttttcaaaagaagccgcttttcctcctaccaatttcctaaagcgcccaccggcaacgcactaaacaaggagggcacagagcgggaaaaaggacacgtgtgatttccgaactcttcccggcgggctccgggccccggcaagcccagccccgcgggaggaaccaaggccgccacccccgagaggcagcccggcccgcgctcctcgcccacgtggccgccgcacgcgcccgctcaaagtccaagggcggcgatccggctctgggaccttggaccgagcgagctcccgccccgacggcgggagtcagaacggtggtggccagcagtccccgcccgcggctccgtgcacctccaccccggcccgcgcgccgcctcccgaaccaccgtggcagaggccgcaaggggaaccggaagccaaaatggcgacgccccgcccttttcctctcgcgagaggcggggaaggaaaaaaagttgtgcgagcgacggggacgtaaccaattagagtgccgggagcgcctgattggcggccctcccggcgcctgcaggccccgccccggctgcggaggctcagtcacagccctcccctcctcgctccctcccctcctctccccgcccagttcttctcttcccgtctgaggtggcggtcggtctcgccttgtcgccagctccattttcctctctttctcttcccctttccttcgcgcccaagagcgcctcccagcctcgtagggtggtcacggagcccctgcgccttttccttgctcgggtcctgcgtccgcgcctgccccgccatgaatgaggagtacgacgtgatcgtgctgggcaccggcctgacggaatgtatcctgtcaggtataatgtcagtgaatggcaagaaagttcttcatatggatcgaaacccttactacggaggagagagtgcatctataacaccattggaagatttatacaaaagatttaaaataccaggatcaccacccgagtcaatggggagaggaagagactggaatgttgacttgattcccaagttccttatggctaatggtcagctggttaagatgctgctttatacagaggtaactcgctatctggattttaaagtgactgaagggagctttgtctataagggtggaaaaatctacaaggttccttccactgaagcagaagccctggcatctagcctaatgggattgtttgaaaaacgtcgcttcaggaaattcctagtgtatgttgccaacttcgatgaaaaagatccaagaacttttgaaggcattgatcctaagaagaccacaatgcgagatgtgtataagaaatttgatttgggtcaagacgttatagattttactggtcatgctcttgcactttacagaactgatgattacttagatcaaccgtgttatgaaaccattaatagaattaaactttacagtgaatctttggcaagatatggcaaaagcccatacctttatccactctatggccttggagaactgccccaaggatttgcaaggctaagtgctatttatggaggtacctatatgctgaataaacccattgaagaaatcattgtacagaatggaaaagtaattggtgtaaaatctgaaggagaaattgctcgctgtaagcagctcatctgtgaccccagctacgtaaaagatcgggtagaaaaagtgggccaggtgatcagagttatttgcatcctcagccaccccatcaagaacaccaatgatgccaactcctgccagatcattattccacagaaccaagtcaatcgaaagtcagatatctacgtctgcatgatctcctttgcgcacaatgtagcagcacaagggaagtacattgctatagttagtacaactgtggaaaccaaggagcctgagaaggaaatcagaccagctttggagctcttggaaccaattgaacagaaatttgttagcatcagtgacctcctggtaccaaaagacttgggaacagaaagccagatctttatttcccgcacatatgatgccaccactcattttgagacaacgtgtgatgacattaaaaacatctataagaggatgacaggatcagagtttgactttgaggaaatgaagcgcaagaagaatgacatctatggggaagactaacagcagtacatgttattatgtaattaggacacatttaaaatttggcaaataatgcatataatgaaatcaatatttactggcacagcgctcttcattctctccattttcattacaaaagcaggccttacaatattgattgtc

SEQ ID NO: 430098 - DNA, 1797 bp, Homo sapiens
caggagaggcggggtgaatcggacgaggcaggtccttcactgaagcagaagccctggcatctagcctaatgggattgtttgaaaaacgtcgcttcaggaaattcctagtgtatgttgccaacttcgatgaaaaagatccaagaacttttgaaggcattgatcctaagaagaccacaatgcgagatgtgtataagaaatttgatttgggtcaagacgttatagattttactggtcatgctcttgcactttacagaactgatgattacttagatcaaccgtgttatgaaaccattaatagaattaaactttacagtgaatctttggcaagatatggcaaaagcccatacctttatccactctatggccttggagaactgccccaaggatttgcaaggctaagtgctatttatggaggtacctatatgctgaataaacccattgaagaaatcattgtacagaatggaaaagtaattggtgtaaaatctgaaggagaaattgctcgctgtaagcagctcatctgtgaccccagctacgtaaaagatcgggtagaaaaagtgggccaggtgatcagagttatttgcatcctcagccaccccatcaagaacaccaatgatgccaactcctgccagatcattattccacagaaccaagtcaatcgaaagtcagatatctacgtctgcatgatctcctttgcgcacaatgtagcagcacaagggaagtacattgctatagttagtacaactgtggaaaccaaggagcctgagaaggaaatcagaccagctttggagctcttggaaccaattgaacagaaatttgttagcatcagtgacctcctggtaccaaaagacttgggaacagaaagccagatctttatttcccgcacatatgatgccaccactcattttgagacaacgtgtgatgacattaaaaacatctataagaggatgacaggatcagagtttgactttgaggaaatgaagcgcaagaagaatgacatctatggggaagactaacagcagtacatgttattatgtaattaggacacatttaaaatttggcaaataatgcatataatgaaatcaatattgtaaggcctgcttttgtaatgaaaatggagagaatgaagagcgctgtgccagtaaatactccccttcacctttctaattattaacttgttttcatggagtggctattcagcattggcagttaccacattctgttcaatttaaccaaactggcttttttttttttctagtgaagttaaacaaacattgggataccgacacagacaacttgagacagtttttttaatcttttaatcagtgtagctatgtgctgctgctgctcaagagctggatccatacaggttgtgtgtcatctgtcctcttgaggttcaggagattctaaattgaatattccacggtttgggacagcatccggaagttttccctatgactttatattttgtattatgtcaaatgttatggcagggcccaaatagcatagccacaagtttggtttatgtgggcataaaattctaaccaaaccccagacatagggagtcatttggagaaagcctgtatgtggtgttttaacctaataaagttgatgagagagaaggggagaggaagcgaacataaagcgggtcaagtgtagtgcatcttttgtatctcaggcgtggcttcttcagtggaccaagctgcaatgcagtattgacttgacagagcctctacttctgtctcaaaatggctccaaatgatttctgtactgcaaaataaagccaaattctggaaacta

SEQ ID NO: 430099 - DNA, 1589 bp, Homo sapiens
  misc_feature (6)..(6): n is a, c, g, or t
gctganctagaggatcccgaacgggtgatgggttgcactttacagaactgatgattacttagatcaaccgtgttatgaaaccattaatagaattaaactttacagtgaatctttggcaagatatggcaaaagcccatacctttatccactctatggccttggagaactgccccaaggatttgcaaggctaagtgctatttatggaggtacctatatgctgaataaacccattgaagaaatcattgtacagaatggaaaagtaattggtgtaaaatctgaaggagaaattgctcgctgtaagcagctcatctgtgaccccagctacgtaaaagatcgggtagaaaaagtgggccaggtgatcagagttatttgcatcctcagccaccccatcaagaacaccaatgatgccaactcctgccagatcattattccacagaaccaagtcaatcgaaagtcagatatctacgtctgcatgatctcctttgcgcacaatgtagcagcacaagggaagtacattgctatagttagtacaactgtggaaaccaaggagcctgagaaggaaatcagaccagctttggagctcttggaaccaattgaacagaaatttgttagcatcagtgacctcctggtaccaaaagacttgggaacagaaagccagatctttatttcccgcacatatgatgccaccactcattttgagacaacgtgtgatgacattaaaaacatctataagaggatgacaggatcagagtttgactttgaggaaatgaagcgcaagaagaatgacatctatggggaagactaacagcagtacatgttattatgtaattaggacacatttaaaatttggcaaataatgcatataatgaaatcaatattgtaaggcctgcttttgtaatgaaaatggagagaatgaagagcgctgtgccagtaaatactccccttcacctttctaattattaacttgttttcatggagtggctattcagcattggcagttaccacattctgttcaatttaaccaaactggcttttttttttttctagtgaagttaaacaaacattgggataccgacacagacaacttgagacagtttttttaatcttttaatcagtgtagctatgtgctgctgctgctcaagagctggatccatacaggttgtgtgtcatctgtcctcttgaggttcaggagattctaaattgaatattccacggtttgggacagcatccggaagttttccctatgactttatattttgtattatgtcaaatgttatggcagggcccaaatagcatagccacaagtttggtttatgtgggcataaaattctaaccaaaccccagacatagggagtcatttggagaaagcctgtatgtggtgttttaacctaataaagttgatgagagagaaggggagaggaagcgaacataaagcgggtcaagtgtagtgcatcttttgtatctcaggcgtggcttcttcagtggaccaagctgcaatgcagtattgacttgacagagcctctacttctgtctcaaaatggctccaaatgatttctgtactgcaaaataaagccaaattctggaaacta

SEQ ID NO: 430100 - DNA, 3037 bp, Homo sapiens
  misc_feature (2999)..(2999): n is a, c, g, or t
tggcaattgtgaaaaaagctctttattgttattgctaataaaaaaaaaagggccaatagtcaggtgtggtggcctgtacctcttgtccctgctactggggagactgaggtgggaggatggcttgagcccaggagatcaaggctgcagtgaggcatgattacaccgctgcactccagcctggacgacagggtgagattgtctcagaaaaataaagaaaaagggttatttcatattggttcaaaaatataggtagtatgaccccctgatgacttgaagacagagcaacagaaggaccttctttagtcatcattagcttagccaaaagaaaagtcagttacactcactgttgcataatcagttgtatggtcaactgtgcactaattcatttggtcacaaatatatacaatcaaattaaggttgaatgtaaatttaaactttacttttgctttcttctcccctcccccccagaaagatccatggtccaatataacatatcttcttcaagtatttatggggtaagaaacattttaaaaagttgttacattctttcctctatcttaatgatttaaatatgagcaagttcggtctatcaaggcaggctctgaatagctactatcgagaagtatttgaggagttcttgaatgccaaatcttcattgtctgctgactctgcagatttatcacgtgctgaaagcacaggttttccaactgtcaacgtctttacgaaattcacctgcttaggctttcgtggggtcggcctcttggagctgagaacacagcttctgcttacacctgtgtcctcaatgaagctagagattcctaagagaattctagaaaaagaggagcggggtagaaggcaagcaaggaacagtttctaagcttagggcctaaacctttgcatacaaggatcagctaccacgtttacagcggctttaagttacagccctcggtaggtgcagatcggcttcccaatgaaacctggctttcactgttcatctctgttaagggttaccttttcaaaagaagccgcttttcctcctaccaatttcctaaagcgcccaccggcaacgcactaaacaaggagggcacagagcgggaaaaaggacacgtgtgatttccgaactcttcccggcgggctccgggccccggcaagcccagccccgcgggaggaaccaaggccgccacccccgagaggcagcccggcccgcgctcctcgcccacgtggccgccgcacgcgcccgctcaaagtccaagggcggcgatccggctctgggaccttggaccgagcgagctcccgccccgacggcgggagtcagaacggtggtggccagcagtccccgcccgcggctccgtgcacctccaccccggcccgcgcgccgcctcccgaaccaccgtggcagaggccgcaaggggaaccggaagccaaaatggcgacgccccgcccttttcctctcgcgagaggcggggaaggaaaaaaagttgtgcgagcgacggggacgtaaccaattagagtgccgggagcgcctgattggcggccctcccggcgcctgcaggccccgccccggctgcggaggctcagtcacagccctcccctcctcgctccctcccctcctctccccgcccagttcttctcttcccgtctgaggtggcggtcggtctcgccttgtcgccagctccattttcctctctttctcttcccctttccttcgcgcccaagagcgcctcccagcctcgtagggtggtcacggagcccctgcgccttttccttgctcgggtcctgcgtccgcgcctgccccgccatgaatgaggagtacgacgtgatcgtgctgggcaccggcctgacggaatgtatcctgtcaggtataatgtcagtgaatggcaagaaagttcttcatatggatcgaaacccttactacggaggagagagtgcatctataacaccattggaagatttatacaaaagatttaaaataccaggatcaccacccgagtcaatggggagaggaagagactggaatgttgacttgattcccaagttccttatggctaatggtcagctggttaagatgctgctttatacagaggtaactcgctatctggattttaaagtgactgaagggagctttgtctataagggtggaaaaatctacaaggttccttccactgaagcagaagccctggcatctagcctaatgggattgtttgaaaaacgtcgcttcaggaaattcctagtgtatgttgccaacttcgatgaaaaagatccaagaacttttgaaggcattgatcctaagaagaccacaatgcgagatgtgtataagaaatttgatttgggtcaagacgttatagattttactggtcatgctcttgcactttacagaactgatgattacttagatcaaccgtgttatgaaaccattaatagaattaaactttacagtgaatctttggcaagatatggcaaaagcccatacctttatccactctatggccttggagaactgccccaaggatttgcaaggctaagtgctatttatggaggtacctatatgctgaataaacccattgaagaaatcattgtacagaatggaaaagtaattggtgtaaaatctgaaggagaaattgctcgctgtaagcagctcatctgtgaccccagctacgtaaaagatcgggtagaaaaagtgggccaggtgatcagagttatttgcatcctcagccaccccatcaagaacaccaatgatgccaactcctgccagatcattattccacagaaccaagtcaatcgaaagtcagatatctacgtctgcatgatctcctttgcgcacaatgtagcagcacaagggaagtacattgctatagttagtacaactgtggaaaccaaggagcctgagaaggaaatcagaccagctttggagctcttggaaccaattgaacagaaatttgttagcatcagtgacctcctggtaccaaaagacttgggaacagaaagccagatctttattncccgcagatgacgccgatgtagctcattgggttccgat

SEQ ID NO: 430101 - DNA, 3040 bp, Homo sapiens
tggcaattgtgaaaaaagctctttattgttattgctaataaaaaaaaaagggccaatagtcaggtgtggtggcctgtacctcttgtccctgctactggggagactgaggtgggaggatggcttgagcccaggagatcaaggctgcagtgaggcatgattacaccgctgcactccagcctggacgacagggtgagattgtctcagaaaaataaagaaaaagggttatttcatattggttcaaaaatataggtagtatgaccccctgatgacttgaagacagagcaacagaaggaccttctttagtcatcattagcttagccaaaagaaaagtcagttacactcactgttgcataatcagttgtatggtcaactgtgcactaattcatttggtcacaaatatatacaatcaaattaaggttgaatgtaaatttaaactttacttttgctttcttctcccctcccccccagaaagatccatggtccaatataacatatcttcttcaagtatttatggggtaagaaacattttaaaaagttgttacattctttcctctatcttaatgatttaaatatgagcaagttcggtctatcaaggcaggctctgaatagctactatcgagaagtatttgaggagttcttgaatgccaaatcttcattgtctgctgactctgcagatttatcacgtgctgaaagcacaggttttccaactgtcaacgtctttacgaaattcacctgcttaggctttcgtggggtcggcctcttggagctgagaacacagcttctgcttacacctgtgtcctcaatgaagctagagattcctaagagaattctagaaaaagaggagcggggtagaaggcaagcaaggaacagtttctaagcttagggcctaaacctttgcatacaaggatcagctaccacgtttacagcggctttaagttacagccctcggtaggtgcagatcggcttcccaatgaaacctggctttcactgttcatctctgttaagggttaccttttcaaaagaagccgcttttcctcctaccaatttcctaaagcgcccaccggcaacgcactaaacaaggagggcacagagcgggaaaaaggacacgtgtgatttccgaactcttcccggcgggctccgggccccggcaagcccagccccgcgggaggaaccaaggccgccacccccgagaggcagcccggcccgcgctcctcgcccacgtggccgccgcacgcgcccgctcaaagtccaagggcggcgatccggctctgggaccttggaccgagcgagctcccgccccgacggcgggagtcagaacggtggtggccagcagtccccgcccgcggctccgtgcacctccaccccggcccgcgcgccgcctcccgaaccaccgtggcagaggccgcaaggggaaccggaagccaaaatggcgacgccccgcccttttcctctcgcgagaggcggggaaggaaaaaaagttgtgcgagcgacggggacgtaaccaattagagtgccgggagcgcctgattggcggccctcccggcgcctgcaggccccgccccggctgcggaggctcagtcacagccctcccctcctcgctccctcccctcctctccccgcccagttcttctcttcccgtctgaggtggcggtcggtctcgccttgtcgccagctccattttcctctctttctcttcccctttccttcgcgcccaagagcgcctcccagcctcgtagggtggtcacggagcccctgcgccttttccttgctcgggtcctgcgtccgcgcctgccccgccatgaatgaggagtacgacgtgatcgtgctgggcaccggcctgacggaatgtatcctgtcaggtataatgtcagtgaatggcaagaaagttcttcatatggatcgaaacccttactacggaggagagagtgcatctataacaccattggaagatttatacaaaagatttaaaataccaggatcaccacccgagtcaatggggagaggaagagactggaatgttgacttgattcccaagttccttatggctaatggtcagctggttaagatgctgctttatacagaggtaactcgctatctggattttaaagtgactgaagggagctttgtctataagggtggaaaaatctacaaggttccttccactgaagcagaagccctggcatctagcctaatgggattgtttgaaaaacgtcgcttcaggaaattcctagtgtatgttgccaacttcgatgaaaaagatccaagaacttttgaaggcattgatcctaagaagaccacaatgcgagatgtgtataagaaatttgatttgggtcaagacgttatagattttactggtcatgctcttgcactttacagaactgatgattacttagatcaaccgtgttatgaaaccattaatagaattaaactttacagtgaatctttggcaagatatggcaaaagcccatacctttatccactctatggccttggagaactgccccaaggatttgcaaggctaagtgctatttatggaggtacctatatgctgaataaacccattgaagaaatcattgtacagaatggaaaagtaattggtgtaaaatctgaaggagaaattgctcgctgtaagcagctcatctgtgaccccagctacgtaaaagatcgggtagaaaaagtgggccaggtgatcagagttatttgcatcctcagccaccccatcaagaacaccaatgatgccaactcctgccagatcattattccacagaaccaagtcaatcgaaagtcagatatctacgtctgcatgatctcctttgcgcacaatgtagcagcacaagggaagtacattgctatagttagtacaactgtggaaaccaaggagcctgagaaggaaatcagaccagctttggagctcttggaaccaattgaacagaaatttgttagcatcagtgacctcctggtaccaaaagacttgggaacagaaagccagatttatttcccgcacatatgagccacgtcggagggatcctgctagagcgcc

SEQ ID NO: 430102 - DNA, 2962 bp, Homo sapiens
tggcaattgtgaaaaaagctctttattgttattgctaataaaaaaaaaagggccaatagtcaggtgtggtggcctgtacctcttgtccctgctactggggagactgaggtgggaggatggcttgagcccaggagatcaaggctgcagtgaggcatgattacaccgctgcactccagcctggacgacagggtgagattgtctcagaaaaataaagaaaaagggttatttcatattggttcaaaaatataggtagtatgaccccctgatgacttgaagacagagcaacagaaggaccttctttagtcatcattagcttagccaaaagaaaagtcagttacactcactgttgcataatcagttgtatggtcaactgtgcactaattcatttggtcacaaatatatacaatcaaattaaggttgaatgtaaatttaaactttacttttgctttcttctcccctcccccccagaaagatccatggtccaatataacatatcttcttcaagtatttatggggtaagaaacattttaaaaagttgttacattctttcctctatcttaatgatttaaatatgagcaagttcggtctatcaaggcaggctctgaatagctactatcgagaagtatttgaggagttcttgaatgccaaatcttcattgtctgctgactctgcagatttatcacgtgctgaaagcacaggttttccaactgtcaacgtctttacgaaattcacctgcttaggctttcgtggggtcggcctcttggagctgagaacacagcttctgcttacacctgtgtcctcaatgaagctagagattcctaagagaattctagaaaaagaggagcggggtagaaggcaagcaaggaacagtttctaagcttagggcctaaacctttgcatacaaggatcagctaccacgtttacagcggctttaagttacagccctcggtaggtgcagatcggcttcccaatgaaacctggctttcactgttcatctctgttaagggttaccttttcaaaagaagccgcttttcctcctaccaatttcctaaagcgcccaccggcaacgcactaaacaaggagggcacagagcgggaaaaaggacacgtgtgatttccgaactcttcccggcgggctccgggccccggcaagcccagccccgcgggaggaaccaaggccgccacccccgagaggcagcccggcccgcgctcctcgcccacgtggccgccgcacgcgcccgctcaaagtccaagggcggcgatccggctctgggaccttggaccgagcgagctcccgccccgacggcgggagtcagaacggtggtggccagcagtccccgcccgcggctccgtgcacctccaccccggcccgcgcgccgcctcccgaaccaccgtggcagaggccgcaaggggaaccggaagccaaaatggcgacgccccgcccttttcctctcgcgagaggcggggaaggaaaaaaagttgtgcgagcgacggggacgtaaccaattagagtgccgggagcgcctgattggcggccctcccggcgcctgcaggccccgccccggctgcggaggctcagtcacagccctcccctcctcgctccctcccctcctctccccgcccagttcttctcttcccgtctgaggtggcggtcggtctcgccttgtcgccagctccattttcctctctttctcttcccctttccttcgcgcccaagagcgcctcccagcctcgtagggtggtcacggagcccctgcgccttttccttgctcgggtcctgcgtccgcgcctgccccgccatgaatgaggagtacgacgtgatcgtgctgggcaccggcctgacggaatgtatcctgtcaggtataatgtcagtgaatggcaagaaagttcttcatatggatcgaaacccttactacggaggagagagtgcatctataacaccattggaagatttatacaaaagatttaaaataccaggatcaccacccgagtcaatggggagaggaagagactggaatgttgacttgattcccaagttccttatggctaatggtcagctggttaagatgctgctttatacagaggtaactcgctatctggattttaaagtgactgaagggagctttgtctataagggtggaaaaatctacaaggttccttccactgaagcagaagccctggcatctagcctaatgggattgtttgaaaaacgtcgcttcaggaaattcctagtgtatgttgccaacttcgatgaaaaagatccaagaacttttgaaggcattgatcctaagaagaccacaatgcgagatgtgtataagaaatttgatttgggtcaagacgttatagattttactggtcatgctcttgcactttacagaactgatgattacttagatcaaccgtgttatgaaaccattaatagaattaaactttacagtgaatctttggcaagatatggcaaaagcccatacctttatccactctatggccttggagaactgccccaaggatttgcaaggctaagtgctatttatggaggtacctatatgctgaataaacccattgaagaaatcattgtacagaatggaaaagtaattggtgtaaaatctgaaggagaaattgctcgctgtaagcagctcatctgtgaccccagctacgtaaaagatcgggtagaaaaagtgggccaggtgatcagagttatttgcatcctcagccaccccatcaagaacaccaatgatgccaactcctgccagatcattattccacagaaccaagtcaatcgaaagtcagatatctacgtctgcatgatctcctttgcgcacaatgtagcagcacaagggaagtacattgctatagttagtacaactgtggaaaccaaggagctttacctgatcagacctgtttccgggttatagctgtctcctggatcatagctgttgtccggatcatagctgtttccgggt

SEQ ID NO: 430103 - DNA, 3090 bp, Homo sapiens
  misc_feature (3059)..(3059): n is a, c, g, or t
tggcaattgtgaaaaaagctctttattgttattgctaataaaaaaaaaagggccaatagtcaggtgtggtggcctgtacctcttgtccctgctactggggagactgaggtgggaggatggcttgagcccaggagatcaaggctgcagtgaggcatgattacaccgctgcactccagcctggacgacagggtgagattgtctcagaaaaataaagaaaaagggttatttcatattggttcaaaaatataggtagtatgaccccctgatgacttgaagacagagcaacagaaggaccttctttagtcatcattagcttagccaaaagaaaagtcagttacactcactgttgcataatcagttgtatggtcaactgtgcactaattcatttggtcacaaatatatacaatcaaattaaggttgaatgtaaatttaaactttacttttgctttcttctcccctcccccccagaaagatccatggtccaatataacatatcttcttcaagtatttatggggtaagaaacattttaaaaagttgttacattctttcctctatcttaatgatttaaatatgagcaagttcggtctatcaaggcaggctctgaatagctactatcgagaagtatttgaggagttcttgaatgccaaatcttcattgtctgctgactctgcagatttatcacgtgctgaaagcacaggttttccaactgtcaacgtctttacgaaattcacctgcttaggctttcgtggggtcggcctcttggagctgagaacacagcttctgcttacacctgtgtcctcaatgaagctagagattcctaagagaattctagaaaaagaggagcggggtagaaggcaagcaaggaacagtttctaagcttagggcctaaacctttgcatacaaggatcagctaccacgtttacagcggctttaagttacagccctcggtaggtgcagatcggcttcccaatgaaacctggctttcactgttcatctctgttaagggttaccttttcaaaagaagccgcttttcctcctaccaatttcctaaagcgcccaccggcaacgcactaaacaaggagggcacagagcgggaaaaaggacacgtgtgatttccgaactcttcccggcgggctccgggccccggcaagcccagccccgcgggaggaaccaaggccgccacccccgagaggcagcccggcccgcgctcctcgcccacgtggccgccgcacgcgcccgctcaaagtccaagggcggcgatccggctctgggaccttggaccgagcgagctcccgccccgacggcgggagtcagaacggtggtggccagcagtccccgcccgcggctccgtgcacctccaccccggcccgcgcgccgcctcccgaaccaccgtggcagaggccgcaaggggaaccggaagccaaaatggcgacgccccgcccttttcctctcgcgagaggcggggaaggaaaaaaagttgtgcgagcgacggggacgtaaccaattagagtgccgggagcgcctgattggcggccctcccggcgcctgcaggccccgccccggctgcggaggctcagtcacagccctcccctcctcgctccctcccctcctctccccgcccagttcttctcttcccgtctgaggtggcggtcggtctcgccttgtcgccagctccattttcctctctttctcttcccctttccttcgcgcccaagagcgcctcccagcctcgtagggtggtcacggagcccctgcgccttttccttgctcgggtcctgcgtccgcgcctgccccgccatgaatgaggagtacgacgtgatcgtgctgggcaccggcctgacggaatgtatcctgtcaggtataatgtcagtgaatggcaagaaagttcttcatatggatcgaaacccttactacggaggagagagtgcatctataacaccattggaagatttatacaaaagatttaaaataccaggatcaccacccgagtcaatggggagaggaagagactggaatgttgacttgattcccaagttccttatggctaatggtcagctggttaagatgctgctttatacagaggtaactcgctatctggattttaaagtgactgaagggagctttgtctataagggtggaaaaatctacaaggttccttccactgaagcagaagccctggcatctagcctaatgggattgtttgaaaaacgtcgcttcaggaaattcctagtgtatgttgccaacttcgatgaaaaagatccaagaacttttgaaggcattgatcctaagaagaccacaatgcgagatgtgtataagaaatttgatttgggtcaagacgttatagattttactggtcatgctcttgcactttacagaactgatgattacttagatcaaccgtgttatgaaaccattaatagaattaaactttacagtgaatctttggcaagatatggcaaaagcccatacctttatccactctatggccttggagaactgccccaaggatttgcaaggctaagtgctatttatggaggtacctatatgctgaataaacccattgaagaaatcattgtacagaatggaaaagtaattggtgtaaaatctgaaggagaaattgctcgctgtaagcagctcatctgtgaccccagctacgtaaaagatcgggtagaaaaagtgggccaggtgatcagagttatttgcatcctcagccaccccatcaagaacaccaatgatgccaactcctgccagatcattattccacagaaccaagtcaatcgaaagtcagatatctacgtctgcatgatctcctttgcgcacaatgtagcagcacaagggaagtacattgctatagttagtacaactgtggaaaccaaggagcggggcaagcctgagaagggaaatcagaaaaccccccaggcctttggagggcccctttcctttgggaaaaaccaaaaaactctggaaaaaccaaaagggggggaaaaaccaaactttttgggggggtattaaaaagggccccaaattttcccaaagggggttttgtggaccctcctgngttttaaaccccccaaataagcactttggga

SEQ ID NO: 430104 - DNA, 1383 bp, Homo sapiens
gagagggcttacacgaggaggcgccatttaactggatcttatatgatggctgaagtaggaaaaacatttaagcagaaacagtacaagcagaggtccaaggaaaagcacggagacgtggcacattgagaaccacaagtagtttgggatggctgatgtgagcaagactgcggcatcttgctcccatcaagaacaccaatgatgccaactcctgccagatcattattccacagaaccaagtcaatcgaaagtcagatatctacgtctgcatgatctcctttgcgcacaatgtagcagcacaagggaagtacattgctatagttagtacaactgtggaaaccaaggagcctgagaaggaaatcagaccagctttggagctcttggaaccaattgaacagaaatttgttagcatcagtgacctcctggtaccaaaagacttgggaacagaaagccagatctttatttcccgcacatatgatgccaccactcattttgagacaacgtgtgatgacattaaaaacatctataagaggatgacaggatcagagtttgactttgaggaaatgaagcgcaagaagaatgacatctatggggaagactaacagcagtacatgttattatgtaattaggacacatttaaaatttggcaaataatgcatataatgaaatcaatattgtaaggcctgcttttgtaatgaaaatggagagaatgaagagcgctgtgccagtaaatactccccttcacctttctaattattaacttgttttcatggagtggctattcagcattggcagttaccacattctgttcaatttaaccaaactggcttttttttttttctagtgaagttaaacaaacattgggataccgacacagacaacttgagacagtttttttaatcttttaatcagtgtagctatgtgctgctgctgctcaagagctggatccatacaggttgtgtgtcatctgtcctcttgaggttcaggagattctaaattgaatattccacggtttgggacagcatccggaagttttccctatgactttatattttgtattatgtcaaatgttatggcagggcccaaatagcatagccacaagtttggtttatgtgggcataaaattctaaccaaaccccagacatagggagtcatttggagaaagcctgtatgtggtgttttaacctaataaagttgatgagagagaaggggagaggaagcgaacataaagcgggtcaagtgtagtgcatcttttgtatctcaggcgtggcttcttcagtggaccaagctgcaatgcagtattgacttgacagagcctctacttctgtctcaaaatggctccaaatgatttctgtactgcaaaataaagccaaattctggaaacta

SEQ ID NO: 430105 - DNA, 3018 bp, Homo sapiens
tggcaattgtgaaaaaagctctttattgttattgctaataaaaaaaaaagggccaatagtcaggtgtggtggcctgtacctcttgtccctgctactggggagactgaggtgggaggatggcttgagcccaggagatcaaggctgcagtgaggcatgattacaccgctgcactccagcctggacgacagggtgagattgtctcagaaaaataaagaaaaagggttatttcatattggttcaaaaatataggtagtatgaccccctgatgacttgaagacagagcaacagaaggaccttctttagtcatcattagcttagccaaaagaaaagtcagttacactcactgttgcataatcagttgtatggtcaactgtgcactaattcatttggtcacaaatatatacaatcaaattaaggttgaatgtaaatttaaactttacttttgctttcttctcccctcccccccagaaagatccatggtccaatataacatatcttcttcaagtatttatggggtaagaaacattttaaaaagttgttacattctttcctctatcttaatgatttaaatatgagcaagttcggtctatcaaggcaggctctgaatagctactatcgagaagtatttgaggagttcttgaatgccaaatcttcattgtctgctgactctgcagatttatcacgtgctgaaagcacaggttttccaactgtcaacgtctttacgaaattcacctgcttaggctttcgtggggtcggcctcttggagctgagaacacagcttctgcttacacctgtgtcctcaatgaagctagagattcctaagagaattctagaaaaagaggagcggggtagaaggcaagcaaggaacagtttctaagcttagggcctaaacctttgcatacaaggatcagctaccacgtttacagcggctttaagttacagccctcggtaggtgcagatcggcttcccaatgaaacctggctttcactgttcatctctgttaagggttaccttttcaaaagaagccgcttttcctcctaccaatttcctaaagcgcccaccggcaacgcactaaacaaggagggcacagagcgggaaaaaggacacgtgtgatttccgaactcttcccggcgggctccgggccccggcaagcccagccccgcgggaggaaccaaggccgccacccccgagaggcagcccggcccgcgctcctcgcccacgtggccgccgcacgcgcccgctcaaagtccaagggcggcgatccggctctgggaccttggaccgagcgagctcccgccccgacggcgggagtcagaacggtggtggccagcagtccccgcccgcggctccgtgcacctccaccccggcccgcgcgccgcctcccgaaccaccgtggcagaggccgcaaggggaaccggaagccaaaatggcgacgccccgcccttttcctctcgcgagaggcggggaaggaaaaaaagttgtgcgagcgacggggacgtaaccaattagagtgccgggagcgcctgattggcggccctcccggcgcctgcaggccccgccccggctgcggaggctcagtcacagccctcccctcctcgctccctcccctcctctccccgcccagttcttctcttcccgtctgaggtggcggtcggtctcgccttgtcgccagctccattttcctctctttctcttcccctttccttcgcgcccaagagcgcctcccagcctcgtagggtggtcacggagcccctgcgccttttccttgctcgggtcctgcgtccgcgcctgccccgccatgaatgaggagtacgacgtgatcgtgctgggcaccggcctgacggaatgtatcctgtcaggtataatgtcagtgaatggcaagaaagttcttcatatggatcgaaacccttactacggaggagagagtgcatctataacaccattggaagatttatacaaaagatttaaaataccaggatcaccacccgagtcaatggggagaggaagagactggaatgttgacttgattcccaagttccttatggctaatggtcagctggttaagatgctgctttatacagaggtaactcgctatctggattttaaagtgactgaagggagctttgtctataagggtggaaaaatctacaaggttccttccactgaagcagaagccctggcatctagcctaatgggattgtttgaaaaacgtcgcttcaggaaattcctagtgtatgttgccaacttcgatgaaaaagatccaagaacttttgaaggcattgatcctaagaagaccacaatgcgagatgtgtataagaaatttgatttgggtcaagacgttatagattttactggtcatgctcttgcactttacagaactgatgattacttagatcaaccgtgttatgaaaccattaatagaattaaactttacagtgaatctttggcaagatatggcaaaagcccatacctttatccactctatggccttggagaactgccccaaggatttgcaaggctaagtgctatttatggaggtacctatatgctgaataaacccattgaagaaatcattgtacagaatggaaaagtaattggtgtaaaatctgaaggagaaattgctcgctgtaagcagctcatctgtgaccccagctacgtaaaagatcgggtagaaaaagtgggccaggtgatcagagttatttgcatcctcagccaccccatcaagaacaccaatgatgccaactcctgccagatcattattccacagaaccaagtcaatcgaaagtcaggtgaggtttgaagaccagcagatgttggtagaattttgtaagatataatttgctttgtgttttatcccaaattcctaattttgtatgctgtattagtgaacagaccttggtttacatatgggggaaaaaaatctttgtacctcctcctgctccggcagcattgtgtcaacgcggacagattcaactcggagccagccttggacttgtgtccatcacctgtagaatgaac

SEQ ID NO: 430106 - DNA, 3857 bp, Homo sapiens
tggcaattgtgaaaaaagctctttattgttattgctaataaaaaaaaaagggccaatagtcaggtgtggtggcctgtacctcttgtccctgctactggggagactgaggtgggaggatggcttgagcccaggagatcaaggctgcagtgaggcatgattacaccgctgcactccagcctggacgacagggtgagattgtctcagaaaaataaagaaaaagggttatttcatattggttcaaaaatataggtagtatgaccccctgatgacttgaagacagagcaacagaaggaccttctttagtcatcattagcttagccaaaagaaaagtcagttacactcactgttgcataatcagttgtatggtcaactgtgcactaattcatttggtcacaaatatatacaatcaaattaaggttgaatgtaaatttaaactttacttttgctttcttctcccctcccccccagaaagatccatggtccaatataacatatcttcttcaagtatttatggggtaagaaacattttaaaaagttgttacattctttcctctatcttaatgatttaaatatgagcaagttcggtctatcaaggcaggctctgaatagctactatcgagaagtatttgaggagttcttgaatgccaaatcttcattgtctgctgactctgcagatttatcacgtgctgaaagcacaggttttccaactgtcaacgtctttacgaaattcacctgcttaggctttcgtggggtcggcctcttggagctgagaacacagcttctgcttacacctgtgtcctcaatgaagctagagattcctaagagaattctagaaaaagaggagcggggtagaaggcaagcaaggaacagtttctaagcttagggcctaaacctttgcatacaaggatcagctaccacgtttacagcggctttaagttacagccctcggtaggtgcagatcggcttcccaatgaaacctggctttcactgttcatctctgttaagggttaccttttcaaaagaagccgcttttcctcctaccaatttcctaaagcgcccaccggcaacgcactaaacaaggagggcacagagcgggaaaaaggacacgtgtgatttccgaactcttcccggcgggctccgggccccggcaagcccagccccgcgggaggaaccaaggccgccacccccgagaggcagcccggcccgcgctcctcgcccacgtggccgccgcacgcgcccgctcaaagtccaagggcggcgatccggctctgggaccttggaccgagcgagctcccgccccgacggcgggagtcagaacggtggtggccagcagtccccgcccgcggctccgtgcacctccaccccggcccgcgcgccgcctcccgaaccaccgtggcagaggccgcaaggggaaccggaagccaaaatggcgacgccccgcccttttcctctcgcgagaggcggggaaggaaaaaaagttgtgcgagcgacggggacgtaaccaattagagtgccgggagcgcctgattggcggccctcccggcgcctgcaggccccgccccggctgcggaggctcagtcacagccctcccctcctcgctccctcccctcctctccccgcccagttcttctcttcccgtctgaggtggcggtcggtctcgccttgtcgccagctccattttcctctctttctcttcccctttccttcgcgcccaagagcgcctcccagcctcgtagggtggtcacggagcccctgcgccttttccttgctcgggtcctgcgtccgcgcctgccccgccatgaatgaggagtacgacgtgatcgtgctgggcaccggcctgacggaatgtatcctgtcaggtataatgtcagtgaatggcaagaaagttcttcatatggatcgaaacccttactacggaggagagagtgcatctataacaccattggaagatttatacaaaagatttaaaataccaggatcaccacccgagtcaatggggagaggaagagactggaatgttgacttgattcccaagttccttatggctaatggtcagctggttaagatgctgctttatacagaggtaactcgctatctggattttaaagtgactgaagggagctttgtctataagggtggaaaaatctacaaggttccttccactgaagcagaagccctggcatctagcctaatgggattgtttgaaaaacgtcgcttcaggaaattcctagtgtatgttgccaacttcgatgaaaaagatccaagaacttttgaaggcattgatcctaagaagaccacaatgcgagatgtgtataagaaatttgatttgggtcaagacgttatagattttactggtcatgctcttgcactttacagaactgatgattacttagatcaaccgtgttatgaaaccattaatagaattaaactttacagtgaatctttggcaagatatggcaaaagcccatacctttatccactctatggccttggagaactgccccaaggatttgcaaggctaagtgctatttatggaggtacctatatgctgaataaacccattgaagaaatcattgtacagaatggaaaagtaattggtgtaaaatctgaaggagaagtaagtagcttttaaaatgaaaaaaattactatgttcttgtgaagaaagttgtgtattctaaatattgattttggtgtggacactgatgcatatgatttctgtatgggaagttagtatttattgtgactaaggactaattacagttgctgtgctttgttttaaaagcatcttttttgttgtcagttgttgattattttaatattgaaatatgcattatgggtgagctctaaatagtaagtattctgtatttatagagtttgggttgtgcctgtctcccaaattttcattgaaattgaactgtacttgcaggccacctacacgggtggggttttgagcagcatttctcaaatgtgaattatatataaagcatcattaatctggttctagtgcatgttctaatcagtaggtctgagaaggctctgcattttcttgaaacctcttaggtgatgtggatgctactgaaaaaaaaaatcacaaggaaaaaaagatcgtttccctttatcaccatatgaattaattcttctgccatttgacactgttactatctgcaacagttcttgcagtagaggatgcacttcaaagtgcactgctttactgtctcactggaattctaaaaatctaagctttatctttttaacattaagctgtgtgggaatgtagcaacctcctgggtggtggggtggggggcatcttcagttatttaggtctcactggaaagtttgagatcagagtttggtaggtggtgtaaggggacaatgagtaagggagagaaaatacaggactgacttggggcaaaaaacgcctgataataatttgtgaagcacattttcaaactcatttattccttacaaggatcctaagaggcgggtattatgtccaggttatacctggaggcttaaatgaagaaacatctacaagggcacacagtttaatgaatggctgaggtagaattggaattaaggtgttccgcacccacagccctcagtcgttatacacctgaggatgtaaattcctgtgctgggtgatgttagatttgtgtgttttatctactaaaatgttatttatttatttatttatttgagacatcaaatcgttttgctctgtcgccgaggctggagtgcagtggcgtgatctcagctcacttcaccctccaccttccaggttcaagtgattctcctacctcagcctcccgagtagctggaattacagatgcatgccaccatgcctggctaatttatg

SEQ ID NO: 430107 - DNA, 3089 bp, Homo sapiens
tggcaattgtgaaaaaagctctttattgttattgctaataaaaaaaaaagggccaatagtcaggtgtggtggcctgtacctcttgtccctgctactggggagactgaggtgggaggatggcttgagcccaggagatcaaggctgcagtgaggcatgattacaccgctgcactccagcctggacgacagggtgagattgtctcagaaaaataaagaaaaagggttatttcatattggttcaaaaatataggtagtatgaccccctgatgacttgaagacagagcaacagaaggaccttctttagtcatcattagcttagccaaaagaaaagtcagttacactcactgttgcataatcagttgtatggtcaactgtgcactaattcatttggtcacaaatatatacaatcaaattaaggttgaatgtaaatttaaactttacttttgctttcttctcccctcccccccagaaagatccatggtccaatataacatatcttcttcaagtatttatggggtaagaaacattttaaaaagttgttacattctttcctctatcttaatgatttaaatatgagcaagttcggtctatcaaggcaggctctgaatagctactatcgagaagtatttgaggagttcttgaatgccaaatcttcattgtctgctgactctgcagatttatcacgtgctgaaagcacaggttttccaactgtcaacgtctttacgaaattcacctgcttaggctttcgtggggtcggcctcttggagctgagaacacagcttctgcttacacctgtgtcctcaatgaagctagagattcctaagagaattctagaaaaagaggagcggggtagaaggcaagcaaggaacagtttctaagcttagggcctaaacctttgcatacaaggatcagctaccacgtttacagcggctttaagttacagccctcggtaggtgcagatcggcttcccaatgaaacctggctttcactgttcatctctgttaagggttaccttttcaaaagaagccgcttttcctcctaccaatttcctaaagcgcccaccggcaacgcactaaacaaggagggcacagagcgggaaaaaggacacgtgtgatttccgaactcttcccggcgggctccgggccccggcaagcccagccccgcgggaggaaccaaggccgccacccccgagaggcagcccggcccgcgctcctcgcccacgtggccgccgcacgcgcccgctcaaagtccaagggcggcgatccggctctgggaccttggaccgagcgagctcccgccccgacggcgggagtcagaacggtggtggccagcagtccccgcccgcggctccgtgcacctccaccccggcccgcgcgccgcctcccgaaccaccgtggcagaggccgcaaggggaaccggaagccaaaatggcgacgccccgcccttttcctctcgcgagaggcggggaaggaaaaaaagttgtgcgagcgacggggacgtaaccaattagagtgccgggagcgcctgattggcggccctcccggcgcctgcaggccccgccccggctgcggaggctcagtcacagccctcccctcctcgctccctcccctcctctccccgcccagttcttctcttcccgtctgaggtggcggtcggtctcgccttgtcgccagctccattttcctctctttctcttcccctttccttcgcgcccaagagcgcctcccagcctcgtagggtggtcacggagcccctgcgccttttccttgctcgggtcctgcgtccgcgcctgccccgccatgaatgaggagtacgacgtgatcgtgctgggcaccggcctgacggaatgtatcctgtcaggtataatgtcagtgaatggcaagaaagttcttcatatggatcgaaacccttactacggaggagagagtgcatctataacaccattggaagatttatacaaaagatttaaaataccaggatcaccacccgagtcaatggggagaggaagagactggaatgttgacttgattcccaagttccttatggctaatggtcagctggttaagatgctgctttatacagaggtaactcgctatctggattttaaagtgactgaagggagctttgtctataagggtggaaaaatctacaaggttccttccactgaagcagaagccctggcatctagcctaatgggattgtttgaaaaacgtcgcttcaggaaattcctagtgtatgttgccaacttcgatgaaaaagatccaagaacttttgaaggcattgatcctaagaagaccacaatgcgagatgtgtataagaaatttgatttgggtcaagacgttatagattttactggtcatgctcttgcactttacagaactgatgattacttagatcaaccgtgttatgaaaccattaatagaattaaactttacagtgaatctttggcaagatatggcaaaagcccatacctttatccactctatggccttggagaactgccccaaggatttgcaaggtaagagcctgtgtttaaaacctcagtgatccaaaacctcatcttcaacataatgtgtatatgagatatagtttaaataatgagatgagatcagtctatgagtaataagatgctttttatttttattgaaataaaattaacatataatgatatgcatggatcttcagttaaaaaaaatccagttttatacaactgtagctgatgtgctcttgtaagtgccaactcctggctggaggccagccaatacaaaaccagcgcacttaacaaaaatacaaccaaggaccttcacagaatctacttcacacccctgttacctccaccagagtaagtgctggtatccacgcctgagagacctggagacagatcacatcacaggactctttgcagacactctccagtaccagcttagagcctgattatctccactgggcggctagatcaagaagagaaataacaatcactgcagtttggctctcaggaagccccatccctaggggaaaggggagagcaccacatcaagggagcatccctgtgggacaaaagaatctgaacagcagcccttgagttccaga

SEQ ID NO: 430108 - DNA, 935 bp, Homo sapiens
cagaatctttatttcccgcacatatgatgccaccactcattttgagacaacgtgtgatgacattaaaaacatctataagaggatgacaggatcagagtttgactttgaggaaatgaagcgcaagaagaatgacatctatggggaagactaacagcagtacatgttattatgtaattaggacacatttaaaatttggcaaataatgcatataatgaaatcaatattgtaaggcctgcttttgtaatgaaaatggagagaatgaagagcgctgtgccagtaaatactccccttcacctttctaattattaacttgttttcatggagtggctattcagcattggcagttaccacattctgttcaatttaaccaaactggcttttttttttttctagtgaagttaaacaaacattgggataccgacacagacaacttgagacagtttttttaatcttttaatcagtgtagctatgtgctgctgctgctcaagagctggatccatacaggttgtgtgtcatctgtcctcttgaggttcaggagattctaaattgaatattccacggtttgggacagcatccggaagttttccctatgactttatattttgtattatgtcaaatgttatggcagggcccaaatagcatagccacaagtttggtttatgtgggcataaaattctaaccaaaccccagacatagggagtcatttggagaaagcctgtatgtggtgttttaacctaataaagttgatgagagagaaggggagaggaagcgaacataaagcgggtcaagtgtagtgcatcttttgtatctcaggcgtggcttcttcagtggaccaagctgcaatgcagtattgacttgacagagcctctacttctgtctcaaaatggctccaaatgatttctgtactgcaaaataaagccaaattctggaaacta

SEQ ID NO: 430109 - DNA, 945 bp, Homo sapiens
tgcttgcactcattctctctcctgctgacctatgaggggtgctttccaccgtgattataagtttccagaggtctccccagccatgtggaactgtgagttaactaaacttcttttctttataaattactcagtctcagaatgacatctatggggaagactaacagcagtacatgttattatgtaattaggacacatttaaaatttggcaaataatgcatataatgaaatcaatattgtaaggcctgcttttgtaatgaaaatggagagaatgaagagcgctgtgccagtaaatactccccttcacctttctaattattaacttgttttcatggagtggctattcagcattggcagttaccacattctgttcaatttaaccaaactggcttttttttttttctagtgaagttaaacaaacattgggataccgacacagacaacttgagacagtttttttaatcttttaatcagtgtagctatgtgctgctgctgctcaagagctggatccatacaggttgtgtgtcatctgtcctcttgaggttcaggagattctaaattgaatattccacggtttgggacagcatccggaagttttccctatgactttatattttgtattatgtcaaatgttatggcagggcccaaatagcatagccacaagtttggtttatgtgggcataaaattctaaccaaaccccagacatagggagtcatttggagaaagcctgtatgtggtgttttaacctaataaagttgatgagagagaaggggagaggaagcgaacataaagcgggtcaagtgtagtgcatcttttgtatctcaggcgtggcttcttcagtggaccaagctgcaatgcagtattgacttgacagagcctctacttctgtctcaaaatggctccaaatgatttctgtactgcaaaataaagccaaattctggaaacta

SEQ ID NO: 430110 - DNA, 744 bp, Homo sapiens
cgggtgggcctcacaacagctagcacatggtaggccccatagcctgtaagaagccggctacatagacagaatgcgctattatccaagtagtttctgggaataggcccttaattattaacttgttttcatggagtggctattcagcattggcagttaccacattctgttcaatttaaccaaactggcttttttttttttctagtgaagttaaacaaacattgggataccgacacagacaacttgagacagtttttttaatcttttaatcagtgtagctatgtgctgctgctgctcaagagctggatccatacaggttgtgtgtcatctgtcctcttgaggttcaggagattctaaattgaatattccacggtttgggacagcatccggaagttttccctatgactttatattttgtattatgtcaaatgttatggcagggcccaaatagcatagccacaagtttggtttatgtgggcataaaattctaaccaaaccccagacatagggagtcatttggagaaagcctgtatgtggtgttttaacctaataaagttgatgagagagaaggggagaggaagcgaacataaagcgggtcaagtgtagtgcatcttttgtatctcaggcgtggcttcttcagtggaccaagctgcaatgcagtattgacttgacagagcctctacttctgtctcaaaatggctccaaatgatttctgtactgcaaaataaagccaaattctggaaacta

SEQ ID NO: 430111 - DNA, 2541 bp, Homo sapiens
  misc_feature (2401)..(2401): n is a, c, g, or t
  misc_feature (2428)..(2428): n is a, c, g, or t
  misc_feature (2460)..(2460): n is a, c, g, or t
  misc_feature (2465)..(2465): n is a, c, g, or t
  misc_feature (2469)..(2469): n is a, c, g, or t
  misc_feature (2473)..(2474): n is a, c, g, or t
  misc_feature (2478)..(2478): n is a, c, g, or t
  misc_feature (2481)..(2481): n is a, c, g, or t
  misc_feature (2484)..(2484): n is a, c, g, or t
  misc_feature (2489)..(2489): n is a, c, g, or t
  misc_feature (2499)..(2499): n is a, c, g, or t
tggcaattgtgaaaaaagctctttattgttattgctaataaaaaaaaaagggccaatagtcaggtgtggtggcctgtacctcttgtccctgctactggggagactgaggtgggaggatggcttgagcccaggagatcaaggctgcagtgaggcatgattacaccgctgcactccagcctggacgacagggtgagattgtctcagaaaaataaagaaaaagggttatttcatattggttcaaaaatataggtagtatgaccccctgatgacttgaagacagagcaacagaaggaccttctttagtcatcattagcttagccaaaagaaaagtcagttacactcactgttgcataatcagttgtatggtcaactgtgcactaattcatttggtcacaaatatatacaatcaaattaaggttgaatgtaaatttaaactttacttttgctttcttctcccctcccccccagaaagatccatggtccaatataacatatcttcttcaagtatttatggggtaagaaacattttaaaaagttgttacattctttcctctatcttaatgatttaaatatgagcaagttcggtctatcaaggcaggctctgaatagctactatcgagaagtatttgaggagttcttgaatgccaaatcttcattgtctgctgactctgcagatttatcacgtgctgaaagcacaggttttccaactgtcaacgtctttacgaaattcacctgcttaggctttcgtggggtcggcctcttggagctgagaacacagcttctgcttacacctgtgtcctcaatgaagctagagattcctaagagaattctagaaaaagaggagcggggtagaaggcaagcaaggaacagtttctaagcttagggcctaaacctttgcatacaaggatcagctaccacgtttacagcggctttaagttacagccctcggtaggtgcagatcggcttcccaatgaaacctggctttcactgttcatctctgttaagggttaccttttcaaaagaagccgcttttcctcctaccaatttcctaaagcgcccaccggcaacgcactaaacaaggagggcacagagcgggaaaaaggacacgtgtgatttccgaactcttcccggcgggctccgggccccggcaagcccagccccgcgggaggaaccaaggccgccacccccgagaggcagcccggcccgcgctcctcgcccacgtggccgccgcacgcgcccgctcaaagtccaagggcggcgatccggctctgggaccttggaccgagcgagctcccgccccgacggcgggagtcagaacggtggtggccagcagtccccgcccgcggctccgtgcacctccaccccggcccgcgcgccgcctcccgaaccaccgtggcagaggccgcaaggggaaccggaagccaaaatggcgacgccccgcccttttcctctcgcgagaggcggggaaggaaaaaaagttgtgcgagcgacggggacgtaaccaattagagtgccgggagcgcctgattggcggccctcccggcgcctgcaggccccgccccggctgcggaggctcagtcacagccctcccctcctcgctccctcccctcctctccccgcccagttcttctcttcccgtctgaggtggcggtcggtctcgccttgtcgccagctccattttcctctctttctcttcccctttccttcgcgcccaagagcgcctcccagcctcgtagggtggtcacggagcccctgcgccttttccttgctcgggtcctgcgtccgcgcctgccccgccatgaatgaggagtacgacgtgatcgtgctgggcaccggcctgacggaatgtatcctgtcaggtataatgtcagtgaatggcaagaaagttcttcatatggatcgaaacccttactacggaggagagagtgcatctataacaccattggaagatttatacaaaagatttaaaataccaggatcaccacccgagtcaatggggagaggaagagactggaatgttgacttgattcccaagttccttatggctaatggtcagctggttaagatgctgctttatacagaggtaactcgctatctggattttaaagtgactgaagggagctttgtctataagggtggaaaaatctacaaggttccttccactgaagcagaagccctggcatctagcctaatgggattgtttgaaaaacgtcgcttcaggaaattcctagtgtatgttgccaacttcgatgaaaaagatccaagaacttttgaaggcattgatcctaagaagaccacaatgcgagatgtgtataagaaatttgatttgggtcaagacgttatagattttactggtcatgctcttgcactttacagaactgatgattctttagatcaccgngtttgaaacccttatagaattaacttncggtgaatcttgggcagaattggaaagcctanctttncccncttnngctnggnacngcccnggttgccgcnagtgtatggcggccatgcgggaaccgggactgtcctctggcg

SEQ ID NO: 430112 - DNA, 3668 bp, Homo sapiens
tggcaattgtgaaaaaagctctttattgttattgctaataaaaaaaaaagggccaatagtcaggtgtggtggcctgtacctcttgtccctgctactggggagactgaggtgggaggatggcttgagcccaggagatcaaggctgcagtgaggcatgattacaccgctgcactccagcctggacgacagggtgagattgtctcagaaaaataaagaaaaagggttatttcatattggttcaaaaatataggtagtatgaccccctgatgacttgaagacagagcaacagaaggaccttctttagtcatcattagcttagccaaaagaaaagtcagttacactcactgttgcataatcagttgtatggtcaactgtgcactaattcatttggtcacaaatatatacaatcaaattaaggttgaatgtaaatttaaactttacttttgctttcttctcccctcccccccagaaagatccatggtccaatataacatatcttcttcaagtatttatggggtaagaaacattttaaaaagttgttacattctttcctctatcttaatgatttaaatatgagcaagttcggtctatcaaggcaggctctgaatagctactatcgagaagtatttgaggagttcttgaatgccaaatcttcattgtctgctgactctgcagatttatcacgtgctgaaagcacaggttttccaactgtcaacgtctttacgaaattcacctgcttaggctttcgtggggtcggcctcttggagctgagaacacagcttctgcttacacctgtgtcctcaatgaagctagagattcctaagagaattctagaaaaagaggagcggggtagaaggcaagcaaggaacagtttctaagcttagggcctaaacctttgcatacaaggatcagctaccacgtttacagcggctttaagttacagccctcggtaggtgcagatcggcttcccaatgaaacctggctttcactgttcatctctgttaagggttaccttttcaaaagaagccgcttttcctcctaccaatttcctaaagcgcccaccggcaacgcactaaacaaggagggcacagagcgggaaaaaggacacgtgtgatttccgaactcttcccggcgggctccgggccccggcaagcccagccccgcgggaggaaccaaggccgccacccccgagaggcagcccggcccgcgctcctcgcccacgtggccgccgcacgcgcccgctcaaagtccaagggcggcgatccggctctgggaccttggaccgagcgagctcccgccccgacggcgggagtcagaacggtggtggccagcagtccccgcccgcggctccgtgcacctccaccccggcccgcgcgccgcctcccgaaccaccgtggcagaggccgcaaggggaaccggaagccaaaatggcgacgccccgcccttttcctctcgcgagaggcggggaaggaaaaaaagttgtgcgagcgacggggacgtaaccaattagagtgccgggagcgcctgattggcggccctcccggcgcctgcaggccccgccccggctgcggaggctcagtcacagccctcccctcctcgctccctcccctcctctccccgcccagttcttctcttcccgtctgaggtggcggtcggtctcgccttgtcgccagctccattttcctctctttctcttcccctttccttcgcgcccaagagcgcctcccagcctcgtagggtggtcacggagcccctgcgccttttccttgctcgggtcctgcgtccgcgcctgccccgccatgaatgaggagtacgacgtgatcgtgctgggcaccggcctgacggaatgtatcctgtcaggtataatgtcagtgaatggcaagaaagttcttcatatggatcgaaacccttactacggaggagagagtgcatctataacaccattggaagatttatacaaaagatttaaaataccaggatcaccacccgagtcaatggggagaggaagagactggaatgttgacttgattcccaagttccttatggctaatggtcagctggttaagatgctgctttatacagaggtaactcgctatctggattttaaagtgactgaagggagctttgtctataagggtggaaaaatctacaaggttccttccactgaagcagaagccctggcatctagcctaatgggattgtttgaaaaacgtcgcttcaggaaattcctagtgtatgttgccaacttcgatgaaaaagatccaagaacttttgaaggcattgatcctaagaagaccacaatgcgagatgtgtataagaaatttgatttgggtcaagacgttatagattttactggtcatgctcttgcactttacagaactgatgagtaagtattttggtttttagatttgtatttttcttgaaattctcactaaatttcccaagtcttccaagtggaaattctaacaaaacaaatacttagccatattgcactatgaatgaagaggttctagttgaaattagtgttgggaccttttaagtgatttaaatataaaggtagtgggccaggtgtggtggctcacgcctgtgatcccagcactttgggaggccaagttgggtggatcatttgaggtcaggagttcaagaccagcctggccaacatggtgaaaccccctctctactaaaaatgcaaaaattagttgggcggtagtggtgcgtccctgtaattccagccacttgggaggctgaggcagaagaatcacttgagcctgggaggtggaagttgtggggagccgagattgcaccactgcactccagtctgggcgacagagtgagaccctgtctcaaaaaaacaaaaaaacaaaaaagaagatagcggattgaaatcgcttcaaaaaaaattataaattgaacaccatgaatgaaaactaaagccctttcctaatactcatttcctttcttccagttacttagatcaaccgtgttatgaaaccattaatagaattaaactttacagtgaatctttggcaagatatggcaaaagcccatacctttatccactctatggccttggagaactgccccaaggatttgcaaggtaagagcctgtgtttaaaacctcagtgatccaaaacctcatcttcaacataatgtgtatatgagatatagtttaaataatgagatgagatcagtctatgagtaataagatgctttttatttttattgaaataaaattaacatataatgatatgcatggatcttcagttaaaaaaaatccagttttatacaactgtagctgatgtgctcttgtaagtgccaactcctggctggaggccagccaatacaaaaccagcgcacttaacaaaaatacaaccaaggaccttcacagaatctacttcacacccctgttacctccaccagagtaagtgctggtatccacgcctgagagacctggagacagatcacatcacaggactctttgcagacactctccagtaccagcttagagcctgattatctccactgggcggctagatcaagaagagaaataacaatcactgcagtttggctctcaggaagccccatccctaggggaaaggggagagcaccacatcaagggagcatccctgtgggacaaaagaatctgaacagcagcccttgagttccaga

SEQ ID NO: 430113 - DNA, 2550 bp, Homo sapiens
tggcaattgtgaaaaaagctctttattgttattgctaataaaaaaaaaagggccaatagtcaggtgtggtggcctgtacctcttgtccctgctactggggagactgaggtgggaggatggcttgagcccaggagatcaaggctgcagtgaggcatgattacaccgctgcactccagcctggacgacagggtgagattgtctcagaaaaataaagaaaaagggttatttcatattggttcaaaaatataggtagtatgaccccctgatgacttgaagacagagcaacagaaggaccttctttagtcatcattagcttagccaaaagaaaagtcagttacactcactgttgcataatcagttgtatggtcaactgtgcactaattcatttggtcacaaatatatacaatcaaattaaggttgaatgtaaatttaaactttacttttgctttcttctcccctcccccccagaaagatccatggtccaatataacatatcttcttcaagtatttatggggtaagaaacattttaaaaagttgttacattctttcctctatcttaatgatttaaatatgagcaagttcggtctatcaaggcaggctctgaatagctactatcgagaagtatttgaggagttcttgaatgccaaatcttcattgtctgctgactctgcagatttatcacgtgctgaaagcacaggttttccaactgtcaacgtctttacgaaattcacctgcttaggctttcgtggggtcggcctcttggagctgagaacacagcttctgcttacacctgtgtcctcaatgaagctagagattcctaagagaattctagaaaaagaggagcggggtagaaggcaagcaaggaacagtttctaagcttagggcctaaacctttgcatacaaggatcagctaccacgtttacagcggctttaagttacagccctcggtaggtgcagatcggcttcccaatgaaacctggctttcactgttcatctctgttaagggttaccttttcaaaagaagccgcttttcctcctaccaatttcctaaagcgcccaccggcaacgcactaaacaaggagggcacagagcgggaaaaaggacacgtgtgatttccgaactcttcccggcgggctccgggccccggcaagcccagccccgcgggaggaaccaaggccgccacccccgagaggcagcccggcccgcgctcctcgcccacgtggccgccgcacgcgcccgctcaaagtccaagggcggcgatccggctctgggaccttggaccgagcgagctcccgccccgacggcgggagtcagaacggtggtggccagcagtccccgcccgcggctccgtgcacctccaccccggcccgcgcgccgcctcccgaaccaccgtggcagaggccgcaaggggaaccggaagccaaaatggcgacgccccgcccttttcctctcgcgagaggcggggaaggaaaaaaagttgtgcgagcgacggggacgtaaccaattagagtgccgggagcgcctgattggcggccctcccggcgcctgcaggccccgccccggctgcggaggctcagtcacagccctcccctcctcgctccctcccctcctctccccgcccagttcttctcttcccgtctgaggtggcggtcggtctcgccttgtcgccagctccattttcctctctttctcttcccctttccttcgcgcccaagagcgcctcccagcctcgtagggtggtcacggagcccctgcgccttttccttgctcgggtcctgcgtccgcgcctgccccgccatgaatgaggagtacgacgtgatcgtgctgggcaccggcctgacggaatgtatcctgtcaggtataatgtcagtgaatggcaagaaagttcttcatatggatcgaaacccttactacggaggagagagtgcatctataacaccattggaagatttatacaaaagatttaaaataccaggatcaccacccgagtcaatggggagaggaagagactggaatgttgacttgattcccaagttccttatggctaatggtcagctggttaagatgctgctttatacagaggtaactcgctatctggattttaaagtgactgaagggagctttgtctataagggtggaaaaatctacaaggttccttccactgaagcagaagccctggcatctagcctaatgggattgtttgaaaaacgtcgcttcaggaaattcctagtgtatgttgccaacttcgatgaaaaagatccaagaacttttgaaggcattgatcctaagaagaccacaatgcgagatgtgtataagaaatttgatttgggtcaagacgttatagattttactggtcatgctcttgcactttacagaactgatgattacttagatcaacggttatgaaccttatagattaacttaacgggaacctgggcaaatgggaaagccaaactatcacctaggctggagaatgcccagatgacgcagcgacaaggcgccaagcggacctggaattgtcacaggaaacgtaaaaaacaaacgtacaa

SEQ ID NO: 430114 - DNA, 2724 bp, Homo sapiens
  misc_feature (2397)..(2397): n is a, c, g, or t
  misc_feature (2627)..(2627): n is a, c, g, or t
  misc_feature (2649)..(2649): n is a, c, g, or t
  misc_feature (2651)..(2651): n is a, c, g, or t
  misc_feature (2657)..(2657): n is a, c, g, or t
  misc_feature (2675)..(2675): n is a, c, g, or t
  misc_feature (2701)..(2701): n is a, c, g, or t
tggcaattgtgaaaaaagctctttattgttattgctaataaaaaaaaaagggccaatagtcaggtgtggtggcctgtacctcttgtccctgctactggggagactgaggtgggaggatggcttgagcccaggagatcaaggctgcagtgaggcatgattacaccgctgcactccagcctggacgacagggtgagattgtctcagaaaaataaagaaaaagggttatttcatattggttcaaaaatataggtagtatgaccccctgatgacttgaagacagagcaacagaaggaccttctttagtcatcattagcttagccaaaagaaaagtcagttacactcactgttgcataatcagttgtatggtcaactgtgcactaattcatttggtcacaaatatatacaatcaaattaaggttgaatgtaaatttaaactttacttttgctttcttctcccctcccccccagaaagatccatggtccaatataacatatcttcttcaagtatttatggggtaagaaacattttaaaaagttgttacattctttcctctatcttaatgatttaaatatgagcaagttcggtctatcaaggcaggctctgaatagctactatcgagaagtatttgaggagttcttgaatgccaaatcttcattgtctgctgactctgcagatttatcacgtgctgaaagcacaggttttccaactgtcaacgtctttacgaaattcacctgcttaggctttcgtggggtcggcctcttggagctgagaacacagcttctgcttacacctgtgtcctcaatgaagctagagattcctaagagaattctagaaaaagaggagcggggtagaaggcaagcaaggaacagtttctaagcttagggcctaaacctttgcatacaaggatcagctaccacgtttacagcggctttaagttacagccctcggtaggtgcagatcggcttcccaatgaaacctggctttcactgttcatctctgttaagggttaccttttcaaaagaagccgcttttcctcctaccaatttcctaaagcgcccaccggcaacgcactaaacaaggagggcacagagcgggaaaaaggacacgtgtgatttccgaactcttcccggcgggctccgggccccggcaagcccagccccgcgggaggaaccaaggccgccacccccgagaggcagcccggcccgcgctcctcgcccacgtggccgccgcacgcgcccgctcaaagtccaagggcggcgatccggctctgggaccttggaccgagcgagctcccgccccgacggcgggagtcagaacggtggtggccagcagtccccgcccgcggctccgtgcacctccaccccggcccgcgcgccgcctcccgaaccaccgtggcagaggccgcaaggggaaccggaagccaaaatggcgacgccccgcccttttcctctcgcgagaggcggggaaggaaaaaaagttgtgcgagcgacggggacgtaaccaattagagtgccgggagcgcctgattggcggccctcccggcgcctgcaggccccgccccggctgcggaggctcagtcacagccctcccctcctcgctccctcccctcctctccccgcccagttcttctcttcccgtctgaggtggcggtcggtctcgccttgtcgccagctccattttcctctctttctcttcccctttccttcgcgcccaagagcgcctcccagcctcgtagggtggtcacggagcccctgcgccttttccttgctcgggtcctgcgtccgcgcctgccccgccatgaatgaggagtacgacgtgatcgtgctgggcaccggcctgacggaatgtatcctgtcaggtataatgtcagtgaatggcaagaaagttcttcatatggatcgaaacccttactacggaggagagagtgcatctataacaccattggaagatttatacaaaagatttaaaataccaggatcaccacccgagtcaatggggagaggaagagactggaatgttgacttgattcccaagttccttatggctaatggtcagctggttaagatgctgctttatacagaggtaactcgctatctggattttaaagtgactgaagggagctttgtctataagggtggaaaaatctacaaggttccttccactgaagcagaagccctggcatctagcctaatgggattgtttgaaaaacgtcgcttcaggaaattcctagtgtatgttgccaacttcgatgaaaaagatccaagaacttttgaaggcattgatcctaagaagaccacaatgcgagatgtgtataagaaatttgatttgggtcaagacgttatagattttactggtcatgctctcgcccagccccactgccgcgggctgggaaatgngacaattggggcccctgcggaggggcacagccctctcaaagctgtcaccagggccaaagtgctgggtggagcagatgcaccgatggacttggcacacccagctcagcctcaagcatcctcttgagaagcctgtggaaggctcctgcgttcgttaactgccatctggccgtctctcagttttgaaatctctgaggagcctgaggatcaagtcagtttggggaaccgaattngtccatgggaagctgaggaatntnggacanatccggccctttgaaagnaccagttatgttccatttttggtggnttttcccaggatgcgtgaacttt

SEQ ID NO: 430115 - DNA, 2560 bp, Homo sapiens
tggcaattgtgaaaaaagctctttattgttattgctaataaaaaaaaaagggccaatagtcaggtgtggtggcctgtacctcttgtccctgctactggggagactgaggtgggaggatggcttgagcccaggagatcaaggctgcagtgaggcatgattacaccgctgcactccagcctggacgacagggtgagattgtctcagaaaaataaagaaaaagggttatttcatattggttcaaaaatataggtagtatgaccccctgatgacttgaagacagagcaacagaaggaccttctttagtcatcattagcttagccaaaagaaaagtcagttacactcactgttgcataatcagttgtatggtcaactgtgcactaattcatttggtcacaaatatatacaatcaaattaaggttgaatgtaaatttaaactttacttttgctttcttctcccctcccccccagaaagatccatggtccaatataacatatcttcttcaagtatttatggggtaagaaacattttaaaaagttgttacattctttcctctatcttaatgatttaaatatgagcaagttcggtctatcaaggcaggctctgaatagctactatcgagaagtatttgaggagttcttgaatgccaaatcttcattgtctgctgactctgcagatttatcacgtgctgaaagcacaggttttccaactgtcaacgtctttacgaaattcacctgcttaggctttcgtggggtcggcctcttggagctgagaacacagcttctgcttacacctgtgtcctcaatgaagctagagattcctaagagaattctagaaaaagaggagcggggtagaaggcaagcaaggaacagtttctaagcttagggcctaaacctttgcatacaaggatcagctaccacgtttacagcggctttaagttacagccctcggtaggtgcagatcggcttcccaatgaaacctggctttcactgttcatctctgttaagggttaccttttcaaaagaagccgcttttcctcctaccaatttcctaaagcgcccaccggcaacgcactaaacaaggagggcacagagcgggaaaaaggacacgtgtgatttccgaactcttcccggcgggctccgggccccggcaagcccagccccgcgggaggaaccaaggccgccacccccgagaggcagcccggcccgcgctcctcgcccacgtggccgccgcacgcgcccgctcaaagtccaagggcggcgatccggctctgggaccttggaccgagcgagctcccgccccgacggcgggagtcagaacggtggtggccagcagtccccgcccgcggctccgtgcacctccaccccggcccgcgcgccgcctcccgaaccaccgtggcagaggccgcaaggggaaccggaagccaaaatggcgacgccccgcccttttcctctcgcgagaggcggggaaggaaaaaaagttgtgcgagcgacggggacgtaaccaattagagtgccgggagcgcctgattggcggccctcccggcgcctgcaggccccgccccggctgcggaggctcagtcacagccctcccctcctcgctccctcccctcctctccccgcccagttcttctcttcccgtctgaggtggcggtcggtctcgccttgtcgccagctccattttcctctctttctcttcccctttccttcgcgcccaagagcgcctcccagcctcgtagggtggtcacggagcccctgcgccttttccttgctcgggtcctgcgtccgcgcctgccccgccatgaatgaggagtacgacgtgatcgtgctgggcaccggcctgacggaatgtatcctgtcaggtataatgtcagtgaatggcaagaaagttcttcatatggatcgaaacccttactacggaggagagagtgcatctataacaccattggaagatttatacaaaagatttaaaataccaggatcaccacccgagtcaatggggagaggaagagactggaatgttgacttgattcccaagttccttatggctaatggtcagctggttaagatgctgctttatacagaggtaactcgctatctggattttaaagtgactgaagggagctttgtctataagggtggaaaaatctacaaggttccttccactgaagcagaagccctggcatctagcctaatgggattgtttgaaaaacgtcgcttcaggaaattcctagtgtatgttgccaacttcgatgaaaaagatccaagaacttttgaaggcattgatcctaagaagaccacaatgcgagatgtgtataagaaatttgatttgggtcaagacgttatagattttactggtcatgctcttgacaactgtgacgcagaaactgatagatttactatgagaatgcaagcgcggtgcttcactgaaagcccagttaaaataaggaaatttagagacccttttgaacaggttggaaactccttttgggacacaagcacttacttgggcctacacacaaaggaccccccaagtttaaacccccttatttttaaaattccc

SEQ ID NO: 430116 - DNA, 2251 bp, Homo sapiens
tggcaattgtgaaaaaagctctttattgttattgctaataaaaaaaaaagggccaatagtcaggtgtggtggcctgtacctcttgtccctgctactggggagactgaggtgggaggatggcttgagcccaggagatcaaggctgcagtgaggcatgattacaccgctgcactccagcctggacgacagggtgagattgtctcagaaaaataaagaaaaagggttatttcatattggttcaaaaatataggtagtatgaccccctgatgacttgaagacagagcaacagaaggaccttctttagtcatcattagcttagccaaaagaaaagtcagttacactcactgttgcataatcagttgtatggtcaactgtgcactaattcatttggtcacaaatatatacaatcaaattaaggttgaatgtaaatttaaactttacttttgctttcttctcccctcccccccagaaagatccatggtccaatataacatatcttcttcaagtatttatggggtaagaaacattttaaaaagttgttacattctttcctctatcttaatgatttaaatatgagcaagttcggtctatcaaggcaggctctgaatagctactatcgagaagtatttgaggagttcttgaatgccaaatcttcattgtctgctgactctgcagatttatcacgtgctgaaagcacaggttttccaactgtcaacgtctttacgaaattcacctgcttaggctttcgtggggtcggcctcttggagctgagaacacagcttctgcttacacctgtgtcctcaatgaagctagagattcctaagagaattctagaaaaagaggagcggggtagaaggcaagcaaggaacagtttctaagcttagggcctaaacctttgcatacaaggatcagctaccacgtttacagcggctttaagttacagccctcggtaggtgcagatcggcttcccaatgaaacctggctttcactgttcatctctgttaagggttaccttttcaaaagaagccgcttttcctcctaccaatttcctaaagcgcccaccggcaacgcactaaacaaggagggcacagagcgggaaaaaggacacgtgtgatttccgaactcttcccggcgggctccgggccccggcaagcccagccccgcgggaggaaccaaggccgccacccccgagaggcagcccggcccgcgctcctcgcccacgtggccgccgcacgcgcccgctcaaagtccaagggcggcgatccggctctgggaccttggaccgagcgagctcccgccccgacggcgggagtcagaacggtggtggccagcagtccccgcccgcggctccgtgcacctccaccccggcccgcgcgccgcctcccgaaccaccgtggcagaggccgcaaggggaaccggaagccaaaatggcgacgccccgcccttttcctctcgcgagaggcggggaaggaaaaaaagttgtgcgagcgacggggacgtaaccaattagagtgccgggagcgcctgattggcggccctcccggcgcctgcaggccccgccccggctgcggaggctcagtcacagccctcccctcctcgctccctcccctcctctccccgcccagttcttctcttcccgtctgaggtggcggtcggtctcgccttgtcgccagctccattttcctctctttctcttcccctttccttcgcgcccaagagcgcctcccagcctcgtagggtggtcacggagcccctgcgccttttccttgctcgggtcctgcgtccgcgcctgccccgccatgaatgaggagtacgacgtgatcgtgctgggcaccggcctgacggaatgtatcctgtcaggtataatgtcagtgaatggcaagaaagttcttcatatggatcgaaacccttactacggaggagagagtgcatctataacaccattggaagatttatacaaaagatttaaaataccaggatcaccacccgagtcaatggggagaggaagagactggaatgttgacttgattcccaagttccttatggctaatggtcagctggttaagatgctgctttatacagaggtaactcgctatctggattttaaagtgactgaagggagctttgtctataagggtggaaaaatctacaaggttccttccactgaagcagaagccctggcatctacctaatgggattgtttgaaaaacgtcgcttcacactacacgtcgccttggacctagtttgatcct

SEQ ID NO: 430117 - DNA, 518 bp, Homo sapiens
cattgctatagttagtacaactgtggaaaccaaggagcctgagaaggaaatcagaccagctttggagctcttggaaccaattgaacagaagtgagttgtgttcttttatatctgccgagatgcaaactgaggcctttgattgtggctccatggtgggacgaatgtgagggcaaggcaggtagctgctggctgctctgtgggattcatctgtacctctcagttgacctcaggcagagccatggtcaggtgtgggaccagctcacctgactgaattctctctccctccagatttgttagcatcagtgacctcctggtaccaaaagacttgggaacagaaagccaggtgagtatggaagtgtgaaaggatatgggcaggtttcactggaagacatccctccatggtcttaagtcttcgtaatttttgttttcagaatctttatttcccgcacatatgatgccaccactcattttgagacaacgtgtgatgacattaaaaacatctataagaggatgacagg

SEQ ID NO: 430118 - DNA, 510 bp, Homo sapiens
gacacagacaacttgagacagtttttttaatcttttaatcagtgtagctatgtgctgctgctgctcaagagctggatccatacaggttgtgtgtcatctgtcctcttgaggttcaggagattctaaattgaatattccacggtttgggacagcatccggaagttttccctatgactttatattttgtattatgtcaaatgttatggcagggcccaaatagcatagccacaagtttggtttatgtgggcataaaattctaaccaaaccccagacatagggagtcatttggagaaagcctgtatgtggtgttttaacctaataaagttgatgagagagaaggggagaggaagcgaacataaagcgggtcaagtgtagtgcatcttttgtatctcaggcgtggcttcttcagtggaccaagctgcaatgcagtattgacttgacagagcctctacttctgtctcaaaatggctccaaatgatttctgtactgcaaaataaagccaaattctgg

SEQ ID NO: 430119 - DNA, 454 bp, Homo sapiens
tactaatttcgcggccgcgtcgacggggaagggtgggtagagggtcctcttctcatccctgactaggctcctgggcatctgattaccttcacggaaggaagcggacgctcaccacgctatgccctctggttctgtgtgggggagtcatggccccaggaccagccgtggaccaagaggctcgtgatggtcaaggttgtgcccacgtgcctcagggccttggtagaaatggcccgggtagggggtgcctcctccctggagaatactgtggacctgcacatttccaacagccacccactctccctcacctccgaccagtacaaggcctacctgcaggacttggtggagggcatggatttccagggccctggggagagctgagccctcgctcctcatggtgtgcctccaacccccctgttccccaccacctcaaccaataaactggttcctgctatga

SEQ ID NO: 430120 - DNA, 1546 bp, Homo sapiens
gggaacagcccagcgggccgtcccatcggcttttgggtctgttacccaaagaatgataaagttggttttatttcaagaagtcgatcaaaaagaaagccccagcgctctagagctcagctgacgggaaagggggtgcgcagcctcgagtttgagagctacccggagctccaagacaggggccggaccatgggaaccccaaagccacggatcctgccctggctggtgtcgcagctggacctggggcaactggagggcgtggcctgggtgaacaagagccgcacgcgcttccgcatcccttggaagcacggcctacggcaggatgcacagcaggaggatttcggaatcttccaggcctgggccgaggccactggtgcatatgttcccgggagggataagccagacctgccaacctggaagaggaatttccgctctgccctcaaccgcaaagaagggttgcgtttagcagaggaccggagcaaggaccctcacgacccacataaaatctacgagtttgtgaactcaggagttggggacttttcccagccagacacctctccggacaccaatggtggaggcagtacttctgatacccaggaagacattctggatgagttactgggtaacatggtgttggccccactcccagatccgggacccccaagcctggctgtagcccctgagccctgccctcagcccctgcggagccccagcttggacaatcccactcccttcccaaacctggggccctctgagaacccactgaagcggctgttggtgccgggggaagagtgggagttcgaggtgacagccttctaccggggccgccaagtcttccagcagaccatctcctgcccggagggcctgcggctggtggggtccgaagtgggagacaggacgctgcctggatggccagtcacactgccagaccctggcatgtccctgacagacaggggagtgatgagctacgtgaggcatgtgctgagctgcctgggtgggggactggctctctggcgggccgggcagtggctctgggcccagcggctggggcactgccacacatactgggcagtgagcgaggagctgctccccaacagcgggcatgggcctgatggcgaggtccccaaggacaaggaaggaggcgtgtttgacctggggcccttcattgtagatctgattaccttcacggaaggaagcggacgctcaccacgctatgccctctggttctgtgtgggggagtcatggccccaggaccagccgtggaccaagaggctcgtgatggtcaaggttgtgcccacgtgcctcagggccttggtagaaatggcccgggtagggggtgcctcctccctggagaatactgtggacctgcacatttccaacagccacccactctccctcacctccgaccagtacaaggcctacctgcaggacttggtggagggcatggatttccagggccctggggagagctgagccctcgctcctcatggtgtgcctccaacccccctgttccccaccacctcaaccaataaactggttcctgctatga

SEQ ID NO: 430121 - DNA, 2372 bp, Homo sapiens
gggaacagcccagcgggccgtcccatcggcttttgggtctgttacccaaagaatgataaagttggttttatttcaagaagtcgatcaaaaagaaagccccagcgctctagagctcagctgacgggaaagggggtgcgcagcctcgagtttgagagctacccggagctccaagacaggggtgggttccagctgcccgcacgccccgaccttccatcgtagggtaacgcggaagagcccgggagagcgttggtggcgtccgagagcgaggagcgggaaagaggatgggtctgcacggagagtggaaaggcaggctgtgtactctggggaaagtggagcaaggaaggagctacagtggccgacgctggaggtcggctgcagaaaaactagaaaaagtagggaggaaagaggaaaagaggaggcgtctacactgagggggttctagagagggaggggtggactccgtagatgggggtagttcagtctcgaaacctggggcgtgctctgtcctggaggagggaggcgggcagtcggaggggaattgaatggaagttctgtgttggaaatgttttgggagatcttctgtagggggactgtggaagggggtctacattggggtaagtgcaggaggtagaggcttacacgtgaatcgattctgcactgaaataactagggaaagaggatgctaccctgaaagtggggatacttactttcgatgatgtgggggagggaggaggtctatactggcggaattgagggagtggagggtctgcactgaagacgctggggaaggatgtgccatggatatgggaaggaaccctagctgattagagagcctctcgggaggatgggaggatgggaagaggaggtttcctgtttgtacccccgaaaatatgggtgaaggacctgtgccgtggcccgtgagaaggaggtctgggtgcggaaactccaggccaggtgggtccgggggaggccggtcgcgcccaggaaatgccctatacgcgcaggccggaccatgggaaccccaaagccacggatcctgccctggctggtgtcgcagctggacctggggcaactggagggcgtggcctgggtgaacaagagccgcacgcgcttccgcatcccttggaagcacggcctacggcaggatgcacagcaggaggatttcggaatcttccaggcctgggccgaggccactggtgcatatgttcccgggagggataagccagacctgccaacctggaagaggaatttccgctctgccctcaaccgcaaagaagggttgcgtttagcagaggaccggagcaaggaccctcacgacccacataaaatctacgagtttgtgaactcaggagttggggacttttcccagccagacacctctccggacaccaatggtggaggcagtacttctgatacccaggaagacattctggatgagttactgggtaacatggtgttggccccactcccagatccgggacccccaagcctggctgtagcccctgagccctgccctcagcccctgcggagccccagcttggacaatcccactcccttcccaaacctggggccctctgagaacccactgaagcggctgttggtgccgggggaagagtgggagttcgaggtgacagccttctaccggggccgccaagtcttccagcagaccatctcctgcccggagggcctgcggctggtggggtccgaagtgggagacaggacgctgcctggatggccagtcacactgccagaccctggcatgtccctgacagacaggggagtgatgagctacgtgaggcatgtgctgagctgcctgggtgggggactggctctctggcgggccgggcagtggctctgggcccagcggctggggcactgccacacatactgggcagtgagcgaggagctgctccccaacagcgggcatgggcctgatggcgaggtccccaaggacaaggaaggaggcgtgtttgacctggggcccttcattgtagatctgattaccttcacggaaggaagcggacgctcaccacgctatgccctctggttctgtgtgggggagtcatggccccaggaccagccgtggaccaagaggctcgtgatggtcaaggttgtgcccacgtgcctcagggccttggtagaaatggcccgggtagggggtgcctcctccctggagaatactgtggacctgcacatttccaacagccacccactctccctcacctccgaccagtacaaggcctacctgcaggacttggtggagggcatggatttccagggccctggggagagctgagccctcgctcctcatggtgtgcctccaacccccctgttccccaccacctcaaccaataaactggttcctgctatga

SEQ ID NO: 430122 - DNA, 2207 bp, Homo sapiens
gggaacagcccagcgggccgtcccatcggcttttgggtctgttacccaaagaatgataaagttggttttatttcaagaagtcgatcaaaaagaaagccccagcgctctagagctcagctgacgggaaagggggtgcgcagcctcgagtttgagagctacccggagctccaagacaggggtgggttccagctgcccgcacgccccgaccttccatcgtagggtaacgcggaagagcccgggagagcgttggtggcgtccgagagcgaggagcgggaaagaggatgggtctgcacggagagtggaaaggcaggctgtgtactctggggaaagtggagcaaggaaggagctacagtggccgacgctggaggtcggctgcagaaaaactagaaaaagtagggaggaaagaggaaaagaggaggcgtctacactgagggggttctagagagggaggggtggactccgtagatgggggtagttcagtctcgaaacctggggcgtgctctgtcctggaggagggaggcgggcagtcggaggggaattgaatggaagttctgtgttggaaatgttttgggagatcttctgtagggggactgtggaagggggtctacattggggtaagtgcaggaggtagaggcttacacgtgaatcgattctgcactgaaataactagggaaagaggatgggaggatgggaagaggaggtttcctgtttgtacccccgaaaatatgggtgaaggacctgtgccgtggcccgtgagaaggaggtctgggtgcggaaactccaggccaggtgggtccgggggaggccggtcgcgcccaggaaatgccctatacgcgcaggccggaccatgggaaccccaaagccacggatcctgccctggctggtgtcgcagctggacctggggcaactggagggcgtggcctgggtgaacaagagccgcacgcgcttccgcatcccttggaagcacggcctacggcaggatgcacagcaggaggatttcggaatcttccaggcctgggccgaggccactggtgcatatgttcccgggagggataagccagacctgccaacctggaagaggaatttccgctctgccctcaaccgcaaagaagggttgcgtttagcagaggaccggagcaaggaccctcacgacccacataaaatctacgagtttgtgaactcaggagttggggacttttcccagccagacacctctccggacaccaatggtggaggcagtacttctgatacccaggaagacattctggatgagttactgggtaacatggtgttggccccactcccagatccgggacccccaagcctggctgtagcccctgagccctgccctcagcccctgcggagccccagcttggacaatcccactcccttcccaaacctggggccctctgagaacccactgaagcggctgttggtgccgggggaagagtgggagttcgaggtgacagccttctaccggggccgccaagtcttccagcagaccatctcctgcccggagggcctgcggctggtggggtccgaagtgggagacaggacgctgcctggatggccagtcacactgccagaccctggcatgtccctgacagacaggggagtgatgagctacgtgaggcatgtgctgagctgcctgggtgggggactggctctctggcgggccgggcagtggctctgggcccagcggctggggcactgccacacatactgggcagtgagcgaggagctgctccccaacagcgggcatgggcctgatggcgaggtccccaaggacaaggaaggaggcgtgtttgacctggggcccttcattgtagatctgattaccttcacggaaggaagcggacgctcaccacgctatgccctctggttctgtgtgggggagtcatggccccaggaccagccgtggaccaagaggctcgtgatggtcaaggttgtgcccacgtgcctcagggccttggtagaaatggcccgggtagggggtgcctcctccctggagaatactgtggacctgcacatttccaacagccacccactctccctcacctccgaccagtacaaggcctacctgcaggacttggtggagggcatggatttccagggccctggggagagctgagccctcgctcctcatggtgtgcctccaacccccctgttccccaccacctcaaccaataaactggttcctgctatga

SEQ ID NO: 430123 - DNA, 2085 bp, Homo sapiens
gggaacagcccagcgggccgtcccatcggcttttgggtctgttacccaaagaatgataaagttggttttatttcaagaagtcgatcaaaaagaaagccccagcgctctagagctcagctgacgggaaagggggtgcgcagcctcgagtttgagagctacccggagctccaagacaggggtgggttccagctgcccgcacgccccgaccttccatcgtaggccggaccatgggaaccccaaagccacggatcctgccctggctggtgtcgcagctggacctggggcaactggagggcgtggcctgggtgaacaagagccgcacgcgcttccgcatcccttggaagcacggcctacggcaggatgcacagcaggaggatttcggaatcttccaggcctgggccgaggccactggtgcatatgttcccgggagggataagccagacctgccaacctggaagaggaatttccgctctgccctcaaccgcaaagaagggttgcgtttagcagaggaccggagcaaggaccctcacgacccacataaaatctacgagtttgtgaactcaggagttggggacttttcccagccagacacctctccggacaccaatggtggaggcagtacttctgatacccaggaagacattctggatgagttactgggtaacatggtgttggccccactcccagatccgggacccccaagcctggctgtagcccctgagccctgccctcagcccctgcggagccccagcttggacaatcccactcccttcccaaacctggggccctctgagaacccactgaagcggctgttggtgccgggggaagagtgggagttcgaggtgacagccttctaccggggccgccaagtcttccagcagaccatctcctgcccggagggcctgcggctggtggggtccgaagtgggagacaggacgctgcctggatggccagtcacactgccagaccctggcatgtccctgacagacaggggagtgatgagctacgtgaggcatgtgctgagctgcctgggtgggggactggctctctggcgggccgggcagtggctctgggcccagcggctggggcactgccacacatactgggcagtgagcgaggagctgctccccaacagcgggcatgggcctgatggcgaggtccccaaggacaaggaaggaggcgtgtttgacctggggcccttcattgtaggtgagtgagacaggggcttcgacctggccagtacaaagcagcctgcacagtggttaacaactcaggattggccgggcacggtggctcacgcctgtagtcccagcactttgggaggctgaggtgggcagatgacaagttcaggagttcgagaccagcctggtcaacatagtgaaaccccatctctactaaagatacaaaaaaatagtcgggcgtggtggcacgtgcctgtaatcccagctactcgggaggctgaggcaggagaattgcttgaacccaggaggcggagattgcagtgagctgagatcgcaccactgcactctagcctggtgacagagtaagactccatctcgaacaacaaaaaaaaaagaactcatgattaggactgaattcagacgctggctgcccttggcccgctgtataaccgaggcaaaggactttgccctgagcccgtggaatccaaggatggtctcctctctctacctgcctgccagcgctgggatctgattaccttcacggaaggaagcggacgctcaccacgctatgccctctggttctgtgtgggggagtcatggccccaggaccagccgtggaccaagaggctcgtgatggtcaaggttgtgcccacgtgcctcagggccttggtagaaatggcccgggtagggggtgcctcctccctggagaatactgtggacctgcacatttccaacagccacccactctccctcacctccgaccagtacaaggcctacctgcaggacttggtggagggcatggatttccagggccctggggagagctgagccctcgctcctcatggtgtgcctccaacccccctgttccccaccacctcaaccaataaactggttcctgctatga

SEQ ID NO: 430124 - DNA, 1735 bp, Homo sapiens
gggaacagcccagcgggccgtcccatcggcttttgggtctgttacccaaagaatgataaagttggttttatttcaagaagtcgatcaaaaagaaagccccagcgctctagagctcagctgacgggaaagggggtgcgcagcctcgagtttgagagctacccggagctccaagacaggggtgggttccagctgcccgcacgccccgaccttccatcgtagggtaacgcggaagagcccgggagagcgttggtggcgtccgagagcgaggagcgggaaagaggatgggtctgcacggagagtggaaaggcaggctgtgtactctggggaaagtggagcaaggaaggagctacagtggccgacgctggaggccggaccatgggaaccccaaagccacggatcctgccctggctggtgtcgcagctggacctggggcaactggagggcgtggcctgggtgaacaagagccgcacgcgcttccgcatcccttggaagcacggcctacggcaggatgcacagcaggaggatttcggaatcttccaggcctgggccgaggccactggtgcatatgttcccgggagggataagccagacctgccaacctggaagaggaatttccgctctgccctcaaccgcaaagaagggttgcgtttagcagaggaccggagcaaggaccctcacgacccacataaaatctacgagtttgtgaactcaggagttggggacttttcccagccagacacctctccggacaccaatggtggaggcagtacttctgatacccaggaagacattctggatgagttactgggtaacatggtgttggccccactcccagatccgggacccccaagcctggctgtagcccctgagccctgccctcagcccctgcggagccccagcttggacaatcccactcccttcccaaacctggggccctctgagaacccactgaagcggctgttggtgccgggggaagagtgggagttcgaggtgacagccttctaccggggccgccaagtcttccagcagaccatctcctgcccggagggcctgcggctggtggggtccgaagtgggagacaggacgctgcctggatggccagtcacactgccagaccctggcatgtccctgacagacaggggagtgatgagctacgtgaggcatgtgctgagctgcctgggtgggggactggctctctggcgggccgggcagtggctctgggcccagcggctggggcactgccacacatactgggcagtgagcgaggagctgctccccaacagcgggcatgggcctgatggcgaggtccccaaggacaaggaaggaggcgtgtttgacctggggcccttcattgtagatctgattaccttcacggaaggaagcggacgctcaccacgctatgccctctggttctgtgtgggggagtcatggccccaggaccagccgtggaccaagaggctcgtgatggtcaaggttgtgcccacgtgcctcagggccttggtagaaatggcccgggtagggggtgcctcctccctggagaatactgtggacctgcacatttccaacagccacccactctccctcacctccgaccagtacaaggcctacctgcaggacttggtggagggcatggatttccagggccctggggagagctgagccctcgctcctcatggtgtgcctccaacccccctgttccccaccacctcaaccaataaactggttcctgctatga

SEQ ID NO: 430125 - DNA, 1760 bp, Homo sapiens
gggaacagcccagcgggccgtcccatcggcttttgggtctgttacccaaagaatgataaagttggttttatttcaagaagtcgatcaaaaagaaagccccagcgctctagagctcagctgacgggaaagggggtgcgcagcctcgagtttgagagctacccggagctccaagacaggggtgggttccagctgcccgcacgccccgaccttccatcgtagggtaacgcggaagagcccgggagagcgttggtggcgtccgagagcgaggagcgggaaagaggatgggtctgcacggagagtggaaaggcaggctgtgtactctggggaaagtggagcaaggaaggagctacagtggccgacgctggaggtcggctgcagaaaaactagaaaaagccggaccatgggaaccccaaagccacggatcctgccctggctggtgtcgcagctggacctggggcaactggagggcgtggcctgggtgaacaagagccgcacgcgcttccgcatcccttggaagcacggcctacggcaggatgcacagcaggaggatttcggaatcttccaggcctgggccgaggccactggtgcatatgttcccgggagggataagccagacctgccaacctggaagaggaatttccgctctgccctcaaccgcaaagaagggttgcgtttagcagaggaccggagcaaggaccctcacgacccacataaaatctacgagtttgtgaactcaggagttggggacttttcccagccagacacctctccggacaccaatggtggaggcagtacttctgatacccaggaagacattctggatgagttactgggtaacatggtgttggccccactcccagatccgggacccccaagcctggctgtagcccctgagccctgccctcagcccctgcggagccccagcttggacaatcccactcccttcccaaacctggggccctctgagaacccactgaagcggctgttggtgccgggggaagagtgggagttcgaggtgacagccttctaccggggccgccaagtcttccagcagaccatctcctgcccggagggcctgcggctggtggggtccgaagtgggagacaggacgctgcctggatggccagtcacactgccagaccctggcatgtccctgacagacaggggagtgatgagctacgtgaggcatgtgctgagctgcctgggtgggggactggctctctggcgggccgggcagtggctctgggcccagcggctggggcactgccacacatactgggcagtgagcgaggagctgctccccaacagcgggcatgggcctgatggcgaggtccccaaggacaaggaaggaggcgtgtttgacctggggcccttcattgtagatctgattaccttcacggaaggaagcggacgctcaccacgctatgccctctggttctgtgtgggggagtcatggccccaggaccagccgtggaccaagaggctcgtgatggtcaaggttgtgcccacgtgcctcagggccttggtagaaatggcccgggtagggggtgcctcctccctggagaatactgtggacctgcacatttccaacagccacccactctccctcacctccgaccagtacaaggcctacctgcaggacttggtggagggcatggatttccagggccctggggagagctgagccctcgctcctcatggtgtgcctccaacccccctgttccccaccacctcaaccaataaactggttcctgctatga

SEQ ID NO: 430126 - DNA, 1763 bp, Homo sapiens
gggaacagcccagcgggccgtcccatcggcttttgggtctgttacccaaagaatgataaagttggttttatttcaagaagtcgatcaaaaagaaagccccagcgctctagagctcagctgacgggaaagggggtgcgcagcctcgagtttgagagctacccggagctccaagacaggggtgggttccagctgcccgcacgccccgaccttccatcgtaggccggaccatgggaaccccaaagccacggatcctgccctggctggtgtcgcagctggacctggggcaactggagggcgtggcctgggtgaacaagagccgcacgcgcttccgcatcccttggaagcacggcctacggcaggatgcacagcaggaggatttcggaatcttccaggcctgggccgaggccactggtgcatatgttcccgggagggataagccagacctgccaacctggaagaggaatttccgctctgccctcaaccgcaaagaagggttgcgtttagcagaggaccggagcaaggaccctcacgacccacataaaatctacgagtttgtgaactcaggagttggggacttttcccagccagacacctctccggacaccaatggtggaggcagtacttctgatacccaggaagacattctggatgagttactgggtaacatggtgttggccccactcccagatccgggacccccaagcctggctgtagcccctgagccctgccctcagcccctgcggagccccagcttggacaatcccactcccttcccaaacctggggccctctgagaacccactgaagcggctgttggtgccgggggaagagtgggagttcgaggtgacagccttctaccggggccgccaagtcttccagcagaccatctcctgcccggagggcctgcggctggtggggtccgaagtgggagacaggacgctgcctggatggccagtcacactgccagaccctggcatgtccctgacagacaggggagtgatgagctacgtgaggcatgtgctgagctgcctgggtgggggactggctctctggcgggccgggcagtggctctgggcccagcggctggggcactgccacacatactgggcagtgagcgaggagctgctccccaacagcgggcatgggcctgatggcgaggtccccaaggacaaggaaggaggcgtgtttgacctggggcccttcattgtagcctggtgacagagtaagactccatctcgaacaacaaaaaaaaaagaactcatgattaggactgaattcagacgctggctgcccttggcccgctgtataaccgaggcaaaggactttgccctgagcccgtggaatccaaggatggtctcctctctctacctgcctgccagcgctgggatctgattaccttcacggaaggaagcggacgctcaccacgctatgccctctggttctgtgtgggggagtcatggccccaggaccagccgtggaccaagaggctcgtgatggtcaaggttgtgcccacgtgcctcagggccttggtagaaatggcccgggtagggggtgcctcctccctggagaatactgtggacctgcacatttccaacagccacccactctccctcacctccgaccagtacaaggcctacctgcaggacttggtggagggcatggatttccagggccctggggagagctgagccctcgctcctcatggtgtgcctccaacccccctgttccccaccacctcaaccaataaactggttcctgctatga

SEQ ID NO: 430127 - DNA, 1280 bp, Homo sapiens
gcggggctagccggatccgctgactgatggtggggcgcaagagggttggagctgcagggttacgggaataaaaccgggaaagccggcctgggccgaggccactggtgcatatgttcccgggagggataagccagacctgccaacctggaagaggaatttccgctctgccctcaaccgcaaagaagggttgcgtttagcagaggaccggagcaaggaccctcacgacccacataaaatctacgagtttgtgaactcaggagttggggacttttcccagccagacacctctccggacaccaatggtggaggcagtacttctgatacccaggaagacattctggatgagttactgggtaacatggtgttggccccactcccagatccgggacccccaagcctggctgtagcccctgagccctgccctcagcccctgcggagccccagcttggacaatcccactcccttcccaaacctggggccctctgagaacccactgaagcggctgttggtgccgggggaagagtgggagttcgaggtgacagccttctaccggggccgccaagtcttccagcagaccatctcctgcccggagggcctgcggctggtggggtccgaagtgggagacaggacgctgcctggatggccagtcacactgccagaccctggcatgtccctgacagacaggggagtgatgagctacgtgaggcatgtgctgagctgcctgggtgggggactggctctctggcgggccgggcagtggctctgggcccagcggctggggcactgccacacatactgggcagtgagcgaggagctgctccccaacagcgggcatgggcctgatggcgaggtccccaaggacaaggaaggaggcgtgtttgacctggggcccttcattgtagatctgattaccttcacggaaggaagcggacgctcaccacgctatgccctctggttctgtgtgggggagtcatggccccaggaccagccgtggaccaagaggctcgtgatggtcaaggttgtgcccacgtgcctcagggccttggtagaaatggcccgggtagggggtgcctcctccctggagaatactgtggacctgcacatttccaacagccacccactctccctcacctccgaccagtacaaggcctacctgcaggacttggtggagggcatggatttccagggccctggggagagctgagccctcgctcctcatggtgtgcctccaacccccctgttccccaccacctcaaccaataaactggttcctgctatga

SEQ ID NO: 430128 - DNA, 1501 bp, Homo sapiens
gggaacagcccagcgggccgtcccatcggcttttgggtctgttacccaaagaatgataaagttggttttatttcaagaagtcgatcaaaaagaaagccccagcgctctagagctcagctgacgggaaagggggtgcgcagcctcgagtttgagagctacccggagctccaagacaggggtgggttccagctgcccgcacgccccgaccttccatcgtaggtgcgtgcgacgacctgggacgctggaaacccggagctgcgcgctgggcggaaaggactcctagtgggcccggctgagaaggcggaggcctgggccgaggccactggtgcatatgttcccgggagggataagccagacctgccaacctggaagaggaatttccgctctgccctcaaccgcaaagaagggttgcgtttagcagaggaccggagcaaggaccctcacgacccacataaaatctacgagtttgtgaactcaggagttggggacttttcccagccagacacctctccggacaccaatggtggaggcagtacttctgatacccaggaagacattctggatgagttactgggtaacatggtgttggccccactcccagatccgggacccccaagcctggctgtagcccctgagccctgccctcagcccctgcggagccccagcttggacaatcccactcccttcccaaacctggggccctctgagaacccactgaagcggctgttggtgccgggggaagagtgggagttcgaggtgacagccttctaccggggccgccaagtcttccagcagaccatctcctgcccggagggcctgcggctggtggggtccgaagtgggagacaggacgctgcctggatggccagtcacactgccagaccctggcatgtccctgacagacaggggagtgatgagctacgtgaggcatgtgctgagctgcctgggtgggggactggctctctggcgggccgggcagtggctctgggcccagcggctggggcactgccacacatactgggcagtgagcgaggagctgctccccaacagcgggcatgggcctgatggcgaggtccccaaggacaaggaaggaggcgtgtttgacctggggcccttcattgtagatctgattaccttcacggaaggaagcggacgctcaccacgctatgccctctggttctgtgtgggggagtcatggccccaggaccagccgtggaccaagaggctcgtgatggtcaaggttgtgcccacgtgcctcagggccttggtagaaatggcccgggtagggggtgcctcctccctggagaatactgtggacctgcacatttccaacagccacccactctccctcacctccgaccagtacaaggcctacctgcaggacttggtggagggcatggatttccagggccctggggagagctgagccctcgctcctcatggtgtgcctccaacccccctgttccccaccacctcaaccaataaactggttcctgctatga

SEQ ID NO: 430129 - DNA, 1242 bp, Homo sapiens
gggaacagcccagcgggccgtcccatcggcttttgggtctgttacccaaagaatgataaagttggttttatttcaagaagtcgatcaaaaagaaagccccagcgctctagagctcagctgacgggaaagggggtgcgcagcctcgagtttgagagctacccggagctccaagacaggggtgggttccagctgcccgcacgccccgaccttccatcgtaggagttggggacttttcccagccagacacctctccggacaccaatggtggaggcagtacttctgatacccaggaagacattctggatgagttactgggtaacatggtgttggccccactcccagatccgggacccccaagcctggctgtagcccctgagccctgccctcagcccctgcggagccccagcttggacaatcccactcccttcccaaacctggggccctctgagaacccactgaagcggctgttggtgccgggggaagagtgggagttcgaggtgacagccttctaccggggccgccaagtcttccagcagaccatctcctgcccggagggcctgcggctggtggggtccgaagtgggagacaggacgctgcctggatggccagtcacactgccagaccctggcatgtccctgacagacaggggagtgatgagctacgtgaggcatgtgctgagctgcctgggtgggggactggctctctggcgggccgggcagtggctctgggcccagcggctggggcactgccacacatactgggcagtgagcgaggagctgctccccaacagcgggcatgggcctgatggcgaggtccccaaggacaaggaaggaggcgtgtttgacctggggcccttcattgtagatctgattaccttcacggaaggaagcggacgctcaccacgctatgccctctggttctgtgtgggggagtcatggccccaggaccagccgtggaccaagaggctcgtgatggtcaaggttgtgcccacgtgcctcagggccttggtagaaatggcccgggtagggggtgcctcctccctggagaatactgtggacctgcacatttccaacagccacccactctccctcacctccgaccagtacaaggcctacctgcaggacttggtggagggcatggatttccagggccctggggagagctgagccctcgctcctcatggtgtgcctccaacccccctgttccccaccacctcaaccaataaactggttcctgctatga

SEQ ID NO: 430130 - DNA, 1363 bp, Homo sapiens
gggaacagcccagcgggccgtcccatcggcttttgggtctgttacccaaagaatgataaagttggttttatttcaagaagtcgatcaaaaagaaagccccagcgctctagagctcagctgacgggaaagggggtgcgcagcctcgagtttgagagctacccggagctccaagacaggggtgggttccagctgcccgcacgccccgaccttccatcgtaggtgcgtgcgacgacctgggacgctggaaacccggagctgcgcgctgggcggaaaggactcctagtgggcccggctgagaaggcggaggtggcgcgcgaggggcgggctcgtgccaacgctggagttggggacttttcccagccagacacctctccggacaccaatggtggaggcagtacttctgatacccaggaagacattctggatgagttactgggtaacatggtgttggccccactcccagatccgggacccccaagcctggctgtagcccctgagccctgccctcagcccctgcggagccccagcttggacaatcccactcccttcccaaacctggggccctctgagaacccactgaagcggctgttggtgccgggggaagagtgggagttcgaggtgacagccttctaccggggccgccaagtcttccagcagaccatctcctgcccggagggcctgcggctggtggggtccgaagtgggagacaggacgctgcctggatggccagtcacactgccagaccctggcatgtccctgacagacaggggagtgatgagctacgtgaggcatgtgctgagctgcctgggtgggggactggctctctggcgggccgggcagtggctctgggcccagcggctggggcactgccacacatactgggcagtgagcgaggagctgctccccaacagcgggcatgggcctgatggcgaggtccccaaggacaaggaaggaggcgtgtttgacctggggcccttcattgtagatctgattaccttcacggaaggaagcggacgctcaccacgctatgccctctggttctgtgtgggggagtcatggccccaggaccagccgtggaccaagaggctcgtgatggtcaaggttgtgcccacgtgcctcagggccttggtagaaatggcccgggtagggggtgcctcctccctggagaatactgtggacctgcacatttccaacagccacccactctccctcacctccgaccagtacaaggcctacctgcaggacttggtggagggcatggatttccagggccctggggagagctgagccctcgctcctcatggtgtgcctccaacccccctgttccccaccacctcaaccaataaactggttcctgctatga

SEQ ID NO: 430131 - DNA, 1471 bp, Homo sapiens
gggaacagcccagcgggccgtcccatcggcttttgggtctgttacccaaagaatgataaagttggttttatttcaagaagtcgatcaaaaagaaagccccagcgctctagagctcagctgacgggaaagggggtgcgcagcctcgagtttgagagctacccggagctccaagacaggggtgggttccagctgcccgcacgccccgaccttccatcgtaggccggaccatgggaaccccaaagccacggatcctgccctggctggtgtcgcagctggacctggggcaactggagggcgtggcctgggtgaacaagagccgcacgcgcttccgcatcccttggaagcacggcctacggcaggatgcacagcaggaggatttcggaatcttccaggcctgggccgaggccactggtgcatatgttcccgggagggataagccagacctgccaacctggaagaggaatttccgctctgccctcaaccgcaaagaagggttgcgtttagcagaggaccggagcaaggaccctcacgacccacataaaatctacgagtttgtgaactcaggagttggggacttttcccagccagacacctctccggacaccaatggtggaggcagtacttctgatacccaggaagacattctggatgagttactgggtaacatggtgttggccccactcccagatccgggacccccaagcctggctgtagcccctgagccctgccctcagcccctgcggagccccagcttggacaatcccactcccttcccaaacctggggccctctgagaacccactgaagcggctgttggtgccgggggaagagtgggagttcgaggtgacagccttctaccggggccgccaagtcttccagcagaccatctcctgcccggagggcctgcggctggtggggtccgaagtgggagacaggacgctgcctggatggccagtcacactgccagaccctggcatgtccctgacagacaggggagtgatgagctacgtgaggcatgtgctgagctgcctgggtgggggactggctctctggcgggccgggcagtggctctgggcccagcggctggggcactgccacacatactgggcagtgagcgaggagctgctccccaacagcgggcatgggcctgatggcgaggtccccaaggacaaggaaggaggcgtgtttgacctggggcccttcattgtaggttgtgcccacgtgcctcagggccttggtagaaatggcccgggtagggggtgcctcctccctggagaatactgtggacctgcacatttccaacagccacccactctccctcacctccgaccagtacaaggcctacctgcaggacttggtggagggcatggatttccagggccctggggagagctgagccctcgctcctcatggtgtgcctccaacccccctgttccccaccacctcaaccaataaactggttcctgctatga

SEQ ID NO: 430132 - DNA, 1437 bp, Homo sapiens
gggaacagcccagcgggccgtcccatcggcttttgggtctgttacccaaagaatgataaagttggttttatttcaagaagtcgatcaaaaagaaagccccagcgctctagagctcagctgacgggaaagggggtgcgcagcctcgagtttgagagctacccggagctccaagacaggggtgggttccagctgcccgcacgccccgaccttccatcgtaggccggaccatgggaaccccaaagccacggatcctgccctggctggtgtcgcagctggacctggggcaactggagggcgtggcctgggtgaacaagagccgcacgcgcttccgcatcccttggaagcacggcctacggcaggatgcacagcaggaggatttcggaatcttccaggcctgggccgaggccactggtgcatatgttcccgggagggataagccagacctgccaacctggaagaggaatttccgctctgccctcaaccgcaaagaagggttgcgtttagcagaggaccggagcaaggaccctcacgacccacataaaatctacgagtttgtgaactcaggagttggggacttttcccagccagacacctctccggacaccaatggtggaggcagtacttctgatacccaggaagacattctggatgagttactgggtaacatggtgttggccccactcccagatccgggacccccaagcctggctgtagcccctgagccctgccctcagcccctgcggagccccagcttggacaatcccactcccttcccaaacctggggccctctgagaacccactgaagcggctgttggtgccgggggaagagtgggagttcgaggtgacagccttctaccggggccgccaagtcttccagcagaccatctcctgcccggagggcctgcggctggtggggtccgaagtgggagacaggacgctgcctggatggccagtcacactgccagaccctggcatgtccctgacagacaggggagtgatgagctacgtgaggcatgtgctgagctgcctgggtgggggactggctctctggcgggccgggcagtggctctgggcccagcggctggggcactgccacacatactgggcagtgagcgaggagctgctccccaacagcgggcatgggcctgatggcgaggtccccaaggacaaggaaggaggcgtgtttgacctggggcccttcattgtaggtgagtgagacaggggcttcgacctggccagtacaaagcagcctgcacagtggttaacaactcaggattacaggcatgagccaccttacccagcctaattccttttttaattgagatatttacatactataaaattcacccttgtatatgattcgtggcttttactatattcccaaggttgtgcagccatcaccactatctatttcctagaacattttcatcacccca

SEQ ID NO: 430133 - DNA, 616 bp, Homo sapiens
ctcaagttttagctgccattgtgaggccatggctgtggctcccaggagtcaagatcacagactgctcagccctgacgtgtgtgtgtgtgtgtgtttgtgtgtgtgtgtaaaactacaactcccagcagccctaggcctatggttcagttacagcagggggtgtgtgtgtgtgtgtgtgtgtgtgtgtgtgtgtgtgtgtgtgtaaaactacaactcccagcagccctaggcctatggttcatcctaggttacagcaggggctgcagggagttgtagtcctccaagccctgactcctaccttggtggacagtggctgggtgttttccctgactcctgtccccacttcccctgcaggttgtgcccacgtgcctcagggccttggtagaaatggcccgggtagggggtgcctcctccctggagaatactgtggacctgcacatttccaacagccacccactctccctcacctccgaccagtacaaggcctacctgcaggacttggtggagggcatggatttccagggccctggggagagctgagccctcgctcctcatggtgtgcctccaacccccctgttccccaccacctcaaccaataaactggttcctgctatga

SEQ ID NO: 430134 - DNA, 433 bp, Homo sapiens
gactttgccctgagcccgtggaatccaaggatggtctcctctctctacctgcctgccagcgctggggtgagacacaggcccagtacacagagcctgctcagggaattagctgccactgtcatcatcatcgtaactaatgatggtgaacagaccaatagcaggaaagctacatcccttagggtttcgctgtgcagtggcactttctgccatgatggaaatgacagtcacctgcactgtccggtgcagcagccactagccacaggggccaagcactcaggtgaggcgagtgcaaccaggacgtgattcgttttaattggttacaatttaaactgaaataaccttacatgactaatggctgcaattggacaatgcagcctcagacaggactgaatgccaaccagcttctccagattcactgagcatccttgggagc

SEQ ID NO: 430135 - DNA, 1587 bp, Homo sapiens
gggaacagcccagcgggccgtcccatcggcttttgggtctgttacccaaagaatgataaagttggttttatttcaagaagtcgatcaaaaagaaagccccagcgctctagagctcagctgacgggaaagggggtgcgcagcctcgagtttgagagctacccggagctccaagacaggggtgggttccagctgcccgcacgccccgaccttccatcgtaggccggaccatgggaaccccaaagccacggatcctgccctggctggtgtcgcagctggacctggggcaactggagggcgtggcctgggtgaacaagagccgcacgcgcttccgcatcccttggaagcacggcctacggcaggatgcacagcaggaggatttcggaatcttccaggcctgggccgaggccactggtgcatatgttcccgggagggataagccagacctgccaacctggaagaggaatttccgctctgccctcaaccgcaaagaagggttgcgtttagcagaggaccggagcaaggaccctcacgacccacataaaatctacgagtttgtgaactcaggagttggggacttttcccagccagacacctctccggacaccaatggtggaggcagtacttctgatacccaggaagacattctggatgagttactgggtaacatggtgttggccccactcccagatccgggacccccaagcctggctgtagcccctgagccctgccctcagcccctgcggagccccagcttggacaatcccactcccttcccaaacctggggccctctgagaacccactgaagcggctgttggtgccgggggaagagtgggagttcgaggtgacagccttctaccggggccgccaagtcttccagcagaccatctcctgcccggagggcctgcggctggtggggtccgaagtgggagacaggacgctgcctggatggccagtcacactgccagaccctggcatgtccctgacagacaggggagtgatgagctacgtgaggcatgtgctgagctgcctgggtgggggactggctctctggcgggccgggcagtggctctgggcccagcggctggggcactgccacacatactgggcagtgagcgaggagctgctccccaacagcgggcatgggcctgatggcgaggtccccaaggacaaggaaggaggcgtgtttgacctggggcccttcattgtagatctgattaccttcacggaaggaagcggacgctcaccacgctatgccctctggttctgtgtgggggagtcatggccccaggaccagccgtggaccaagaggctcgtgatggtcaaggttgtgcccacgtgcctcagggccttggtagaaatggcccgggtagggggtgcctcctccctggagaatactgtggacctgcacatttccaacagccacccactctccctcacctccgaccagtacaaggcctacctgcaggacttggtggagggcatggatttccagggccctggggagagctgagccctcgctcctcatggtgtgcctccaacccccctgttccccaccacctcaaccaataaactggttcctgctatga

SEQ ID NO: 430136 - DNA, 1535 bp, Homo sapiens
gggaacagcccagcgggccgtcccatcggcttttgggtctgttacccaaagaatgataaagttggttttatttcaagaagtcgatcaaaaagaaagccccagcgctctagagctcagctgacgggaaagggggtgcgcagcctcgagtttgagagctacccggagctccaagacaggggtgggttccagctgcccgcacgccccgaccttccatcgtaggtgcgtgcgacgacctgggacgctggaaacccggagctgcgcgctgggcggaaaggactcctagtgggcccggctgagaaggcggaggtggcgcgcgaggggcgggctcgtgccaacgctggcctgggccgaggccactggtgcatatgttcccgggagggataagccagacctgccaacctggaagaggaatttccgctctgccctcaaccgcaaagaagggttgcgtttagcagaggaccggagcaaggaccctcacgacccacataaaatctacgagtttgtgaactcaggagttggggacttttcccagccagacacctctccggacaccaatggtggaggcagtacttctgatacccaggaagacattctggatgagttactgggtaacatggtgttggccccactcccagatccgggacccccaagcctggctgtagcccctgagccctgccctcagcccctgcggagccccagcttggacaatcccactcccttcccaaacctggggccctctgagaacccactgaagcggctgttggtgccgggggaagagtgggagttcgaggtgacagccttctaccggggccgccaagtcttccagcagaccatctcctgcccggagggcctgcggctggtggggtccgaagtgggagacaggacgctgcctggatggccagtcacactgccagaccctggcatgtccctgacagacaggggagtgatgagctacgtgaggcatgtgctgagctgcctgggtgggggactggctctctggcgggccgggcagtggctctgggcccagcggctggggcactgccacacatactgggcagtgagcgaggagctgctccccaacagcgggcatgggcctgatggcgaggtccccaaggacaaggaaggaggcgtgtttgacctggggcccttcattgtagatctgattaccttcacggaaggaagcggacgctcaccacgctatgccctctggttctgtgtgggggagtcatggccccaggaccagccgtggaccaagaggctcgtgatggtcaaggttgtgcccacgtgcctcagggccttggtagaaatggcccgggtagggggtgcctcctccctggagaatactgtggacctgcacatttccaacagccacccactctccctcacctccgaccagtacaaggcctacctgcaggacttggtggagggcatggatttccagggccctggggagagctgagccctcgctcctcatggtgtgcctccaacccccctgttccccaccacctcaaccaataaactggttcctgctatga

SEQ ID NO: 430137 - DNA, 1414 bp, Homo sapiens
gggaacagcccagcgggccgtcccatcggcttttgggtctgttacccaaagaatgataaagttggttttatttcaagaagtcgatcaaaaagaaagccccagcgctctagagctcagctgacgggaaagggggtgcgcagcctcgagtttgagagctacccggagctccaagacaggggtgggttccagctgcccgcacgccccgaccttccatcgtaggcctgggccgaggccactggtgcatatgttcccgggagggataagccagacctgccaacctggaagaggaatttccgctctgccctcaaccgcaaagaagggttgcgtttagcagaggaccggagcaaggaccctcacgacccacataaaatctacgagtttgtgaactcaggagttggggacttttcccagccagacacctctccggacaccaatggtggaggcagtacttctgatacccaggaagacattctggatgagttactgggtaacatggtgttggccccactcccagatccgggacccccaagcctggctgtagcccctgagccctgccctcagcccctgcggagccccagcttggacaatcccactcccttcccaaacctggggccctctgagaacccactgaagcggctgttggtgccgggggaagagtgggagttcgaggtgacagccttctaccggggccgccaagtcttccagcagaccatctcctgcccggagggcctgcggctggtggggtccgaagtgggagacaggacgctgcctggatggccagtcacactgccagaccctggcatgtccctgacagacaggggagtgatgagctacgtgaggcatgtgctgagctgcctgggtgggggactggctctctggcgggccgggcagtggctctgggcccagcggctggggcactgccacacatactgggcagtgagcgaggagctgctccccaacagcgggcatgggcctgatggcgaggtccccaaggacaaggaaggaggcgtgtttgacctggggcccttcattgtagatctgattaccttcacggaaggaagcggacgctcaccacgctatgccctctggttctgtgtgggggagtcatggccccaggaccagccgtggaccaagaggctcgtgatggtcaaggttgtgcccacgtgcctcagggccttggtagaaatggcccgggtagggggtgcctcctccctggagaatactgtggacctgcacatttccaacagccacccactctccctcacctccgaccagtacaaggcctacctgcaggacttggtggagggcatggatttccagggccctggggagagctgagccctcgctcctcatggtgtgcctccaacccccctgttccccaccacctcaaccaataaactggttcctgctatga

SEQ ID NO: 430138 - DNA, 2056 bp, Homo sapiens
gggaacagcccagcgggccgtcccatcggcttttgggtctgttacccaaagaatgataaagttggttttatttcaagaagtcgatcaaaaagaaagccccagcgctctagagctcagctgacgggaaagggggtgcgcagcctcgagtttgagagctacccggagctccaagacaggggtgggttccagctgcccgcacgccccgaccttccatcgtaggccggaccatgggaaccccaaagccacggatcctgccctggctggtgtcgcagctggacctggggcaactggagggcgtggcctgggtgaacaagagccgcacgcgcttccgcatcccttggaagcacggcctacggcaggatgcacagcaggaggatttcggaatcttccaggcctgggccgaggccactggtgcatatgttcccgggagggataagccagacctgccaacctggaagaggaatttccgctctgccctcaaccgcaaagaagggttgcgtttagcagaggaccggagcaaggaccctcacgacccacataaaatctacgagtttgtgaactcaggagttggggacttttcccagccagacacctctccggacaccaatggtggaggcagtacttctgatacccaggaagacattctggatgagttactgggtaacatggtgttggccccactcccagatccgggacccccaagcctggctgtagcccctgagccctgccctcagcccctgcggagccccagcttggacaatcccactcccttcccaaacctggggccctctgagaacccactgaagcggctgttggtgccgggggaagagtgggagttcgaggtgacagccttctaccggggccgccaagtcttccagcagaccatctcctgcccggagggcctgcggctggtggggtccgaagtgggagacaggacgctgcctggatggccagtcacactgccagaccctggcatgtccctgacagacaggggagtgatgagctacgtgaggcatgtgctgagctgcctgggtgggggactggctctctggcgggccgggcagtggctctgggcccagcggctggggcactgccacacatactgggcagtgagcgaggagctgctccccaacagcgggcatgggcctgatggcgaggtccccaaggacaaggaaggaggcgtgtttgacctggggcccttcattgtaggtgagtgagacaggggcttcgacctggccagtacaaagcagcctgcacagtggttaacaactcaggattggccgggcacggtggctcacgcctgtagtcccagcactttgggaggctgaggtgggcagatgacaagttcaggagttcgagaccagcctggtcaacatagtgaaaccccatctctactaaagatacaaaaaaatagtcgggcgtggtggcacgtgcctgtaatcccagctactcgggaggctgaggcaggagaattgcttgaacccaggaggcggagattgcagtgagctgagatcgcaccactgcactctagcctggtgacagagtaagactccatctcgaacaacaaaaaaaaaagaactcatgattaggactgaattcagacgctggctgcccttggcccgctgtataaccgaggcaaaggactttgccctgagcccgtggaatccaaggatggtctcctctctctacctgcctgccagcgctgggatctgattaccttcacggaaggaagcggacgctcaccacgctatgccctctggttctgtgtgggggagtcatggccccaggaccagccgtggaccaagaggctcgtgatggtcaaggtgcctgcagacctgagtccctggggctgaaaggggtggccttacagagggaagaggttgctcccaggaactccaactcccagagggccctctaaaaaactgcaacttccaagatctctgcaataaccagtttttcatccccgggagctccttcccatggcctcacctgcagaacctgttttgaactctctaaaccagtggcccccaaactatttggcaccagggaccagtct

SEQ ID NO: 430139 - DNA, 1206 bp, Homo sapiens
gggaacagcccagcgggccgtcccatcggcttttgggtctgttacccaaagaatgataaagttggttttatttcaagaagtcgatcaaaaagaaagccccagcgctctagagctcagctgacgggaaagggggtgcgcagcctcgagtttgagagctacccggagctccaagacaggggtgggttccagctgcccgcacgccccgaccttccatcgtaggccggaccatgggaaccccaaagccacggatcctgccctggctggtgtcgcagctggacctggggcaactggagggcgtggcctgggtgaacaagagccgcacgcgcttccgcatcccttggaagcacggcctacggcaggatgcacagcaggaggatttcggaatcttccaggcctgggccgaggccactggtgcatatgttcccgggagggataagccagacctgccaacctggaagaggaatttccgctctgccctcaaccgcaaagaagggttgcgtttagcagaggaccggagcaaggaccctcacgacccacataaaatctacgagtttgtgaactcaggagttggggacttttcccagccagacacctctccggacaccaatggtggaggcagtacttctgatacccaggaagacattctggatgagttactgggtaacatggtgttggccccactcccagatccgggacccccaagcctggctgtagcccctgagccctgccctcagcccctgcggagccccagcttggacaatcccactcccttcccaaacctggggccctctgagaacccactgaagcggctgttggtgccgggggaagatctgattaccttcacggaaggaagcggacgctcaccacgctatgccctctggttctgtgtgggggagtcatggccccaggaccagccgtggaccaagaggctcgtgatggtcaaggttgtgcccacgtgcctcagggccttggtagaaatggcccgggtagggggtgcctcctccctggagaatactgtggacctgcacatttccaacagccacccactctccctcacctccgaccagtacaaggcctacctgcaggacttggtggagggcatggatttccagggccctggggagagctgagccctcgctcctcatggtgtgcctccaacccccctgttccccaccacctcaaccaataaactggttcctgctatga

SEQ ID NO: 430140 - DNA, 3593 bp, Homo sapiens
agcggaggcgtagtctcggccccgggctgccgcgccagcccgtctccgcggcgggggaccgggctgccttggcccctcagcgctcgcgtcttttccggcagttggaacgcttcctgttgtcctcacccgtaaccgcctgttgccccctgtctcagagtccctcacgcgtcccctcccgtctttggctcgttggctgccgccgccggggcttcgccagccttcaagtcgagactactggccgaaggggcgtctgcggctctccgccgtccccagccctgcctctccctgggctctgcagccatggcaatgacaggctcaacaccttgctcatccatgagtaaccacacaaaggaaagggtgacaatgaccaaagtgacactggagaatttttatagcaaccttatcgctcaacatgaagaacgagaaatgagacaaaagaagttagaaaaggtgatggaagaagaaggcctaaaagatgaggagaaacgactccggagatcagcacatgctcggaaggaaacagagtttcttcgtttgaagagaacaagacttggattggaagattttgagtccttaaaagtaataggcagaggagcatttggtgaggtacggcttgttcagaagaaagatacgggacatgtgtatgcaatgaaaatactccgtaaagcagatatgcttgaaaaagagcaggttggccacattcgtgcggagcgtgacattctagtggaggcagacagtttgtgggttgtgaaaatgttctatagttttcaggataagctaaacctctacctaatcatggagttcctgcctggaggggacatgatgaccttgttgatgaaaaaagacactctgacagaagaggagactcagttttatatagcagaaacagtattagccatagactctattcaccaacttggattcatccacagagacatcaaaccagacaaccttcttttggacagcaagggccatgtgaaactttctgactttggtctttgcacaggactgaaaaaagcacataggacagaattttataggaatctgaaccacagcctccccagtgatttcactttccagaacatgaattccaaaaggaaagcagaaacctggaaaagaaatagacgtcagctagccttctccacagtaggcactcctgactacattgctcctgaggtgttcatgcagaccgggtacaacaagctctgtgattggtggtcgcttggggtgatcatgtatgagatgctcatcggctacccacctttctgttctgagacccctcaagagacatataagaaggtgatgaactggaaagaaactttgacttttcctccagaagttcccatctctgagaaagccaaggatctaattttgaggttctgctgtgaatgggaacatagaattggagctcctggagttgaggaaataaaaagtaactctttttttgaaggcgttgactgggaacatatcagagagagacctgctgcaatatctattgaaatcaaaagcattgatgatacctcaaacttcgatgagtttccagaatctgatattcttaagccaacagtggccacaagtaatcatcctgagactgactacaagaacaaagactgggtcttcatcaattacacgtacaagcgctttgagggcctgactgcaaggggggcaataccttcctacatgaaagcagcaaaatagtactcttgccacggaatcctatgtggagcagagttctttgtataacatcatgcttttcctctcacactcttgaagagcttccaagaagttgatggaacccaccaatatgtcatagtaaagtctcctgaaatgtggtagtaagaggattttcttccataatgcatctgaaaaactgtaaacaaagacaaccatttctactacgtcggccataaacagctatcctgctttggaagagaagcatcatgagccaatttgataggtgttttaaaaataacttgagttttcctaagttcatcagaatgaaggggaaaaacagccatcatccaacattattgagattgtcgtgtatagtcatcgaatatcagccagttcctgtaattttgtgacacgctctctgccaagcccaccaagtatttcctttatagctaaaagttccatagtactaaggaaataaagcaataaagacagtctcagcagccaggattctggctgaaggaaatgatccgccaccctgagggtggtgatggtagtttctacccatacctcagcctcaggcgagtggcttatagcctccattcatggtgcactttatttatggtactaagataaagactgtcaatccattgatttatctcctcctgtcccccatctaaaatacccatgctgcttttctgagtgttgatgggggttaccagcttgatccactgttgctcttagaaggcccagaaagtctttgggcattgccaagaaatcccggattatgtggaaaaccctcactttctcttcacggctgtaccagaaaatccctaagacagatcttgccgtggactagcaatacctgcaagtgctgccaatgggaactcaatttattcctgggaacctaacgaggagagcccaggcctaggcaggaggcctggaaccctcttggctaaggtgctgttcctgttcctgcaaggtctccagaacccctttggaaatggtgaaggaaccagcccaatagaagtacagagccagctgacaagtccttgtaaagctcactcctcagtccttggcacagccatgttttgtcttctctcttggtatttcttctctcccaactttagccattttgccttggaatcatgattacaattttttcctttgcagatgccttcctgggggatactcctccccaccctaaagggtcgcctgcaacttaggcggattgggtctctctgctgtggcgttctctcttgagagaccctctgaattttagcacaaagtgccttctgtttcacagctgccaccacctttagaggaatttcgtcagaaaaatgtggaggctccatattaatgcattattttttaaaaagttttgataactcttaaagcatcatttgcacctatgtgggaactttgcctgttgcaaagtattgtggccgagctgcagctgggagcctgctttctgccagtcttgaggttctgaagatcagctttgaaaggaaagtatgtcctagcttagccattcagaagagaaaaatggaatatcagagttacagttgtcagtgaaactactttggattttaacctcttagaggaagaaaaaaggttagggaagtgtcaactctggatgaaggtgatgtgtttgcctctcagtctttcattcatagcctgctagtgaaaaggaagtaaatgagattcttttgtgtgactttgtagtctctttgtattaccaaatagttggggtgttgactcctgtgtgttttgcaagaatgtgtggtaagcctgggtaaagagaaggaactgcggtgttgggagagtctttgtgttggggagtggcaggggatgatttgtttcaggggaaaatgcccacattttaacttttaaacttctgaataaactgtgtaaaaacagta

SEQ ID NO: 430141 - DNA, 670 bp, Homo sapiens
  misc_feature (103)..(103): n is a, c, g, or t
  misc_feature (105)..(105): n is a, c, g, or t
gccttattttggcagatagggaagacatatctgaaaattggtactcactcgtatgttgtgtgtgtgtgtgtgtgtgtgtgtgtgtgtggtggctttgtatctncntgtttccaggggacatgatgaccttgttgatgaaaaaagacactctgacagaagaggagactcagttttatatagcagaaacagtattagccatagactctattcaccaacttggattcatccacagagacatcaaaccagacaaccttcttttggacagcaaggtattgggggggcattggcatgaactatgcacgtttactgatctgagcagcctctgctttaacacctgcacccctgtggtcatcccagtgggcgagctgtgacctgccttgtcatgattttccttttttttttaaacaggtaagtttgctgtcacttcctttctctgaaaggctatggttctgtaatttggttgaacatttctcttaaaaataaaggaaacttgaaaataagagcaaaattgatgtagagggcaattttgtaataaagccaaagatagtcaccttctcttagcatataattaactgtgttactaatacatcacctatctagagcccttctgttgggcaacctcatcagttaatgaggaacccagccaagaagcaggaaatgcagtaacaac

SEQ ID NO: 430142 - DNA, 547 bp, Homo sapiens
ctttgggaaatcgagcttgccattaagctactgggcagtcctgcttatttagcttgggggtagcttctgatgttactcatagcctttggtttctagaacagaactctgggcacctcctgcctggctgggcctcgctgatgtgtggtccatgtttcaggccttctccacagtaggcactcctgactacattgctcctgaggtgttcatgcagaccgggtacaacaagctctgtgattggtggtcgcttggggtgatcatgtatgagatgctcatcggtaagttgcatggtttcagaggactttttctgtgcatccatgacagacttttacattgataccagcctctgtttcaattggcagtgatctaagtgatttccctacttgtctttcaaagtgaattgttttagacagatgacacctctttcagtaagatgtatcccactccattcttgggcttactggcatcctgcaattgctttgctgatcattttttatgtttttctttctcttataccttcatcttctccatctagaagctcttttagtca

SEQ ID NO: 430143 - DNA, 3888 bp, Homo sapiens
gaattccgggccaggcatggtagcgcatcgctgtaatcccagctactcgggaaactgaggtgggagaatcgattgaacctggaagtggaggttgcggtgagccaagatcatcctgtcgcactccagcctgggcaacaagagcgaaactccatctcaaaaagaaaaaaaaagatatatatgtgtgacttacaggtacaggtaaagttgcttctggttttctggttgttgcatggtatttcctatgcagccacaggtctttattttcttacttaagtgcctccaacttcccataacacaaattaaggcatgatgaacatcctctctgtgctgaacatcctgtgtatgtcacttcagaagcctgtgtgacggtttctttagtctttatacctaggggtgggatttctgggtcataggacagtaatttatatttatttcactaagtattctctttctctggcttttgttacatattacctgtttgtcctccagaaaacttgcaccaatttacattcctaccaatagggtaggagagtgcacaatgggtggattctaactccaaatctaacacctcttcttttctttgtttctagcagccatggcaatgacaggctcaacaccttgctcatccatgagtaaccacacaaaggaaagggtgacaatgaccaaagtgacactggagaatttttatagcaaccttatcgctcaacatgaagaacgagaaatgagacaaaagaagttagaaaaggtgatggaagaagaaggcctaaaagatgaggagaaacgactccggagatcagcacatgctcggaaggaaacagagtttcttcgtttgaagagaacaagacttggattggaagattttgagtccttaaaagtaataggcagaggagcatttggtgaggtacggcttgttcagaagaaagatacgggacatgtgtatgcaatgaaaatactccgtaaagcagatatgcttgaaaaagagcaggttggccacattcgtgcggagcgtgacattctagtggaggcagacagtttgtgggttgtgaaaatgttctatagttttcaggataagctaaacctctacctaatcatggagttcctgcctggaggggacatgatgaccttgttgatgaaaaaagacactctgacagaagaggagactcagttttatatagcagaaacagtattagccatagactctattcaccaacttggattcatccacagagacatcaaaccagacaaccttcttttggacagcaagggccatgtgaaactttctgactttggtctttgcacaggactgaaaaaagcacataggacagaattttataggaatctgaaccacagcctccccagtgatttcactttccagaacatgaattccaaaaggaaagcagaaacctggaaaagaaatagacgtcagctagccttctccacagtaggcactcctgactacattgctcctgaggtgttcatgcagaccgggtacaacaagctctgtgattggtggtcgcttggggtgatcatgtatgagatgctcatcggctacccacctttctgttctgagacccctcaagagacatataagaaggtgatgaactggaaagaaactttgacttttcctccagaagttcccatctctgagaaagccaaggatctaattttgaggttctgctgtgaatgggaacatagaattggagctcctggagttgaggaaataaaaagtaactctttttttgaaggcgttgactgggaacatatcagagagagacctgctgcaatatctattgaaatcaaaagcattgatgatacctcaaacttcgatgagtttccagaatctgatattcttaagccaacagtggccacaagtaatcatcctgagactgactacaagaacaaagactgggtcttcatcaattacacgtacaagcgctttgagggcctgactgcaaggggggcaataccttcctacatgaaagcagcaaaatagtactcttgccacggaatcctatgtggagcagagttctttgtataacatcatgcttttcctctcacactcttgaagagcttccaagaagttgatggaacccaccaatatgtcatagtaaagtctcctgaaatgtggtagtaagaggattttcttccataatgcatctgaaaaactgtaaacaaagacaaccatttctactacgtcggccataaacagctatcctgctttggaagagaagcatcatgagccaatttgataggtgttttaaaaataacttgagttttcctaagttcatcagaatgaaggggaaaaacagccatcatccaacattattgagattgtcgtgtatagtcatcgaatatcagccagttcctgtaattttgtgacacgctctctgccaagcccaccaagtatttcctttatagctaaaagttccatagtactaaggaaataaagcaataaagacagtctcagcagccaggattctggctgaaggaaatgatccgccaccctgagggtggtgatggtagtttctacccatacctcagcctcaggcgagtggcttatagcctccattcatggtgcactttatttatggtactaagataaagactgtcaatccattgatttatctcctcctgtcccccatctaaaatacccatgctgcttttctgagtgttgatgggggttaccagcttgatccactgttgctcttagaaggcccagaaagtctttgggcattgccaagaaatcccggattatgtggaaaaccctcactttctcttcacggctgtaccagaaaatccctaagacagatcttgccgtggactagcaatacctgcaagtgctgccaatgggaactcaatttattcctgggaacctaacgaggagagcccaggcctaggcaggaggcctggaaccctcttggctaaggtgctgttcctgttcctgcaaggtctccagaacccctttggaaatggtgaaggaaccagcccaatagaagtacagagccagctgacaagtccttgtaaagctcactcctcagtccttggcacagccatgttttgtcttctctcttggtatttcttctctcccaactttagccattttgccttggaatcatgattacaattttttcctttgcagatgccttcctgggggatactcctccccaccctaaagggtcgcctgcaacttaggcggattgggtctctctgctgtggcgttctctcttgagagaccctctgaattttagcacaaagtgccttctgtttcacagctgccaccacctttagaggaatttcgtcagaaaaatgtggaggctccatattaatgcattattttttaaaaagttttgataactcttaaagcatcatttgcacctatgtgggaactttgcctgttgcaaagtattgtggccgagctgcagctgggagcctgctttctgccagtcttgaggttctgaagatcagctttgaaaggaaagtatgtcctagcttagccattcagaagagaaaaatggaatatcagagttacagttgtcagtgaaactactttggattttaacctcttagaggaagaaaaaaggttagggaagtgtcaactctggatgaaggtgatgtgtttgcctctcagtctttcattcatagcctgctagtgaaaaggaagtaaatgagattcttttgtgtgactttgtagtctctttgtattaccaaatagttggggtgttgactcctgtgtgttttgcaagaatgtgtggtaagcctgggtaaagagaaggaactgcggtgttgggagagtctttgtgttggggagtggcaggggatgatttgtttcaggggaaaatgcccacattttaacttttaaacttctgaataaactgtgtaaaaacagta

SEQ ID NO: 430144 - DNA, 3668 bp, Homo sapiens
agcggaggcgtagtctcggccccgggctgccgcgccagcccgtctccgcggcgggggaccgggctgccttggcccctcagcgctcgcgtcttttccggcagttggaacgcttcctgttgtcctcacccgtaaccgcctgttgccccctgtctcagagtccctcacgcgtcccctcccgtctttggctcgttggctgccgccgccggggcttcgccagccttcaagtcgagactactggccgaaggggcgtctgcggctctccgccgtccccagccctgcctctccctgggctctgcagccatggcaatgacaggctcaacaccttgctcatccatgagtaaccacacaaaggaaagggtgacaatgaccaaagtgacactggagaatttttatagcaaccttatcgctcaacatgaagaacgagaaatgagacaaaagaagttagaaaaggtgatggaagaagaaggcctaaaagatgaggagaaacgactccggagatcagcacatgctcggaaggaaacagagtttcttcgtttgaagagaacaagacttggattggaagattttgagtccttaaaagtaataggcagaggagcatttggtgaggtacggcttgttcagaagaaagatacgggacatgtgtatgcaatgaaaatactccgtaaagcagatatgcttgaaaaagagcaggttggccacattcgtgcggagcgtgacattctagtggaggcagacagtttgtgggttgtgaaaatgttctatagttttcaggataagctaaacctctacctaatcatggagttcctgcctggaggggacatgatgaccttgttgatgaaaaaagacactctgacagaagaggagactcagttttatatagcagaaacagtattagccatagactctattcaccaacttggattcatccacagagacatcaaaccagacaaccttcttttggacagcaagggccatgtgaaactttctgactttggtctttgcacaggactgaaaaaagcacataggacagaattttataggaatctgaaccacagcctccccagtgatttcactttccagaacatgaattccaaaaggaaagcagaaacctggaaaagaaatagacgtcagctagccttctccacagtaggcactcctgactacattgctcctgaggtgttcatgcagaccgggtacaacaagctctgtgattggtggtcgcttggggtgatcatgtatgagatgctcatcggctacccacctttctgttctgagacccctcaagagacatataagaaggtgatgaactggaaagaaactttgacttttcctccagaagttcccatctctgagaaagccaaggatctaattttgaggttctgctgtgaatgggaacatagaattggagctcctggagttgaggaaataaaaagtaactctttttttgaaggcgttgactgggaacatatcagagagagacctgctgcaatatctattgaaatcaaaagcattgatgatacctcaaacttcgatgagtttccagaatctgatattcttaagccaacagtcctgtcttcagcaccgtgagcagtccattggaggcaaggcagtgaatcaactctcacatctatttctttcccagtggccacaagtaatcatcctgagactgactacaagaacaaagactgggtcttcatcaattacacgtacaagcgctttgagggcctgactgcaaggggggcaataccttcctacatgaaagcagcaaaatagtactcttgccacggaatcctatgtggagcagagttctttgtataacatcatgcttttcctctcacactcttgaagagcttccaagaagttgatggaacccaccaatatgtcatagtaaagtctcctgaaatgtggtagtaagaggattttcttccataatgcatctgaaaaactgtaaacaaagacaaccatttctactacgtcggccataaacagctatcctgctttggaagagaagcatcatgagccaatttgataggtgttttaaaaataacttgagttttcctaagttcatcagaatgaaggggaaaaacagccatcatccaacattattgagattgtcgtgtatagtcatcgaatatcagccagttcctgtaattttgtgacacgctctctgccaagcccaccaagtatttcctttatagctaaaagttccatagtactaaggaaataaagcaataaagacagtctcagcagccaggattctggctgaaggaaatgatccgccaccctgagggtggtgatggtagtttctacccatacctcagcctcaggcgagtggcttatagcctccattcatggtgcactttatttatggtactaagataaagactgtcaatccattgatttatctcctcctgtcccccatctaaaatacccatgctgcttttctgagtgttgatgggggttaccagcttgatccactgttgctcttagaaggcccagaaagtctttgggcattgccaagaaatcccggattatgtggaaaaccctcactttctcttcacggctgtaccagaaaatccctaagacagatcttgccgtggactagcaatacctgcaagtgctgccaatgggaactcaatttattcctgggaacctaacgaggagagcccaggcctaggcaggaggcctggaaccctcttggctaaggtgctgttcctgttcctgcaaggtctccagaacccctttggaaatggtgaaggaaccagcccaatagaagtacagagccagctgacaagtccttgtaaagctcactcctcagtccttggcacagccatgttttgtcttctctcttggtatttcttctctcccaactttagccattttgccttggaatcatgattacaattttttcctttgcagatgccttcctgggggatactcctccccaccctaaagggtcgcctgcaacttaggcggattgggtctctctgctgtggcgttctctcttgagagaccctctgaattttagcacaaagtgccttctgtttcacagctgccaccacctttagaggaatttcgtcagaaaaatgtggaggctccatattaatgcattattttttaaaaagttttgataactcttaaagcatcatttgcacctatgtgggaactttgcctgttgcaaagtattgtggccgagctgcagctgggagcctgctttctgccagtcttgaggttctgaagatcagctttgaaaggaaagtatgtcctagcttagccattcagaagagaaaaatggaatatcagagttacagttgtcagtgaaactactttggattttaacctcttagaggaagaaaaaaggttagggaagtgtcaactctggatgaaggtgatgtgtttgcctctcagtctttcattcatagcctgctagtgaaaaggaagtaaatgagattcttttgtgtgactttgtagtctctttgtattaccaaatagttggggtgttgactcctgtgtgttttgcaagaatgtgtggtaagcctgggtaaagagaaggaactgcggtgttgggagagtctttgtgttggggagtggcaggggatgatttgtttcaggggaaaatgcccacattttaacttttaaacttctgaataaactgtgtaaaaacagta

SEQ ID NO: 430145 - DNA, 1518 bp, Homo sapiens
  misc_feature (8)..(8): n is a, c, g, or t
agctgggncctctataggatcgcagcccaccaagtatttcctttatagctaaaagttccatagtactaaggaaataaagcaataaagacagtctcagcagccaggattctggctgaaggaaatgatccgccaccctgagggtggtgatggtagtttctacccatacctcagcctcaggcgagtggcttatagcctccattcatggtgcactttatttatggtactaagataaagactgtcaatccattgatttatctcctcctgtcccccatctaaaatacccatgctgcttttctgagtgttgatgggggttaccagcttgatccactgttgctcttagaaggcccagaaagtctttgggcattgccaagaaatcccggattatgtggaaaaccctcactttctcttcacggctgtaccagaaaatccctaagacagatcttgccgtggactagcaatacctgcaagtgctgccaatgggaactcaatttattcctgggaacctaacgaggagagcccaggcctaggcaggaggcctggaaccctcttggctaaggtgctgttcctgttcctgcaaggtctccagaacccctttggaaatggtgaaggaaccagcccaatagaagtacagagccagctgacaagtccttgtaaagctcactcctcagtccttggcacagccatgttttgtcttctctcttggtatttcttctctcccaactttagccattttgccttggaatcatgattacaattttttcctttgcagatgccttcctgggggatactcctccccaccctaaagggtcgcctgcaacttaggcggattgggtctctctgctgtggcgttctctcttgagagaccctctgaattttagcacaaagtgccttctgtttcacagctgccaccacctttagaggaatttcgtcagaaaaatgtggaggctccatattaatgcattattttttaaaaagttttgataactcttaaagcatcatttgcacctatgtgggaactttgcctgttgcaaagtattgtggccgagctgcagctgggagcctgctttctgccagtcttgaggttctgaagatcagctttgaaaggaaagtatgtcctagcttagccattcagaagagaaaaatggaatatcagagttacagttgtcagtgaaactactttggattttaacctcttagaggaagaaaaaaggttagggaagtgtcaactctggatgaaggtgatgtgtttgcctctcagtctttcattcatagcctgctagtgaaaaggaagtaaatgagattcttttgtgtgactttgtagtctctttgtattaccaaatagttggggtgttgactcctgtgtgttttgcaagaatgtgtggtaagcctgggtaaagagaaggaactgcggtgttgggagagtctttgtgttggggagtggcaggggatgatttgtttcaggggaaaatgcccacattttaacttttaaacttctgaataaactgtgtaaaaacagta

SEQ ID NO: 430146 - DNA, 3093 bp, Homo sapiens
gaattccgggccaggcatggtagcgcatcgctgtaatcccagctactcgggaaactgaggtgggagaatcgattgaacctggaagtggaggttgcggtgagccaagatcatcctgtcgcactccagcctgggcaacaagagcgaaactccatctcaaaaagaaaaaaaaagatatatatgtgtgacttacaggtacaggtaaagttgcttctggttttctggttgttgcatggtatttcctatgcagccacaggtctttattttcttacttaagtgcctccaacttcccataacacaaattaaggcatgatgaacatcctctctgtgctgaacatcctgtgtatgtcacttcagaagcctgtgtgacggtttctttagtctttatacctaggggtgggatttctgggtcataggacagtaatttatatttatttcactaagtattctctttctctggcttttgttacatattacctgtttgtcctccagaaaacttgcaccaatttacattcctaccaatagggtaggagagtgcacaatgggtggattctaactccaaatctaacacctcttcttttctttgtttctagcagccatggcaatgacaggctcaacaccttgctcatccatgagtaaccacacaaaggaaagggtgacaatgaccaaagtgacactggagaatttttatagcaaccttatcgctcaacatgaagaacgagaaatgagacaaaagaagttagaaaaggtgatggaagaagaaggcctaaaagatgaggagaaacgactccggagatcagcacatgctcggaaggaaacagagtttcttcgtttgaagagaacaagacttggattggaagattttgagtccttaaaagtaataggcagaggagcatttggtgaggtacggcttgttcagaagaaagatacgggacatgtgtatgcaatgaaaatactccgtaaagcagatatgcttgaaaaagagcaggttggccacattcgtgcggagcgtgacattctagtggaggcagacagtttgtgggttgtgaaaatgttctatagttttcaggataagctaaacctctacctaatcatggagttcctgcctggaggggacatgatgaccttgttgatgaaaaaagacactctgacagaagaggagactcagttttatatagcagaaacagtattagccatagactctattcaccaacttggattcatccacagagacatcaaaccagacaaccttcttttggacagcaagggccatgtgaaactttctgactttggtctttgcacaggactgaaaaaagcacataggacagaattttataggaatctgaaccacagcctccccagtgatttcactttccagaacatgaattccaaaaggaaagcagaaacctggaaaagaaatagacgtcagctagccttctccacagtaggcactcctgactacattgctcctgaggtgttcatgcagaccgggtacaacaagctctgtgattggtggtcgcttggggtgatcatgtatgagatgctcatcggctacccacctttctgttctgagacccctcaagagacatataagaaggtgatgaactggaaagaaactttgacttttcctccagaagttcccatctctgagaaagccaaggatctaattttgaggttctgctgtgaatgggaacatagaattggagctcctggagttgaggaaataaaaagtaactctttttttgaaggcgttgactgggaacatatcagagagagacctgctgcaatatctattgaaatcaaaagcattgatgatacctcaaacttcgatgagtttccagaatctgatattcttaagccaacagtggccacaagtaatcatcctgagactgactacaagaacaaagactgggtcttcatcaattacacgtacaagcgctttgagggcctgactgcaaggggggcaataccttcctacatgaaagcagcaaaatagtactcttgccacggaatcctatgtggagcagagttctttgtataacatcatgcttttcctctcacactcttgaagagcttccaagaagttgatggaacccaccaatatgtcatagtaaagtctcctgaaatgtggtagtaagaggattttcttccataatgcatctgaaaaactgtaaacaaagacaaccatttctactacgtcggccataaacagctatcctgctttggaagagaagcatcatgagccaatttgataggtgttttaaaaataacttgagttttcctaagttcatcagaatgaaggggaaaaacagccatcatccaacattattgagattgtcgtgtatagtcatcgaatatcagccagttcctgtaattttgtgacacgctctctgccaagcccaccaagtatttcctttatagctaaaagttccatagtactaaggaaataaagcaataaagacagtctcagcagccaggattctggctgaaggaaatgatccgccaccctgagggtggtgatggtagtttctacccatacctcagcctcaggcgagtggcttatagcctccattcatggtgcactttatttatggtactaagataaagactgtcaatccattgatttatctcctcctgtcccccatctaaaatacccatgctgcttttctgagtgttgatgggggttaccagcttgatccactgttgctcttagaaggcccagaaagtctttgggcattgccaagaaatcccggattatgtggaaaaccctcactttctcttcacggctgtaccagaaaatccctaagacagatcttgccgtggactagcaatacctgcaagtgctgccaatgggaactcaatttattcctgggaacctaacgaggagagcccaggcctaggcaggaggcctggaaccctcttggctaaggtgctgttcctgttcctgcaaggtctccagaacccctttggaaatggtgaaggaaccagcccaatagaagtacagagccagctgacaagtccttgtaaagctcactcctcagtccttggcacagccatttaggtaaagatcctgtagagtcacctcagcacactcgt

SEQ ID NO: 430147 - DNA, 1444 bp, Homo sapiens
cattcctttatagctaagatactaataaagacagtctcagcagcagacgcgagcgccaccctgagggtggtgatggtagtttctacccatacctcagcctcaggcgagtggcttatagcctccattcatggtgcactttatttatggtactaagataaagactgtcaatccattgatttatctcctcctgtcccccatctaaaatacccatgctgcttttctgagtgttgatgggggttaccagcttgatccactgttgctcttagaaggcccagaaagtctttgggcattgccaagaaatcccggattatgtggaaaaccctcactttctcttcacggctgtaccagaaaatccctaagacagatcttgccgtggactagcaatacctgcaagtgctgccaatgggaactcaatttattcctgggaacctaacgaggagagcccaggcctaggcaggaggcctggaaccctcttggctaaggtgctgttcctgttcctgcaaggtctccagaacccctttggaaatggtgaaggaaccagcccaatagaagtacagagccagctgacaagtccttgtaaagctcactcctcagtccttggcacagccatgttttgtcttctctcttggtatttcttctctcccaactttagccattttgccttggaatcatgattacaattttttcctttgcagatgccttcctgggggatactcctccccaccctaaagggtcgcctgcaacttaggcggattgggtctctctgctgtggcgttctctcttgagagaccctctgaattttagcacaaagtgccttctgtttcacagctgccaccacctttagaggaatttcgtcagaaaaatgtggaggctccatattaatgcattattttttaaaaagttttgataactcttaaagcatcatttgcacctatgtgggaactttgcctgttgcaaagtattgtggccgagctgcagctgggagcctgctttctgccagtcttgaggttctgaagatcagctttgaaaggaaagtatgtcctagcttagccattcagaagagaaaaatggaatatcagagttacagttgtcagtgaaactactttggattttaacctcttagaggaagaaaaaaggttagggaagtgtcaactctggatgaaggtgatgtgtttgcctctcagtctttcattcatagcctgctagtgaaaaggaagtaaatgagattcttttgtgtgactttgtagtctctttgtattaccaaatagttggggtgttgactcctgtgtgttttgcaagaatgtgtggtaagcctgggtaaagagaaggaactgcggtgttgggagagtctttgtgttggggagtggcaggggatgatttgtttcaggggaaaatgcccacattttaacttttaaacttctgaataaactgtgtaaaaacagta

SEQ ID NO: 430148 - DNA, 2316 bp, Homo sapiens
agcggaggcgtagtctcggccccgggctgccgcgccagcccgtctccgcggcgggggaccgggctgccttggcccctcagcgctcgcgtcttttccggcagttggaacgcttcctgttgtcctcacccgtaaccgcctgttgccccctgtctcagagtccctcacgcgtcccctcccgtctttggctcgttggctgccgccgccggggcttcgccagccttcaagtcgagactactggccgaaggggcgtctgcggctctccgccgtccccagccctgcctctccctgggctctgcagccatggcaatgacaggctcaacaccttgctcatccatgagtaaccacacaaaggaaagggtgacaatgaccaaagtgacactggagaatttttatagcaaccttatcgctcaacatgaagaacgagaaatgagacaaaagaagttagaaaaggtgatggaagaagaaggcctaaaagatgaggagaaacgactccggagatcagcacatgctcggaaggaaacagagtttcttcgtttgaagagaacaagacttggattggaagattttgagtccttaaaagtaataggcagaggagcatttggtgaggtacggcttgttcagaagaaagatacgggacatgtgtatgcaatgaaaatactccgtaaagcagatatgcttgaaaaagagcaggttggccacattcgtgcggagcgtgacattctagtggaggcagacagtttgtgggttgtgaaaatgttctatagttttcaggataagctaaacctctacctaatcatggagttcctgcctggaggggacatgatgaccttgttgatgaaaaaagacactctgacagaagaggagactcagttttatatagcagaaacagtattagccatagactctattcaccaacttggattcatccacagagacatcaaaccagacaaccttcttttggacagcaagggccatgtgaaactttctgactttggtctttgcacaggactgaaaaaagcacataggacagaattttataggaatctgaaccacagcctccccagtgatttcactttccagaacatgaattccaaaaggaaagcagaaacctggaaaagaaatagacgtcagctagccttctccacagtaggcactcctgactacattgctcctgaggtgttcatgcagaccgggtacaacaagctctgtgattggtggtcgcttggggtgatcatgtatgagatgctcatcggctacccacctttctgttctgagacccctcaagagacatataagaaggtgatgaactggaaagaaactttgacttttcctccagaagttcccatctctgagaaagccaaggatctaattttgaggttctgctgtgaatgggaacatagaattggagctcctggagttgaggaaataaaaagtaactctttttttgaaggcgttgactgggaacatatcagagagagacctgctgcaatatctattgaaatcaaaagcattgatgatacctcaaacttcgatgagtttccagaatctgatattcttaagccaacagatgccttcctgggggatactcctccccaccctaaagggtcgcctgcaacttaggcggattgggtctctctgctgtggcgttctctcttgagagaccctctgaattttagcacaaagtgccttctgtttcacagctgccaccacctttagaggaatttcgtcagaaaaatgtggaggctccatattaatgcattattttttaaaaagttttgataactcttaaagcatcatttgcacctatgtgggaactttgcctgttgcaaagtattgtggccgagctgcagctgggagcctgctttctgccagtcttgaggttctgaagatcagctttgaaaggaaagtatgtcctagcttagccattcagaagagaaaaatggaatatcagagttacagttgtcagtgaaactactttggattttaacctcttagaggaagaaaaaaggttagggaagtgtcaactctggatgaaggtgatgtgtttgcctctcagtctttcattcatagcctgctagtgaaaaggaagtaaatgagattcttttgtgtgactttgtagtctctttgtattaccaaatagttggggtgttgactcctgtgtgttttgcaagaatgtgtggtaagcctgggtaaagagaaggaactgcggtgttgggagagtctttgtgttggggagtggcaggggatgatttgtttcaggggaaaatgcccacattttaacttttaaacttctgaataaactgtgtaaaaacagta

SEQ ID NO: 430149 - DNA, 1524 bp, Homo sapiens
agcggaggcgtagtctcggccccgggctgccgcgccagcccgtctccgcggcgggggaccgggctgccttggcccctcagcgctcgcgtcttttccggcagttggaacgcttcctgttgtcctcacccgtaaccgcctgttgccccctgtctcagagtccctcacgcgtcccctcccgtctttggctcgttggctgccgccgccggggcttcgccagccttcaagtcgagactactggccgaaggggcgtctgcggctctccgccgtccccagccctgcctctccctgggctctgcagccatggcaatgacaggctcaacaccttgctcatccatgagtaaccacacaaaggaaagggtgacaatgaccaaagtgacactggagaatttttatagcaaccttatcgctcaacatgaagaacgagaaatgagacaaaagaagttagaaaaggtgatggaagaagaaggcctaaaagatgaggagaaacgactccggagatcagcacatgctcggaaggaaacagagtttcttcgtttgaagagaacaagacttggattggaagattttgagtccttaaaagtaataggcagaggagcatttggtgaggtacggcttgttcagaagaaagatacgggacatgtgtatgcaatgaaaatactccgtaaagcagatatgcttgaaaaagagcaggttggccacattcgtgcggagcgtgacattctagtggaggcagacagtttgtgggttgtgaaaatgttctatagttttcaggataagctaaacctctacctaatcatggagttcctgcctggaggggacatgatgaccttgttgatgaaaaaagacactctgacagaagaggagactcagttttatatagcagaaacagtattagccatagactctattcaccaacttggattcatccacagagacatcaaaccagacaaccttcttttggacagcaagggccatgtgaaactttctgactttggtctttgcacaggactgaaaaaagcacataggacagaattttataggaatctgaaccacagcctccccagtgatttcactttccagaacatgaattccaaaaggaaagcagaaacctggaaaagaaatagacgtcagctagccttctccacagtaggcactcctgactacattgctcctgaggtgttcatgcagaccgggtacaacaagctctgtgattggtggtcgcttggggtgatcatgtatgagatgctcatcggtaagttgcatggtttcagaggactttttctgtgcatccatgacagacttttacattgataccagcctctgtttcaattggcagtgatctaagtgatttccctacttgtctttcaaagtgaattgttttagacagatgacacctctttcagtaagatgtatcccactccattcttgggcttactggcatcctgcaattgctttgctgatcattttttatgtttttctttctcttataccttcatcttctccatctagaagctcttttagtca

SEQ ID NO: 430150 - DNA, 1370 bp, Homo sapiens
agcggaggcgtagtctcggccccgggctgccgcgccagcccgtctccgcggcgggggaccgggctgccttggcccctcagcgctcgcgtcttttccggcagttggaacgcttcctgttgtcctcacccgtaaccgcctgttgccccctgtctcagagtccctcacgcgtcccctcccgtctttggctcgttggctgccgccgccggggcttcgccagccttcaagtcgagactactggccgaaggggcgtctgcggctctccgccgtccccagccctgcctctccctgggctctgcagccatggcaatgacaggctcaacaccttgctcatccatgagtaaccacacaaaggaaagggtgacaatgaccaaagtgacactggagaatttttatagcaaccttatcgctcaacatgaagaacgagaaatgagacaaaagaagttagaaaaggtgatggaagaagaaggcctaaaagatgaggagaaacgactccggagatcagcacatgctcggaaggaaacagagtttcttcgtttgaagagaacaagacttggattggaagattttgagtccttaaaagtaataggcagaggagcatttggtgaggtacggcttgttcagaagaaagatacgggacatgtgtatgcaatgaaaatactccgtaaagcagatatgcttgaaaaagagcaggttggccacattcgtgcggagcgtgacattctagtggaggcagacagtttgtgggttgtgaaaatgttctatagttttcaggataagctaaacctctacctaatcatggagttcctgcctggaggggacatgatgaccttgttgatgaaaaaagacactctgacagaagaggagactcagttttatatagcagaaacagtattagccatagactctattcaccaacttggattcatccacagagacatcaaaccagacaaccttcttttggacagcaaggtattgggggggcattggcatgaactatgcacgtttactgatctgagcagcctctgctttaacacctgcacccctgtggtcatcccagtgggcgagctgtgacctgccttgtcatgattttccttttttttttaaacaggtaagtttgctgtcacttcctttctctgaaaggctatggttctgtaatttggttgaacatttctcttaaaaataaaggaaacttgaaaataagagcaaaattgatgtagagggcaattttgtaataaagccaaagatagtcaccttctcttagcatataattaactgtgttactaatacatcacctatctagagcccttctgttgggcaacctcatcagttaatgaggaacccagccaagaagcaggaaatgcagtaacaac

SEQ ID NO: 430151 - DNA, 379 bp, Homo sapiens
tgacctagagttacttatcgccaacaccgcacttcttctatttacccaggcttaccacacattcttgcaaacacacggaagtgtcaactctggatgaaggtgatgtgtttgcctctcagtctttcattcatagcctgctagtgaaaaggaagtaaatgagattcttttgtgtgactttgtagtctctttgtattaccaaatagttggggtgttgactcctgtgtgttttgcaagaatgtgtggtaagcctgggtaaagagaaggaactgcggtgttgggagagtctttgtgttggggagtggcaggggatgatttgtttcaggggaaaatgcccacattttaacttttaaacttctgaataaactgtgtaaaaacagta

SEQ ID NO: 430152 - DNA, 110 bp, Homo sapiens
gctttcccaaatagaaactggtgtgttcttcatagtcctgtcttcagcaccgtgagcagtccattggaggcaaggcagtgaatcaactctcacatctatttctttcccag

SEQ ID NO: 430153 - DNA, 843 bp, Homo sapiens
aaattgtttaagcaaatatacaatctaataaagcagagcaagctttgtcattaatcaaatgcatatacctccaggttggccacattcgtgcggagcgtgacattctagtggaggcagacagtttgtgggttgtgaaaatgttctatagttttcaggataagctaaacctctacctaatcatggagttcctgcctggaggtaattacttgacgatgaaaggtcattttttctttttgttctgtggtttctttctctcacatcacgattaaccctcctttctacttttaaatgtgctcacaaagttgctttctatatccttttttaggtctataaaggaagtcagtaacctgtcttgtgctggggtgcctttctacaatcttagtaccataaaagtaacctgttaattcatttacatgatttcagatggacatttctttcttttcttcttctttttaaaatatataggaataaattagggtgctctgcctgctctcctgtcaatgggaatcatatatgatcaataacccaagtgacaacattgaagctataacatcctttgctccaaatttttgtttctttttgtataacatattaataaggagtgaattttttgttacccatattagtagccagaaaaaatttctcatttctgaaattttaagttttatgtaactcagcatgagcatctcctaagacagctccaaagtaaacccagaacagaacatgccatctgttctgaggaaagcagtctgtttgtcagtgagcagatgaactctgagcaaactctggtgggaaaaaaaaagagagagaacttttttcttttttgttcctataattgtggca

SEQ ID NO: 430154 - DNA, 740 bp, Homo sapiens
atttccctgcggtttgcccacactccctgtggcaggaggagttagagtttgccatcatgcggatagaagccctgaagctggccaggcagattgctttggcttcccgcagccaccaggatgccaaggtaccggtttgctgctgcgtgcgccacctcctgagaatgtcatgtgtgccgctggggtccagaagctgctttgctaaccatccgccaggcgggcatcatcggtgtccagcaaagagtcgtttccaaaaagctgaaagcgtcactcttgcataaatacacactgagcacatagctaagatccatttaagtcgataatgctaaaccgcgggatagtaatgctggttaaatgagagagaatgcagagaccaatgtatgggtcagtagggtaaagaaggctagcctaagatgacaaagttggatagaaaactggttagcaccaattcaacagagcaaaacaaaatcatgacctttgagggttttttttttctacagataccatttgcttctctattgagcaaacataatttgcaacttttctattttctgcaagttaacatctgactttgttgagacaaggccctaatcaataatacatagtaagtgaaaccaagacatttgataatattctagaccaggcttaagcaattctttctgtaaagtgcaaatgataagtatttccagccttgtgggccgtactgtctggcactgttccaataaaacttttatttgtctgaa

SEQ ID NO: 430155 - DNA, 3993 bp, Homo sapiens
  misc_feature (253)..(253): n is a, c, g, or t
  misc_feature (361)..(361): n is a, c, g, or t
ggaaagccctttgcacacatcggcctattgaagcactttgcttgattcagctattctcctctcaggacctgcctggatcatcccagcctgtagaatcctgggtttctgtggcagtttgttcttctggtatcacctgctatgctctgaatgtttgtatccctctcagccccgaaattcctgtgttgaaatcctaacccctaaggtgatggtatgaggaggtggggccttcgggaggtgattaggccataagggnggagcctttgtgaatgggattagtgcccttataaaaagaggccccacagcactgccttgcctcttctgccacgtgaagatgcagtgagaaggagctgtctgtgaactnggaaggggtcctcatgagacactgaacctgctggtgccttgatcttggacttcccagcctccagaactttcacctgtggcagatgatatcatccagcccgctgcccccgcagacctggaaagcccaaccttagctgcctcttcctaccacggtgatgttgttggccaggtctctacggatctgatagcccagaggagttccgattctgaagaggcatttgagaccccggagtcaacgacccctgtcaaagctccgccagctccacccccaccaccccccgaagtcatcccagaacccgaggtcagcacacagccacccccggaagaaccaggatgtggttctgagacagtccctgtccctgatggcccacggagcgactcggtggaaggaagtcccttccgtcccccgtcacactccttctctgccgtcttcgatgaagacaagccgatagccagcagtgggacttacaacttggactttgacaacattgagcttgtggatacctttcagaccttggagcctcgtgcctcagacgctaagaatcaggagggcaaagtgaacacacggaggaagtccacggattccgtccccatctctaagtctacactgtcccggtcgctcagcctgcaagccagtgactttgatggtgcttcttcctcaggcaatcccgaggccgtggcccttgccccagatgcatatagcacgggttccagcagtgcttctagtacccttaagcgaactaaaaaaccgaggccgccttccttaaaaaagaaacagaccaccaagaaacccacagagacccccccagtgaaggagacgcaacaggagccagatgaagagagccttgtccccagtggggagaatctagcatctgagacgaaaacggaatctgccaagacggaaggtcctagcccagccttattggaggagacgccccttgagcccgctgtggggcccaaagctgcctgccctctggactcagagagtgcagaaggggttgtccccccggcttctggaggtggcagagtgcagaactcaccccctgtcgggaggaaaacgctgcctcttaccacggccccggaggcaggggaggtaaccccatcggatagcggggggcaagaggactctccagccaaagggctctccgtaaggctggagtttgactattctgaggacaagagtagttgggacaaccagcaggaaaacccccctcctaccaaaaagataggcaaaaagccagttgccaaaatgcccctgaggaggccaaagatgaaaaagacacccgagaaacttgacaacactcctgcctcacctcccagatcccctgctgaacccaatgacatccccattgctaaaggtacttacacctttgatattgacaagtgggatgaccccaattttaaccctttttcttccacctcaaaaatgcaggagtctcccaaactgccccaacaatcatacaactttgacccagacacctgtgatgagtccgttgacccctttaagacatcctctaagacccccagctcaccttctaaatccccagcctcctttgagatcccagccagtgctatggaagccaatggagtggacggggatgggctaaacaagcccgccaagaagaagaagacgcccctaaagactgacacatttagggtgaaaaagtcgccaaaacggtctcctctctctgatccaccttcccaggaccccaccccagctgctacaccagaaacaccaccagtgatctctgcggtggtccacgccacagatgaggaaaagctggcggtcaccaaccagaagtggacgtgcatgacagtggacctagaggctgacaaacaggactacccgcagccctcggacctgtccacctttgtaaacgagaccaaattcagttcacccactgaggagttggattacagaaactcctatgaaattgaatatatggagaaaattggctcctccttacctcaggacgacgatgccccgaagaagcaggccttgtaccttatgtttgacacttctcaggagagccctgtcaagtcatctcccgtccgcatgtcagagtccccgacgccgtgttcagggtcaagttttgaagagactgaagcccttgtgaacactgctgcgaaaaaccagcatcctgtcccacgaggactggcccctaaccaagagtcacacttgcaggtgccagagaaatcctcccagaaggagctggaggccatgggcttgggcaccccttcagaagcgattgaaattagagaggctgctcacccaacagacgtctccatctccaaaacagccttgtactcccgcatcgggaccgctgaggtggagaaacctgcaggccttctgttccagcagcccgacctggactctgccctccagatcgccagagcagagatcataaccaaggagagagaggtctcagaatggaaagataaatatgaagaaagcaggcgggaagtgatggaaatgaggaaaatagtggccgagtatgagaagaccatcgctcagatgatagaggacgaacagagagagaagtcagtctcccaccagacggtgcagcagctggttctggagaaggagcaagccctggccgacctgaactccgtggagaagtctctggccgacctcttcagaagatatgagaagatgaaggaggtcctagaaggcttccgcaagaatgaagaggtgttgaagagatgtgcgcaggagtacctgtcccgggtgaagaaggaggagcagaggtaccaggccctgaaggtgcacgcggaggagaaactggacagggccaatgctgagattgctcaggttcgaggcaaggccaagcaggagcaagccgcccaccaggccagcctgcggaaggagcagctgcgagtggacgccctggaaaggacgctggagcagaagaataaagaaatagaagaactcaccaagatttgtgacgaactgattgccaaaatggggaaaagctaactctgaaccgaatgttttggacttaactgttgcgtgcaatatgaccgtcggcacactgctgttcctccagttccatggacaggttctgttttcactttttcgtatgcactactgtatttcctttctaaataaaattgatttgattgtatgcagtactaaggagactatcagaatttcttgctattggtttgcattttcctagtataattcatagcaagttgacctcagagttcctgtatcagggagattgtctgattctctaataaaagacacattgctgaccttggccttgccctttgtacacaagttcccagggtgagcagcttttggatttaatatgaacatgtacagcgtgcatagggactcttgccttaaggagtgtaaacttgatctgcatttgctgatttgtttttaaaaaaacaagaaatgcatgtttcaaataaaattctctattgtaaataaaattttttctttggatcttggcaataagtgtgcctcgaatttattttctgggaagggttgagtcttttctcacctttgtcaaataccagatttggcttcgtgctcttctctgtctgggctcatttctttgtccatagacttaaataatatttcctttgttatcgtggctgcatttgtaggatgaagctaatgag

SEQ ID NO: 430156 - DNA, 876 bp, Homo sapiens
aaagcagcaccaggaaacatctgcctgcggcagtccacatggagaagatggtcccggggactttgctcacacaggggttccaggacatgtgccaaggtccacgtgtgccccttctcctcagagggaggttttgactgtgcctgaggccaacagtgagccctggacccttgacacgcttgggggtgaaaggagacccggagtcactactggcatcttggaaatgcggaaatgccctgggcaaccagagcacccctgcaccaccaactggagaagtggcagacactcccctggagcctggcaaggtggcaggcgctgctgggaaagcagagggtgacatcaccctgagcacagctgagacacaggcatgtgcgtccggtgatctgcctgaagcaggtactacgaggacattctccgttgtggcaggtgacttggtgctgccaggaagctgtcaggacccagcctgctctgacaaggctccggggatggagggtacagctgcccttcatggggacagcccagccaggccccagcaggctaaggagcagccaggacctgagcgccccattccagctggggatgggaaggtgtgcgtctcctcacctccagagcctgacgaaactcacgacccgaagctgcaacatttggctccagaagagctccacactgacagagagagccccaggcctggcccatccatgttaccttcggttcctaagaaggatgctccaagagtcatggataaagtcacttcagatgagaccagaggtgcggaaggaacagaaagttcacctgtggcagatgatatcatccagcccgctgcccccgcagacctggaaagcccaaccttagctgtgctcagggtgatgtcaccctctg

SEQ ID NO: 430157 - DNA, 651 bp, Homo sapiens
aaagcagcaccaggaaacatctgcctgcggcagtccacatggagaagatggtcccggggactttgctcacacaggggttccaggacatgtgccaaggtccacgtgtgccccttctcctcagagggaggttttgactgtgcctgaggccaacagtgagccctggacccttgacacgcttgggggtgaaaggagacccggagtcactactggcatcttggaaatgcggaaatgccctgggcaaccagagcacccctgcaccaccaactggagaagtggcagacactcccctggagcctggcaaggtggcaggcgctgctgggaaagcagagggtgacatcaccctgagcacagctgagacacaggcatgtgcgtccggtgatctgcctgaagcaggtactacgaggacattctccgttgtggcaggtgacttggtgctgccaggaagctgtcaggacccagcctgctctgacaaggctccggggatggagggtacagctgcccttcatggggacagcccagccaggccccagcaggctaaggagcagccaggacctgagcgccccattccagctggggatgggaaggtgtgcgtctcctcacctccagagcctgaccaggcttcagtgcctgaccaggcttcagtgcctgacc

SEQ ID NO: 430158 - DNA, 261 bp, Homo sapiens
atcaggttaaggaatagtaatggctcatttctacctcacgcgaggctgcacaggcccgggtctgggaagccagggctctggtttttgttctgttagagacagtctgggagggctctggggcgtgggttcgtcccaaggaaaagctggggtttgagatgcccccactggtgaggctgagttgcatctgaggcctcggctggccccagagacccagtttggactttctgggctccatcatttggctcctggtctctcctgcca

SEQ ID NO: 430159 - DNA, 4178 bp, Homo sapiens
aaagcagcaccaggaaacatctgcctgcggcagtccacatggagaagatggtcccggggactttgctcacacaggggttccaggacatgtgccaaggtccacgtgtgccccttctcctcagagggaggttttgactgtgcctgaggccaacagtgagccctggacccttgacacgcttgggggtgaaaggagacccggagtcactactggcatcttggaaatgcggaaatgccctgggcaaccagagcacccctgcaccaccaactggagaagtggcagacactcccctggagcctggcaaggtggcaggcgctgctgggaaagcagagggtgacatcaccctgagcacagctgagacacaggcatgtgcgtccggtgatctgcctgaagcaggtactacgaggacattctccgttgtggcaggtgacttggtgctgccaggaagctgtcaggacccagcctgctctgacaaggctccggggatggagggtacagctgcccttcatggggacagcccagccaggccccagcaggctaaggagcagccaggacctgagcgccccattccagctggggatgggaaggtgtgcgtctcctcacctccagagcctgacgaaactcacgacccgaagctgcaacatttggctccagaagagctccacactgacagagagagccccaggcctggcccatccatgttaccttcggttcctaagaaggatgctccaagagtcatggataaagtcacttcagatgagaccagaggtgcggaaggaacagaaagttcacctgtggcagatgatatcatccagcccgctgcccccgcagacctggaaagcccaaccttagctgcctcttcctaccacggtgatgttgttggccaggtctctacggatctgatagcccagaggagttccgattctgaagaggcatttgagaccccggagtcaacgacccctgtcaaagctccgccagctccacccccaccaccccccgaagtcatcccagaacccgaggtcagcacacagccacccccggaagaaccaggatgtggttctgagacagtccctgtccctgatggcccacggagcgactcggtggaaggaagtcccttccgtcccccgtcacactccttctctgccgtcttcgatgaagacaagccgatagccagcagtgggacttacaacttggactttgacaacattgagcttgtggatacctttcagaccttggagcctcgtgcctcagacgctaagaatcaggagggcaaagtgaacacacggaggaagtccacggattccgtccccatctctaagtctacactgtcccggtcgctcagcctgcaagccagtgactttgatggtgcttcttcctcaggcaatcccgaggccgtggcccttgccccagatgcatatagcacgggttccagcagtgcttctagtacccttaagcgaactaaaaaaccgaggccgccttccttaaaaaagaaacagaccaccaagaaacccacagagacccccccagtgaaggagacgcaacaggagccagatgaagagagccttgtccccagtggggagaatctagcatctgagacgaaaacggaatctgccaagacggaaggtcctagcccagccttattggaggagacgccccttgagcccgctgtggggcccaaagctgcctgccctctggactcagagagtgcagaaggggttgtccccccggcttctggaggtggcagagtgcagaactcaccccctgtcgggaggaaaacgctgcctcttaccacggccccggaggcaggggaggtaaccccatcggatagcggggggcaagaggactctccagccaaagggctctccgtaaggctggagtttgactattctgaggacaagagtagttgggacaaccagcaggaaaacccccctcctaccaaaaagataggcaaaaagccagttgccaaaatgcccctgaggaggccaaagatgaaaaagacacccgagaaacttgacaacactcctgcctcacctcccagatcccctgctgaacccaatgacatccccattgctaaaggtacttacacctttgatattgacaagtgggatgaccccaattttaaccctttttcttccacctcaaaaatgcaggagtctcccaaactgccccaacaatcatacaactttgacccagacacctgtgatgagtccgttgacccctttaagacatcctctaagacccccagctcaccttctaaatccccagcctcctttgagatcccagccagtgctatggaagccaatggagtggacggggatgggctaaacaagcccgccaagaagaagaagacgcccctaaagactgacacatttagggtgaaaaagtcgccaaaacggtctcctctctctgatccaccttcccaggaccccaccccagctgctacaccagaaacaccaccagtgatctctgcggtggtccacgccacagatgaggaaaagctggcggtcaccaaccagaagtggacgtgcatgacagtggacctagaggctgacaaacaggactacccgcagccctcggacctgtccacctttgtaaacgagaccaaattcagttcacccactgaggagttggattacagaaactcctatgaaattgaatatatggagaaaattggctcctccttacctcaggacgacgatgccccgaagaagcaggccttgtaccttatgtttgacacttctcaggagagccctgtcaagtcatctcccgtccgcatgtcagagtccccgacgccgtgttcagggtcaagttttgaagagactgaagcccttgtgaacactgctgcgaaaaaccagcatcctgtcccacgaggactggcccctaaccaagagtcacacttgcaggtgccagagaaatcctcccagaaggagctggaggccatgggcttgggcaccccttcagaagcgattgaaattagagaggctgctcacccaacagacgtctccatctccaaaacagccttgtactcccgcatcgggaccgctgaggtggagaaacctgcaggccttctgttccagcagcccgacctggactctgccctccagatcgccagagcagagatcataaccaaggagagagaggtctcagaatggaaagataaatatgaagaaagcaggcgggaagtgatggaaatgaggaaaatagtggccgagtatgagaagaccatcgctcagatgatagaggacgaacagagagagaagtcagtctcccaccagacggtgcagcagctggttctggagaaggagcaagccctggccgacctgaactccgtggagaagtctctggccgacctcttcagaagatatgagaagatgaaggaggtcctagaaggcttccgcaagaatgaagaggtgttgaagagatgtgcgcaggagtacctgtcccgggtgaagaaggaggagcagaggtaccaggccctgaaggtgcacgcggaggagaaactggacagggccaatgctgagattgctcaggttcgaggcaaggccaagcaggagcaagccgcccaccaggccagcctgcggaaggagcagctgcgagtggacgccctggaaaggacgctggagcagaagaataaagaaatagaagaactcaccaagatttgtgacgaactgattgccaaaatggggaaaagctaactctgaaccgaatgttttggacttaactgttgcgtgcaatatgaccgtcggcacactgctgttcctccagttccatggacaggttctgttttcactttttcgtatgcactactgtatttcctttctaaataaaattgatttgattgtatgcagtactaaggagactatcagaatttcttgctattggtttgcattttcctagtataattcatagcaagttgacctcagagttcctgtatcagggagattgtctgattctctaataaaagacacattgctgaccttggccttgccctttgtacacaagttcccagggtgagcagcttttggatttaatatgaacatgtacagcgtgcatagggactcttgccttaaggagtgtaaacttgatctgcatttgctgatttgtttttaaaaaaacaagaaatgcatgtttcaaataaaattctctattgtaaataaaattttttctttggatcttggcaa

SEQ ID NO: 430160 - DNA, 3687 bp, Homo sapiens
gagcctttcggggagccacgccggccctgcgccgttgtcccgggaaactttgcgtcccagggccgcaccggaccgtggtgaccccacgcgccgcgccgccaccgggctcggaaaacccagcgcccccgggctctttggcagttgcgactccgaacgaaggcggctccgtgcgggccatcccctatctccccgggcggttcacctgtggcagatgatatcatccagcccgctgcccccgcagacctggaaagcccaaccttagctgcctcttcctaccacggtgatgttgttggccaggtctctacggatctgatagcccagaggagttccgattctgaagaggcatttgagaccccggagtcaacgacccctgtcaaagctccgccagctccacccccaccaccccccgaagtcatcccagaacccgaggtcagcacacagccacccccggaagaaccagtagagactgggtttcaccatgatgaccaggctggtctcaaactcctgacctcaagtgatctgcctgcctcggcctcccaaagtgctgggattacaggatgtggttctgagacagtccctgtccctgatggcccacggagcgactcggtggaaggaagtcccttccgtcccccgtcacactccttctctgccgtcttcgatgaagacaagccgatagccagcagtgggacttacaacttggactttgacaacattgagcttgtggatacctttcagaccttggagcctcgtgcctcagacgctaagaatcaggagggcaaagtgaacacacggaggaagtccacggattccgtccccatctctaagtctacactgtcccggtcgctcagcctgcaagccagtgactttgatggtgcttcttcctcaggcaatcccgaggccgtggcccttgccccagatgcatatagcacgggttccagcagtgcttctagtacccttaagcgaactaaaaaaccgaggccgccttccttaaaaaagaaacagaccaccaagaaacccacagagacccccccagtgaaggagacgcaacaggagccagatgaagagagccttgtccccagtggggagaatctagcatctgagacgaaaacggaatctgccaagacggaaggtcctagcccagccttattggaggagacgccccttgagcccgctgtggggcccaaagctgcctgccctctggactcagagagtgcagaaggggttgtccccccggcttctggaggtggcagagtgcagaactcaccccctgtcgggaggaaaacgctgcctcttaccacggccccggaggcaggggaggtaaccccatcggatagcggggggcaagaggactctccagccaaagggctctccgtaaggctggagtttgactattctgaggacaagagtagttgggacaaccagcaggaaaacccccctcctaccaaaaagataggcaaaaagccagttgccaaaatgcccctgaggaggccaaagatgaaaaagacacccgagaaacttgacaacactcctgcctcacctcccagatcccctgctgaacccaatgacatccccattgctaaaggtacttacacctttgatattgacaagtgggatgaccccaattttaaccctttttcttccacctcaaaaatgcaggagtctcccaaactgccccaacaatcatacaactttgacccagacacctgtgatgagtccgttgacccctttaagacatcctctaagacccccagctcaccttctaaatccccagcctcctttgagatcccagccagtgctatggaagccaatggagtggacggggatgggctaaacaagcccgccaagaagaagaagacgcccctaaagactgacacatttagggtgaaaaagtcgccaaaacggtctcctctctctgatccaccttcccaggaccccaccccagctgctacaccagaaacaccaccagtgatctctgcggtggtccacgccacagatgaggaaaagctggcggtcaccaaccagaagtggacgtgcatgacagtggacctagaggctgacaaacaggactacccgcagccctcggacctgtccacctttgtaaacgagaccaaattcagttcacccactgaggagttggattacagaaactcctatgaaattgaatatatggagaaaattggctcctccttacctcaggacgacgatgccccgaagaagcaggccttgtaccttatgtttgacacttctcaggagagccctgtcaagtcatctcccgtccgcatgtcagagtccccgacgccgtgttcagggtcaagttttgaagagactgaagcccttgtgaacactgctgcgaaaaaccagcatcctgtcccacgaggactggcccctaaccaagagtcacacttgcaggtgccagagaaatcctcccagaaggagctggaggccatgggcttgggcaccccttcagaagcgattgaaattagagaggctgctcacccaacagacgtctccatctccaaaacagccttgtactcccgcatcgggaccgctgaggtggagaaacctgcaggccttctgttccagcagcccgacctggactctgccctccagatcgccagagcagagatcataaccaaggagagagaggtctcagaatggaaagataaatatgaagaaagcaggcgggaagtgatggaaatgaggaaaatagtggccgagtatgagaagaccatcgctcagatgatagaggacgaacagagagagaagtcagtctcccaccagacggtgcagcagctggttctggagaaggagcaagccctggccgacctgaactccgtggagaagtctctggccgacctcttcagaagatatgagaagatgaaggaggtcctagaaggcttccgcaagaatgaagaggtgttgaagagatgtgcgcaggagtacctgtcccgggtgaagaaggaggagcagaggtaccaggccctgaaggtgcacgcggaggagaaactggacagggccaatgctgagattgctcaggttcgaggcaaggccaagcaggagcaagccgcccaccaggccagcctgcggaaggagcagctgcgagtggacgccctggaaaggacgctggagcagaagaataaagaaatagaagaactcaccaagatttgtgacgaactgattgccaaaatggggaaaagctaactctgaaccgaatgttttggacttaactgttgcgtgcaatatgaccgtcggcacactgctgttcctccagttccatggacaggttctgttttcactttttcgtatgcactactgtatttcctttctaaataaaattgatttgattgtatgcagtactaaggagactatcagaatttcttgctattggtttgcattttcctagtataattcatagcaagttgacctcagagttcctgtatcagggagattgtctgattctctaataaaagacacattgctgaccttggccttgccctttgtacacaagttcccagggtgagcagcttttggatttaatatgaacatgtacagcgtgcatagggactcttgccttaaggagtgtaaacttgatctgcatttgctgatttgtttttaaaaaaacaagaaatgcatgtttcaaataaaattctctattgtaaataaaattttttctttggatcttggcaa

SEQ ID NO: 430161 - DNA, 4319 bp, Homo sapiens
aaagcagcaccaggaaacatctgcctgcggcagtccacatggagaagatggtcccggggactttgctcacacaggggttccaggacatgtgccaaggtccacgtgtgccccttctcctcagagggaggttttgactgtgcctgaggccaacagtgagccctggacccttgacacgcttgggggtgaaaggagacccggagtcactactggcatcttggaaatgcggaaatgccctgggcaaccagagcacccctgcaccaccaactggagaagtggcagacactcccctggagcctggcaaggtggcaggcgctgctgggaaagcagagggtgacatcaccctgagcacagctgagacacaggcatgtgcgtccggtgatctgcctgaagcaggtactacgaggacattctccgttgtggcaggtgacttggtgctgccaggaagctgtcaggacccagcctgctctgacaaggctccggggatggagggtacagctgcccttcatggggacagcccagccaggccccagcaggctaaggagcagccaggacctgagcgccccattccagctggggatgggaaggtgtgcgtctcctcacctccagagcctgacgaaactcacgacccgaagctgcaacatttggctccagaagagctccacactgacagagagagccccaggcctggcccatccatgttaccttcggttcctaagaaggatgctccaagagtcatggataaagtcacttcagatgagaccagaggtgcggaaggaacagaaagttcacctgtggcagatgatatcatccagcccgctgcccccgcagacctggaaagcccaaccttagctgcctcttcctaccacggtgatgttgttggccaggtctctacggatctgatagcccagaggagttccgattctgaagaggcatttgagaccccggagtcaacgacccctgtcaaagctccgccagctccacccccaccaccccccgaagtcatcccagaacccgaggtcagcacacagccacccccggaagaaccaggatgtggttctgagacagtccctgtccctgatggcccacggagcgactcggtggaaggaagtcccttccgtcccccgtcacactccttctctgccgtcttcgatgaagacaagccgatagccagcagtgggacttacaacttggactttgacaacattgagcttgtggatacctttcagaccttggagcctcgtgcctcagacgctaagaatcaggagggcaaagtgaacacacggaggaagtccacggattccgtccccatctctaagtctacactgtcccggtcgctcagcctgcaagccagtgactttgatggtgcttcttcctcaggcaatcccgaggccgtggcccttgccccagatgcatatagcacgggttccagcagtgcttctagtacccttaagcgaactaaaaaaccgaggccgccttccttaaaaaagaaacagaccaccaagaaacccacagagacccccccagtgaaggagacgcaacaggagccagatgaagagagccttgtccccagtggggagaatctagcatctgagacgaaaacggaatctgccaagacggaaggtcctagcccagccttattggaggagacgccccttgagcccgctgtggggcccaaagctgcctgccctctggactcagagagtgcagaaggggttgtccccccggcttctggaggtggcagagtgcagaactcaccccctgtcgggaggaaaacgctgcctcttaccacggccccggaggcaggggaggtaaccccatcggatagcggggggcaagaggactctccagccaaagggctctccgtaaggctggagtttgactattctgaggacaagagtagttgggacaaccagcaggaaaacccccctcctaccaaaaagataggcaaaaagccagttgccaaaatgcccctgaggaggccaaagatgaaaaagacacccgagaaacttgacaacactcctgcctcacctcccagatcccctgctgaacccaatgacatccccattgctaaaggtacttacacctttgatattgacaagtgggatgaccccaattttaaccctttttcttccacctcaaaaatgcaggagtctcccaaactgccccaacaatcatacaactttgacccagacacctgtgatgagtccgttgacccctttaagacatcctctaagacccccagctcaccttctaaatccccagcctcctttgagatcccagccagtgctatggaagccaatggagtggacggggatgggctaaacaagcccgccaagaagaagaagacgcccctaaagactgacacatttagggtgaaaaagtcgccaaaacggtctcctctctctgatccaccttcccaggaccccaccccagctgctacaccagaaacaccaccagtgatctctgcggtggtccacgccacagatgaggaaaagctggcggtcaccaaccagaagtggacgtgcatgacagtggacctagaggctgacaaacaggactacccgcagccctcggacctgtccacctttgtaaacgagaccaaattcagttcacccactgaggagttggattacagaaactcctatgaaattgaatatatggagaaaattggctcctccttacctcaggacgacgatgccccgaagaagcaggccttgtaccttatgtttgacacttctcaggagagccctgtcaagtcatctcccgtccgcatgtcagagtccccgacgccgtgttcagggtcaagttttgaagagactgaagcccttgtgaacactgctgcgaaaaaccagcatcctgtcccacgaggactggcccctaaccaagagtcacacttgcaggtgccagagaaatcctcccagaaggagctggaggccatgggcttgggcaccccttcagaagcgattgaaattacagctcccgagggctcctttgcctctgctgacgccctcctcagcaggctagctcaccccgtctctctctgtggtgcacttgactatctggagcccgacttagcagaaaagaaccccccactattcgctcagaaactccagagagaggctgctcacccaacagacgtctccatctccaaaacagccttgtactcccgcatcgggaccgctgaggtggagaaacctgcaggccttctgttccagcagcccgacctggactctgccctccagatcgccagagcagagatcataaccaaggagagagaggtctcagaatggaaagataaatatgaagaaagcaggcgggaagtgatggaaatgaggaaaatagtggccgagtatgagaagaccatcgctcagatgatagaggacgaacagagagagaagtcagtctcccaccagacggtgcagcagctggttctggagaaggagcaagccctggccgacctgaactccgtggagaagtctctggccgacctcttcagaagatatgagaagatgaaggaggtcctagaaggcttccgcaagaatgaagaggtgttgaagagatgtgcgcaggagtacctgtcccgggtgaagaaggaggagcagaggtaccaggccctgaaggtgcacgcggaggagaaactggacagggccaatgctgagattgctcaggttcgaggcaaggccaagcaggagcaagccgcccaccaggccagcctgcggaaggagcagctgcgagtggacgccctggaaaggacgctggagcagaagaataaagaaatagaagaactcaccaagatttgtgacgaactgattgccaaaatggggaaaagctaactctgaaccgaatgttttggacttaactgttgcgtgcaatatgaccgtcggcacactgctgttcctccagttccatggacaggttctgttttcactttttcgtatgcactactgtatttcctttctaaataaaattgatttgattgtatgcagtactaaggagactatcagaatttcttgctattggtttgcattttcctagtataattcatagcaagttgacctcagagttcctgtatcagggagattgtctgattctctaataaaagacacattgctgaccttggccttgccctttgtacacaagttcccagggtgagcagcttttggatttaatatgaacatgtacagcgtgcatagggactcttgccttaaggagtgtaaacttgatctgcatttgctgatttgtttttaaaaaaacaagaaatgcatgtttcaaataaaattctctattgtaaataaaattttttctttggatcttggcaa

SEQ ID NO: 430162 - DNA, 3962 bp, Homo sapiens
aaagcagcaccaggaaacatctgcctgcggcagtccacatggagaagatggtcccggggactttgctcacacaggggttccaggacatgtgccaaggtccacgtgtgccccttctcctcagagggaggttttgactgtgcctgaggccaacagtgagccctggacccttgacacgcttgggggtgaaaggagacccggagtcactactggcatcttggaaatgcggaaatgccctgggcaaccagagcacccctgcaccaccaactggagaagtggcagacactcccctggagcctggcaaggtggcaggcgctgctgggaaagcagagggtgacatcaccctgagcacagctgagacacaggcatgtgcgtccggtgatctgcctgaagcaggtactacgaggacattctccgttgtggcaggtgacttggtgctgccaggaagctgtcaggacccagcctgctctgacaaggctccggggatggagggtacagctgcccttcatggggacagcccagccaggccccagcaggctaaggagcagccaggacctgagcgccccattccagctggggatgggaaggtgtgcgtctcctcacctccagagcctgacgaaactcacgacccgaagctgcaacatttggctccagaagagctccacactgacagagagagccccaggcctggcccatccatgttaccttcggttcctaagaaggatgctccaagagtcatggataaagtcacttcagatgagaccagaggtgcggaaggaacagaaagttcacctgtggcagatgatatcatccagcccgctgcccccgcagacctggaaagcccaaccttagctgcctcttcctaccacggtgatgttgttggccaggtctctacggatctgatagcccagaggagttccgattctgaagaggcatttgagaccccggagtcaacgacccctgtcaaagctccgccagctccacccccaccaccccccgaagtcatcccagaacccgaggtcagcacacagccacccccggaagaaccaggatgtggttctgagacagtccctgtccctgatggcccacggagcgactcggtggaaggaagtcccttccgtcccccgtcacactccttctctgccgtcttcgatgaagacaagccgatagccagcagtgggacttacaacttggactttgacaacattgagcttgtggatacctttcagaccttggagcctcgtgcctcagacgctaagaatcaggagggcaaagtgaacacacggaggaagtccacggattccgtccccatctctaagtctacactgtcccggtcgctcagcctgcaagccagtgactttgatggtgcttcttcctcaggcaatcccgaggccgtggcccttgccccagatgcatatagcacgggttccagcagtgcttctagtacccttaagcgaactaaaaaaccgaggccgccttccttaaaaaagaaacagaccaccaagaaacccacagagacccccccagtgaaggagacgcaacaggagccagatgaagagagccttgtccccagtggggagaatctagcatctgagacgaaaacggaatctgccaagacggaaggtcctagcccagccttattggaggagacgccccttgagcccgctgtggggcccaaagctgcctgccctctggactcagagagtgcagaaggggttgtccccccggcttctggaggtggcagagtgcagaactcaccccctgtcgggaggaaaacgctgcctcttaccacggccccggaggcaggggaggtaaccccatcggatagcggggggcaagaggactctccagccaaagggctctccgtaaggctggagtttgactattctgaggacaagagtagttgggacaaccagcaggaaaacccccctcctaccaaaaagataggcaaaaagccagttgccaaaatgcccctgaggaggccaaagatgaaaaagacacccgagaaacttgacaacactcctgcctcacctcccagatcccctgctgaacccaatgacatccccattgctaaaggtacttacacctttgatattgacaagtgggatgaccccaattttaaccctttttcttccacctcaaaaatgcaggagtctcccaaactgccccaacaatcatacaactttgacccagacacctgtgatgagtccgttgacccctttaagacatcctctaagacccccagctcaccttctaaatccccagcctcctttgagatcccagccagtgctatggaagccaatggagtggacggggatgggctaaacaagcccgccaagaagaagaagacgcccctaaagactgacacatttagggtgaaaaagtcgccaaaacggtctcctctctctgatccaccttcccaggaccccaccccagctgctacaccagaaacaccaccagtgatctctgcggtggtccacgccacagatgaggaaaagctggcggtcaccaaccagaagtggacgtgcatgacagtggacctagaggctgacaaacaggactacccgcagccctcggacctgtccacctttgtaaacgagaccaaattcagttcacccactgaggagttggattacagaaactcctatgaaattgaatatatggagaaaattggctcctccttacctcaggacgacgatgccccgaagaagcaggccttgtaccttatgtttgacacttctcaggagagccctgtcaagtcatctcccgtccgcatgtcagagtccccgacgccgtgttcagggtcaagttttgaagagactgaagcccttgtgaacactgctgcgaaaaaccagcatcctgtcccacgaggactggcccctaaccaagagtcacacttgcaggtgccagagaaatcctcccagaaggagctggaggccatgggcttgggcaccccttcagaagcgattgaaattagagaggctgctcacccaacagacgtctccatctccaaaacagccttgtactcccgcatcgggaccgctgaggtggagaaacctgcaggccttctgttccagcagcccgacctggactctgccctccagatcgccagagcagagaagtctctggccgacctcttcagaagatatgagaagatgaaggaggtcctagaaggcttccgcaagaatgaagaggtgttgaagagatgtgcgcaggagtacctgtcccgggtgaagaaggaggagcagaggtaccaggccctgaaggtgcacgcggaggagaaactggacagggccaatgctgagattgctcaggttcgaggcaaggccaagcaggagcaagccgcccaccaggccagcctgcggaaggagcagctgcgagtggacgccctggaaaggacgctggagcagaagaataaagaaatagaagaactcaccaagatttgtgacgaactgattgccaaaatggggaaaagctaactctgaaccgaatgttttggacttaactgttgcgtgcaatatgaccgtcggcacactgctgttcctccagttccatggacaggttctgttttcactttttcgtatgcactactgtatttcctttctaaataaaattgatttgattgtatgcagtactaaggagactatcagaatttcttgctattggtttgcattttcctagtataattcatagcaagttgacctcagagttcctgtatcagggagattgtctgattctctaataaaagacacattgctgaccttggccttgccctttgtacacaagttcccagggtgagcagcttttggatttaatatgaacatgtacagcgtgcatagggactcttgccttaaggagtgtaaacttgatctgcatttgctgatttgtttttaaaaaaacaagaaatgcatgtttcaaataaaattctctattgtaaataaaattttttctttggatcttggcaa

SEQ ID NO: 430163 - DNA, 781 bp, Homo sapiens
ttgcatatggcaaggccaagggcacaactccataggtagctttttctatttcgacgtggttcatcttccttcaagatatcctgcaccatgtccgctgccttacacaactccttggccttgccatatgcaagcatatggcaaggccaagcaggagcaagccgcccaccaggccagcctgcggaaggagcagctgcgagtggacgccctggaaaggacgctggagcagaagaataaagaaatagaagaactcaccaagatttgtgacgaactgattgccaaaatggggaaaagctaactctgaaccgaatgttttggacttaactgttgcgtgcaatatgaccgtcggcacactgctgttcctccagttccatggacaggttctgttttcactttttcgtatgcactactgtatttcctttctaaataaaattgatttgattgtatgcagtactaaggagactatcagaatttcttgctattggtttgcattttcctagtataattcatagcaagttgacctcagagttcctgtatcagggagattgtctgattctctaataaaagacacattgctgaccttggccttgccctttgtacacaagttcccagggtgagcagcttttggatttaatatgaacatgtacagcgtgcatagggactcttgccttaaggagtgtaaacttgatctgcatttgctgatttgtttttaaaaaaacaagaaatgcatgtttcaaataaaattctctattgtaaataaaattttttctttggatcttggcaa

SEQ ID NO: 430164 - DNA, 1567 bp, Homo sapiens
gaacttcccctccactgaggagagccacttcctcccagcactgacacaatgatgaatgacaccaggagttctaacctagaaacagagggcacgtggctctgggctggaacatgtctcaggagttctgaggttttcagggaagggctctgcacagcctcagggacaggcttttggtgaagactgatcttccatgggaatctcaaggaaaagctggctgcaaaacatccccagtatgctggagggatccagcccccttggagaaggccattggagatcggtcgtgctgttgaacttgatcagcatcagagccagcatgtaacctatctgaaagcaaagccacacgtccatgatggagggatcgtcccgctggatcccctcactttctgagaagatggacagtgtaggatcatctgtgctagacaaacctgtggttggttccccttgattagacaggcaaggtgtggtgggagaatcaccttaaagccagctcgcatctgccccccaccccccatgaccctgtagccacagcatcacctatttggcatccctctgagcaatgccagtgatcccattcacgtagaactgcgtaaccctccttatgctacatctcaaaaaagccacccgaggggtttacccaggacgctcctcacctcagatcacatccttcccgggcaaataaagggaaaggaaccagactagttagtccttcactctgtgctggtcactgccaggaaactacatttatcacctcatttacttctcagaaagaaacatgttatcacctatgttctagagataaggacaccaaggctcagagaggttgtgtaacttgtggaagatcacacagctacagctgggatatatactcagattgtttggctccaagtcatttgtctcactgctttagtggggaccaaggggcctggtggtcccccatctccccaaaaagccccatgagcattctgactggccagatttcaaacatcagcaacttcttccttgtcttcacttgcagaataaagaaatagaagaactcaccaagatttgtgacgaactgattgccaaaatggggaaaagctaactctgaaccgaatgttttggacttaactgttgcgtgcaatatgaccgtcggcacactgctgttcctccagttccatggacaggttctgttttcactttttcgtatgcactactgtatttcctttctaaataaaattgatttgattgtatgcagtactaaggagactatcagaatttcttgctattggtttgcattttcctagtataattcatagcaagttgacctcagagttcctgtatcagggagattgtctgattctctaataaaagacacattgctgaccttggccttgccctttgtacacaagttcccagggtgagcagcttttggatttaatatgaacatgtacagcgtgcatagggactcttgccttaaggagtgtaaacttgatctgcatttgctgatttgtttttaaaaaaacaagaaatgcatgtttcaaataaaattctctattgtaaataaaattttttctttggatcttggcaa

SEQ ID NO: 430165 - DNA, 626 bp, Homo sapiens
gcgtcgaccactcgcagctgctccttccgcaggctggcctggtggacgccctggaaaggacgctggagcagaagaataaagaaatagaagaactcaccaagatttgtgacgaactgattgccaaaatggggaaaagctaactctgaaccgaatgttttggacttaactgttgcgtgcaatatgaccgtcggcacactgctgttcctccagttccatggacaggttctgttttcactttttcgtatgcactactgtatttcctttctaaataaaattgatttgattgtatgcagtactaaggagactatcagaatttcttgctattggtttgcattttcctagtataattcatagcaagttgacctcagagttcctgtatcagggagattgtctgattctctaataaaagacacattgctgaccttggccttgccctttgtacacaagttcccagggtgagcagcttttggatttaatatgaacatgtacagcgtgcatagggactcttgccttaaggagtgtaaacttgatctgcatttgctgatttgtttttaaaaaaacaagaaatgcatgtttcaaataaaattctctattgtaaataaaattttttctttggatcttggcaa

SEQ ID NO: 430166 - DNA, 3479 bp, Homo sapiens
aaagcagcaccaggaaacatctgcctgcggcagtccacatggagaagatggtcccggggactttgctcacacaggggttccaggacatgtgccaaggtccacgtgtgccccttctcctcagagggaggttttgactgtgcctgaggccaacagtgagccctggacccttgacacgcttgggggtgaaaggagacccggagtcactactggcatcttggaaatgcggaaatgccctgggcaaccagagcacccctgcaccaccaactggagaagtggcagacactcccctggagcctggcaaggtggcaggcgctgctgggaaagcagagggtgacatcaccctgagcacagctgagacacaggcatgtgcgtccggtgatctgcctgaagcaggtactacgaggacattctccgttgtggcaggtgacttggtgctgccaggaagctgtcaggacccagcctgctctgacaaggctccggggatggagggtacagctgcccttcatggggacagcccagccaggccccagcaggctaaggagcagccaggacctgagcgccccattccagctggggatgggaaggtgtgcgtctcctcacctccagagcctgacgaaactcacgacccgaagctgcaacatttggctccagaagagctccacactgacagagagagccccaggcctggcccatccatgttaccttcggttcctaagaaggatgctccaagagtcatggataaagtcacttcagatgagaccagaggtgcggaaggaacagaaagttcacctgtggcagatgatatcatccagcccgctgcccccgcagacctggaaagcccaaccttagctgcctcttcctaccacggtgatgttgttggccaggtctctacggatctgatagcccagaggagttccgattctgaagaggcatttgagaccccggagtcaacgacccctgtcaaagctccgccagctccacccccaccaccccccgaagtcatcccagaacccgaggtcagcacacagccacccccggaagaaccaggatgtggttctgagacagtccctgtccctgatggcccacggagcgactcggtggaaggaagtcccttccgtcccccgtcacactccttctctgccgtcttcgatgaagacaagccgatagccagcagtgggacttacaacttggactttgacaacattgagcttgtggatacctttcagaccttggagcctcgtgcctcagacgctaagaatcaggagggcaaagtgaacacacggaggaagtccacggattccgtccccatctctaagtctacactgtcccggtcgctcagcctgcaagccagtgactttgatggtgcttcttcctcaggcaatcccgaggccgtggcccttgccccagatgcatatagcacgggttccagcagtgcttctagtacccttaagcgaactaaaaaaccgaggccgccttccttaaaaaagaaacagaccaccaagaaacccacagagacccccccagtgaaggagacgcaacaggagccagatgaagagagccttgtccccagtggggagaatctagcatctgagacgaaaacggaatctgccaagacggaaggtcctagcccagccttattggaggagacgccccttgagcccgctgtggggcccaaagctgcctgccctctggactcagagagtgcagaaggggttgtccccccggcttctggaggtggcagagtgcagaactcaccccctgtcgggaggaaaacgctgcctcttaccacggccccggaggcaggggaggtaaccccatcggatagcggggggcaagaggactctccagccaaagggctctccgtaaggctggagtttgactattctgaggacaagagtagttgggacaaccagcaggaaaacccccctcctaccaaaaagataggcaaaaagccagttgccaaaatgcccctgaggaggccaaagatgaaaaagacacccgagaaacttgacaacactcctgcctcacctcccagatcccctgctgaacccaatgacatccccattgctaaaggtacttacacctttgatattgacaagtgggatgaccccaattttaaccctttttcttccacctcaaaaatgcaggagtctcccaaactgccccaacaatcatacaactttgacccagacacctgtgatgagtccgttgacccctttaagacatcctctaagacccccagctcaccttctaaatccccagcctcctttgagatcccagccagtgctatggaagccaatggagtggacggggatgggctaaacaagcccgccaagaagaagaagacgcccctaaagactgacacatttagggtgaaaaagtcgccaaaacggtctcctctctctgatccaccttcccaggaccccaccccagctgctacaccagaaacaccaccagtgatctctgcggtggtccacgccacagatgaggaaaagctggcggtcaccaaccagaagtggacgtgcatgacagtggacctagaggctgacaaacaggactacccgcagccctcggacctgtccacctttgtaaacgagaccaaattcagttcacccactgaggagttggattacagaaactcctatgaaattgaatatatggagaaaattggctcctccttacctcaggacgacgatgccccgaagaagcaggccttgtaccttatgtttgacacttctcaggagagccctgtcaagtcatctcccgtccgcatgtcagagtccccgacgccgtgttcagggtcaagttttgaagagactgaagcccttgtgaacactgctgcgaaaaaccagcatcctgtcccacgaggactggcccctaaccaagagtcacacttgcaggtgccagagaaatcctcccagaaggagctggaggccatgggcttgggcaccccttcagaagcgattgaaattagagaggctgctcacccaacagacgtctccatctccaaaacagccttgtactcccgcatcgggaccgctgaggtggagaaacctgcaggccttctgttccagcagcccgacctggactctgccctccagatcgccagagcagagatcataaccaaggagagagaggtctcagaatggaaagataaatatgaagaaagcaggcgggaagtgatggaaatgaggaaaatagtggccgagtatgagaagaccatcgctcagatgatagaggacgaacagagagagaagtcagtctcccaccagacggtgcagcagctggttctggagaaggagcaagccctggccgacctgaactccgtggagaagtctctggccgacctcttcagaagatatgagaagatgaaggaggtcctagaaggcttccgcaagaattaagaggttttgagagatgttcgcagagtacttccggtgaacgaatgtttgacttacttgagtgcaatatgacctcgg

SEQ ID NO: 430167 - DNA, 3818 bp, Homo sapiens
aaagcagcaccaggaaacatctgcctgcggcagtccacatggagaagatggtcccggggactttgctcacacaggggttccaggacatgtgccaaggtccacgtgtgccccttctcctcagagggaggttttgactgtgcctgaggccaacagtgagccctggacccttgacacgcttgggggtgaaaggagacccggagtcactactggcatcttggaaatgcggaaatgccctgggcaaccagagcacccctgcaccaccaactggagaagtggcagacactcccctggagcctggcaaggtggcaggcgctgctgggaaagcagagggtgacatcaccctgagcacagctgagacacaggcatgtgcgtccggtgatctgcctgaagcaggtactacgaggacattctccgttgtggcaggtgacttggtgctgccaggaagctgtcaggacccagcctgctctgacaaggctccggggatggagggtacagctgcccttcatggggacagcccagccaggccccagcaggctaaggagcagccaggacctgagcgccccattccagctggggatgggaaggtgtgcgtctcctcacctccagagcctgacgaaactcacgacccgaagctgcaacatttggctccagaagagctccacactgacagagagagccccaggcctggcccatccatgttaccttcggttcctaagaaggatgctccaagagtcatggataaagtcacttcagatgagaccagaggtgcggaaggaacagaaagttcacctgtggcagatgatatcatccagcccgctgcccccgcagacctggaaagcccaaccttagctgcctcttcctaccacggtgatgttgttggccaggtctctacggatctgatagcccagaggagttccgattctgaagaggcatttgagaccccggagtcaacgacccctgtcaaagctccgccagctccacccccaccaccccccgaagtcatcccagaacccgaggtcagcacacagccacccccggaagaaccaggatgtggttctgagacagtccctgtccctgatggcccacggagcgactcggtggaaggaagtcccttccgtcccccgtcacactccttctctgccgtcttcgatgaagacaagccgatagccagcagtgggacttacaacttggactttgacaacattgagcttgtggatacctttcagaccttggagcctcgtgcctcagacgctaagaatcaggagggcaaagtgaacacacggaggaagtccacggattccgtccccatctctaagtctacactgtcccggtcgctcagcctgcaagccagtgactttgatggtgcttcttcctcaggcaatcccgaggccgtggcccttgccccagatgcatatagcacgggttccagcagtgcttctagtacccttaagcgaactaaaaaaccgaggccgccttccttaaaaaagaaacagaccaccaagaaacccacagagacccccccagtgaaggagacgcaacaggagccagatgaagagagccttgtccccagtggggagaatctagcatctgagacgaaaacggaatctgccaagacggaaggtcctagcccagccttattggaggagacgccccttgagcccgctgtggggcccaaagctgcctgccctctggactcagagagtgcagaaggggttgtccccccggcttctggaggtggcagagtgcagaactcaccccctgtcgggaggaaaacgctgcctcttaccacggccccggaggcaggggaggtaaccccatcggatagcggggggcaagaggactctccagccaaagggctctccgtaaggctggagtttgactattctgaggacaagagtagttgggacaaccagcaggaaaacccccctcctaccaaaaagataggcaaaaagccagttgccaaaatgcccctgaggaggccaaagatgaaaaagacacccgagaaacttgacaacactcctgcctcacctcccagatcccctgctgaacccaatgacatccccattgctaaaggtacttacacctttgatattgacaagtgggatgaccccaattttaaccctttttcttccacctcaaaaatgcaggagtctcccaaactgccccaacaatcatacaactttgacccagacacctgtgatgagtccgttgacccctttaagacatcctctaagacccccagctcaccttctaaatccccagcctcctttgagatcccagccagtgctatggaagccaatggagtggacggggatgggctaaacaagcccgccaagaagaagaagacgcccctaaagactgacacatttagggtgaaaaagtcgccaaaacggtctcctctctctgatccaccttcccaggaccccaccccagctgctacaccagaaacaccaccagtgatctctgcggtggtccacgccacagatgaggaaaagctggcggtcaccaaccagaagtggacgtgcatgacagtggacctagaggctgacaaacaggactacccgcagccctcggacctgtccacctttgtaaacgagaccaaattcagttcacccactgaggagttggattacagaaactcctatgaaattgaatatatggagaaaattggctcctccttacctcaggacgacgatgccccgaagaagcaggccttgtaccttatgtttgacacttctcaggagagccctgtcaagtcatctcccgtccgcatgtcagagtccccgacgccgtgttcagggtcaagttttgaagagactgaagcccttgtgaacactgctgcgaaaaaccagcatcctgtcccacgaggactggcccctaaccaagagtcacacttgcaggtgccagagaaatcctcccagaaggagctggaggccatgggcttgggcaccccttcagaagcgattgaaattacagctcccgagggctcctttgcctctgctgacgccctcctcagcaggctagctcaccccgtctctctctgtggtgcacttgactatctggagcccgacttagcagaaaagaaccccccactattcgctcagaaactccaggaggagttagagtttgccatcatgcggatagaagccctgaagctggccaggcagattgctttggcttcccgcagccaccaggatgccaaggtaccggtttgctgctgcgtgcgccacctcctgagaatgtcatgtgtgccgctggggtccagaagctgctttgctaaccatccgccaggcgggcatcatcggtgtccagcaaagagtcgtttccaaaaagctgaaagcgtcactcttgcataaatacacactgagcacatagctaagatccatttaagtcgataatgctaaaccgcgggatagtaatgctggttaaatgagagagaatgcagagaccaatgtatgggtcagtagggtaaagaaggctagcctaagatgacaaagttggatagaaaactggttagcaccaattcaacagagcaaaacaaaatcatgacctttgagggttttttttttctacagataccatttgcttctctattgagcaaacataatttgcaacttttctattttctgcaagttaacatctgactttgttgagacaaggccctaatcaataatacatagtaagtgaaaccaagacatttgataatattctagaccaggcttaagcaattctttctgtaaagtgcaaatgataagtatttccagccttgtgggccgtactgtctggcactgttccaataaaacttttatttgtctgaa

SEQ ID NO: 430168 - DNA, 268 bp, Homo sapiens
aagacatttaccgtttgtctgaaaatagccgaactgagccttttcttcaggctatatgagaagtctctagacagtgggcaccgtcagaaagcccagagccttgtgatagctcccaccctgcctggctcagatcttcccatttttttcctctggcactaacctcaccttttgtttttttgtgtttgtgtttgtttttgtttttgcagagttggattacagaaactcctatgaaattgaatatatggagaaaattggctcctccttacct

SEQ ID NO: 430169 - DNA, 254 bp, Homo sapiens
tccacatttattcaccgtctccttttcttgatctatgaattgctcagagctgaattcactcatttggggctaacctttctcttcttctctctgaaactagatcataaccaaggagagagaggtctcagaatggaaagataaatatgaagaaagcaggcgggaagtgatggaaatgaggtcagttggggagctgggccttcctcgtgcctgagggatacttacctgtggtttaataatgaccggagctggtgtgg

SEQ ID NO: 430170 - DNA, 783 bp, Homo sapiens
gggggtttaagagaagagcctttcggaccacaccggcgctcacgctcatacccgcacgccccgggcagagccgcgcacgccggccacactcgggcgcgcgccggccacactcgcgcgcacacatacgcggcgctcgccccccggcccccggctcgggccgcgagtcgcagctccctgccgccgctcccgccgccacggatgcccgcagctgctcccctctgcagtgcagcaaccccggccgccggcggccgccccggctcccggctgcaggaatcgcgccaggacgctggccccgctcgcggctagcttgcacgccagggcacagcgaggatgggagggtcgcagtccctgcagccagccccagccagcgacctgaacctggaggcttccgaggcaatgtaagtgctccgcccgggccgccccgagtctcccggggaggaggagaggatgcccgggctttgttagtgtcgcctttcctaatgcctgtgcaacctggagcccaggctggcctggggttcttcgcagccttggaaagctttacctggggctgctctgggaggagcatctggtagccccaagttactgctgtgggcagaaacgattccctggaattcagttttggtcgctcagcagtgggtgcatggctggggggcttctcctgccgtcagcatctttcctctgcacccccggcacagtggtatttcctgcaagggaacagccaggcatcagcgactgcctcctcctaggaagaacccatgagcgtggcagctccgtgcccggggc

SEQ ID NO: 430171 - DNA, 4069 bp, Homo sapiens
acaatgcgggcggtcccggcgaggcgggaggggccggggcagagggagggtcttcgcctccccacccccagccccgtttccggagcccgcgatggagctttgtgaagatgcaggcgttggggctgctcggcgatgatgacatcatcgtgtcacacacaggagccggctgccggggggtttaagagaagagcctttcggaccacaccggcgctcacgctcatacccgcacgccccgggcagagccgcgcacgccggccacactcgggcgcgcgccggccacactcgcgcgcacacatacgcggcgctcgccccccggcccccggctcgggccgcgagtcgcagctccctgccgccgctcccgccgccacggatgcccgcagctgctcccctctgcagtgcagcaaccccggccgccggcggccgccccggctcccggctgcaggaatcgcgccaggacgctggccccgctcgcggctagcttgcacgccagggcacagcgaggatgggagggtcgcagtccctgcagccagccccagccagcgacctgaacctggaggcttccgaggcaatgagttccgattctgaagaggcatttgagaccccggagtcaacgacccctgtcaaagctccgccagctccacccccaccaccccccgaagtcatcccagaacccgaggtcagcacacagccacccccggaagaaccaggatgtggttctgagacagtccctgtccctgatggcccacggagcgactcggtggaaggaagtcccttccgtcccccgtcacactccttctctgccgtcttcgatgaagacaagccgatagccagcagtgggacttacaacttggactttgacaacattgagcttgtggatacctttcagaccttggagcctcgtgcctcagacgctaagaatcaggagggcaaagtgaacacacggaggaagtccacggattccgtccccatctctaagtctacactgtcccggtcgctcagcctgcaagccagtgactttgatggtgcttcttcctcaggcaatcccgaggccgtggcccttgccccagatgcatatagcacgggttccagcagtgcttctagtacccttaagcgaactaaaaaaccgaggccgccttccttaaaaaagaaacagaccaccaagaaacccacagagacccccccagtgaaggagacgcaacaggagccagatgaagagagccttgtccccagtggggagaatctagcatctgagacgaaaacggaatctgccaagacggaaggtcctagcccagccttattggaggagacgccccttgagcccgctgtggggcccaaagctgcctgccctctggactcagagagtgcagaaggggttgtccccccggcttctggaggtggcagagtgcagaactcaccccctgtcgggaggaaaacgctgcctcttaccacggccccggaggcaggggaggtaaccccatcggatagcggggggcaagaggactctccagccaaagggctctccgtaaggctggagtttgactattctgaggacaagagtagttgggacaaccagcaggaaaacccccctcctaccaaaaagataggcaaaaagccagttgccaaaatgcccctgaggaggccaaagatgaaaaagacacccgagaaacttgacaacactcctgcctcacctcccagatcccctgctgaacccaatgacatccccattgctaaaggtacttacacctttgatattgacaagtgggatgaccccaattttaaccctttttcttccacctcaaaaatgcaggagtctcccaaactgccccaacaatcatacaactttgacccagacacctgtgatgagtccgttgacccctttaagacatcctctaagacccccagctcaccttctaaatccccagcctcctttgagatcccagccagtgctatggaagccaatggagtggacggggatgggctaaacaagcccgccaagaagaagaagacgcccctaaagactgacacatttagggtgaaaaagtcgccaaaacggtctcctctctctgatccaccttcccaggaccccaccccagctgctacaccagaaacaccaccagtgatctctgcggtggtccacgccacagatgaggaaaagctggcggtcaccaaccagaagtggacgtgcatgacagtggacctagaggctgacaaacaggactacccgcagccctcggacctgtccacctttgtaaacgagaccaaattcagttcacccactgaggagttggattacagaaactcctatgaaattgaatatatggagaaaattggctcctccttacctcaggacgacgatgccccgaagaagcaggccttgtaccttatgtttgacacttctcaggagagccctgtcaagtcatctcccgtccgcatgtcagagtccccgacgccgtgttcagggtcaagttttgaagagactgaagcccttgtgaacactgctgcgaaaaaccagcatcctgtcccacgaggactggcccctaaccaagagtcacacttgcaggtgccagagaaatcctcccagaaggagctggaggccatgggcttgggcaccccttcagaagcgattgaaattacagctcccgagggctcctttgcctctgctgacgccctcctcagcaggctagctcaccccgtctctctctgtggtgcacttgactatctggagcccgacttagcagaaaagaaccccccactattcgctcagaaactccaggaggagttagagtttgccatcatgcggatagaagccctgaagctggccaggcagattgctttggcttcccgcagccaccaggatgccaagagagaggctgctcacccaacagacgtctccatctccaaaacagccttgtactcccgcatcgggaccgctgaggtggagaaacctgcaggccttctgttccagcagcccgacctggactctgccctccagatcgccagagcagagatcataaccaaggagagagaggtctcagaatggaaagataaatatgaagaaagcaggcgggaagtgatggaaatgaggaaaatagtggccgagtatgagaagaccatcgctcagatgatagaggacgaacagagagagaagtcagtctcccaccagacggtgcagcagctggttctggagaaggagcaagccctggccgacctgaactccgtggagaagtctctggccgacctcttcagaagatatgagaagatgaaggaggtcctagaaggcttccgcaagaatgaagaggtgttgaagagatgtgcgcaggagtacctgtcccgggtgaagaaggaggagcagaggtaccaggccctgaaggtgcacgcggaggagaaactggacagggccaatgctgagattgctcaggttcgaggcaaggccaagcaggagcaagccgcccaccaggccagcctgcggaaggagcagctgcgagtggacgccctggaaaggacgctggagcagaagaataaagaaatagaagaactcaccaagatttgtgacgaactgattgccaaaatggggaaaagctaactctgaaccgaatgttttggacttaactgttgcgtgcaatatgaccgtcggcacactgctgttcctccagttccatggacaggttctgttttcactttttcgtatgcactactgtatttcctttctaaataaaattgatttgattgtatgcagtactaaggagactatcagaatttcttgctattggtttgcattttcctagtataattcatagcaagttgacctcagagttcctgtatcagggagattgtctgattctctaataaaagacacattgctgaccttggccttgccctttgtacacaagttcccagggtgagcagcttttggatttaatatgaacatgtacagcgtgcatagggactcttgccttaaggagtgtaaacttgatctgcatttgctgatttgtttttaaaaaaacaagaaatgcatgtttcaaataaaattctctattgtaaataaaattttttctttggatcttggcaa

SEQ ID NO: 430172 - DNA, 3292 bp, Homo sapiens
  misc_feature (2)..(3): n is a, c, g, or t
  misc_feature (6)..(6): n is a, c, g, or t
  misc_feature (9)..(9): n is a, c, g, or t
cnnccnggnagggaaaggttttgtctatttctgttccttgttgaatctctagtacctagaaccatgtctggtcctgattaggcacttggtgaatgtttttgaatgaatactctgagctgttctttaatcggtcctcatgatcctcattgtacagatgagggaactctgggcgaacctggcctgggtcttgagctaattacgggtaggtcaggttctgtacccaagtagtacacacagtgatgggcggggtggcctggggccgtggtttgtcaacccctacgctggagggtgatgttttggtacaagaggagaggtgccccaatgcgtcctgtgtctgtaattgatggcgttgtctgtgtttccccaggatgtggttctgagacagtccctgtccctgatggcccacggagcgactcggtggaaggaagtcccttccgtcccccgtcacactccttctctgccgtcttcgatgaagacaagccgatagccagcagtgggacttacaacttggactttgacaacattgagcttgtggatacctttcagaccttggagcctcgtgcctcagacgctaagaatcaggagggcaaagtgaacacacggaggaagtccacggattccgtccccatctctaagtctacactgtcccggtcgctcagcctgcaagccagtgactttgatggtgcttcttcctcaggcaatcccgaggccgtggcccttgccccagatgcatatagcacgggttccagcagtgcttctagtacccttaagcgaactaaaaaaccgaggccgccttccttaaaaaagaaacagaccaccaagaaacccacagagacccccccagtgaaggagacgcaacaggagccagatgaagagagccttgtccccagtggggagaatctagcatctgagacgaaaacggaatctgccaagacggaaggtcctagcccagccttattggaggagacgccccttgagcccgctgtggggcccaaagctgcctgccctctggactcagagagtgcagaaggggttgtccccccggcttctggaggtggcagagtgcagaactcaccccctgtcgggaggaaaacgctgcctcttaccacggccccggaggcaggggaggtaaccccatcggatagcggggggcaagaggactctccagccaaagggctctccgtaaggctggagtttgactattctgaggacaagagtagttgggacaaccagcaggaaaacccccctcctaccaaaaagataggcaaaaagccagttgccaaaatgcccctgaggaggccaaagatgaaaaagacacccgagaaacttgacaacactcctgcctcacctcccagatcccctgctgaacccaatgacatccccattgctaaaggtacttacacctttgatattgacaagtgggatgaccccaattttaaccctttttcttccacctcaaaaatgcaggagtctcccaaactgccccaacaatcatacaactttgacccagacacctgtgatgagtccgttgacccctttaagacatcctctaagacccccagctcaccttctaaatccccagcctcctttgagatcccagccagtgctatggaagccaatggagtggacggggatgggctaaacaagcccgccaagaagaagaagacgcccctaaagactgacacatttagggtgaaaaagtcgccaaaacggtctcctctctctgatccaccttcccaggaccccaccccagctgctacaccagaaacaccaccagtgatctctgcggtggtccacgccacagatgaggaaaagctggcggtcaccaaccagaagtggacgtgcatgacagtggacctagaggctgacaaacaggactacccgcagccctcggacctgtccacctttgtaaacgagaccaaattcagttcacccactgaggagttggattacagaaactcctatgaaattgaatatatggagaaaattggctcctccttacctcaggacgacgatgccccgaagaagcaggccttgtaccttatgtttgacacttctcaggagagccctgtcaagtcatctcccgtccgcatgtcagagtccccgacgccgtgttcagggtcaagttttgaagagactgaagcccttgtgaacactgctgcgaaaaaccagcatcctgtcccacgaggactggcccctaaccaagagtcacacttgcaggtgccagagaaatcctcccagaaggagctggaggccatgggcttgggcaccccttcagaagcgattgaaattagagaggctgctcacccaacagacgtctccatctccaaaacagccttgtactcccgcatcgggaccgctgaggtggagaaacctgcaggccttctgttccagcagcccgacctggactctgccctccagatcgccagagcagagatcataaccaaggagagagaggtctcagaatggaaagataaatatgaagaaagcaggcgggaagtgatggaaatgaggaaaatagtggccgagtatgagaagaccatcgctcagatgatagaggacgaacagagagagaagtcagtctcccaccagacggtgcagcagctggttctggagaaggagcaagccctggccgacctgaactccgtggagaagtctctggccgacctcttcagaagatatgagaagatgaaggaggtcctagaaggcttccgcaagaatgaagaggtgttgaagagatgtgcgcaggagtacctgtcccgggtgaagaaggaggagcagaggtaccaggccctgaaggtgcacgcggaggagaaactggacagggccaatgctgagattgctcaggttcgaggcaaggccaagcaggagcaagccgcccaccaggccagcctgcggaaggagcagctgcgagtggacgccctggaaaggacgctggagcagaagaataaagaaatagaagaactcaccaagatttgtgacgaactgattgccaaaatggggaaaagctaactctgaaccgaatgttttggacttaactgttgcgtgcaatatgaccgtcggcacactgctgttcctccagttccatggacaggttctgttttcactttttcgtatgcactactgtatttcctttctaaataaaattgatttgattgtatgcagtactaaggagactatcagaatttcttgctattggtttgcattttcctagtataattcatagcaagttgacctcagagttcctgtatcagggagattgtctgattctctaataaaagacacattgctg

SEQ ID NO: 430173 - DNA, 308 bp, Homo sapiens
  misc_feature (273)..(273): n is a, c, g, or t
ctgctgcctcctctcttcctggtggctccagaacaatgaaggcttttccctgatgggttatttgttctctgttgaagagtgctccagttttcatctccgttgcacgttcaggccaactgtacccaagctgatatgtgattttgatccctgcagcaggacgacgatgccccgaagaagcaggccttgtaccttatgtttgacacttctcaggagagccctgtcaagtcatctcccgtccgcatgtcagagtccccgacgccgtgttcagggtcnagttttgaagagggagcagccggcgatcctctaga

SEQ ID NO: 430174 - DNA, 3582 bp, Homo sapiens
ttttcaataggacatgaggagaaatgccttactatctacattatcctattaattgctttcttttattatcccagagagagccccaggcctggcccatccatgttaccttcggttcctaagaaggatgctccaagagtcatggataaagtcacttcagatgagaccagaggtgcggaaggaacagaaagttcacctgtggcagatgatatcatccagcccgctgcccccgcagacctggaaagcccaaccttagctgcctcttcctaccacggtgatgttgttggccaggtctctacggatctgatagcccagaggagttccgattctgaagaggcatttgagaccccggagtcaacgacccctgtcaaagctccgccagctccacccccaccaccccccgaagtcatcccagaacccgaggtcagcacacagccacccccggaagaaccaggatgtggttctgagacagtccctgtccctgatggcccacggagcgactcggtggaaggaagtcccttccgtcccccgtcacactccttctctgccgtcttcgatgaagacaagccgatagccagcagtgggacttacaacttggactttgacaacattgagcttgtggatacctttcagaccttggagcctcgtgcctcagacgctaagaatcaggagggcaaagtgaacacacggaggaagtccacggattccgtccccatctctaagtctacactgtcccggtcgctcagcctgcaagccagtgactttgatggtgcttcttcctcaggcaatcccgaggccgtggcccttgccccagatgcatatagcacgggttccagcagtgcttctagtacccttaagcgaactaaaaaaccgaggccgccttccttaaaaaagaaacagaccaccaagaaacccacagagacccccccagtgaaggagacgcaacaggagccagatgaagagagccttgtccccagtggggagaatctagcatctgagacgaaaacggaatctgccaagacggaaggtcctagcccagccttattggaggagacgccccttgagcccgctgtggggcccaaagctgcctgccctctggactcagagagtgcagaaggggttgtccccccggcttctggaggtggcagagtgcagaactcaccccctgtcgggaggaaaacgctgcctcttaccacggccccggaggcaggggaggtaaccccatcggatagcggggggcaagaggactctccagccaaagggctctccgtaaggctggagtttgactattctgaggacaagagtagttgggacaaccagcaggaaaacccccctcctaccaaaaagataggcaaaaagccagttgccaaaatgcccctgaggaggccaaagatgaaaaagacacccgagaaacttgacaacactcctgcctcacctcccagatcccctgctgaacccaatgacatccccattgctaaaggtacttacacctttgatattgacaagtgggatgaccccaattttaaccctttttcttccacctcaaaaatgcaggagtctcccaaactgccccaacaatcatacaactttgacccagacacctgtgatgagtccgttgacccctttaagacatcctctaagacccccagctcaccttctaaatccccagcctcctttgagatcccagccagtgctatggaagccaatggagtggacggggatgggctaaacaagcccgccaagaagaagaagacgcccctaaagactgacacatttagggtgaaaaagtcgccaaaacggtctcctctctctgatccaccttcccaggaccccaccccagctgctacaccagaaacaccaccagtgatctctgcggtggtccacgccacagatgaggaaaagctggcggtcaccaaccagaagtggacgtgcatgacagtggacctagaggctgacaaacaggactacccgcagccctcggacctgtccacctttgtaaacgagaccaaattcagttcacccactgaggagttggattacagaaactcctatgaaattgaatatatggagaaaattggctcctccttacctcaggacgacgatgccccgaagaagcaggccttgtaccttatgtttgacacttctcaggagagccctgtcaagtcatctcccgtccgcatgtcagagtccccgacgccgtgttcagggtcaagttttgaagagactgaagcccttgtgaacactgctgcgaaaaaccagcatcctgtcccacgaggactggcccctaaccaagagtcacacttgcaggtgccagagaaatcctcccagaaggagctggaggccatgggcttgggcaccccttcagaagcgattgaaattagagaggctgctcacccaacagacgtctccatctccaaaacagccttgtactcccgcatcgggaccgctgaggtggagaaacctgcaggccttctgttccagcagcccgacctggactctgccctccagatcgccagagcagagatcataaccaaggagagagaggtctcagaatggaaagataaatatgaagaaagcaggcgggaagtgatggaaatgaggaaaatagtggccgagtatgagaagaccatcgctcagatgatagaggacgaacagagagagaagtcagtctcccaccagacggtgcagcagctggttctggagaaggagcaagccctggccgacctgaactccgtggagaagtctctggccgacctcttcagaagatatgagaagatgaaggaggtcctagaaggcttccgcaagaatgaagaggtgttgaagagatgtgcgcaggagtacctgtcccgggtgaagaaggaggagcagaggtaccaggccctgaaggtgcacgcggaggagaaactggacagggccaatgctgagattgctcaggttcgaggcaaggccaagcaggagcaagccgcccaccaggccagcctgcggaaggagcagctgcgagtggacgccctggaaaggacgctggagcagaagaataaagaaatagaagaactcaccaagatttgtgacgaactgattgccaaaatggggaaaagctaactctgaaccgaatgttttggacttaactgttgcgtgcaatatgaccgtcggcacactgctgttcctccagttccatggacaggttctgttttcactttttcgtatgcactactgtatttcctttctaaataaaattgatttgattgtatgcagtactaaggagactatcagaatttcttgctattggtttgcattttcctagtataattcatagcaagttgacctcagagttcctgtatcagggagattgtctgattctctaataaaagacacattgctgaccttggccttgccctttgtacacaagttcccagggtgagcagcttttggatttaatatgaacatgtacagcgtgcatagggactcttgccttaaggagtgtaaacttgatctgcatttgctgatttgtttttaaaaaaacaagaaatgcatgtttcaaataaaattctctattgtaaataaaattttttctttggatcttggcaa

SEQ ID NO: 430175 - DNA, 3341 bp, Homo sapiens
catctgccccagctggtgacagagtagaagcttccactccctcctgcccagatccggccaaggacctcagcaggagttccgattctgaagaggcatttgagaccccggagtcaacgacccctgtcaaagctccgccagctccacccccaccaccccccgaagtcatcccagaacccgaggtcagcacacagccacccccggaagaaccaggatgtggttctgagacagtccctgtccctgatggcccacggagcgactcggtggaaggaagtcccttccgtcccccgtcacactccttctctgccgtcttcgatgaagacaagccgatagccagcagtgggacttacaacttggactttgacaacattgagcttgtggatacctttcagaccttggagcctcgtgcctcagacgctaagaatcaggagggcaaagtgaacacacggaggaagtccacggattccgtccccatctctaagtctacactgtcccggtcgctcagcctgcaagccagtgactttgatggtgcttcttcctcaggcaatcccgaggccgtggcccttgccccagatgcatatagcacgggttccagcagtgcttctagtacccttaagcgaactaaaaaaccgaggccgccttccttaaaaaagaaacagaccaccaagaaacccacagagacccccccagtgaaggagacgcaacaggagccagatgaagagagccttgtccccagtggggagaatctagcatctgagacgaaaacggaatctgccaagacggaaggtcctagcccagccttattggaggagacgccccttgagcccgctgtggggcccaaagctgcctgccctctggactcagagagtgcagaaggggttgtccccccggcttctggaggtggcagagtgcagaactcaccccctgtcgggaggaaaacgctgcctcttaccacggccccggaggcaggggaggtaaccccatcggatagcggggggcaagaggactctccagccaaagggctctccgtaaggctggagtttgactattctgaggacaagagtagttgggacaaccagcaggaaaacccccctcctaccaaaaagataggcaaaaagccagttgccaaaatgcccctgaggaggccaaagatgaaaaagacacccgagaaacttgacaacactcctgcctcacctcccagatcccctgctgaacccaatgacatccccattgctaaaggtacttacacctttgatattgacaagtgggatgaccccaattttaaccctttttcttccacctcaaaaatgcaggagtctcccaaactgccccaacaatcatacaactttgacccagacacctgtgatgagtccgttgacccctttaagacatcctctaagacccccagctcaccttctaaatccccagcctcctttgagatcccagccagtgctatggaagccaatggagtggacggggatgggctaaacaagcccgccaagaagaagaagacgcccctaaagactgacacatttagggtgaaaaagtcgccaaaacggtctcctctctctgatccaccttcccaggaccccaccccagctgctacaccagaaacaccaccagtgatctctgcggtggtccacgccacagatgaggaaaagctggcggtcaccaaccagaagtggacgtgcatgacagtggacctagaggctgacaaacaggactacccgcagccctcggacctgtccacctttgtaaacgagaccaaattcagttcacccactgaggagttggattacagaaactcctatgaaattgaatatatggagaaaattggctcctccttacctcaggacgacgatgccccgaagaagcaggccttgtaccttatgtttgacacttctcaggagagccctgtcaagtcatctcccgtccgcatgtcagagtccccgacgccgtgttcagggtcaagttttgaagagactgaagcccttgtgaacactgctgcgaaaaaccagcatcctgtcccacgaggactggcccctaaccaagagtcacacttgcaggtgccagagaaatcctcccagaaggagctggaggccatgggcttgggcaccccttcagaagcgattgaaattagagaggctgctcacccaacagacgtctccatctccaaaacagccttgtactcccgcatcgggaccgctgaggtggagaaacctgcaggccttctgttccagcagcccgacctggactctgccctccagatcgccagagcagagatcataaccaaggagagagaggtctcagaatggaaagataaatatgaagaaagcaggcgggaagtgatggaaatgaggaaaatagtggccgagtatgagaagaccatcgctcagatgatagaggacgaacagagagagaagtcagtctcccaccagacggtgcagcagctggttctggagaaggagcaagccctggccgacctgaactccgtggagaagtctctggccgacctcttcagaagatatgagaagatgaaggaggtcctagaaggcttccgcaagaatgaagaggtgttgaagagatgtgcgcaggagtacctgtcccgggtgaagaaggaggagcagaggtaccaggccctgaaggtgcacgcggaggagaaactggacagggccaatgctgagattgctcaggttcgaggcaaggccaagcaggagcaagccgcccaccaggccagcctgcggaaggagcagctgcgagtggacgccctggaaaggacgctggagcagaagaataaagaaatagaagaactcaccaagatttgtgacgaactgattgccaaaatggggaaaagctaactctgaaccgaatgttttggacttaactgttgcgtgcaatatgaccgtcggcacactgctgttcctccagttccatggacaggttctgttttcactttttcgtatgcactactgtatttcctttctaaataaaattgatttgattgtatgcagtactaaggagactatcagaatttcttgctattggtttgcattttcctagtataattcatagcaagttgacctcagagttcctgtatcagggagattgtctgattctctaataaaagacacattgctgaccttggccttgccctttgtacacaagttcccagggtgagcagcttttggatttaatatgaacatgtacagcgtgcatagggactcttgccttaaggagtgtaaacttgatctgcatttgctgatttgtttttaaaaaaacaagaaatgcatgtttcaaataaaattctctattgtaaataaaattttttctttggatcttggcaa

SEQ ID NO: 430176 - DNA, 3858 bp, Homo sapiens
aaagcagcaccaggaaacatctgcctgcggcagtccacatggagaagatggtcccggggactttgctcacacaggggttccaggacatgtgccaaggtccacgtgtgccccttctcctcagagggaggttttgactgtgcctgaggccaacagtgagccctggacccttgacacgcttgggggtgaaaggagacccggagtcactactggcatcttggaaatgcggaaatgccctgggcaaccagagcacccctgcaccaccaactggagaagtggcagacactcccctggagcctggcaaggtggcaggcgctgctgggaaagcagagggtgacatcaccctgagcacagctgagacacaggcatgtgcgtccggtgatctgcctgaagcaggtactacgaggacattctccgttgtggcaggtgacttggtgctgccaggaagctgtcaggacccagcctgctctgacaaggctccggggatggagggtacagctgcccttcatggggacagcccagccaggccccagcaggctaaggagcagccaggacctgagcgccccattccagctggggatgggaaggtgtgcgtctcctcacctccagagcctgacgaaactcacgacccgaagctgcaacatttggctccagaagagctccacactgacagagagagccccaggcctggcccatccatgttaccttcggttcctaagaaggatgctccaagagtcatggataaagtcacttcagatgagaccagaggtgcggaaggaacagaaagttcacctgtggcagatgatatcatccagcccgctgcccccgcagacctggaaagcccaaccttagctgcctcttcctaccacggtgatgttgttggccaggtctctacggatctgatagcccagaggagttccgattctgaagaggcatttgagaccccggagtcaacgacccctgtcaaagctccgccagctccacccccaccaccccccgaagtcatcccagaacccgaggtcagcacacagccacccccggaagaaccaggatgtggttctgagacagtccctgtccctgatggcccacggagcgactcggtggaaggaagtcccttccgtcccccgtcacactccttctctgccgtcttcgatgaagacaagccgatagccagcagtgggacttacaacttggactttgacaacattgagcttgtggatacctttcagaccttggagcctcgtgcctcagacgctaagaatcaggagggcaaagtgaacacacggaggaagtccacggattccgtccccatctctaagtctacactgtcccggtcgctcagcctgcaagccagtgactttgatggtgcttcttcctcaggcaatcccgaggccgtggcccttgccccagatgcatatagcacgggttccagcagtgcttctagtacccttaagcgaactaaaaaaccgaggccgccttccttaaaaaagaaacagaccaccaagaaacccacagagacccccccagtgaaggagacgcaacaggagccagatgaagagagccttgtccccagtggggagaatctagcatctgagacgaaaacggaatctgccaagacggaaggtcctagcccagccttattggaggagacgccccttgagcccgctgtggggcccaaagctgcctgccctctggactcagagagtgcagaaggggttgtccccccggcttctggaggtggcagagtgcagaactcaccccctgtcgggaggaaaacgctgcctcttaccacggccccggaggcaggggaggtaaccccatcggatagcggggggcaagaggactctccagccaaagggctctccgtaaggctggagtttgactattctgaggacaagagtagttgggacaaccagcaggaaaacccccctcctaccaaaaagataggcaaaaagccagttgccaaaatgcccctgaggaggccaaagatgaaaaagacacccgagaaacttgacaacactcctgcctcacctcccagatcccctgctgaacccaatgacatccccattgctaaaggtacttacacctttgatattgacaagtgggatgaccccaattttaaccctttttcttccacctcaaaaatgcaggagtctcccaaactgccccaacaatcatacaactttgacccagacacctgtgatgagtccgttgacccctttaagacatcctctaagacccccagctcaccttctaaatccccagcctcctttgagatcccagccagtgctatggaagccaatggagtggacggggatgggctaaacaagcccgccaagaagaagaagacgcccctaaagactgacacatttagggtgaaaaagtcgccaaaacggtctcctctctctgatccaccttcccaggaccccaccccagctgctacaccagaaacaccaccagtgatctctgcggtggtccacgccacagatgaggaaaagctggcggtcaccaaccagaagtggacgtgcatgacagtggacctagaggctgacaaacaggactacccgcagccctcggacctgtccacctttgtaaacgagaccaaattcagttcacccactgaggagttggattacagaaactcctatgaaattgaatatatggagaaaattggctcctccttacctcaggacgacgatgccccgaagaagcaggccttgtaccttatgtttgacacttctcaggagagccctgtcaagtcatctcccgtccgcatgtcagagtccccgacgccgtgttcagggtcaagttttgaagagactgaagcccttgtgaacactgctgcgaaaaaccagcatcctgtcccacgaggactggcccctaaccaagagtcacacttgcaggtgccagagaaatcctcccagaaggagctggaggccatgggcttgggcaccccttcagaagcgattgaaattagagaggctgctcacccaacagacgtctccatctccaaaacagccttgtactcccgcatcgggaccgctgaggtggagaaacctgcaggccttctgttccagcagcccgacctggactctgccctccagatcgccagagcagagatcataaccaaggagagagaggtctcagaatggaaagataaatatgaagaaagcaggcgggaagtgatggaaatgaggaaaatagtggccgagtatgagaagaccatcgctcagatgatagaggacgaacagagagagaagtcagtctcccaccagacggtgcagcagctggttctggagaaggagcaagccctggccgacctgaactccgtggagaagtctctggccgacctcttcagaagatatgagaagatgaaggaggtcctagaaggcttccgcaagaatgaagaggtgttgaagagatgtgcgcaggagtacctgtcccgggtgaagaaggaggagcagaggtaccaggccctgaaggtgcacgcggaggagaaactggacagggccaatgctgagattgctcaggttcgaggcaaggccaagcaggagcaagccgcccaccaggccagcctgcggaaggagcagctgcgagtggacgccctggaaaggacgctggagcagaagaataaagaaatagaagaactcaccaagatttgtgacgaactgattgccaaaatggggaaaagctaactctgaaccgaatgttttggacttaactgttgcgtgcaatatgaccgtcggcacactgctgttcctccagttccatggacaggttctgttttcactttttcgtatgcactactgtatttcctttctaaataaaattgatttgattgtatgcagtactaaggagact

SEQ ID NO: 430177 - DNA, 3939 bp, Homo sapiens
aaagcagcaccaggaaacatctgcctgcggcagtccacatggagaagatggtcccggggactttgctcacacaggggttccaggacatgtgccaaggtccacgtgtgccccttctcctcagagggaggttttgactgtgcctgaggccaacagtgagccctggacccttgacacgcttgggggtgaaaggagacccggagtcactactggcatcttggaaatgcggaaatgccctgggcaaccagagcacccctgcaccaccaactggagaagtggcagacactcccctggagcctggcaaggtggcaggcgctgctgggaaagcagagggtgacatcaccctgagcacagctgagacacaggcatgtgcgtccggtgatctgcctgaagcaggtactacgaggacattctccgttgtggcaggtgacttggtgctgccaggaagctgtcaggacccagcctgctctgacaaggctccggggatggagggtacagctgcccttcatggggacagcccagccaggccccagcaggctaaggagcagccaggacctgagcgccccattccagctggggatgggaaggtgtgcgtctcctcacctccagagcctgacgaaactcacgacccgaagctgcaacatttggctccagaagagctccacactgacagagagagccccaggcctggcccatccatgttaccttcggttcctaagaaggatgctccaagagtcatggataaagtcacttcagatgagaccagaggtgcggaaggaacagaaagttcacctgtggcagatgatatcatccagcccgctgcccccgcagacctggaaagcccaaccttagctgcctcttcctaccacggtgatgttgttggccaggtctctacggatctgatagcccagaggagttccgattctgaagaggcatttgagaccccggagtcaacgacccctgtcaaagctccgccagctccacccccaccaccccccgaagtcatcccagaacccgaggtcagcacacagccacccccggaagaaccaggatgtggttctgagacagtccctgtccctgatggcccacggagcgactcggtggaaggaagtcccttccgtcccccgtcacactccttctctgccgtcttcgatgaagacaagccgatagccagcagtgggacttacaacttggactttgacaacattgagcttgtggatacctttcagaccttggagcctcgtgcctcagacgctaagaatcaggagggcaaagtgaacacacggaggaagtccacggattccgtccccatctctaagtctacactgtcccggtcgctcagcctgcaagccagtgactttgatggtgcttcttcctcaggcaatcccgaggccgtggcccttgccccagatgcatatagcacgggttccagcagtgcttctagtacccttaagcgaactaaaaaaccgaggccgccttccttaaaaaagaaacagaccaccaagaaacccacagagacccccccagtgaaggagacgcaacaggagccagatgaagagagccttgtccccagtggggagaatctagcatctgagacgaaaacggaatctgccaagacggaaggtcctagcccagccttattggaggagacgccccttgagcccgctgtggggcccaaagctgcctgccctctggactcagagagtgcagaaggggttgtccccccggcttctggaggtggcagagtgcagaactcaccccctgtcgggaggaaaacgctgcctcttaccacggccccggaggcaggggaggtaaccccatcggatagcggggggcaagaggactctccagccaaagggctctccgtaaggctggagtttgactattctgaggacaagagtagttgggacaaccagcaggaaaacccccctcctaccaaaaagataggcaaaaagccagttgccaaaatgcccctgaggaggccaaagatgaaaaagacacccgagaaacttgacaacactcctgcctcacctcccagatcccctgctgaacccaatgacatccccattgctaaaggtacttacacctttgatattgacaagtgggatgaccccaattttaaccctttttcttccacctcaaaaatgcaggagtctcccaaactgccccaacaatcatacaactttgacccagacacctgtgatgagtccgttgacccctttaagacatcctctaagacccccagctcaccttctaaatccccagcctcctttgagatcccagccagtgctatggaagccaatggagtggacggggatgggctaaacaagcccgccaagaagaagaagacgcccctaaagactgacacatttagggtgaaaaagtcgccaaaacggtctcctctctctgatccaccttcccaggaccccaccccagctgctacaccagaaacaccaccagtgatctctgcggtggtccacgccacagatgaggaaaagctggcggtcaccaaccagaagtggacgtgcatgacagtggacctagaggctgacaaacaggactacccgcagccctcggacctgtccacctttgtaaacgagaccaaattcagttcacccactgaggagttggattacagaaactcctatgaaattgaatatatggagaaaattggctcctccttacctcaggacgacgatgccccgaagaagcaggccttgtaccttatgtttgacacttctcaggagagccctgtcaagtcatctcccgtccgcatgtcagagtccccgacgccgtgttcagggtcaagttttgaagagactgaagcccttgtgaacactgctgcgaaaaaccagcatcctgtcccacgaggactggcccctaaccaagagtcacacttgcaggtgccagagaaatcctcccagaaggagctggaggccatgggcttgggcaccccttcagaagcgattgaaattagagaggctgctcacccaacagacgtctccatctccaaaacagccttgtactcccgcatcgggaccgctgaggtggagaaacctgcaggccttctgttccagcagcccgacctggactctgccctccagatcgccagagcagagatcataaccaaggagagagaggtctcagaatggaaagataaatatgaagaaagcaggcgggaagtgatggaaatgaggaaaatagtggccgagtatgagaagaccatcgctcagatgatagaggacgaacagagagagaagtcagtctcccaccagacggtgcagcagctggttctggagaaggagcaagccctggccgacctgaactccgtggagaagtctctggccgacctcttcagaagatatgagaagatgaaggaggtcctagaaggcttccgcaagaatgaagaggtgttgaagagatgtgcgcaggagtacctgtcccgggtgaagaaggaggagcagaggtaccaggccctgaaggtgcacgcggaggagaaactggacagggccaatgctgagattgctcaggttcgaggcaaggccaagcaggagcaagccgcccaccaggccagcctgcggaaggagcagctgcgagtggacgccctggaaaggacgctggagcagaagaataaagaaatagaagaactcaccaagatttgtgacgaactgattgccaaaatggggaaaagctaactctgaaccgaatgttttggacttaactgttgcgtgcaatatgaccgtcggcacactgctgttcctccagttccatggacaggttctgttttcactttttcgtatgcactactgtatttcctttctaaataaaattgatttgattgtatgcagtactaaggagacttccaattctgctatggttggatatctactaatctacaggtgaccagaaaccgctcagggtcgacctacgcctgcgtgcccg

SEQ ID NO: 430178 - DNA, 3599 bp, Homo sapiens
aaagcagcaccaggaaacatctgcctgcggcagtccacatggagaagatggtcccggggactttgctcacacaggggttccaggacatgtgccaaggtccacgtgtgccccttctcctcagagggaggttttgactgtgcctgaggccaacagtgagccctggacccttgacacgcttgggggtgaaaggagacccggagtcactactggcatcttggaaatgcggaaatgccctgggcaaccagagcacccctgcaccaccaactggagaagtggcagacactcccctggagcctggcaaggtggcaggcgctgctgggaaagcagagggtgacatcaccctgagcacagctgagacacaggcatgtgcgtccggtgatctgcctgaagcaggtactacgaggacattctccgttgtggcaggtgacttggtgctgccaggaagctgtcaggacccagcctgctctgacaaggctccggggatggagggtacagctgcccttcatggggacagcccagccaggccccagcaggctaaggagcagccaggacctgagcgccccattccagctggggatgggaaggtgtgcgtctcctcacctccagagcctgacgaaactcacgacccgaagctgcaacatttggctccagaagagctccacactgacagagagagccccaggcctggcccatccatgttaccttcggttcctaagaaggatgctccaagagtcatggataaagtcacttcagatgagaccagaggtgcggaaggaacagaaagttcacctgtggcagatgatatcatccagcccgctgcccccgcagacctggaaagcccaaccttagctgcctcttcctaccacggtgatgttgttggccaggtctctacggatctgatagcccagaggagttccgattctgaagaggcatttgagaccccggagtcaacgacccctgtcaaagctccgccagctccacccccaccaccccccgaagtcatcccagaacccgaggtcagcacacagccacccccggaagaaccaggatgtggttctgagacagtccctgtccctgatggcccacggagcgactcggtggaaggaagtcccttccgtcccccgtcacactccttctctgccgtcttcgatgaagacaagccgatagccagcagtgggacttacaacttggactttgacaacattgagcttgtggatacctttcagaccttggagcctcgtgcctcagacgctaagaatcaggagggcaaagtgaacacacggaggaagtccacggattccgtccccatctctaagtctacactgtcccggtcgctcagcctgcaagccagtgactttgatggtgcttcttcctcaggcaatcccgaggccgtggcccttgccccagatgcatatagcacgggttccagcagtgcttctagtacccttaagcgaactaaaaaaccgaggccgccttccttaaaaaagaaacagaccaccaagaaacccacagagacccccccagtgaaggagacgcaacaggagccagatgaagagagccttgtccccagtggggagaatctagcatctgagacgaaaacggaatctgccaagacggaaggtcctagcccagccttattggaggagacgccccttgagcccgctgtggggcccaaagctgcctgccctctggactcagagagtgcagaaggggttgtccccccggcttctggaggtggcagagtgcagaactcaccccctgtcgggaggaaaacgctgcctcttaccacggccccggaggcaggggaggtaaccccatcggatagcggggggcaagaggactctccagccaaagggctctccgtaaggctggagtttgactattctgaggacaagagtagttgggacaaccagcaggaaaacccccctcctaccaaaaagataggcaaaaagccagttgccaaaatgcccctgaggaggccaaagatgaaaaagacacccgagaaacttgacaacactcctgcctcacctcccagatcccctgctgaacccaatgacatccccattgctaaaggtacttacacctttgatattgacaagtgggatgaccccaattttaaccctttttcttccacctcaaaaatgcaggagtctcccaaactgccccaacaatcatacaactttgacccagacacctgtgatgagtccgttgacccctttaagacatcctctaagacccccagctcaccttctaaatccccagcctcctttgagatcccagccagtgctatggaagccaatggagtggacggggatgggctaaacaagcccgccaagaagaagaagacgcccctaaagactgacacatttagggtgaaaaagtcgccaaaacggtctcctctctctgatccaccttcccaggaccccaccccagctgctacaccagaaacaccaccagtgatctctgcggtggtccacgccacagatgaggaaaagctggcggtcaccaaccagaagtggacgtgcatgacagtggacctagaggctgacaaacaggactacccgcagccctcggacctgtccacctttgtaaacgagaccaaattcagttcacccactgaggagttggattacagaaactcctatgaaattgaatatatggagaaaattggctcctccttacctcaggacgacgatgccccgaagaagcaggccttgtaccttatgtttgacacttctcaggagagccctgtcaagtcatctcccgtccgcatgtcagagtccccgacgccgtgttcagggtcaagttttgaagagactgaagcccttgtgaacactgctgcgaaaaaccagcatcctgtcccacgaggactggcccctaaccaagagtcacacttgcaggtgccagagaaatcctcccagaaggagctggaggccatgggcttgggcaccccttcagaagcgattgaaattagagaggctgctcacccaacagacgtctccatctccaaaacagccttgtactcccgcatcgggaccgctgaggtggagaaacctgcaggccttctgttccagcagcccgacctggactctgccctccagatcgccagagcagagatcataaccaaggagagagaggtctcagaatggaaagataaatatgaagaaagcaggcgggaagtgatggaaatgaggaaaatagtggccgagtatgagaagaccatcgctcagatgataggtaggtgtcctgacctgcgggggctcaggccggccccgatgtttctgaactatgaggaggccttggaagataggaggctcagagtgggtttctggtagagcgtgaagcctttcagggaaggaccagagcattccagaaaatatggctttgccccaggacagagtctggggcttcttggtaacacccccctgaactgtgccatagcattattcacacccatggaaagccatggcagtcacctgccagccaccatctgactcagccaaggactctctactttgtggggaaagagattccttttgggtgggatatttgggggattttttcttttcgcttgtgggagataataggaatcaaatccc

SEQ ID NO: 430179 - DNA, 487 bp, Homo sapiens
aaataaaataccttaggaacattttcctgaaagagtccacataaaattcattttaatgcatgtgtttatgcatagctttctatttttcctcttttcctctttaacattcccaaattaggaatataatgcctaatccaagtatagtggctgcgtttcctttccttccctcctagtctgcaggtagcatacaaatgtaataaagtactcattcatgtcacatctatttattttctgccttataccaagcttgtgggattctcttaaatacaacatttttatacttacacctatgcaatacccattagcatcgccttcctaaatcaggggaaattgagtctctgtaaggtgcagtaacttactaagatacaaaactcagcattaaagtctgtatacttcaatatcctgccctcttctcatttgtctttactgccttttatgtatgtgttagatgttcaataaattctcttttttaaactgaaaaaaaaac

SEQ ID NO: 430180 - DNA, 789 bp, Homo sapiens
  misc_feature (26)..(26): n is a, c, g, or t
  misc_feature (28)..(28): n is a, c, g, or t
acttacggctaggtcgaggctgggtntngcaggtttggagtctctggcaagctcccctgactgtgcatccctctggagacgaagaggagggggaggcctgtcctctctgggatccattggtcacatccccctgaggattcccgaatgcctacctccagtgtcgtcaacatggagttctgaagtccatgtggctcttcacagtgaatcaggtgttaaggaagatgcagagacgccacagcagcaacacggataacattccacctgaaagaaaccgcagccaggcgctcagctccgaggcgagtgtggatgaaggtggcgtctttgagagtctgaaggcagaggcagcctccccaccagcgctcttctcgggcttatcaggcagcctccccaccagctcgttcccctccagcctggtgctgggctcctcggctggcggcggggacgtgttcatccagatgcccgcgtccagggaggaaggagggggccggggcgaggggggcgcctaccaccaccgccagccccaccaccatttccaccatggcggccaccgcgggggctccctgctgcagcacgtgggtggggaccaccgggggcactcggaggagggaggcgacgagcagcctgggacgcccgcccccgccctgtccgagctgaaggctgtgatctgctggctccagaaaggactccccttcatcctgatcctcctggccaaactgtgctttcagcataagctcggatgtgtggctcagggatgccagcactagctaagaatccagtcgaaacgtccag

SEQ ID NO: 430181 - DNA, 2891 bp, Homo sapiens
agtcacatgctgcccaggctgcgcgggtgattggcttggctggacctgaatgatgcggctgtgattgctgaattgtctgggcaggtttggagtctctggcaagctcccctgactgtgcatccctctggagacgaagaggagggggaggcctgtcctctctgggatccattggtcacatccccctgaggattcccgaatgcctacctccagtgtcgtcaacatggagttctgaagtccatgtggctcttcacagtgaatcaggtgttaaggaagatgcagagacgccacagcagcaacacggataacattccacctgaaagaaaccgcagccaggcgctcagctccgaggcgagtgtggatgaaggtggcgtctttgagagtctgaaggcagaggcagcctccccaccagcgctcttctcgggcttatcaggcagcctccccaccagctcgttcccctccagcctggtgctgggctcctcggctggcggcggggacgtgttcatccagatgcccgcgtccagggaggaaggagggggccggggcgaggggggcgcctaccaccaccgccagccccaccaccatttccaccatggcggccaccgcgggggctccctgctgcagcacgtgggtggggaccaccgggggcactcggaggagggaggcgacgagcagcctgggacgcccgcccccgccctgtccgagctgaaggctgtgatctgctggctccagaaaggactccccttcatcctgatcctcctggccaaactgtgctttcagcataagctcggcattgctgtgtgcatcgggatggccagcaccttcgcctatgccaactccacgcttcgagaacaggtctcactgaaggagaagaggtcagtgctggtcatcttgtggatcctggcctttctggcggggaacaccctctatgtgctttatacattcagctccgagattgcaccacagcactccaacctgggtgacagagtgagtgagactctgtctaaaaaaaaaaagaaagaaagaagggagggagggaggaaggaaggaaggaaggaaagaaagaaaggtcagctttggcccagatgtggttaccccttggtctcctgtctttatgtctttctcctcttcctattctgtcatctccctcacttaagtctcaggcctgtcagcagctcctgtggacattgccatcccctctggtagccttcagagcaaacaggacaacctatgttatggatgtttccaccaaccagggtagtggcatggagcaccgtaaccatctgtgcttctgtgatctctatgacagagccacttctccacctctgaaatgttccctgctctgaaatctggcatgagatggcacaggtgaccacgcagaagccaccagaatcttgcctgccctattcctcctcccaagtctgttctcttattgtcaacctcagcacaacaggctggcgccaatggcattacagagaaagcaatctgtgtggctagtgggcagattaccatgcaagccccaggagaaatggaggagctttgtagccacctccctgtcagccagtattaacatgtccccttccccctgccccgccgtagattcaggacattcgcccctgtgtgccaccaaaccaggacttttccccttggcttggcatccctggctctctcctggtacccagcaagacgtctgttccagggcagtgtagcatctttcaagctccgttactatggcgatggccatgatgttacaatcccacttgcctgaataatcaagtgggaaggggaagcagagggaaatggggccatgtgaatgcagctgctctgttctccctaccctgaggaaaaaccaaagggaagcaacaggaacttctgcaactggtttttatcggaaagatcatcctgcctgcagatgctgttgaaggggcacaagaaattggagctggagaagattgatgaaagtgcaggtgtgtaaggaaatagaacagtctgctgggagtcagacctggaattctgattccaaactctttattactttgggaagtcactcagcctccccgtagccatctccagggtgacggaacccagtgtattacctgctggaaccaaggaaactaacaatgtaggttactagtgaataccccaatggtttctccaattatgcccatgccaccaaaacaataaaacaaaattctctaacactgcaaagagtgagccatgcctgttaacactgtaaagaatgtaacatgtgggggacacacaggggcagatgggatggtttagtttaggattttattagtgcatgccctaccctctgggggaacgtcccatctgaggttttcttctcggtggggggatttaacttctgtcctagggaaaacagtgtctgatgaggagtgtttccaacacaggctacatgaattcccctataccagtgcgaaagcagccaggagtccccgttggaaaagaacaatgccactctcttttatgtatcttggttctgcaactcatttgttgtaagtagggttaatcgagtatcaggttcacagtatcctgcccttattattttatgattcactgactcaagttccacgaagtccttagaaatggacctcttcatgtaaaatatcttgagaataataaatgtgagggaataagaaaggcaagctttggacacagatatgataggtgcatcagcttcggaagagaagaatgatgtgcagagtgttaggaagacatccgggctgctgagactcgggattagaagaaagagaggtaaataaagtgggtcctggaatcttttaggacttctgctgtaggacaaacagctgcctttggtgttttaatgtctcccaaagtacccttcagccaataaataccatctgttggtgcaa

SEQ ID NO: 430182 - DNA, 2839 bp, Homo sapiens
  misc_feature (26)..(26): n is a, c, g, or t
  misc_feature (28)..(28): n is a, c, g, or t
acttacggctaggtcgaggctgggtntngcaggtttggagtctctggcaagctcccctgactgtgcatccctctggagacgaagaggagggggaggcctgtcctctctgggatccattggtcacatccccctgaggattcccgaatgcctacctccagtgtcgtcaacatggagttctgaagtccatgtggctcttcacagtgaatcaggtgttaaggaagatgcagagacgccacagcagcaacacggataacattccacctgaaagaaaccgcagccaggcgctcagctccgaggcgagtgtggatgaaggtggcgtctttgagagtctgaaggcagaggcagcctccccaccagcgctcttctcgggcttatcaggcagcctccccaccagctcgttcccctccagcctggtgctgggctcctcggctggcggcggggacgtgttcatccagatgcccgcgtccagggaggaaggagggggccggggcgaggggggcgcctaccaccaccgccagccccaccaccatttccaccatggcggccaccgcgggggctccctgctgcagcacgtgggtggggaccaccgggggcactcggaggagggaggcgacgagcagcctgggacgcccgcccccgccctgtccgagctgaaggctgtgatctgctggctccagaaaggactccccttcatcctgatcctcctggccaaactgtgctttcagcataagctcggcattgctgtgtgcatcgggatggccagcaccttcgcctatgccaactccacgcttcgagaacaggtctcactgaaggagaagaggtcagtgctggtcatcttgtggatcctggcctttctggcggggaacaccctctatgtgctttatacattcagctccgagattgcaccacagcactccaacctgggtgacagagtgagtgagactctgtctaaaaaaaaaaagaaagaaagaagggagggagggaggaaggaaggaaggaaggaaagaaagaaaggtcagctttggcccagatgtggttaccccttggtctcctgtctttatgtctttctcctcttcctattctgtcatctccctcacttaagtctcaggcctgtcagcagctcctgtggacattgccatcccctctggtagccttcagagcaaacaggacaacctatgttatggatgtttccaccaaccagggtagtggcatggagcaccgtaaccatctgtgcttctgtgatctctatgacagagccacttctccacctctgaaatgttccctgctctgaaatctggcatgagatggcacaggtgaccacgcagaagccaccagaatcttgcctgccctattcctcctcccaagtctgttctcttattgtcaacctcagcacaacaggctggcgccaatggcattacagagaaagcaatctgtgtggctagtgggcagattaccatgcaagccccaggagaaatggaggagctttgtagccacctccctgtcagccagtattaacatgtccccttccccctgccccgccgtagattcaggacattcgcccctgtgtgccaccaaaccaggacttttccccttggcttggcatccctggctctctcctggtacccagcaagacgtctgttccagggcagtgtagcatctttcaagctccgttactatggcgatggccatgatgttacaatcccacttgcctgaataatcaagtgggaaggggaagcagagggaaatggggccatgtgaatgcagctgctctgttctccctaccctgaggaaaaaccaaagggaagcaacaggaacttctgcaactggtttttatcggaaagatcatcctgcctgcagatgctgttgaaggggcacaagaaattggagctggagaagattgatgaaagtgcaggtgtgtaaggaaatagaacagtctgctgggagtcagacctggaattctgattccaaactctttattactttgggaagtcactcagcctccccgtagccatctccagggtgacggaacccagtgtattacctgctggaaccaaggaaactaacaatgtaggttactagtgaataccccaatggtttctccaattatgcccatgccaccaaaacaataaaacaaaattctctaacactgcaaagagtgagccatgcctgttaacactgtaaagaatgtaacatgtgggggacacacaggggcagatgggatggtttagtttaggattttattagtgcatgccctaccctctgggggaacgtcccatctgaggttttcttctcggtggggggatttaacttctgtcctagggaaaacagtgtctgatgaggagtgtttccaacacaggctacatgaattcccctataccagtgcgaaagcagccaggagtccccgttggaaaagaacaatgccactctcttttatgtatcttggttctgcaactcatttgttgtaagtagggttaatcgagtatcaggttcacagtatcctgcccttattattttatgattcactgactcaagttccacgaagtccttagaaatggacctcttcatgtaaaatatcttgagaataataaatgtgagggaataagaaaggcaagctttggacacagatatgataggtgcatcagcttcggaagagaagaatgatgtgcagagtgttaggaagacatccgggctgctgagactcgggattagaagaaagagaggtaaataaagtgggtcctggaatcttttaggacttctgctgtaggacaaacagctgcctttggtgttttaatgtctcccaaagtacccttcagccaataaataccatctgttggtgcaa

SEQ ID NO: 430183 - DNA, 2184 bp, Homo sapiens
acacgagaggccgggtgtggtggcccatgcctgtagtgccagcattttgggaggctgaagcaggcgggtcacctgaggtcaagagttcaagactagcctggccaacatggcaaaaccccctctttactaaaaaatacaaaaattagccgggcgcggtggcgggtgcctgtaatcccagctactcaggaggctaaggcagggagaactgcttgaactcgggaggtgaaagttgcagtgagccgagattgcaccacagcactccaacctgggtgacagagtgagtgagactctgtctaaaaaaaaaaagaaagaaagaagggagggagggaggaaggaaggaaggaaggaaagaaagaaaggtcagctttggcccagatgtggttaccccttggtctcctgtctttatgtctttctcctcttcctattctgtcatctccctcacttaagtctcaggcctgtcagcagctcctgtggacattgccatcccctctggtagccttcagagcaaacaggacaacctatgttatggatgtttccaccaaccagggtagtggcatggagcaccgtaaccatctgtgcttctgtgatctctatgacagagccacttctccacctctgaaatgttccctgctctgaaatctggcatgagatggcacaggtgaccacgcagaagccaccagaatcttgcctgccctattcctcctcccaagtctgttctcttattgtcaacctcagcacaacaggctggcgccaatggcattacagagaaagcaatctgtgtggctagtgggcagattaccatgcaagccccaggagaaatggaggagctttgtagccacctccctgtcagccagtattaacatgtccccttccccctgccccgccgtagattcaggacattcgcccctgtgtgccaccaaaccaggacttttccccttggcttggcatccctggctctctcctggtacccagcaagacgtctgttccagggcagtgtagcatctttcaagctccgttactatggcgatggccatgatgttacaatcccacttgcctgaataatcaagtgggaaggggaagcagagggaaatggggccatgtgaatgcagctgctctgttctccctaccctgaggaaaaaccaaagggaagcaacaggaacttctgcaactggtttttatcggaaagatcatcctgcctgcagatgctgttgaaggggcacaagaaattggagctggagaagattgatgaaagtgcaggtgtgtaaggaaatagaacagtctgctgggagtcagacctggaattctgattccaaactctttattactttgggaagtcactcagcctccccgtagccatctccagggtgacggaacccagtgtattacctgctggaaccaaggaaactaacaatgtaggttactagtgaataccccaatggtttctccaattatgcccatgccaccaaaacaataaaacaaaattctctaacactgcaaagagtgagccatgcctgttaacactgtaaagaatgtaacatgtgggggacacacaggggcagatgggatggtttagtttaggattttattagtgcatgccctaccctctgggggaacgtcccatctgaggttttcttctcggtggggggatttaacttctgtcctagggaaaacagtgtctgatgaggagtgtttccaacacaggctacatgaattcccctataccagtgcgaaagcagccaggagtccccgttggaaaagaacaatgccactctcttttatgtatcttggttctgcaactcatttgttgtaagtagggttaatcgagtatcaggttcacagtatcctgcccttattattttatgattcactgactcaagttccacgaagtccttagaaatggacctcttcatgtaaaatatcttgagaataataaatgtgagggaataagaaaggcaagctttggacacagatatgataggtgcatcagcttcggaagagaagaatgatgtgcagagtgttaggaagacatccgggctgctgagactcgggattagaagaaagagaggtaaataaagtgggtcctggaatcttttaggacttctgctgtaggacaaacagctgcctttggtgttttaatgtctcccaaagtacccttcagccaataaataccatctgttggtgcaa

SEQ ID NO: 430184 - DNA, 1887 bp, Homo sapiens
agtcacatgctgcccaggctgcgcgggtgattggcttggctggacctgaatgatgcggctgtgattgctgaattgtctgggcaggtttggagtctctggcaagctcccctgactgtgcatccctctggagacgaagaggagggggaggcctgtcctctctgggatccattggtcacatccccctgaggattcccgaatgcctacctccagtgtcgtcaacatggagttctgaagtccatgtggctcttcacagtgaatcaggtgttaaggaagatgcagagacgccacagcagcaacacggataacattccacctgaaagaaaccgcagccaggcgctcagctccgaggcgagtgtggatgaaggtggcgtctttgagagtctgaaggcagaggcagcctccccaccagcgctcttctcgggcttatcaggcagcctccccaccagctcgttcccctccagcctggtgctgggctcctcggctggcggcggggacgtgttcatccagatgcccgcgtccagggaggaaggagggggccggggcgaggggggcgcctaccaccaccgccagccccaccaccatttccaccatggcggccaccgcgggggctccctgctgcagcacgtgggtggggaccaccgggggcactcggaggagggaggcgacgagcagcctgggacgcccgcccccgccctgtccgagctgaaggctgtgatctgctggctccagaaaggactccccttcatcctgatcctcctggccaaactgtgctttcagcataagctcggcattgctgtgtgcatcgggatggccagcaccttcgcctatgccaactccacgcttcgagaacaggtctcactgaaggagaagaggtcagtgctggtcatcttgtggatcctggcctttctggcggggaacaccctctatgtgctttatacattcagctcccagcagctgtacaacagcctcatattcctgaagcccaacctggagatgctggacttctttgacctgctatggattgtggggatcgcagactttgttctgaagtacatcaccatcgccctcaagtgcctcatcgtggccctgcccaagatcatcctggccgtcaagtccaagggaaagttctatctggtcatcgaggagctgagccagctgttccgatcccttgtccccatccagctgtggtacaaatacatcatgggtgacgactcctccaacagctacttcctgggcggggtcctgatcgttctctacagcctctgcaagtccttcgacatctgtggacgtgtgggcggagttaggaaagccctgaagcttctctgtacctctcagaactatggagtccgagccaccgggcagcagtgcacagaagctggtgacatctgcgccatctgtcaggccgagttccgagagcctctgattctcctgtgccagcacgtgttctgtgaggagtgcctctgcctgtggctggaccgtgagcgcacctgcccgctctgccgctcggtcgccgtggacaccctgcgctgctggaaggacggcgccacgtccgcacacttccaggtgtactaggaccgaacactgaggacacccagaaggacgccaagggtcagcatgcccggacccagccctgcgggggcttcctgagaaacaggcctcaagcacttacatcctgcctcttgccctccaccacctctgaccccaaagtcccgcccctgtcttgtccttctgaccttcatcttcctctctcgttctgtggtatagtgcgtgcctccttcccctgcaaaaggggacgtcttcctaactcagacttgatgcccttctagatgcatcttccttctccactccaagtcaaggacctggcaatacatgaagttcccacttgtt

SEQ ID NO: 430185 - DNA, 370 bp, Homo sapiens
agacggatcttcttgcgaagtttacttccctgagctcccttctacctttgtaacaccctccttcctgaggacacccagaaggacgccaagggtcagcatgcccggacccagccctgcgggggcttcctgagaaacaggcctcaagcacttacatcctgcctcttgccctccaccacctctgaccccaaagtcccgcccctgtcttgtccttctgaccttcatcttcctctctcgttctgtggtatagtgcgtgcctccttcccctgcaaaaggggacgtcttcctaactcagacttgatgcccttctagatgcatcttccttctccactccaagtcaaggacctggcaatacatgaagttcccacttgtt

SEQ ID NO: 430186 - DNA, 2203 bp, Homo sapiens
agtcacatgctgcccaggctgcgcgggtgattggcttggctggacctgaatgatgcggctgtgattgctgaattgtctgggcaggtttggagtctctggcaagctcccctgactgtgcatccctctggagacgaagaggagggggaggcctgtcctctctgggatccattggtcacatccccctgaggattcccgaatgcctacctccagtgtcgtcaacatggagttctgaagtccatgtggctcttcacagtgaatcaggtgttaaggaagatgcagagacgccacagcagcaacacggataacattccacctgaaagaaaccgcagccaggcgctcagctccgaggcgagtgtggatgaaggtggcgtctttgagagtctgaaggcagaggcagcctccccaccagcgctcttctcgggcttatcaggcagcctccccaccagctcgttcccctccagcctggtgctgggctcctcggctggcggcggggacgtgttcatccagatgcccgcgtccagggaggaaggagggggccggggcgaggggggcgcctaccaccaccgccagccccaccaccatttccaccatggcggccaccgcgggggctccctgctgcagcacgtgggtggggaccaccgggggcactcggaggagggaggcgacgagcagcctgggacgcccgcccccgccctgtccgagctgaaggctgtgatctgctggctccagaaaggactccccttcatcctgatcctcctggccaaactgtgctttcagcataagctcggcattgctgtgtgcatcgggatggccagcaccttcgcctatgccaactccacgcttcgagaacaggtctcactgaaggagaagaggtcagtgctggtcatcttgtggatcctggcctttctggcggggaacaccctctatgtgctttatacattcagctccgagattgcaccacagcactccaacctgggtgacagagtgagtgagactctgtctaaaaaaaaaaagaaagaaagaagggagggagggaggaaggaaggaaggaaggaaagaaagaaaggtcagctttggcccagatgtggttaccccttggtctcctgtctttatgtctttctcctcttcctattctgtcatctccctcacttaagtctcaggcctgtcagcagctcctgtggacattgccatcccctctggtagccttcagagcaaacaggacaacctatgttatggatgtttccaccaaccagggtagtggcatggagcaccgtaaccatctgtgcttctgtgatctctatgacagagccacttctccacctctgaaatgttccctgctctgaaatctggcatgagatggcacaggtgaccacgcagaagccaccagaatcttgcctgccctattcctcctcccaagtctgttctcttattgtcaacctcagcacaacaggctggcgccaatggcattacagagaaagcaatctgtgtggctagtgggcagattaccatgcaagccccaggagaaatggaggagctttgtagccacctccctgtcagccagtattaacatgtccccttccccctgccccgccgtagattcaggacattcgcccctgtgtgccaccaaaccaggacttttccccttggcttggcatccctggctctctcctggtacccagcaagacgtctgttccagggcagtgtagcatctttcaagctccgttactatggcgatggccatgatgttacaatcccacttgcctgaataatcaagtgggaaggggaagcagagggaaatggggccatgtgaatgcagctgctctgttctccctaccctgaggaaaaaccaaagggaagcaacaggaacttctgcaactggtttttatcggaaagatcatcctgcctgcagatgctgttgaaggggcacaagaaattggagctggagaagattgatgaaagtgcaggtgtgtaaggaaatagaacagtctgctgggagtcagacctggaattctgattccaaactctttattactttgggaagtcactcagcctccccgtagccatctccagggtgacggaacccagtgtattacctgctggaaccaaggaaactaacaatgtaggttactagtgaataccccaatggtttctccaattatgcccatgccaccaaaacaataaaacaaaattctctaacactgca

SEQ ID NO: 430187 - DNA, 2502 bp, Homo sapiens
agtcacatgctgcccaggctgcgcgggtgattggcttggctggacctgaatgatgcggctgtgattgctgaattgtctgggcaggtttggagtctctggcaagctcccctgactgtgcatccctctggagacgaagaggagggggaggcctgtcctctctgggatccattggtcacatccccctgaggattcccgaatgcctacctccagtgtcgtcaacatggagttctgaagtccatgtggctcttcacagtgaatcaggtgttaaggaagatgcagagacgccacagcagcaacacggataacattccacctgaaagctgtgaccaaggctggcccctctggggaactgggggccattgaacttgaagactgcagagccagcggtccttgggatcccgagaaaccgcagccaggcgctcagctccgaggcgagtgtggatgaaggtggcgtctttgagagtctgaaggcagaggcagcctccccaccagcgctcttctcgggcttatcaggcagcctccccaccagctcgttcccctccagcctggtgctgggctcctcggctggcggcggggacgtgttcatccagatgcccgcgtccagggaggaaggagggggccggggcgaggggggcgcctaccaccaccgccagccccaccaccatttccaccatggcggccaccgcgggggctccctgctgcagcacgtgggtggggaccaccgggggcactcggaggagggaggcgacgagcagcctgggacgcccgcccccgccctgtccgagctgaaggctgtgatctgctggctccagaaaggactccccttcatcctgatcctcctggccaaactgtgctttcagcataagctcggcattgctgtgtgcatcgggatggccagcaccttcgcctatgccaactccacgcttcgagaacaggtctcactgaaggagaagaggtcagtgctggtcatcttgtggatcctggcctttctggcggggaacaccctctatgtgctttatacattcagctcccagcagctgtacaacagcctcatattcctgaagcccaacctggagatgctggacttctttgacctgctatggattgtggggatcgcagactttgttctgaagtacatcaccatcgccctcaagtgcctcatcgtggccctgcccaagatcatcctggccgtcaagtccaagggaaagttctatctggtcatcgaggagctgagccagctgttccgatcccttgtccccatccagctgtggtacaaatacatcatgggtgacgactcctccaacagctacttcctgggcggggtcctgatcgttctctacagcctctgcaagtccttcgacatctgtggacgtgtgggcggagttaggaaagccctgaagcttctctgtacctctcagaactatggagtccgagccaccgggcagcagtgcacagaagctggtgacatctgcgccatctgtcaggccgagttccgagagcctctgattctcctgtgccagatgctgttgaaggggcacaagaaattggagctggagaagattgatgaaagtgcaggtgtgtaaggaaatagaacagtctgctgggagtcagacctggaattctgattccaaactctttattactttgggaagtcactcagcctccccgtagccatctccagggtgacggaacccagtgtattacctgctggaaccaaggaaactaacaatgtaggttactagtgaataccccaatggtttctccaattatgcccatgccaccaaaacaataaaacaaaattctctaacactgcaaagagtgagccatgcctgttaacactgtaaagaatgtaacatgtgggggacacacaggggcagatgggatggtttagtttaggattttattagtgcatgccctaccctctgggggaacgtcccatctgaggttttcttctcggtggggggatttaacttctgtcctagggaaaacagtgtctgatgaggagtgtttccaacacaggctacatgaattcccctataccagtgcgaaagcagccaggagtccccgttggaaaagaacaatgccactctcttttatgtatcttggttctgcaactcatttgttgtaagtagggttaatcgagtatcaggttcacagtatcctgcccttattattttatgattcactgactcaagttccacgaagtccttagaaatggacctcttcatgtaaaatatcttgagaataataaatgtgagggaataagaaaggcaagctttggacacagatatgataggtgcatcagcttcggaagagaagaatgatgtgcagagtgttaggaagacatccgggctgctgagactcgggattagaagaaagagaggtaaataaagtgggtcctggaatcttttaggacttctgctgtaggacaaacagctgcctttggtgttttaatgtctcccaaagtacccttcagccaataaataccatctgttggtgcaa

SEQ ID NO: 430188 - DNA, 2447 bp, Homo sapiens
agtcacatgctgcccaggctgcgcgggtgattggcttggctggacctgaatgatgcggctgtgattgctgaattgtctgggcaggtttggagtctctggcaagctcccctgactgtgcatccctctggagacgaagaggagggggaggcctgtcctctctgggatccattggtcacatccccctgaggattcccgaatgcctacctccagtgtcgtcaacatggagttctgaagtccatgtggctcttcacagtgaatcaggtgttaaggaagatgcagagacgccacagcagcaacacggataacattccacctgaaagctgtgaccaaggctggcccctctggggaactgggggccattgaacttgaagactgcagagccagcggtccttgggatcccgagaaaccgcagccaggcgctcagctccgaggcgagtgtggatgaaggtggcgtctttgagagtctgaaggcagaggcagcctccccaccagcgctcttctcgggcttatcaggcagcctccccaccagctcgttcccctccagcctggtgctgggctcctcggctggcggcggggacgtgttcatccagatgcccgcgtccagggaggaaggagggggccggggcgaggggggcgcctaccaccaccgccagccccaccaccatttccaccatggcggccaccgcgggggctccctgctgcagcacgtgggtggggaccaccgggggcactcggaggagggaggcgacgagcagcctgggacgcccgcccccgccctgtccgagctgaaggctgtgatctgctggctccagaaaggactccccttcatcctgatcctcctggccaaactgtgctttcagcataagctcggcattgctgtgtgcatcgggatggccagcaccttcgcctatgccaactccacgcttcgagaacaggtctcactgaaggagaagaggtcagtgctggtcatcttgtggatcctggcctttctggcggggaacaccctctatgtgctttatacattcagctcccagcagctgtacaacagcctcatattcctgaagcccaacctggagatgctggacttctttgacctgctatggattgtggggatcgcagactttgttctgaagtacatcaccatcgccctcaagtgcctcatcgtggccctgcccaagatcatcctggccgtcaagtccaagggaaagttctatctggtcatcgaggagctgagccagctgttccgatcccttgtccccatccagctgtggtacaaatacatcatgggtgacgactcctccaacagctacttcctgggcggggtcctgatcgttctctacagcctctgcaagtccttcgacatctgtggacgtgtgggcggagttaggaaagccctgaagcttctctgtacctctcagaactatggagtccgagccaccgggcagcagtgcacagaagctggtgacatctgcgccatctgtcaggccgagttccgagagcctctgattctcctgtgccagatgctgttgaaggggcacaagaaattggagctggagaagattgatgaaagtgcaggtgtgtaaggaaatagaacagtctgctgggagtcagacctggaattctgattccaaactctttattactttgggaagtcactcagcctccccgtagccatctccagggtgacggaacccagtgtattacctgctggaaccaaggaaactaacaatgtaggttactagtgaataccccaatggtttctccaattatgcccatgccaccaaaacaataaaacaaaattctctaacactgcaaagagtgagccatgcctgttaacactgtaaagaatgtaacatgtgggggacacacaggggcagatgggatggtttagtttaggattttattagtgcatgccctaccctctgggggaacgtcccatctgaggttttcttctcggtggggggatttaacttctgtcctagggaaaacagtgtctgatgaggagtgtttccaacacaggctacatgaattcccctataccagtgcgaaagcagccaggagtccccgttggaaaagaacaatgccactctcttttatgtatcttggttctgcaactcatttgttgtaagtagggttaatcgagtatcaggttcacagtatcctgcccttattattttatgattcactgactcaagttccacgaagtccttagaaatggacctcttcatacagatatgataggtgcatcagcttcggaagagaagaatgatgtgcagagtgttaggaagacatccgggctgctgagactcgggattagaagaaagagaggtaaataaagtgggtcctggaatcttttaggacttctgctgtaggacaaacagctgcctttggtgttttaatgtctcccaaagtacccttcagccaataaataccatctgttggtgcaa

SEQ ID NO: 430189 - DNA, 1263 bp, Homo sapiens
  misc_feature (1149)..(1149): n is a, c, g, or t
agtcacatgctgcccaggctgcgcgggtgattggcttggctggacctgaatgatgcggctgtgattgctgaattgtctgggcaggtttggagtctctggcaagctcccctgactgtgcatccctctggagacgaagaggagggggaggcctgtcctctctgggatccattggtcacatccccctgaggattcccgaatgcctacctccagtgtcgtcaacatggagttctgaagtccatgtggctcttcacagtgaatcaggtgttaaggaagatgcagagacgccacagcagcaacacggataacattccacctgaaagaaaccgcagccaggcgctcagctccgaggcgagtgtggatgaaggtggcgtctttgagagtctgaaggcagaggcagcctccccaccagcgctcttctcgggcttatcaggcagcctccccaccagctcgttcccctccagcctggtgctgggctcctcggctggcggcggggacgtgttcatccagatgcccgcgtccagggaggaaggagggggccggggcgaggggggcgcctaccaccaccgccagccccaccaccatttccaccatggcggccaccgcgggggctccctgctgcagcacgtgggtggggaccaccgggggcactcggaggagggaggcgacgagcagcctgggacgcccgcccccgccctgtccgagctgaaggctgtgatctgctggctccagaaaggactccccttcatcctgatcctcctggccaaactgtgctttcagcataagctcggcattgctgtgtgcatcgggatggccagcaccttcgcctatgccaactccacgcttcgagaacaggtctcactgaaggagaagaggtcagtgctggtcatcttgtggatcctggcctttctggcggggaacaccctctatgtgctttatacattcagctcccagcagctgtacaacagcctcatattcctgaagcccaacctggagatgctggacttctttgacctgctatggattgtggggatcgcagactttgttctgaagtacatcaccatcgccctcaagtgcctcatcgtggccctgcccaagatcatcctggccgtcaagtccaaggtaggcactggctgcggccacaaggtagcntaccagttttaaatgtcgtcagattttccattatgtattgattttgcaacttaggatgtttttgagtcccatggttcattttgattgtttaatctttgttattaaattcttgta

SEQ ID NO: 430190 - DNA, 4416 bp, Homo sapiens
ttcttaaccctttccagctttcccaccctctttggctttagccatggccttctgatctgtgtttctcaggggacctgcaggccccagatatagccccatgctgtcctcctaccccagagcacactgttcaggctacttccactggtactgaaatccagtatttcacttactcttttcctttccaatatcctcatgacattcaatatttcacttactctaggtcctccctgcctaaggcccaagtcaactttctgtccagtgggatttgtaatccaatgcctcctagccctagcagaatcccatgtggataatcagaaatgtgactggaaaaaggacagagctctatggctgtgggtcccagtccccactgctggcagtaagtccccagcagtgagctgtgtaagcaccttacattctgcgcttggttgaaaacagcaaggcaagcatccacttgagaaatgtcaacccctaggaaatcccagcctcaagtctttctcatcccttgggaagtgcaaattggatagagaagaaaccaattaaaaacaaaacaaacaaatcatacttagatattctggcttttctcaccagggctggattaaagcatgtacttcaaaataataacaacttaagtcaataaataaatgtaaggaagtccaaatgttcacctgaagacaactgtggtcattttttggcaatcccaggttctcttttctacctgtttgctcaatcgtggtctccctctccctctcttgttggggcccatgcccctgctttactgttgccagaggcttgtacttgtttgccttttaggtaggagcagttacttccactcccctcacctgccataaagcatctttataaacaaagcaagtagaagaaacacatcctggtatccaccacattcggcttttgttgattctgttcacttgggagcacctgctgctagggaataagaaggttgaggctgaagagtgaggactcttcagctcccctctggcaggacccgggagaggaaagagccctcagctggtccatcctccccactcctggtcagccttctgttctgagatcaaagtggtggggtcacattctcgagaactgtgctcagccccctcatctcacaccctttccctctccctgtgtgcctgcccccctcttacataaccatgctggtgattggcaccgtcataaatcaatactttgctcactttcacatcaagtaacactatccagggaggtggtttcaacaaaggaggaagtataaggagatctaggttcaaattaatgttgcccctagtggtaaaggacagagaccctcagactgatgaaatgcactcagaattacttagacaaagcggatatttgccactctcttccccttttcctgtgtttttgtagtgaagagacctgaaagaaaaaagtagggagaacataatgagaacaaatacggtaatctcttcatttgctagttcaagtgctggacttgggacttaggaggggcaatggagccgcttagtgcctacatctgacttggactgaaatataggtgagagacaagattgtctcatatccggggaaatcataacctatgactaggacgggaagaggaagcactgcctttacttcagtgggaatctcggcctcagcctgcaagccaagtgttcacagtgagaaaagcaagagaataagctaatactcctgtcctgaacaaggcagcggctccttggtaaagctactccttgatcgatcctttgcaccggattgttcaaagtggaccccaggggagaagtcggagcaaagaacttaccaccaagcagtccaagaggcccagaagcaaacctggaggtgagacccaaagaaagctggaaccatgctgactttgtacactgtgaggacacagagtctgttcctggaaagcccagtgtcaacgcagatgaggaagtcggaggtccccaaatctgccgtgtatgtggggacaaggccactggctatcacttcaatgtcatgacatgtgaaggatgcaagggctttttcaggagggccatgaaacgcaacgcccggctgaggtgccccttccggaagggcgcctgcgagatcacccggaagacccggcgacagtgccaggcctgccgcctgcgcaagtgcctggagagcggcatgaagaaggagatgatcatgtccgacgaggccgtggaggagaggcgggccttgatcaagcggaagaaaagtgaacggacagggactcagccactgggagtgcaggggctgacagaggagcagcggatgatgatcagggagctgatggacgctcagatgaaaacctttgacactaccttctcccatttcaagaatttccggctgccaggggtgcttagcagtggctgcgagttgccagagtctctgcaggccccatcgagggaagaagctgccaagtggagccaggtccggaaagatctgtgctctttgaaggtctctctgcagctgcggggggaggatggcagtgtctggaactacaaacccccagccgacagtggcgggaaagagatcttctccctgctgccccacatggctgacatgtcaacctacatgttcaaaggcatcatcagctttgccaaagtcatctcctacttcagggacttgcccatcgaggaccagatctccctgctgaagggggccgctttcgagctgtgtcaactgagattcaacacagtgttcaacgcggagactggaacctgggagtgtggccggctgtcctactgcttggaagacactgcaggtggcttccagcaacttctactggagcccatgctgaaattccactacatgctgaagaagctgcagctgcatgaggaggagtatgtgctgatgcaggccatctccctcttctccccagaccgcccaggtgtgctgcagcaccgcgtggtggaccagctgcaggagcaattcgccattactctgaagtcctacattgaatgcaatcggccccagcctgctcataggttcttgttcctgaagatcatggctatgctcaccgagctccgcagcatcaatgctcagcacacccagcggctgctgcgcatccaggacatacacccctttgctacgcccctcatgcaggagttgttcggcatcacaggtagctgagcggctgcccttgggtgacacctccgagaggcagccagacccagagccctctgagccgccactcccgggccaagacagatggacactgccaagagccgacaatgccctgctggcctgtctccctagggaattcctgctatgacagctggctagcattcctcaggaaggacatgggtgccccccacccccagttcagtctgtagggagtgaagccacagactcttacgtggagagtgcactgacctgtaggtcaggaccatcagagaggcaaggttgccctttccttttaaaaggccctgtggtctggggagaaatccctcagatcccactaaagtgtcaaggtgtggaagggaccaagcgaccaaggataggccatctggggtctatgcccacatacccacgtttgttcgcttcctgagtcttttcattgctacctctaatagtcctgtctcccacttcccactcgttcccctcctcttccgagctgctttgtgggctccaggcctgtactcatcggcaggtgcatgagtatctgtgggagtcctctagagagatgagaagccaggaggcctgcaccaaatgtcagaagcttggcatgacctcattccggccacatcattctgtgtctctgcatccatttgaacacattattaagcaccgataataggtagcctgctgtggggtatacagcattgactcagatatagatcctgagctcacagagtttatagttaaaaaaacaaacagaaacacaaacaatttggatcaaaaggagaaatgataagtgacaaaagcagcacaaggaatttccctgtgtggatgctgagctgtgatggcgggcactgggtacccaagtgaaggttcccgaggacatgagtctgtaggagcaagggcacaaactgcagctgtgagtgcgtgtgtgtgatttggtgtaggtaggtctgtttgccacttgatggggcctgggtttgttcctggggctggaatgctgggtatgctctgtgacaaggctacgctgacaatcagttaaacacaccggagaagaaccatttacatgcaccttatatttctgtgtacacatctattctcaaagctaaagggtatgaaagtgcctgccttgtttatagccacttgtgagtaaaaatttttttgcattttcacaaattatactttatataaggcattccacacctaagaactagttttgggaaatgtagccctgggtttaatgtcaaatcaaggcaaaaggaattaaataatgtacttttggct

SEQ ID NO: 430191 - DNA, 4305 bp, Homo sapiens
ttcttaaccctttccagctttcccaccctctttggctttagccatggccttctgatctgtgtttctcaggggacctgcaggccccagatatagccccatgctgtcctcctaccccagagcacactgttcaggctacttccactggtactgaaatccagtatttcacttactcttttcctttccaatatcctcatgacattcaatatttcacttactctaggtcctccctgcctaaggcccaagtcaactttctgtccagtgggatttgtaatccaatgcctcctagccctagcagaatcccatgtggataatcagaaatgtgactggaaaaaggacagagctctatggctgtgggtcccagtccccactgctggcagtaagtccccagcagtgagctgtgtaagcaccttacattctgcgcttggttgaaaacagcaaggcaagcatccacttgagaaatgtcaacccctaggaaatcccagcctcaagtctttctcatcccttgggaagtgcaaattggatagagaagaaaccaattaaaaacaaaacaaacaaatcatacttagatattctggcttttctcaccagggctggattaaagcatgtacttcaaaataataacaacttaagtcaataaataaatgtaaggaagtccaaatgttcacctgaagacaactgtggtcattttttggcaatcccaggttctcttttctacctgtttgctcaatcgtggtctccctctccctctcttgttggggcccatgcccctgctttactgttgccagaggcttgtacttgtttgccttttaggtaggagcagttacttccactcccctcacctgccataaagcatctttataaacaaagcaagtagaagaaacacatcctggtatccaccacattcggcttttgttgattctgttcacttgggagcacctgctgctagggaataagaaggttgaggctgaagagtgaggactcttcagctcccctctggcaggacccgggagaggaaagagccctcagctggtccatcctccccactcctggtcagccttctgttctgagatcaaagtggtggggtcacattctcgagaactgtgctcagccccctcatctcacaccctttccctctccctgtgtgcctgcccccctcttacataaccatgctggtgattggcaccgtcataaatcaatactttgctcactttcacatcaagtaacactatccagggaggtggtttcaacaaaggaggaagtataaggagatctaggttcaaattaatgttgcccctagtggtaaaggacagagaccctcagactgatgaaatgcactcagaattacttagacaaagcggatatttgccactctcttccccttttcctgtgtttttgtagtgaagagacctgaaagaaaaaagtagggagaacataatgagaacaaatacggtaatctcttcatttgctagttcaagtgctggacttgggacttaggaggggcaatggagccgcttagtgcctacatctgacttggactgaaatataggtgagagacaagattgtctcatatccggggaaatcataacctatgactaggacgggaagaggaagcactgcctttacttcagtgggaatctcggcctcagcctgcaagccaagtgttcacagtgagaaaagcaagagaataagctaatactcctgtcctgaacaaggcagcggctccttggtaaagctactccttgatcgatcctttgcaccggattgttcaaagtggaccccaggggagaagtcggagcaaagaacttaccaccaagcagtccaagaggcccagaagcaaacctggaggtgagacccaaagaaagctggaaccatgctgactttgtacactgtgaggacacagagtctgttcctggaaagcccagtgtcaacgcagatgaggaagtcggaggtccccaaatctgccgtgtatgtggggacaaggccactggctatcacttcaatgtcatgacatgtgaaggatgcaagggctttttcaggagggccatgaaacgcaacgcccggctgaggtgccccttccggaagggcgcctgcgagatcacccggaagacccggcgacagtgccaggcctgccgcctgcgcaagtgcctggagagcggcatgaagaaggagatgatcatgtccgacgaggccgtggaggagaggcgggccttgatcaagcggaagaaaagtgaacggacagggactcagccactgggagtgcaggggctgacagaggagcagcggatgatgatcagggagctgatggacgctcagatgaaaacctttgacactaccttctcccatttcaagaatttccgggtctctctgcagctgcggggggaggatggcagtgtctggaactacaaacccccagccgacagtggcgggaaagagatcttctccctgctgccccacatggctgacatgtcaacctacatgttcaaaggcatcatcagctttgccaaagtcatctcctacttcagggacttgcccatcgaggaccagatctccctgctgaagggggccgctttcgagctgtgtcaactgagattcaacacagtgttcaacgcggagactggaacctgggagtgtggccggctgtcctactgcttggaagacactgcaggtggcttccagcaacttctactggagcccatgctgaaattccactacatgctgaagaagctgcagctgcatgaggaggagtatgtgctgatgcaggccatctccctcttctccccagaccgcccaggtgtgctgcagcaccgcgtggtggaccagctgcaggagcaattcgccattactctgaagtcctacattgaatgcaatcggccccagcctgctcataggttcttgttcctgaagatcatggctatgctcaccgagctccgcagcatcaatgctcagcacacccagcggctgctgcgcatccaggacatacacccctttgctacgcccctcatgcaggagttgttcggcatcacaggtagctgagcggctgcccttgggtgacacctccgagaggcagccagacccagagccctctgagccgccactcccgggccaagacagatggacactgccaagagccgacaatgccctgctggcctgtctccctagggaattcctgctatgacagctggctagcattcctcaggaaggacatgggtgccccccacccccagttcagtctgtagggagtgaagccacagactcttacgtggagagtgcactgacctgtaggtcaggaccatcagagaggcaaggttgccctttccttttaaaaggccctgtggtctggggagaaatccctcagatcccactaaagtgtcaaggtgtggaagggaccaagcgaccaaggataggccatctggggtctatgcccacatacccacgtttgttcgcttcctgagtcttttcattgctacctctaatagtcctgtctcccacttcccactcgttcccctcctcttccgagctgctttgtgggctccaggcctgtactcatcggcaggtgcatgagtatctgtgggagtcctctagagagatgagaagccaggaggcctgcaccaaatgtcagaagcttggcatgacctcattccggccacatcattctgtgtctctgcatccatttgaacacattattaagcaccgataataggtagcctgctgtggggtatacagcattgactcagatatagatcctgagctcacagagtttatagttaaaaaaacaaacagaaacacaaacaatttggatcaaaaggagaaatgataagtgacaaaagcagcacaaggaatttccctgtgtggatgctgagctgtgatggcgggcactgggtacccaagtgaaggttcccgaggacatgagtctgtaggagcaagggcacaaactgcagctgtgagtgcgtgtgtgtgatttggtgtaggtaggtctgtttgccacttgatggggcctgggtttgttcctggggctggaatgctgggtatgctctgtgacaaggctacgctgacaatcagttaaacacaccggagaagaaccatttacatgcaccttatatttctgtgtacacatctattctcaaagctaaagggtatgaaagtgcctgccttgtttatagccacttgtgagtaaaaatttttttgcattttcacaaattatactttatataaggcattccacacctaagaactagttttgggaaatgtagccctgggtttaatgtcaaatcaaggcaaaaggaattaaataatgtacttttggct

SEQ ID NO: 430192 - DNA, 2752 bp, Homo sapiens
  misc_feature (4)..(4): n is a, c, g, or t
  misc_feature (6)..(6): n is a, c, g, or t
  misc_feature (8)..(8): n is a, c, g, or t
  misc_feature (10)..(10): n is a, c, g, or t
tgantncntnggcctgctgggttagtgctggcagccccctgaggccaaggacagcagcatgacagtcaccaggactcaccacttcaaggaggggtccctcagagcacctgccatacccctgcacagtgctgcggctgagttggcttcaaaccatccaagaggcccagaagcaaacctggaggtgagacccaaagaaagctggaaccatgctgactttgtacactgtgaggacacagagtctgttcctggaaagcccagtgtcaacgcagatgaggaagtcggaggtccccaaatctgccgtgtatgtggggacaaggccactggctatcacttcaatgtcatgacatgtgaaggatgcaagggctttttcaggagggccatgaaacgcaacgcccggctgaggtgccccttccggaagggcgcctgcgagatcacccggaagacccggcgacagtgccaggcctgccgcctgcgcaagtgcctggagagcggcatgaagaaggagatgatcatgtccgacgaggccgtggaggagaggcgggccttgatcaagcggaagaaaagtgaacggacagggactcagccactgggagtgcaggggctgacagaggagcagcggatgatgatcagggagctgatggacgctcagatgaaaacctttgacactaccttctcccatttcaagaatttccggctgccaggggtgcttagcagtggctgcgagttgccagagtctctgcaggccccatcgagggaagaagctgccaagtggagccaggtccggaaagatctgtgctctttgaaggtctctctgcagctgcggggggaggatggcagtgtctggaactacaaacccccagccgacagtggcgggaaagagatcttctccctgctgccccacatggctgacatgtcaacctacatgttcaaaggcatcatcagctttgccaaagtcatctcctacttcagggacttgcccatcgaggaccagatctccctgctgaagggggccgctttcgagctgtgtcaactgagattcaacacagtgttcaacgcggagactggaacctgggagtgtggccggctgtcctactgcttggaagacactgcaggtggcttccagcaacttctactggagcccatgctgaaattccactacatgctgaagaagctgcagctgcatgaggaggagtatgtgctgatgcaggccatctccctcttctccccagaccgcccaggtgtgctgcagcaccgcgtggtggaccagctgcaggagcaattcgccattactctgaagtcctacattgaatgcaatcggccccagcctgctcataggttcttgttcctgaagatcatggctatgctcaccgagctccgcagcatcaatgctcagcacacccagcggctgctgcgcatccaggacatacacccctttgctacgcccctcatgcaggagttgttcggcatcacaggtagctgagcggctgcccttgggtgacacctccgagaggcagccagacccagagccctctgagccgccactcccgggccaagacagatggacactgccaagagccgacaatgccctgctggcctgtctccctagggaattcctgctatgacagctggctagcattcctcaggaaggacatgggtgccccccacccccagttcagtctgtagggagtgaagccacagactcttacgtggagagtgcactgacctgtaggtcaggaccatcagagaggcaaggttgccctttccttttaaaaggccctgtggtctggggagaaatccctcagatcccactaaagtgtcaaggtgtggaagggaccaagcgaccaaggataggccatctggggtctatgcccacatacccacgtttgttcgcttcctgagtcttttcattgctacctctaatagtcctgtctcccacttcccactcgttcccctcctcttccgagctgctttgtgggctccaggcctgtactcatcggcaggtgcatgagtatctgtgggagtcctctagagagatgagaagccaggaggcctgcaccaaatgtcagaagcttggcatgacctcattccggccacatcattctgtgtctctgcatccatttgaacacattattaagcaccgataataggtagcctgctgtggggtatacagcattgactcagatatagatcctgagctcacagagtttatagttaaaaaaacaaacagaaacacaaacaatttggatcaaaaggagaaatgataagtgacaaaagcagcacaaggaatttccctgtgtggatgctgagctgtgatggcgggcactgggtacccaagtgaaggttcccgaggacatgagtctgtaggagcaagggcacaaactgcagctgtgagtgcgtgtgtgtgatttggtgtaggtaggtctgtttgccacttgatggggcctgggtttgttcctggggctggaatgctgggtatgctctgtgacaaggctacgctgacaatcagttaaacacaccggagaagaaccatttacatgcaccttatatttctgtgtacacatctattctcaaagctaaagggtatgaaagtgcctgccttgtttatagccacttgtgagtaaaaatttttttgcattttcacaaattatactttatataaggcattccacacctaagaactagttttgggaaatgtagccctgggtttaatgtcaaatcaaggcaaaaggaattaaataatgtacttttggct

SEQ ID NO: 430193 - DNA, 4362 bp, Homo sapiens
ttcttaaccctttccagctttcccaccctctttggctttagccatggccttctgatctgtgtttctcaggggacctgcaggccccagatatagccccatgctgtcctcctaccccagagcacactgttcaggctacttccactggtactgaaatccagtatttcacttactcttttcctttccaatatcctcatgacattcaatatttcacttactctaggtcctccctgcctaaggcccaagtcaactttctgtccagtgggatttgtaatccaatgcctcctagccctagcagaatcccatgtggataatcagaaatgtgactggaaaaaggacagagctctatggctgtgggtcccagtccccactgctggcagtaagtccccagcagtgagctgtgtaagcaccttacattctgcgcttggttgaaaacagcaaggcaagcatccacttgagaaatgtcaacccctaggaaatcccagcctcaagtctttctcatcccttgggaagtgcaaattggatagagaagaaaccaattaaaaacaaaacaaacaaatcatacttagatattctggcttttctcaccagggctggattaaagcatgtacttcaaaataataacaacttaagtcaataaataaatgtaaggaagtccaaatgttcacctgaagacaactgtggtcattttttggcaatcccaggttctcttttctacctgtttgctcaatcgtggtctccctctccctctcttgttggggcccatgcccctgctttactgttgccagaggcttgtacttgtttgccttttaggtaggagcagttacttccactcccctcacctgccataaagcatctttataaacaaagcaagtagaagaaacacatcctggtatccaccacattcggcttttgttgattctgttcacttgggagcacctgctgctagggaataagaaggttgaggctgaagagtgaggactcttcagctcccctctggcaggacccgggagaggaaagagccctcagctggtccatcctccccactcctggtcagccttctgttctgagatcaaagtggtggggtcacattctcgagaactgtgctcagccccctcatctcacaccctttccctctccctgtgtgcctgcccccctcttacataaccatgctggtgattggcaccgtcataaatcaatactttgctcactttcacatcaagtaacactatccagggaggtggtttcaacaaaggaggaagtataaggagatctaggttcaaattaatgttgcccctagtggtaaaggacagagaccctcagactgatgaaatgcactcagaattacttagacaaagcggatatttgccactctcttccccttttcctgtgtttttgtagtgaagagacctgaaagaaaaaagtagggagaacataatgagaacaaatacggtaatctcttcatttgctagttcaagtgctggacttgggacttaggaggggcaatggagccgcttagtgcctacatctgacttggactgaaatataggtgagagacaagattgtctcatatccggggaaatcataacctatgactaggacgggaagaggaagcactgcctttacttcagtgggaatctcggcctcagcctgcaagccaagtgttcacagtgagaaaagcaagagaataagctaatactcctgtcctgaacaaggcagcggctccttggtaaagctactccttgatcgatcctttgcaccggattgttcaaagtggaccccaggggagaagtcggagcaaagaacttaccaccaagcagtccaagaggcccagaagcaaacctggaggtgagacccaaagaaagctggaaccatgctgactttgtacactgtgaggacacagagtctgttcctggaaagcccagtgtcaacgcagatgaggaagtcggaggtccccaaatctgccgtgtatgtggggacaaggccactggctatcacttcaatgtcatgacatgtgaaggatgcaagggctttttcaggagggccatgaaacgcaacgcccggctgaggtgccccttccggaagggcgcctgcgagatcacccggaagacccggcgacagtgccaggcctgccgcctgcgcaagtgcctggagagcggcatgaagaaggagatgatcatgtccgacgaggccgtggaggagaggcgggccttgatcaagcggaagaaaagtgaacggacagggactcagccactgggagtgcaggggctgacagaggagcagcggatgatgatcagggagctgatggacgctcagatgaaaacctttgacactaccttctcccatttcaagaatttccggctgccaggggtgcttagcagtggctgcgagttgccagagtctctgcaggccccatcgagggaagaagctgccaagtggagccaggtccggaaagatctgtgctctttgaaggtctctctgcagctgcggggggaggatggcagtgtctggaactacaaacccccagccgacagtggcgggaaagagatcttctccctgctgccccacatggctgacatgtcaacctacatgttcaaaggcatcatcagctttgccaaagtcatctcctacttcagggacttgcccatcgaggaccagatctccctgctgaagggggccgctttcgagctgtgtcaactgagattcaacacagtgttcaacgcggagactggaacctgggagtgtggccggctgtcctactgcttggaagacactgcaggtggcttccagcaacttctactggagcccatgctgaaattccactacatgctgaagaagctgcagctgcatgaggaggagtatgtgctgatgcaggccatctccctcttctccccagaccgcccaggtgtgctgcagcaccgcgtggtggaccagctgcaggagcaattcgccattactctgaagtcctacattgaatgcaatcggccccagcctgctcataggttcttgttcctgaagatcatggctatgctcaccgagctccgcagcatcaatgctcagcacacccagcggctgctgcgcatccaggacatacacccctttgctacgcccctcatgcaggagttgttcggcatcacaggtagctgagcggctgcccttgggtgacacctccgagaggcagccagacccagagccctctgagccgccactcccgggccaagacagatggacactgccaagagccgacaatgccctgctggcctgtctccctagggaattcctgctatgacagctggctagcattcctcaggaaggacatgggtgccccccacccccagttcagtctgtagggagtgaagccacagactcttacgtggagagtgcactgacctgtaggtcaggaccatcagagaggcaaggttgccctttccttttaaaaggccctgtggtctggggagaaatccctcagatcccactaaagtgtcaaggtgtggaagggaccaagcgaccaaggataggccatctggggtctatgcccacatacccacgtttgttcgcttcctgagtcttttcattgctacctctaatagtcctgtctcccacttcccactcgttcccctcctcttccgagctgctttgtgggctccaggcctgtactcatcggcaggtgcatgagtatctgtgggagtcctctagagagatgagaagccaggaggcctgcaccaaatgtcagaagcttggcatgacctcattccggccacatcattctgtgtctctgcatccatttgaacacattattaagcaccgataataggtagcctgctgtggggtatacagcattgactcagatatagatcctgagctcacagagtttatagttaaaaaaacaaacagaaacacaaacaatttggatcaaaaggagaaatgataagtgacagggtacccaagtgaaggttcccgaggacatgagtctgtaggagcaagggcacaaactgcagctgtgagtgcgtgtgtgtgatttggtgtaggtaggtctgtttgccacttgatggggcctgggtttgttcctggggctggaatgctgggtatgctctgtgacaaggctacgctgacaatcagttaaacacaccggagaagaaccatttacatgcaccttatatttctgtgtacacatctattctcaaagctaaagggtatgaaagtgcctgccttgtttatagccacttgtgagtaaaaatttttttgcattttcacaaattatactttatataaggcattccacacctaagaactagttttgggaaatgtagccctgggtttaatgtcaaatcaaggcaaaaggaattaaataatgtacttttggct

SEQ ID NO: 430194 - DNA, 2309 bp, Homo sapiens
ttcttaaccctttccagctttcccaccctctttggctttagccatggccttctgatctgtgtttctcaggggacctgcaggccccagatatagccccatgctgtcctcctaccccagagcacactgttcaggctacttccactggtactgaaatccagtatttcacttactcttttcctttccaatatcctcatgacattcaatatttcacttactctaggtcctccctgcctaaggcccaagtcaactttctgtccagtgggatttgtaatccaatgcctcctagccctagcagaatcccatgtggataatcagaaatgtgactggaaaaaggacagagctctatggctgtgggtcccagtccccactgctggcagtaagtccccagcagtgagctgtgtaagcaccttacattctgcgcttggttgaaaacagcaaggcaagcatccacttgagaaatgtcaacccctaggaaatcccagcctcaagtctttctcatcccttgggaagtgcaaattggatagagaagaaaccaattaaaaacaaaacaaacaaatcatacttagatattctggcttttctcaccagggctggattaaagcatgtacttcaaaataataacaacttaagtcaataaataaatgtaaggaagtccaaatgttcacctgaagacaactgtggtcattttttggcaatcccaggttctcttttctacctgtttgctcaatcgtggtctccctctccctctcttgttggggcccatgcccctgctttactgttgccagaggcttgtacttgtttgccttttaggtaggagcagttacttccactcccctcacctgccataaagcatctttataaacaaagcaagtagaagaaacacatcctggtatccaccacattcggcttttgttgattctgttcacttgggagcacctgctgctagggaataagaaggttgaggctgaagagtgaggactcttcagctcccctctggcaggacccgggagaggaaagagccctcagctggtccatcctccccactcctggtcagccttctgttctgagatcaaagtggtggggtcacattctcgagaactgtgctcagccccctcatctcacaccctttccctctccctgtgtgcctgcccccctcttacataaccatgctggtgattggcaccgtcataaatcaatactttgctcactttcacatcaagtaacactatccagggaggtggtttcaacaaaggaggaagtataaggagatctaggttcaaattaatgttgcccctagtggtaaaggacagagaccctcagactgatgaaatgcactcagaattacttagacaaagcggatatttgccactctcttccccttttcctgtgtttttgtagtgaagagacctgaaagaaaaaagtagggagaacataatgagaacaaatacggtaatctcttcatttgctagttcaagtgctggacttgggacttaggaggggcaatggagccgcttagtgcctacatctgacttggactgaaatataggtgagagacaagattgtctcatatccggggaaatcataacctatgactaggacgggaagaggaagcactgcctttacttcagtgggaatctcggcctcagcctgcaagccaagtgttcacagtgagaaaagcaagagaataagctaatactcctgtcctgaacaaggcagcggctccttggtaaagctactccttgatcgatcctttgcaccggattgttcaaagtggaccccaggggagaagtcggagcaaagaacttaccaccaagcagtccaagaggcccagaagcaaacctggaggtgagacccaaagaaagctggaaccatgctgactttgtacactgtgaggacacagagtctgttcctggaaagcccagtgtcaacgcagatgaggaagtcggaggtccccaaatctgccgtgtatgtggggacaaggccactggctatcacttcaatgtcatgacatgtgaaggatgcaagggctttttcaggtagagttacccatcagccttcacccacgtgccaccactgacccactgggtaacatctcagggcctcagcttgacctatcccccaggttcagagtgtgggctggtggcccacccaaaggccttgtaattagtctcaagggagccatttatatcccagaggaatccttcatcttcagtcttcctgttctacccaggaaaggtctccttccattaagatatcccttggtttctccatgtgctcttgaataaaatggaaaatgactcagtgaaaga

SEQ ID NO: 430195 - DNA, 2433 bp, Homo sapiens
ttcttaaccctttccagctttcccaccctctttggctttagccatggccttctgatctgtgtttctcaggggacctgcaggccccagatatagccccatgctgtcctcctaccccagagcacactgttcaggctacttccactggtactgaaatccagtatttcacttactcttttcctttccaatatcctcatgacattcaatatttcacttactctaggtcctccctgcctaaggcccaagtcaactttctgtccagtgggatttgtaatccaatgcctcctagccctagcagaatcccatgtggataatcagaaatgtgactggaaaaaggacagagctctatggctgtgggtcccagtccccactgctggcagtaagtccccagcagtgagctgtgtaagcaccttacattctgcgcttggttgaaaacagcaaggcaagcatccacttgagaaatgtcaacccctaggaaatcccagcctcaagtctttctcatcccttgggaagtgcaaattggatagagaagaaaccaattaaaaacaaaacaaacaaatcatacttagatattctggcttttctcaccagggctggattaaagcatgtacttcaaaataataacaacttaagtcaataaataaatgtaaggaagtccaaatgttcacctgaagacaactgtggtcattttttggcaatcccaggttctcttttctacctgtttgctcaatcgtggtctccctctccctctcttgttggggcccatgcccctgctttactgttgccagaggcttgtacttgtttgccttttaggtaggagcagttacttccactcccctcacctgccataaagcatctttataaacaaagcaagtagaagaaacacatcctggtatccaccacattcggcttttgttgattctgttcacttgggagcacctgctgctagggaataagaaggttgaggctgaagagtgaggactcttcagctcccctctggcaggacccgggagaggaaagagccctcagctggtccatcctccccactcctggtcagccttctgttctgagatcaaagtggtggggtcacattctcgagaactgtgctcagccccctcatctcacaccctttccctctccctgtgtgcctgcccccctcttacataaccatgctggtgattggcaccgtcataaatcaatactttgctcactttcacatcaagtaacactatccagggaggtggtttcaacaaaggaggaagtataaggagatctaggttcaaattaatgttgcccctagtggtaaaggacagagaccctcagactgatgaaatgcactcagaattacttagacaaagcggatatttgccactctcttccccttttcctgtgtttttgtagtgaagagacctgaaagaaaaaagtagggagaacataatgagaacaaatacggtaatctcttcatttgctagttcaagtgctggacttgggacttaggaggggcaatggagccgcttagtgcctacatctgacttggactgaaatataggtgagagacaagattgtctcatatccggggaaatcataacctatgactaggacgggaagaggaagcactgcctttacttcagtgggaatctcggcctcagcctgcaagccaagtgttcacagtgagaaaagcaagggcacaaactgcagctgtgagtgcgtgtgtgtgatttggtgtaggtaggtctgtttgccacttgatggggcctgggtttgttccttgggcactgggtacccaagtgaaggttcccgaggacatgagtctgtaggagcaagggcacaaactgcatgagtatctgtgggagtcctctagagagatgagaagccaggaggcctgcaccaaatgtcagaagcttggcatgacctcattccggccacatcattctgtgtctctgcatccatttgaacacattattaagcaccgataataggtagcctgctgtggggtatacagcattgactcagatatagatcctgagctcacagagtttatagttaaaaaaacaaacagaaacacaaacaatttggatcaaaaggagaaatgataagtgacaaaagcagcacaaggaatttccctgtgtggatgctgagctgtgatggcgggcactgtatgctctgtgacaaggctacgctgacaatcagttaaacacaccggagaagaaccatttacatgcaccttatatttctgtgtacacatctattctcaaagctaaagggtatgaaagtgcctgccttgtttatagccacttgtgagtaaaaatttttttgcattttcacaaattatactttatataaggcattccacacctaagaactagttttgggaaatgtagccctgggtttaatgtcaaatcaaggcaaaaggaattaaataatgtacttttggct

SEQ ID NO: 430196 - DNA, 1085 bp, Homo sapiens
gctcttaaaaattagttaaacatccaccctgtcagctaatttaccctatttatgtgctcaacaaactttttgaaaactaaagtctaccccactttttagttatacattcttatttaacagagtttaatatttattcagttgtgttcttatttaaagccattatacctaaaatacttacgttataagcatatctagtatttaagataataaaaatattaatgctgaatgtgtgatcttgcacttatttccctactgccacaactcagatgagaggccagatggagtctcatctgaaggagttagagcgtgtctgcgattccttgacggcggcggaacggaggcttcacgagtgtcaggagagtctgcagtgctgcaaggggaagtgtgcagaccaggaacacaccattagggagcttcagggccaggtgtccagccgtccttctgagttttgctagatgcgttaaaagaatgctttggaatgatttcaccagttgagggcactcatgtcagggcttgatttttaaattcccatctacttagttcgtaaaacatcattttcatgcagatactataatactgttttgcaagctattcttttagtattttatggtgaaaaattggtaattaaaattcttattttagtttattcatgcaaatctatagacatttgaagacatggtaatagaatgagagaaggagcaaagttatacttacatatatgttccttgatgtaaggataaggtaaattattgaaacttacattacaaaaattgaatttattttaattagaattgtacgtcaagttttttgggatatttttcagtctgtttctttttcctgttttactttttataccatcagaatatggatcatgtgtatcctgttagtagccacatagccttctcctagctcaatgcctagcacatagtaagcactcaatatttttttaattaatgaaattttttttaaaggagcagtccaaagatggtgacaagtcttttttcttttactttcaaggcagttttaggaagcattccctgtctatcttccaaatatgatctggattttaattttgcaaaaaaaaa

SEQ ID NO: 430197 - DNA, 1158 bp, Homo sapiens
  misc_feature (1017)..(1018): n is a, c, g, or t
  misc_feature (1036)..(1036): n is a, c, g, or t
  misc_feature (1038)..(1038): n is a, c, g, or t
  misc_feature (1041)..(1042): n is a, c, g, or t
  misc_feature (1061)..(1061): n is a, c, g, or t
gccgccgttgccagagaagccactagccggttactagctgcgcttttgttccacttgagcgggcactcttctgcggcaagcaggtctaggaattcgcctggttcccacctcgcgtcccttgccttccttcctagtctacccactgtagtgccccctgcgtcccgctccctcctagccgactcagagcacaagaaggattgccacggtttccattgcagcagccgtggcgcctctgaccctttttttatatcgcggcgacggcgggctgtcgtcacgacgacgtgcggacgcagcggcgggggcctttcagcttatgtggagaagtcgctgtgaagccacctataaatccatttactgaatttatggagaaggctgtaaatgatggaagtcattcagaagaactcttttgccatcttaaaactatatcagagaaagaagatttaccacggtgcaccagtgaaagtcatctcagctggcgaatctttctgcattgaatttgaagatttctgaacagaaggaaatattaataaaagaattagacaccttcaaaagtgtaaaactagctttagaacatcttcttagaaagagagactacaaacaaacaggagacaatttatccagcatgttgctagaaaatctaactgataatgaaagtgaaaatactaatcttaagaagaaggtatttgaaaaggaggcccatatccaagaactttcttgtttgtttcagagtgaaaaggcaaatactttgaaagcaaaccgtttttcccaatcagtaaaagtagtacatgaacgactacagatccaaattcataaaagggaagccgagaacgataagttgaaagaatatgtaaagagcttagaaaccaagatagccaagtggaacctgcaatcaagaatgaataagaatgaggctatagtgatgaaagaagcaagtaggcaaaaaactgtagctttaaaaaaggcatctaaagtttacaaacaagggtgacatttacgggtatgaaagttattccaatnnagataggacagtgttgananatnnggtcagcgggaagctttgncattggtggaacgctgttccatgagtaaagctacttgggtggagggcggaactgaataaacgtgaattgacaaacgggggggttaaaaaatggtgtg

SEQ ID NO: 430198 - DNA, 760 bp, Homo sapiens
tgggggcgactttgtggggagcctagctgctgctgggcgtttaccgcgggagcccttagcggtctggagctttcagcttatgtggagaagtcgctgtgaagccacctataaatccatttactgaatttatggagaaggctgtaaatgatggaagtcattcagaagaactcttttgccatcttaaaactatatcagagaaagaagatttaccacggtgcaccagtgaaagtcatctcagctggtattctcatcagtatcaggggaaatctaaatttccgattctaggatttcctgttttgtctataatataaattatttgaatcaaatacagcattcttttaagagtatcttttccaaatctagtatttatttattaaaatatatttaatctgattacaagtgtactcatctagcagaattcaactagtttttttgaatcttaatgaaagcaattaaaaatgaaaacctggccgggcgcaatggatcatgcctgtaatcccagcactttgggaggatgaggcaggtggatcacttgaggtcaggagttcaagatcagcctggccaacatggtgaaaccccatctctactgaaaaaatgcaaaaattagccagatgtggtagcgtgtgcctgttgtcccagctacttggaaggctgtggtagaagaatcaccttcgcctcccaggttcaagtgagccgagataatgccactgcactcctgggtgacagagcctgggtgacagagcgagactccatctcaaaa

SEQ ID NO: 430199 - DNA, 6359 bp, Homo sapiens
  misc_feature (2594)..(2594): n is a, c, g, or t
  misc_feature (3073)..(3073): n is a, c, g, or t
  misc_feature (3160)..(3160): n is a, c, g, or t
  misc_feature (5125)..(5125): n is a, c, g, or t
  misc_feature (5403)..(5403): n is a, c, g, or t
  misc_feature (5458)..(5458): n is a, c, g, or t
gccgccgttgccagagaagccactagccggttactagctgcgcttttgttccacttgagcgggcactcttctgcggcaagcaggtctaggaattcgcctggttcccacctcgcgtcccttgccttccttcctagtctacccactgtagtgccccctgcgtcccgctccctcctagccgactcagagcacaagaaggattgccacggtttccattgcagcagccgtggcgcctctgaccctttttttatatcgcggcgacggcgggctgtcgtcacgacgacgtgcggacgcagcggcgggggcctttcagcttatgtggagaagtcgctgtgaagccacctataaatccatttactgaatttatggagaaggctgtaaatgatggaagtcattcagaagaactcttttgccatcttaaaactatatcagagaaagaagatttaccacggtgcaccagtgaaagtcatctcagctgcctgaagcaggacattctaaatgaaaagactgaattggaagcaacacttaaggaagcggagttggtaactcattctgtagaattgcttttgccactatttaaggacaccattgaaaagattaattttgaaaatgcgaatctttctgcattgaatttgaagatttctgaacagaaggaaatattaataaaagaattagacaccttcaaaagtgtaaaactagctttagaacatcttcttagaaagagagactacaaacaaacaggagacaatttatccagcatgttgctagaaaatctaactgataatgaaagtgaaaatactaatcttaagaagaaggtatttgaaaaggaggcccatatccaagaactttcttgtttgtttcagagtgaaaaggcaaatactttgaaagcaaaccgtttttcccaatcagtaaaagtagtacatgaacgactacagatccaaattcataaaagggaagccgagaacgataagttgaaagaatatgtaaagagcttagaaaccaagatagccaagtggaacctgcaatcaagaatgaataagaatgaggctatagtgatgaaagaagcaagtaggcaaaaaactgtagctttaaaaaaggcatctaaagtttacaaacaaaggcttgaccattttacaggagctattgaaaagcttacttcccaaattagagatcaggaagccaagttgtctgaaacaatttcagcttccaatgcctggaaaagtcattatgagaaaattgtaatagaaaaaaccgaattggaagtacagattgaaacaatgaaaaagcaaatcattaatcttttggaagatctgaagaaaatggaagaccatggaaaaaattcatgtgaagaaattcttagaaaagttcactcaattgaatatgaaaatgaaactctgaatcttgagaatacaaaattaaagcttagattcccatgtagaattactgagtcaaagaatatgaacattttgattgttcttgatatgctttgctacatttcttctgaaaagactacacttgctgctttgaaggatgaagttgtatctgttgaaaatgaactctcagaattgcaagaagtagaaaaaaaacagaaaacccttattgaaatgtataaaactcaggtacaaaagttgcaagaagcagctgaaatagtaaaaagcagatgtgaaaatttgctacataaaaataaccaaataacaaaaaccaaaaataaaaatgtagagaagatgagaggccagatggagtctcatctgaaggagttagagcgtgtctgcgattccttgacggcggcggaacggaggcttcacgagtgtcaggagagtctgcagtgctgcaaggggaagtgtgcagaccaggaacacaccattagggagcttcagggccaggttgatggaaatcacaatcttctgacaaagctttctctggaagaggaaaactgtcttattcagctgaagtgtgaaaaccttcaacaaaaattagaacagatggacgcagaaaataaagagcttgagaagaagctggcaaaccaagaagaatgtcttaagcacagcaatcttaagtttaaagagaaatctgcagaatatacagcattggccagacaactggaagctgctttagaagaaggaagacaaaaggttgctgaagaaatagagaaaatgtcatctagagagagtgctttacaaattaaaatattagatctggaaactgagcttagaaagaaaaatgaagagcaaaatcaacttgtttgcaaaatgaacagtgatccagagactccatgaaatctatttttttaattcccaagtgtctaaaaagttgaaaacctaaaagattcaagagttaaatgatttttggcatgcacaatttgattttattgccatcaaaagtttcatgacaacttagtcagaacaaaacgtcgatcacctttaatttagcacaggccttccatttatttctaaacttttttttaactcaccatttgactttctgatattgtaaaatgtgtgtgctgtttttttgtgtaattgaagcctctgaaaaaataaatgaggtgggttttgctgtaatgtccctagtacttggctaaagctagtaaaataaanagatcccattcacaattgccacaaagagaataaaatacctaggaatccaaattacaaggaatgtgaaggacctcttcaaggagaactacaaaccactgcttaaggaaataagagaggacacaaacaaatggaaaacattccatgcttatgaataagatgaaacaagatcatgaaaatggctatactccccaaagtaatttatagattcagtgctatccccatcaagctaccattgactttcttcacagaattagaaaaaactacttcaaatttcatatggaaccaaaaaagagctcacataaccaagacaatcctaagcaaaaagaacaaagctgtaggcatcacgctacctgacttcaaactatactacaaggctacagtaaccaaaatagcatggtactggtgccaaaacagatatatagaccaatggaacagaacagaggcctcagaaataactccacacatctacaaccatctgntgtttgacatacctgagaaaaacaagaaatggggaaaggattccctatttaataaatggtgttgggaaaactggctagccatatgcngaaaactgaaactggatcccttccttacaccttatacaaaaattaactcaagatggattaaagacttaagtgtaagacctaaaaccataaaaaccctagaggaaaacctaggcaataccattcaggacataggcatggacgaatacttcatgactaaaacaccaaaagtaatggcaataaaagccaagattgacaaatgggatctaattaaactaaagagcttctgcacagcaaaagaaactatcatcagagtgaacaggaaccgacagaatgggagaaaatttttgcaatctatccatctgacaaagggccaatatccagaatctacaaagaacttaaacaaatttacaagaaaaaaaaccccatcaaaaagtgtgcaaagaatatgaacagacacttctcaagagaagacatttagtcagccaaaaaacatatgaaaaaaagctcatcactggtcattcagagaaatgcaaatcaaaactacagtgagataccatgtcacaccaattagaatggtgatcattaaaaagacaggaaacaacagatgctggagaggatgtggagaaataggatgcttttacactgttggtgggagtgtaaattagttcaaccactgcggaagacagtgtggcgattcctcaaggatctagaaccagaaataccatttgacccagcaatcccattactgggtatatacccaaaggactataaatcatgctgctatagagacacatgcacacgtatatttattgtggcactattcacaatagcaaagacttggagccaacccaaatgcccatcaatgatagactgaataaagaaaatgtggcacatacaccatggaatactatgcagccataaaaaaggatgagttcatgtcctttgcagggacatggatgaagctggaaaccatcattctcagcaaactaacacaagaacagaaaaccaaacaccgcatgttctcactcataagtgggagttgaacaatgagaatacatggatacagggcagggaacatcacacaccagggcctgtcagggcgtggggggctaggggagggataacattagaaattcctaatgtagatgacgggttgatgagtgcagcaaaccaccatggcacgtgtatacctatgtaaccaacctgtacgttctgtacatgtatcccagaacttaaagtataataaaaattaaaaaaaataaagatctgatgttttgttaaacctgataagttttgtactagtaaaattctagaattctaagcatagatttaaacattgctgaaaaatgagtttgtgtgttttatgccttccaggggacagttaagtgggcagtatttatttaatatacctgcttcagccccatttgaattgtaagcactctgaaagcatgtctcatagtcgtctgtatccctggtgtctcccacagtgccctgcttacctgcaggcctttttgtattttctgtccaagtaccctaatagggtggtgcagaatggatgtacagatctgtggatgacctcagcagcttaatccaaggcacccctcgggaagcctgaaatgtctttgaagtcttatgtattatcctaaaatccattgacattttatattctaccctacaaaataagtatgtgttactatttttctttccaaattgttgagtaaaactcactgtattcatcctgtgactttgtactgcccagcctagctcattgttttttacctgcctcatttcctgagctgggcattgctcagtttcagaaggtatcaggtgtcattgaacacctgatatgaaggatgtaaaagttctctcttttctatctaggtgtctatattttaattggaggctagatgatatttgcaacctgtctttatctaaagcattgtcagtgaactcacctacttaggaattcatatgcaccttagttaaaaaaaatgtattgtggttttaaattttttcctcaaccantgtaatatgaagaattctttttattttttaagagattctaagaaaatgttcacattatcaaaactagaattctatcaacttttaagacatttaattatttggaataaaatgtgaatttttagacagaaaatggcaaaaactagtatgaaaatatatcatgttacatgtgaaattatgacagttgttaacctattaagttaatcatgttaaatatgtaataatttggggctaaatgaatgtatattataaattatatcagtgaagatcaaccatgtgtntgctttaattattaattttaaagagtgagctctaagaatgaacacatcagatgtnagtattattttaaaaaatcaaaaagaattatctagttattgtatatatgtttttaatattatgactctggtcctttggaatgaatgctattattgcttatctgtatttttttccttttttctttagaaagcacaacatcaggaagtgtgtttgaaagaagtacaaaatagtcttgagaagtcggaaaatcaaaatgagagtattaagaattatttacagtttcttaaaacttcttatgtaacaatgtttgaataaattgtcaaatttattttctctaagtagtagatttttattatgagtctaaaatgtgattgggtaaaaaaataaatatactaccagttacattttatgatttatgagtggtagtattagaggtttttatgtaaagatttttgaaacataatttatctaactgaaactttaaaataggatagttgttactattcctgtttgctggataattcttatttatctttggtttaatttcttttaaaattaaattggttgttagaatatttttctcacacatagacatggaagtcagattcattctttgtgatgtttgtagccaccattcaagtgaatttgtagtaagtcttcggtcaatatgattttaaataatatatataattgttttatattatgatatataaatgtaaaatattctgaattttaatttttaataatggtgtaattacatactttctaaagctactaaatgtctcaatatactacacttaatattgtttcaagtatatgctgagttgccattataatttctgttaggttttaagtatacaattttaaatcatcgctattaagtaccaactgctaatgacagatgaaaacgtggtcatgcattatttctttataaagaatagatattcaggctgtcttcaat

SEQ ID NO: 430200 - DNA, 2651 bp, Homo sapiens
gccgccgttgccagagaagccactagccggttactagctgcgcttttgttccacttgagcgggcactcttctgcggcaagcaggtctaggaattcgcctggttcccacctcgcgtcccttgccttccttcctagtctacccactgtagtgccccctgcgtcccgctccctcctagccgactcagagcacaagaaggattgccacggtttccattgcagcagccgtggcgcctctgaccctttttttatatcgcggcgacggcgggctgtcgtcacgacgacgtgcggacgcagcggcgggggcctttcagcttatgtggagaagtcgctgtgaagccacctataaatccatttactgaatttatggagaaggctgtaaatgatggaagtcattcagaagaactcttttgccatcttaaaactatatcagagaaagaagatttaccacggtgcaccagtgaaagtcatctcagctggcgaatctttctgcattgaatttgaagatttctgaacagaaggaaatattaataaaagaattagacaccttcaaaagtgtaaaactagctttagaacatcttcttagaaagagagactacaaacaaacaggagacaatttatccagcatgttgctagaaaatctaactgataatgaaagtgaaaatactaatcttaagaagaaggtatttgaaaaggaggcccatatccaagaactttcttgtttgtttcagagtgaaaaggcaaatactttgaaagcaaaccgtttttcccaatcagtaaaagtagtacatgaacgactacagatccaaattcataaaagggaagccgagaacgataagttgaaagaatatgtaaagagcttagaaaccaagatagccaagtggaacctgcaatcaagaatgaataagaatgaggctatagtgatgaaagaagcaagtaggcaaaaaactgtagctttaaaaaaggcatctaaagtttacaaacaaaggcttgaccattttacaggagctattgaaaagcttacttcccaaattagagatcaggaagccaagttgtctgaaacaatttcagcttccaatgcctggaaaagtcattatgagaaaattgtaatagaaaaaaccgaattggaagtacagattgaaacaatgaaaaagcaaatcattaatcttttggaagatctgaagaaaatggaagaccatggaaaaaattcatgtgaagaaattcttagaaaagttcactcaattgaatatgaaaatgaaactctgaatcttgagaatacaaaattaaagactacacttgctgctttgaaggatgaagttgtatctgttgaaaatgaactctcagaattgcaagaagtagaaaaaaaacagaaaacccttattgaaatgtataaaactcaggtacaaaagttgcaagaagcagctgaaatagtaaaaagcagatgtgaaaatttgctacataaaaataaccaaataacaaaaaccaaaaataaaaatgtagagaaggttgatggaaatcacaatcttctgacaaagctttctctggaagaggaaaactgtcttattcagctgaagtgtgaaaaccttcaacaaaaattagaacagatggacgcagaaaataaagagcttgagaagaagctggcaaaccaagaagaatgtcttaagcacagcaatcttaagtttaaagagaaatctgcagaatatacagcattggccagacaactggaagctgctttagaagaaggaagacaaaaggttgctgaagaaatagagaaaatgtcatctagagagagtgctttacaaattaaaatattagatctggaaactgagcttagaaagaaaaatgaagagcaaaatcaacttgtttgcaaaatgaacagtaaagcacaacatcaggaagtgtgtttgaaagaagtacaaaatagtcttgagaagtcggaaaatcaaaatgagagtattaagaattatttacagtttcttaaaacttcttatgtaacaatgtttgaataaattgtcaaatttattttctctaagtagtagatttttattatgagtctaaaatgtgattgggtaaaaaaataaatatactaccagttacattttatgatttatgagtggtagtattagaggtttttatgtaaagatttttgaaacataatttatctaactgaaactttaaaataggatagttgttactattcctgtttgctggataattcttatttatctttggtttaatttcttttaaaattaaattggttgttagaatatttttctcacacatagacatggaagtcagattcattctttgtgatgtttgtagccaccattcaagtgaatttgtagtaagtcttcggtcaatatgattttaaataatatatataattgttttatattatgatatataaatgtaaaatattctgaattttaatttttaataatggtgtaattacatactttctaaagctactaaatgtctcaatatactacacttaatattgtttcaagtatatgctgagttgccattataatttctgttaggttttaagtatacaattttaaatcatcgctattaagtaccaactgctaatgacagatgaaaacgtggtcatgcattatttctttataaagaatagatattcaggctgtcttcaat

SEQ ID NO: 430201 - DNA, 2235 bp, Homo sapiens
gccgccgttgccagagaagccactagccggttactagctgcgcttttgttccacttgagcgggcactcttctgcggcaagcaggtctaggaattcgcctggttcccacctcgcgtcccttgccttccttcctagtctacccactgtagtgccccctgcgtcccgctccctcctagccgactcagagcacaagaaggattgccacggtttccattgcagcagccgtggcgcctctgaccctttttttatatcgcggcgacggcgggctgtcgtcacgacgacgtgcggacgcagcggcgggggcctttcagcttatgtggagaagtcgctgtgaagccacctataaatccatttactgaatttatggagaaggctgtaaatgatggaagtcattcagaagaactcttttgccatcttaaaactatatcagagaaagaagatttaccacggtgcaccagtgaaagtcatctcagctggcgaatctttctgcattgaatttgaagatttctgaacagaaggaaatattaataaaagaattagacaccttcaaaagtgtaaaactagctttagaacatcttcttagaaagagagactacaaacaaacaggagacaatttatccagcatgttgctagaaaatctaactgataatgaaagtgaaaatactaatcttaagaagaaggtatttgaaaaggaggcccatatccaagaactttcttgtttgtttcagagtgaaaaggcaaatactttgaaagcaaaccgtttttcccaatcagtaaaagtagtacatgaacgactacagatccaaattcataaaagggaagccgagaacgataagttgaaagaatatgtaaagagcttagaaaccaagatagccaagtggaacctgcaatcaagaatgaataagaatgaggctatagtgatgaaagaagcaagtaggcaaaaaactgtagctttaaaaaaggcatctaaagtttacaaacaaaggcttgaccattttacaggagctattgaaaagcttacttcccaaattagagatcaggaagccaagttgtctgaaacaatttcagcttccaatgcctggaaaagtcattatgagaaaattgtaatagaaaaaaccgaattggaagtacagattgaaacaatgaaaaagcaaatcattaatcttttggaagatctgaagaaaatggaagaccatggaaaaaattcatgtgaagaaattcttagaaaagttcactcaattgaatatgaaaatgaaactctgaatcttgagaatacaaaattaaagactacacttgctgctttgaaggatgaagttgtatctgttgaaaatgaactctcagaattgcaagaagtagaaaaaaaacagaaaacccttattgaaatgtataaaactcaggtacaaaagttgcaagaagcagctgaaatagtaaaaagcagatgtgaaaatttgctacataaaaataaccaaataacaaaaaccaaaaataaaaatgtagagaagatgagaggccagatggagtctcatctgaaggagttagagcgtgtctgcgattccttgacggcggcggaacggaggcttcacgagtgtcaggagagtctgcagtgctgcaaggggaagtgtgcagaccaggaacacaccattagggagcttcagggccagaatatggatcatgtagcagattttgaagcagtgggaagaatattctgtcttggcatgggttgatggaaatcacaatcttctgacaaagctttctctggaagaggaaaactgtcttattcagctgaagtgtgaaaaccttcaacaaaaattagaacagatggacgcagaaaataaagagcttgagaagaagctggcaaaccaagaagaatgtcttaagcacagcaatcttaagtttaaagagaaatctgcagaatatacagcattggccagacaactggaagctgctttagaagaaggaagacaaaaggttgctgaagaaatagagaaaatgtcatctagagagagtgctttacaaattaaaatattagatctggaaactgagcttagaaagaaaaatgaagagcaaaatcaacttgtttgcaaaatgaacagtaaagcacaacatcaggaagtgtgtttgaaagaagtacaaaatagtcttgagaagtcggaaaatcaaaatgagagtattaagaattatttacagtttcttaaaacttcttatgtaacaatgtttgaataaattgtcaaattta

SEQ ID NO: 430202 - DNA, 1905 bp, Homo sapiens
gccgccgttgccagagaagccactagccggttactagctgcgcttttgttccacttgagcgggcactcttctgcggcaagcaggtctaggaattcgcctggttcccacctcgcgtcccttgccttccttcctagtctacccactgtagtgccccctgcgtcccgctccctcctagccgactcagagcacaagaaggattgccacggtttccattgcagcagccgtggcgcctctgaccctttttttatatcgcggcgacggcgggctgtcgtcacgacgacgtgcggacgcagcggcgggggcctttcagcttatgtggagaagtcgctgtgaagccacctataaatccatttactgaatttatggagaaggctgtaaatgatggaagtcattcagaagaactcttttgccatcttaaaactatatcagagaaagaagatttaccacggtgcaccagtgaaagtcatctcagctggcgaatctttctgcattgaatttgaagatttctgaacagaaggaaatattaataaaagaattagacaccttcaaaagtgtaaaactagctttagaacatcttcttagaaagagagactacaaacaaacaggagacaatttatccagcatgttgctagaaaatctaactgataatgaaagtgaaaatactaatcttaagaagaaggtatttgaaaaggaggcccatatccaagaactttcttgtttgtttcagagtgaaaaggcaaatactttgaaagcaaaccgtttttcccaatcagtaaaagtagtacatgaacgactacagatccaaattcataaaagggaagccgagaacgataagttgaaagaatatgtaaagagcttagaaaccaagatagccaagtggaacctgcaatcaagaatgaataagaatgaggctatagtgatgaaagaagcaagtaggcaaaaaactgtagctttaaaaaaggcatctaaagtttacaaacaaaggcttgaccattttacaggagctattgaaaagcttacttcccaaattagagatcaggaagccaagttgtctgaaacaatttcagcttccaatgcctggaaaagtcattatgagaaaattgtaatagaaaaaaccgaattggaagtacagattgaaacaatgaaaaagcaaatcattaatcttttggaagatctgaagaaaatggaagaccatggaaaaaattcatgtgaagaaattcttagaaaagttcactcaattgaatatgaaaatgaaactctgaatcttgagaatacaaaattaaagactacacttgctgctttgaaggatgaagttgtatctgttgaaaatgaactctcagaattgcaagaagtagaaaaaaaacagaaaacccttattgaaatgtataaaactcaggtacaaaagttgcaagaagcagctgaaatagtaaaaagcagatgtgaaaatttgctacataaaaataaccaaataacaaaaaccaaaaataaaaatgtagagaaggattgagaagtcagagcaaggcaataatgtgaagaagaggtcagccagagcaagcgtcctccagttatacagacataaagatagctcactgaatgcacaacttactgctttcatggaattacttttcacctatttttagcaggccagcgaataaaccatttcatgtcttttggtctcattttctcatgaaacataccagtgcaaatgtctccttttctgctaggcagcactgtaaataaaagcatattttacaatcctgttcaaatgacggaaagggttggagcctgtctttttcagatactgtgaggtcacaatgttttctaactagtatttaacaagacaactatttttttaatgaaatttttctttttcttacttcactgttttaagtctcctggttttct

SEQ ID NO: 430203 - DNA, 2767 bp, Homo sapiens
tgggggcgactttgtggggagcctagctgctgctgggcgtttaccgcgggagcccttagcggtctggagctttcagcttatgtggagaagtcgctgtgaagccacctataaatccatttactgaatttatggagaaggctgtaaatgatggaagtcattcagaagaactcttttgccatcttaaaactatatcagagaaagaagatttaccacggtgcaccagtgaaagtcatctcagctgcctgaagcaggacattctaaatgaaaagactgaattggaagcaacacttaaggaagcggagttggtaactcattctgtagaattgcttttgccactatttaaggacaccattgaaaagattaattttgaaaatgcgaatctttctgcattgaatttgaagatttctgaacagaaggaaatattaataaaagaattagacaccttcaaaagtgtaaaactagctttagaacatcttcttagaaagagagactacaaacaaacaggagacaatttatccagcatgttgctagaaaatctaactgataatgaaagtgaaaatactaatcttaagaagaaggtatttgaaaaggaggcccatatccaagaactttcttgtttgtttcagagtgaaaaggcaaatactttgaaagcaaaccgtttttcccaatcagtaaaagtagtacatgaacgactacagatccaaattcataaaagggaagccgagaacgataagttgaaagaatatgtaaagagcttagaaaccaagatagccaagtggaacctgcaatcaagaatgaataagaatgaggctatagtgatgaaagaagcaagtaggcaaaaaactgtagctttaaaaaaggcatctaaagtttacaaacaaaggcttgaccattttacaggagctattgaaaagcttacttcccaaattagagatcaggaagccaagttgtctgaaacaatttcagcttccaatgcctggaaaagtcattatgagaaaattgtaatagaaaaaaccgaattggaagtacagattgaaacaatgaaaaagcaaatcattaatcttttggaagatctgaagaaaatggaagaccatggaaaaaattcatgtgaagaaattcttagaaaagttcactcaattgaatatgaaaatgaaactctgaatcttgagaatacaaaattaaagactacacttgctgctttgaaggatgaagttgtatctgttgaaaatgaactctcagaattgcaagaagtagaaaaaaaacagaaaacccttattgaaatgtataaaactcaggtacaaaagttgcaagaagcagctgaaatagtaaaaagcagatgtgaaaatttgctacataaaaataaccaaataacaaaaaccaaaaataaaaatgtagagaagatgagaggccagatggagtctcatctgaaggagttagagcgtgtctgcgattccttgacggcggcggaacggaggcttcacgagtgtcaggagagtctgcagtgctgcaaggggaagtgtgcagaccaggaacacaccattagggagcttcagggccagaatatggatcatgtagcagattttgaagcagtgggaagaatattctgtcttggcatgggttgatggaaatcacaatcttctgacaaagctttctctggaagaggaaaactgtcttattcagctgaagtgtgaaaaccttcaacaaaaattagaacagatggacgcagaaaataaagagcttgagaagaagctggcaaaccaagaagaatgtcttaagcacagcaatcttaagtttaaagagaaatctgcagaatatacagcattggccagacaactggaagctgctttagaagaaggaagacaaaaggttgctgaagaaatagagaaaatgtcatctagagagagtgctttacaaattaaaatattagatctggaaactgagcttagaaagaaaaatgaagagcaaaatcaacttgtttgcaaaatgaacagtaaagcacaacatcaggaagtgtgtttgaaagaagtacaaaatagtcttgagaagtcggaaaatcaaaatgagagtattaagaattatttacagtttcttaaaacttcttatgtaacaatgtttgaataaattgtcaaatttattttctctaagtagtagatttttattatgagtctaaaatgtgattgggtaaaaaaataaatatactaccagttacattttatgatttatgagtggtagtattagaggtttttatgtaaagatttttgaaacataatttatctaactgaaactttaaaataggatagttgttactattcctgtttgctggataattcttatttatctttggtttaatttcttttaaaattaaattggttgttagaatatttttctcacacatagacatggaagtcagattcattctttgtgatgtttgtagccaccattcaagtgaatttgtagtaagtcttcggtcaatatgattttaaataatatatataattgttttatattatgatatataaatgtaaaatattctgaattttaatttttaataatggtgtaattacatactttctaaagctactaaatgtctcaatatactacacttaatattgtttcaagtatatgctgagttgccattataatttctgttaggttttaagtatacaattttaaatcatcgctattaagtaccaactgctaatgacagatgaaaacgtggtcatgcattatttctttataaagaatagatattcaggctgtcttcaat

SEQ ID NO: 430204 - DNA, 2829 bp, Homo sapiens
gccgccgttgccagagaagccactagccggttactagctgcgcttttgttccacttgagcgggcactcttctgcggcaagcaggtctaggaattcgcctggttcccacctcgcgtcccttgccttccttcctagtctacccactgtagtgccccctgcgtcccgctccctcctagccgactcagagcacaagaaggattgccacggtttccattgcagcagccgtggcgcctctgaccctttttttatatcgcggcgacggcgggctgtcgtcacgacgacgtgcggacgcagcggcgggggccctgaagcaggacattctaaatgaaaagactgaattggaagcaacacttaaggaagcggagttggtaactcattctgtagaattgcttttgccactatttaaggacaccattgaaaagattaattttgaaaatgcgaatctttctgcattgaatttgaagatttctgaacagaaggaaatattaataaaagaattagacaccttcaaaagtgtaaaactagctttagaacatcttcttagaaagagagactacaaacaaacaggagacaatttatccagcatgttgctagaaaatctaactgataatgaaagtgaaaatactaatcttaagaagaaggtatttgaaaaggaggcccatatccaagaactttcttgtttgtttcagagtgaaaaggcaaatactttgaaagcaaaccgtttttcccaatcagtaaaagtagtacatgaacgactacagatccaaattcataaaagggaagccgagaacgataagttgaaagaatatgtaaagagcttagaaaccaagatagccaagtggaacctgcaatcaagaatgaataagaatgaggctatagtgatgaaagaagcaagtaggcaaaaaactgtagctttaaaaaaggcatctaaagtttacaaacaaaggcttgaccattttacaggagctattgaaaagcttacttcccaaattagagatcaggaagccaagttgtctgaaacaatttcagcttccaatgcctggaaaagtcattatgagaaaattgtaatagaaaaaaccgaattggaagtacagattgaaacaatgaaaaagcaaatcattaatcttttggaagatctgaagaaaatggaagaccatggaaaaaattcatgtgaagaaattcttagaaaagttcactcaattgaatatgaaaatgaaactctgaatcttgagaatacaaaattaaagactacacttgctgctttgaaggatgaagttgtatctgttgaaaatgaactctcagaattgcaagaagtagaaaaaaaacagaaaacccttattgaaatgtataaaactcaggtacaaaagttgcaagaagcagctgaaatagtaaaaagcagatgtgaaaatttgctacataaaaataaccaaataacaaaaaccaaaaataaaaatgtagagaagatgagaggccagatggagtctcatctgaaggagttagagcgtgtctgcgattccttgacggcggcggaacggaggcttcacgagtgtcaggagagtctgcagtgctgcaaggggaagtgtgcagaccaggaacacaccattagggagcttcagggccagaatatggatcatgtagcagattttgaagcagtgggaagaatattctgtcttggcatgggttgatggaaatcacaatcttctgacaaagctttctctggaagaggaaaactgtcttattcagctgaagtgtgaaaaccttcaacaaaaattagaacagatggacgcagaaaataaagagcttgagaagaagctggcaaaccaagaagaatgtcttaagcacagcaatcttaagtttaaagagaaatctgcagaatatacagcattggccagacaactggaagctgctttagaagaaggaagacaaaaggttgctgaagaaatagagaaaatgtcatctagagagagtgctttacaaattaaaatattagatctggaaactgagcttagaaagaaaaatgaagagcaaaatcaacttgtttgcaaaatgaacagtaaagcacaacatcaggaagtgtgtttgaaagaagtacaaaatagtcttgagaagtcggaaaatcaaaatgagagtattaagaattatttacagtttcttaaaacttcttatgtaacaatgtttgaataaattgtcaaatttattttctctaagtagtagatttttattatgagtctaaaatgtgattgggtaaaaaaataaatatactaccagttacattttatgatttatgagtggtagtattagaggtttttatgtaaagatttttgaaacataatttatctaactgaaactttaaaataggatagttgttactattcctgtttgctggataattcttatttatctttggtttaatttcttttaaaattaaattggttgttagaatatttttctcacacatagacatggaagtcagattcattctttgtgatgtttgtagccaccattcaagtgaatttgtagtaagtcttcggtcaatatgattttaaataatatatataattgttttatattatgatatataaatgtaaaatattctgaattttaatttttaataatggtgtaattacatactttctaaagctactaaatgtctcaatatactacacttaatattgtttcaagtatatgctgagttgccattataatttctgttaggttttaagtatacaattttaaatcatcgctattaagtaccaactgctaatgacagatgaaaacgtggtcatgcattatttctttataaagaatagatattcaggctgtcttcaat

SEQ ID NO: 430205 - DNA, 2528 bp, Homo sapiens
aaaatagttgcaacatcttttaaaatttaagttgaaacttccactatgtgtatatgaaataatagcaatatagatatttactttacaatttttctattcaaagttgtacagtgactttatttatttcaatagtttttaggggacaggtcgtttctggttacctggacaacttctttagtggttatttctgacattttggtgcacctgtcacccgagcactgtacactgtagccaatgtgtagtcttttacccctcacctccctccctcccttctccctagttcctaaagtcctttatatcaatcttatgcttttgcattttcatagcttagctcccacttatgagtgagaacatacgatatttggttttccattcctgagttacttcacttataatagctgtctccaacttcatccaggttgctgcagatgttccttttaatggctgagtagtattccatgatggatatataccatattttctttatccactcattggttggtgggcatttaggctggttccatatttttgcaattatgaattgcactgctataaacatgcatgtatagttttctatatttgaagttccatactttttggaagattgcttccctgtttataatgtatttgtgtttagagatctgaacaaaacaaaaatgttttaaaattatagtatgaatacttttatgtattttttaggaagccaagttgtctgaaacaatttcagcttccaatgcctggaaaagtcattatgagaaaattgtaatagaaaaaaccgaattggaagtacagattgaaacaatgaaaaagcaaatcattaatcttttggaagatctgaagaaaatggaagaccatggaaaaaattcatgtgaagaaattcttagaaaagttcactcaattgaatatgaaaatgaaactctgaatcttgagaatacaaaattaaagactacacttgctgctttgaaggatgaagttgtatctgttgaaaatgaactctcagaattgcaagaagtagaaaaaaaacagaaaacccttattgaaatgtataaaactcaggtacaaaagttgcaagaagcagctgaaatagtaaaaagcagatgtgaaaatttgctacataaaaataaccaaataacaaaaaccaaaaataaaaatgtagagaagatgagaggccagatggagtctcatctgaaggagttagagcgtgtctgcgattccttgacggcggcggaacggaggcttcacgagtgtcaggagagtctgcagtgctgcaaggggaagtgtgcagaccaggaacacaccattagggagcttcagggccagaatatggatcatgtagcagattttgaagcagtgggaagaatattctgtcttggcatgggttgatggaaatcacaatcttctgacaaagctttctctggaagaggaaaactgtcttattcagctgaagtgtgaaaaccttcaacaaaaattagaacagatggacgcagaaaataaagagcttgagaagaagctggcaaaccaagaagaatgtcttaagcacagcaatcttaagtttaaagagaaatctgcagaatatacagcattggccagacaactggaagctgctttagaagaaggaagacaaaaggttgctgaagaaatagagaaaatgtcatctagagagagtgctttacaaattaaaatattagatctggaaactgagcttagaaagaaaaatgaagagcaaaatcaacttgtttgcaaaatgaacagtaaagcacaacatcaggaagtgtgtttgaaagaagtacaaaatagtcttgagaagtcggaaaatcaaaatgagagtattaagaattatttacagtttcttaaaacttcttatgtaacaatgtttgaataaattgtcaaatttattttctctaagtagtagatttttattatgagtctaaaatgtgattgggtaaaaaaataaatatactaccagttacattttatgatttatgagtggtagtattagaggtttttatgtaaagatttttgaaacataatttatctaactgaaactttaaaataggatagttgttactattcctgtttgctggataattcttatttatctttggtttaatttcttttaaaattaaattggttgttagaatatttttctcacacatagacatggaagtcagattcattctttgtgatgtttgtagccaccattcaagtgaatttgtagtaagtcttcggtcaatatgattttaaataatatatataattgttttatattatgatatataaatgtaaaatattctgaattttaatttttaataatggtgtaattacatactttctaaagctactaaatgtctcaatatactacacttaatattgtttcaagtatatgctgagttgccattataatttctgttaggttttaagtatacaattttaaatcatcgctattaagtaccaactgctaatgacagatgaaaacgtggtcatgcattatttctttataaagaatagatattcaggctgtcttcaat

SEQ ID NO: 430206 - DNA, 2306 bp, Homo sapiens
attcttcctgtcattgttatttgcatgctgcttggttttataaagttagccaatattatccaagttgtgaaattcctaattcttattttatatttgctcaagaatcttaagaagaaggtatttgaaaaggaggcccatatccaagaactttcttgtttgtttcagagtgaaaaggcaaatactttgaaagcaaaccgtttttcccaatcagtaaaagtagtacatgaacgactacagatccaaattcataaaagggaagccgagaacgataagttgaaagaatatgtaaagagcttagaaaccaagatagccaagtggaacctgcaatcaagaatgaataagaatgaggctatagtgatgaaagaagcaagtaggcaaaaaactgtagctttaaaaaaggcatctaaagtttacaaacaaaggcttgaccattttacaggagctattgaaaagcttacttcccaaattagagatcaggaagccaagttgtctgaaacaatttcagcttccaatgcctggaaaagtcattatgagaaaattgtaatagaaaaaaccgaattggaagtacagattgaaacaatgaaaaagcaaatcattaatcttttggaagatctgaagaaaatggaagaccatggaaaaaattcatgtgaagaaattcttagaaaagttcactcaattgaatatgaaaatgaaactctgaatcttgagaatacaaaattaaagactacacttgctgctttgaaggatgaagttgtatctgttgaaaatgaactctcagaattgcaagaagtagaaaaaaaacagaaaacccttattgaaatgtataaaactcaggtacaaaagttgcaagaagcagctgaaatagtaaaaagcagatgtgaaaatttgctacataaaaataaccaaataacaaaaaccaaaaataaaaatgtagagaagatgagaggccagatggagtctcatctgaaggagttagagcgtgtctgcgattccttgacggcggcggaacggaggcttcacgagtgtcaggagagtctgcagtgctgcaaggggaagtgtgcagaccaggaacacaccattagggagcttcagggccagaatatggatcatgtagcagattttgaagcagtgggaagaatattctgtcttggcatgggttgatggaaatcacaatcttctgacaaagctttctctggaagaggaaaactgtcttattcagctgaagtgtgaaaaccttcaacaaaaattagaacagatggacgcagaaaataaagagcttgagaagaagctggcaaaccaagaagaatgtcttaagcacagcaatcttaagtttaaagagaaatctgcagaatatacagcattggccagacaactggaagctgctttagaagaaggaagacaaaaggttgctgaagaaatagagaaaatgtcatctagagagagtgctttacaaattaaaatattagatctggaaactgagcttagaaagaaaaatgaagagcaaaatcaacttgtttgcaaaatgaacagtaaagcacaacatcaggaagtgtgtttgaaagaagtacaaaatagtcttgagaagtcggaaaatcaaaatgagagtattaagaattatttacagtttcttaaaacttcttatgtaacaatgtttgaataaattgtcaaatttattttctctaagtagtagatttttattatgagtctaaaatgtgattgggtaaaaaaataaatatactaccagttacattttatgatttatgagtggtagtattagaggtttttatgtaaagatttttgaaacataatttatctaactgaaactttaaaataggatagttgttactattcctgtttgctggataattcttatttatctttggtttaatttcttttaaaattaaattggttgttagaatatttttctcacacatagacatggaagtcagattcattctttgtgatgtttgtagccaccattcaagtgaatttgtagtaagtcttcggtcaatatgattttaaataatatatataattgttttatattatgatatataaatgtaaaatattctgaattttaatttttaataatggtgtaattacatactttctaaagctactaaatgtctcaatatactacacttaatattgtttcaagtatatgctgagttgccattataatttctgttaggttttaagtatacaattttaaatcatcgctattaagtaccaactgctaatgacagatgaaaacgtggtcatgcattatttctttataaagaatagatattcaggctgtcttcaat

SEQ ID NO: 430207 - DNA, 1647 bp, Homo sapiens
tctattgatttttcatatctaggcacatttccaagtttttttgtcagtaaatttagaaagttttaaaaataatatgtcctgtgtaaatcttaataaggatgttcataattattagtcactagctttgtgaaattcctaaattttagatggtattgcatgaaataaaaaataattattttatcaactttgttaatacatgagttatgtttttataataattctgtagcactggagtataaatgtattctaatgacttataaaatctatatcttttttgctagactacacttgctgctttgaaggatgaagttgtatctgttgaaaatgaactctcagaattgcaagaagtagaaaaaaaacagaaaacccttattgaaatgtataaaactcaggtacaaaagttgcaagaagcagctgaaatagtaaaaagcagatgtgaaaatttgctacataaaaataaccaaataacaaaaaccaaaaataaaaatgtagagaaggttgatggaaatcacaatcttctgacaaagctttctctggaagaggaaaactgtcttattcagctgaagtgtgaaaaccttcaacaaaaattagaacagatggacgcagaaaataaagagcttgagaagaagctggcaaaccaagaagaatgtcttaagcacagcaatcttaagtttaaagagaaatctgcagaatatacagcattggccagacaactggaagctgctttagaagaaggaagacaaaaggttgctgaagaaatagagaaaatgtcatctagagagagtgctttacaaattaaaatattagatctggaaactgagcttagaaagaaaaatgaagagcaaaatcaacttgtttgcaaaatgaacagtaaagcacaacatcaggaagtgtgtttgaaagaagtacaaaatagtcttgagaagtcggaaaatcaaaatgagagtattaagaattatttacagtttcttaaaacttcttatgtaacaatgtttgaataaattgtcaaatttattttctctaagtagtagatttttattatgagtctaaaatgtgattgggtaaaaaaataaatatactaccagttacattttatgatttatgagtggtagtattagaggtttttatgtaaagatttttgaaacataatttatctaactgaaactttaaaataggatagttgttactattcctgtttgctggataattcttatttatctttggtttaatttcttttaaaattaaattggttgttagaatatttttctcacacatagacatggaagtcagattcattctttgtgatgtttgtagccaccattcaagtgaatttgtagtaagtcttcggtcaatatgattttaaataatatatataattgttttatattatgatatataaatgtaaaatattctgaattttaatttttaataatggtgtaattacatactttctaaagctactaaatgtctcaatatactacacttaatattgtttcaagtatatgctgagttgccattataatttctgttaggttttaagtatacaattttaaatcatcgctattaagtaccaactgctaatgacagatgaaaacgtggtcatgcattatttctttataaagaatagatattcaggctgtcttcaat

SEQ ID NO: 430208 - DNA, 1972 bp, Homo sapiens
attcttcctgtcattgttatttgcatgctgcttggttttataaagttagccaatattatccaagttgtgaaattcctaattcttattttatatttgctcaagaatcttaagaagaaggtatttgaaaaggaggcccatatccaagaactttcttgtttgtttcagagtgaaaagagcttagaaaccaagatagccaagtggaacctgcaatcaagaatgaataagaatgaggctatagtgatgaaagaagcaagtaggcaaaaaactgtagctttaaaaaaggcatctaaagtttacaaacaaaggcttgaccattttacaggagctattgaaaagcttacttcccaaattagagatcaggaagccaagttgtctgaaacaatttcagcttccaatgcctggaaaagtcattatgagaaaattgtaatagaaaaaaccgaattggaagtacagattgaaacaatgaaaaagcaaatcattaatcttttggaagatctgaagaaaatggaagaccatggaaaaaattcatgtgaagaaattcttagaaaagttcactcaattgaatatgaaaatgaaactctgaatcttgagaatacaaaattaaagactacacttgctgctttgaaggatgaagttgtatctgttgaaaatgaactctcagaattgcaagaagtagaaaaaaaacagaaaacccttattgaaatgtataaaactcaggtacaaaagttgcaagaagcagctgaaatagtaaaaagcagatgtgaaaatttgctacataaaaataaccaaataacaaaaaccaaaaataaaaatgtagagaaggttgatggaaatcacaatcttctgacaaagctttctctggaagaggaaaactgtcttattcagctgaagtgtgaaaaccttcaacaaaaattagaacagatggacgcagaaaataaagagcttgagaagaagctggcaaaccaagaagaatgtcttaagcacagcaatcttaagtttaaagagaaatctgcagaatatacagcattggccagacaactggaagctgctttagaagaaggaagacaaaaggttgctgaagaaatagagaaaatgtcatctagagagagtgctttacaaattaaaatattagatctggaaactgagcttagaaagaaaaatgaagagcaaaatcaacttgtttgcaaaatgaacagtaaagcacaacatcaggaagtgtgtttgaaagaagtacaaaatagtcttgagaagtcggaaaatcaaaatgagagtattaagaattatttacagtttcttaaaacttcttatgtaacaatgtttgaataaattgtcaaatttattttctctaagtagtagatttttattatgagtctaaaatgtgattgggtaaaaaaataaatatactaccagttacattttatgatttatgagtggtagtattagaggtttttatgtaaagatttttgaaacataatttatctaactgaaactttaaaataggatagttgttactattcctgtttgctggataattcttatttatctttggtttaatttcttttaaaattaaattggttgttagaatatttttctcacacatagacatggaagtcagattcattctttgtgatgtttgtagccaccattcaagtgaatttgtagtaagtcttcggtcaatatgattttaaataatatatataattgttttatattatgatatataaatgtaaaatattctgaattttaatttttaataatggtgtaattacatactttctaaagctactaaatgtctcaatatactacacttaatattgtttcaagtatatgctgagttgccattataatttctgttaggttttaagtatacaattttaaatcatcgctattaagtaccaactgctaatgacagatgaaaacgtggtcatgcattatttctttataaagaatagatattcaggctgtcttcaat

SEQ ID NO: 430209 - DNA, 4752 bp, Homo sapiens
  misc_feature (987)..(987): n is a, c, g, or t
  misc_feature (1466)..(1466): n is a, c, g, or t
  misc_feature (1553)..(1553): n is a, c, g, or t
  misc_feature (3518)..(3518): n is a, c, g, or t
  misc_feature (3796)..(3796): n is a, c, g, or t
  misc_feature (3851)..(3851): n is a, c, g, or t
taaaaagggccaaaacggccaagagacggaaaaaccggctaaaaataaagagccgaaccttgccagggaaaccaaggaggaacaaatgatggttactgataatattaaaaataacaagcaatataagacataacaaataaaaatgttatgatatgccaaataatttattattctgcctctttggatggcatgtattgcattgccatcaaatctcatcaggcactttccctacatattacttttgcaatgacatctgcttaatgaaaattacagatataatctacttgatttcatcctgatatgaatttttcattttttaaagataaacacagtgtaaactattattacaagtgagttttatatctgtcttgaataatgaatattttgttttagaaagttataattttgtagtaaacattcagtattgttagatatacatgtgagatggatgctttagtccactcagccatgaaatgaaaataccaaagtgactgtgcttaattagtcttctgttttttttcctgaatactcatgaaacagtcaattggcatagaatattctgaaagctagcattactcatgattaaattacgtaataactgtctactagataatgacatagagaataatgatactgtgttttttccaggatccagagactccatgaaatctatttttttaattcccaagtgtctaaaaagttgaaaacctaaaagattcaagagttaaatgatttttggcatgcacaatttgattttattgccatcaaaagtttcatgacaacttagtcagaacaaaacgtcgatcacctttaatttagcacaggccttccatttatttctaaacttttttttaactcaccatttgactttctgatattgtaaaatgtgtgtgctgtttttttgtgtaattgaagcctctgaaaaaataaatgaggtgggttttgctgtaatgtccctagtacttggctaaagctagtaaaataaanagatcccattcacaattgccacaaagagaataaaatacctaggaatccaaattacaaggaatgtgaaggacctcttcaaggagaactacaaaccactgcttaaggaaataagagaggacacaaacaaatggaaaacattccatgcttatgaataagatgaaacaagatcatgaaaatggctatactccccaaagtaatttatagattcagtgctatccccatcaagctaccattgactttcttcacagaattagaaaaaactacttcaaatttcatatggaaccaaaaaagagctcacataaccaagacaatcctaagcaaaaagaacaaagctgtaggcatcacgctacctgacttcaaactatactacaaggctacagtaaccaaaatagcatggtactggtgccaaaacagatatatagaccaatggaacagaacagaggcctcagaaataactccacacatctacaaccatctgntgtttgacatacctgagaaaaacaagaaatggggaaaggattccctatttaataaatggtgttgggaaaactggctagccatatgcngaaaactgaaactggatcccttccttacaccttatacaaaaattaactcaagatggattaaagacttaagtgtaagacctaaaaccataaaaaccctagaggaaaacctaggcaataccattcaggacataggcatggacgaatacttcatgactaaaacaccaaaagtaatggcaataaaagccaagattgacaaatgggatctaattaaactaaagagcttctgcacagcaaaagaaactatcatcagagtgaacaggaaccgacagaatgggagaaaatttttgcaatctatccatctgacaaagggccaatatccagaatctacaaagaacttaaacaaatttacaagaaaaaaaaccccatcaaaaagtgtgcaaagaatatgaacagacacttctcaagagaagacatttagtcagccaaaaaacatatgaaaaaaagctcatcactggtcattcagagaaatgcaaatcaaaactacagtgagataccatgtcacaccaattagaatggtgatcattaaaaagacaggaaacaacagatgctggagaggatgtggagaaataggatgcttttacactgttggtgggagtgtaaattagttcaaccactgcggaagacagtgtggcgattcctcaaggatctagaaccagaaataccatttgacccagcaatcccattactgggtatatacccaaaggactataaatcatgctgctatagagacacatgcacacgtatatttattgtggcactattcacaatagcaaagacttggagccaacccaaatgcccatcaatgatagactgaataaagaaaatgtggcacatacaccatggaatactatgcagccataaaaaaggatgagttcatgtcctttgcagggacatggatgaagctggaaaccatcattctcagcaaactaacacaagaacagaaaaccaaacaccgcatgttctcactcataagtgggagttgaacaatgagaatacatggatacagggcagggaacatcacacaccagggcctgtcagggcgtggggggctaggggagggataacattagaaattcctaatgtagatgacgggttgatgagtgcagcaaaccaccatggcacgtgtatacctatgtaaccaacctgtacgttctgtacatgtatcccagaacttaaagtataataaaaattaaaaaaaataaagatctgatgttttgttaaacctgataagttttgtactagtaaaattctagaattctaagcatagatttaaacattgctgaaaaatgagtttgtgtgttttatgccttccaggggacagttaagtgggcagtatttatttaatatacctgcttcagccccatttgaattgtaagcactctgaaagcatgtctcatagtcgtctgtatccctggtgtctcccacagtgccctgcttacctgcaggcctttttgtattttctgtccaagtaccctaatagggtggtgcagaatggatgtacagatctgtggatgacctcagcagcttaatccaaggcacccctcgggaagcctgaaatgtctttgaagtcttatgtattatcctaaaatccattgacattttatattctaccctacaaaataagtatgtgttactatttttctttccaaattgttgagtaaaactcactgtattcatcctgtgactttgtactgcccagcctagctcattgttttttacctgcctcatttcctgagctgggcattgctcagtttcagaaggtatcaggtgtcattgaacacctgatatgaaggatgtaaaagttctctcttttctatctaggtgtctatattttaattggaggctagatgatatttgcaacctgtctttatctaaagcattgtcagtgaactcacctacttaggaattcatatgcaccttagttaaaaaaaatgtattgtggttttaaattttttcctcaaccantgtaatatgaagaattctttttattttttaagagattctaagaaaatgttcacattatcaaaactagaattctatcaacttttaagacatttaattatttggaataaaatgtgaatttttagacagaaaatggcaaaaactagtatgaaaatatatcatgttacatgtgaaattatgacagttgttaacctattaagttaatcatgttaaatatgtaataatttggggctaaatgaatgtatattataaattatatcagtgaagatcaaccatgtgtntgctttaattattaattttaaagagtgagctctaagaatgaacacatcagatgtnagtattattttaaaaaatcaaaaagaattatctagttattgtatatatgtttttaatattatgactctggtcctttggaatgaatgctattattgcttatctgtatttttttccttttttctttagaaagcacaacatcaggaagtgtgtttgaaagaagtacaaaatagtcttgagaagtcggaaaatcaaaatgagagtattaagaattatttacagtttcttaaaacttcttatgtaacaatgtttgaataaattgtcaaatttattttctctaagtagtagatttttattatgagtctaaaatgtgattgggtaaaaaaataaatatactaccagttacattttatgatttatgagtggtagtattagaggtttttatgtaaagatttttgaaacataatttatctaactgaaactttaaaataggatagttgttactattcctgtttgctggataattcttatttatctttggtttaatttcttttaaaattaaattggttgttagaatatttttctcacacatagacatggaagtcagattcattctttgtgatgtttgtagccaccattcaagtgaatttgtagtaagtcttcggtcaatatgattttaaataatatatataattgttttatattatgatatataaatgtaaaatattctgaattttaatttttaataatggtgtaattacatactttctaaagctactaaatgtctcaatatactacacttaatattgtttcaagtatatgctgagttgccattataatttctgttaggttttaagtatacaattttaaatcatcgctattaagtaccaactgctaatgacagatgaaaacgtggtcatgcattatttctttataaagaatagatattcaggctgtcttcaat

SEQ ID NO: 430210 - DNA, 152 bp, Homo sapiens
ctatatatgcttcttcaagatagaacatctttaaacttggatataacatacaagtaatatctgtttagaaaaaaggtacaatataactgtcaaggctttaaatcatattttaaagaaagcactttattttactcttttgataaaaattacag

SEQ ID NO: 430211 - DNA, 388 bp, Homo sapiens
aggttactctctctgggttgctccctatcttaggattgagaagtcagagcaaggcaataatgtgaagaagaggtcagccagagcaagcgtcctccagttatacagacataaagatagctcactgaatgcacaacttactgctttcatggaattacttttcacctatttttagcaggccagcgaataaaccatttcatgtcttttggtctcattttctcatgaaacataccagtgcaaatgtctccttttctgctaggcagcactgtaaataaaagcatattttacaatcctgttcaaatgacggaaagggttggagcctgtctttttcagatactgtgaggtcacaatgttttctaactagtatttaacaagacaactatttttttaa

SEQ ID NO: 430212 - DNA, 721 bp, Homo sapiens
ttaataaaagaattagacaccttcaaaagtgtaaaactagctttagaacatcttcttagaaagagagactacaaacaagtaaggcatcaacactaagcactcattttaatagtgatatttctcatttgaaggatacattatttttaaactgtagaaattattggtatatttgaaatggaaataatgctttgaattttgtcagtcattaatccccacctttagtgtttcataagtagttgtatatgaacaccacgtttttatagaaaatgtatttttcatctcaaaaactttgtcatacttaattgagctgattctaataaaatatacactttttgagtttaagatctttgtacattatatttatacatatctatatattcttcatctggtaaaagctttattgaaatagaattcacataccatacagttcttccatttaaattataaaattcagtggttttcattgtattcacagagttgtgcagccatcaccacagtcaattttaaagcatttttatcactccaaaaagaaagcttatccctttaaatcacctaaattattcttctgactcccttttggctttttcctatgataaaaattatttcagaattgtaaaaactatctaatattaggtaatagtttttgtaattaaaaagttacatgctcatagaaaattgtgataagcagagaaatattctcttgatctcagcacttagtgaa

SEQ ID NO: 430213 - DNA, 499 bp, Homo sapiens
ctgatgaacattttcatacataaactttttgttgtattgtctttagcttagattcccatgtagaattactgagtcaaagaatatgaacattttgattgttcttgatatgctttgctacatttcttctgaaaaggtattttattactcatactgccattagttctctatacctcatcagcacaggaaataaaatgtgtttttgatttgtagtgtttgctaatttggcaggtaaaaatgttatctatggttttaatttgtaactctttgaggagctagttttaaatttctaaacaatttctatttttattcttctgatagttatctgcatatctgtaaattatatattatactccttggtttatcaaatttagtcaattatattaaccttctaattagtcgagcactaacataattgataatataaatactaatacaactaaaagacatgttaaattcctagtaaataatacaacaaacatataactttatactttcaaaa

SEQ ID NO: 430214 - DNA, 994 bp, Homo sapiens
gccgccgttgccagagaagccactagccggttactagctgcgcttttgttccacttgagcgggcactcttctgcggcaagcaggtctaggaattcgcctggttcccacctcgcgtcccttgccttccttcctagtctacccactgtagtgccccctgcgtcccgctccctcctagccgactcagagcacaagaaggattgccacggtttccattgcagcagccgtggcgcctctgaccctttttttatatcgcggcgacggcgggctgtcgtcacgacgacgtgcggacgcagcggcgggggcctttcagcttatgtggagaagtcgctgtgaagccacctataaatccatttactgaatttatggagaaggctgtaaatgatggaagtcattcagaagaactcttttgccatcttaaaactatatcagagaaagaagatttaccacggtgcaccagtgaaagtcatctcagctggtattctcatcagtatcaggggaaatctaaatttccgattctaggatttcctgttttgtctataatataaattatttgaatcaaatacagcattcttttaagagtatcttttccaaatctagtatttatttattaaaatatatttaatctgattacaagtgtactcatctagcagaattcaactagtttttttgaatcttaatgaaagcaattaaaaatgaaaacctggccgggcgcaatggatcatgcctgtaatcccagcactttgggaggatgaggcaggtggatcacttgaggtcaggagttcaagatcagcctggccaacatggtgaaaccccatctctactgaaaaaatgcaaaaattagccagatgtggtagcgtgtgcctgttgtcccagctacttggaaggctgtggtagaagaatcaccttcgcctcccaggttcaagtgagccgagataatgccactgcactcctgggtgacagagcctgggtgacagagcgagactccatctcaaaa

SEQ ID NO: 430215 - DNA, 2868 bp, Homo sapiens
gccgccgttgccagagaagccactagccggttactagctgcgcttttgttccacttgagcgggcactcttctgcggcaagcaggtctaggaattcgcctggttcccacctcgcgtcccttgccttccttcctagtctacccactgtagtgccccctgcgtcccgctccctcctagccgactcagagcacaagaaggattgccacggtttccattgcagcagccgtggcgcctctgaccctttttttatatcgcggcgacggcgggctgtcgtcacgacgacgtgcggacgcagcggcgggggcctttcagcttatgtggagaagtcgctgtgaagccacctataaatccatttactgaatttatggagaaggctgtaaatgatggaagtcattcagaagaactcttttgccatcttaaaactatatcagagaaagaagatttaccacggtgcaccagtgaaagtcatctcagctggcgaatctttctgcattgaatttgaagatttctgaacagaaggaaatattaataaaagaattagacaccttcaaaagtgtaaaactagctttagaacatcttcttagaaagagagactacaaacaaacaggagacaatttatccagcatgttgctagaaaatctaactgataatgaaagtgaaaatactaatcttaagaagaaggtatttgaaaaggaggcccatatccaagaactttcttgtttgtttcagagtgaaaaggcaaatactttgaaagcaaaccgtttttcccaatcagtaaaagtagtacatgaacgactacagatccaaattcataaaagggaagccgagaacgataagttgaaagaatatgtaaagagcttagaaaccaagatagccaagtggaacctgcaatcaagaatgaataagaatgaggctatagtgatgaaagaagcaagtaggcaaaaaactgtagctttaaaaaaggcatctaaagtttacaaacaaaggcttgaccattttacaggagctattgaaaagcttacttcccaaattagagatcaggaagccaagttgtctgaaacaatttcagcttccaatgcctggaaaagtcattatgagaaaattgtaatagaaaaaaccgaattggaagtacagattgaaacaatgaaaaagcaaatcattaatcttttggaagatctgaagaaaatggaagaccatggaaaaaattcatgtgaagaaattcttagaaaagttcactcaattgaatatgaaaatgaaactctgaatcttgagaatacaaaattaaagactacacttgctgctttgaaggatgaagttgtatctgttgaaaatgaactctcagaattgcaagaagtagaaaaaaaacagaaaacccttattgaaatgtataaaactcaggtacaaaagttgcaagaagcagctgaaatagtaaaaagcagatgtgaaaatttgctacataaaaataaccaaataacaaaaaccaaaaataaaaatgtagagaagatgagaggccagatggagtctcatctgaaggagttagagcgtgtctgcgattccttgacggcggcggaacggaggcttcacgagtgtcaggagagtctgcagtgctgcaaggggaagtgtgcagaccaggaacacaccattagggagcttcagggccagaatatggatcatgtagcagattttgaagcagtgggaagaatattctgtcttggcatgggttgatggaaatcacaatcttctgacaaagctttctctggaagaggaaaactgtcttattcagctgaagtgtgaaaaccttcaacaaaaattagaacagatggacgcagaaaataaagagcttgagaagaagctggcaaaccaagaagaatgtcttaagcacagcaatcttaagtttaaagagaaatctgcagaatatacagcattggccagacaactggaagctgctttagaagaaggaagacaaaaggttgctgaagaaatagagaaaatgtcatctagagagagtgctttacaaattaaaatattagatctggaaactgagcttagaaagaaaaatgaagagcaaaatcaacttgtttgcaaaatgaacagtaaagcacaacatcaggaagtgtgtttgaaagaagtacaaaatagtcttgagaagtcggaaaatcaaaatgagagtattaagaattatttacagtttcttaaaacttcttatgtaacaatgtttgaataaattgtcaaatttattttctctaagtagtagatttttattatgagtctaaaatgtgattgggtaaaaaaataaatatactaccagttacattttatgatttatgagtggtagtattagaggtttttatgtaaagatttttgaaacataatttatctaactgaaactttaaaataggatagttgttactattcctgtttgctggataattcttatttatctttggtttaatttcttttaaaattaaattggttgttagaatatttttctcacacatagacatggaagtcagattcattctttgtgatgtttgtagccaccattcaagtgaatttgtagtaagtcttcggtcaatatgattttaaataatatatataattgttttatattatgatatataaatgtaaaatattctgaattttaatttttaataatggtgtaattacatactttctaaagctactaaatgtctcaatatactacacttaatattgtttcaagtatatgctgagttgccattataatttctgttaggttttaagtatacaattttaaatcatcgctattaagtaccaactgctaatgacagatgaaaacgtggtcatgcattatttctttataaagaatagatattcaggctgtcttcaat

SEQ ID NO: 430216 - DNA, 2320 bp, Homo sapiens
gccgccgttgccagagaagccactagccggttactagctgcgcttttgttccacttgagcgggcactcttctgcggcaagcaggtctaggaattcgcctggttcccacctcgcgtcccttgccttccttcctagtctacccactgtagtgccccctgcgtcccgctccctcctagccgactcagagcacaagaaggattgccacggtttccattgcagcagccgtggcgcctctgaccctttttttatatcgcggcgacggcgggctgtcgtcacgacgacgtgcggacgcagcggcgggggcctttcagcttatgtggagaagtcgctgtgaagccacctataaatccatttactgaatttatggagaaggctgtaaatgatggaagtcattcagaagaactcttttgccatcttaaaactatatcagagaaagaagatttaccacggtgcaccagtgaaagtcatctcagctggcgaatctttctgcattgaatttgaagatttctgaacagaaggaaatattaataaaagaattagacaccttcaaaagtgtaaaactagctttagaacatcttcttagaaagagagactacaaacaaacaggagacaatttatccagcatgttgctagaaaatctaactgataatgaaagtgaaaatactaatcttaagaagaaggtatttgaaaaggaggcccatatccaagaactttcttgtttgtttcagagtgaaaaggcaaatactttgaaagcaaaccgtttttcccaatcagtaaaagtagtacatgaacgactacagatccaaattcataaaagggaagccgagaacgataagttgaaagaatatgtaaagagcttagaaaccaagatagccaagtggaacctgcaatcaagaatgaataagaatgaggctatagtgatgaaagaagcaagtaggcaaaaaactgtagctttaaaaaaggcatctaaagtttacaaacaaaggcttgaccattttacaggagctattgaaaagcttacttcccaaattagagatcaggaagccaagttgtctgaaacaatttcagcttccaatgcctggaaaagtcattatgagaaaattgtaatagaaaaaaccgaattggaagtacagattgaaacaatgaaaaagcaaatcattaatcttttggaagatctgaagaaaatggaagaccatggaaaaaattcatgtgaagaaattcttagaaaagttcactcaattgaatatgaaaatgaaactctgaatcttgagaatacaaaattaaagactacacttgctgctttgaaggatgaagttgtatctgttgaaaatgaactctcagaattgcaagaagtagaaaaaaaacagaaaacccttattgaaatgtataaaactcaggtacaaaagttgcaagaagcagctgaaatagtaaaaagcagatgtgaaaatttgctacataaaaataaccaaataacaaaaaccaaaaataaaaatgtagagaagatgagaggccagatggagtctcatctgaaggagttagagcgtgtctgcgattccttgacggcggcggaacggaggcttcacgagtgtcaggagagtctgcagtgctgcaaggggaagtgtgcagaccaggaacacaccattagggagcttcagggccaggtgtccagccgtccttctgagttttgctagatgcgttaaaagaatgctttggaatgatttcaccagttgagggcactcatgtcagggcttgatttttaaattcccatctacttagttcgtaaaacatcattttcatgcagatactataatactgttttgcaagctattcttttagtattttatggtgaaaaattggtaattaaaattcttattttagtttattcatgcaaatctatagacatttgaagacatggtaatagaatgagagaaggagcaaagttatacttacatatatgttccttgatgtaaggataaggtaaattattgaaacttacattacaaaaattgaatttattttaattagaattgtacgtcaagttttttgggatatttttcagtctgtttctttttcctgttttactttttataccatcagaatatggatcatgtgtatcctgttagtagccacatagccttctcctagctcaatgcctagcacatagtaagcactcaatatttttttaattaatgaaattttttttaaaggagcagtccaaagatggtgacaagtcttttttcttttactttcaaggcagttttaggaagcattccctgtctatcttccaaatatgatctggattttaattttgcaaaaaaaaa

SEQ ID NO: 430217 - DNA, 2453 bp, Homo sapiens
gccgccgttgccagagaagccactagccggttactagctgcgcttttgttccacttgagcgggcactcttctgcggcaagcaggtctaggaattcgcctggttcccacctcgcgtcccttgccttccttcctagtctacccactgtagtgccccctgcgtcccgctccctcctagccgactcagagcacaagaaggattgccacggtttccattgcagcagccgtggcgcctctgaccctttttttatatcgcggcgacggcgggctgtcgtcacgacgacgtgcggacgcagcggcgggggcacaggagacaatttatccagcatgttgctagaaaatctaactgataatgaaagtgaaaatactaatcttaagaagaaggtatttgaaaaggaggcccatatccaagaactttcttgtttgtttcagagtgaaaagagcttagaaaccaagatagccaagtggaacctgcaatcaagaatgaataagaatgaggctatagtgatgaaagaagcaagtaggcaaaaaactgtagctttaaaaaaggcatctaaagtttacaaacaaaggcttgaccattttacaggagctattgaaaagcttacttcccaaattagagatcaggaagccaagttgtctgaaacaatttcagcttccaatgcctggaaaagtcattatgagaaaattgtaatagaaaaaaccgaattggaagtacagattgaaacaatgaaaaagcaaatcattaatcttttggaagatctgaagaaaatggaagaccatggaaaaaattcatgtgaagaaattcttagaaaagttcactcaattgaatatgaaaatgaaactctgaatcttgagaatacaaaattaaagactacacttgctgctttgaaggatgaagttgtatctgttgaaaatgaactctcagaattgcaagaagtagaaaaaaaacagaaaacccttattgaaatgtataaaactcaggtacaaaagttgcaagaagcagctgaaatagtaaaaagcagatgtgaaaatttgctacataaaaataaccaaataacaaaaaccaaaaataaaaatgtagagaagatgagaggccagatggagtctcatctgaaggagttagagcgtgtctgcgattccttgacggcggcggaacggaggcttcacgagtgtcaggagagtctgcagtgctgcaaggggaagtgtgcagaccaggaacacaccattagggagcttcagggccagaatatggatcatgtagcagattttgaagcagtgggaagaatattctgtcttggcatgggttgatggaaatcacaatcttctgacaaagctttctctggaagaggaaaactgtcttattcagctgaagtgtgaaaaccttcaacaaaaattagaacagatggacgcagaaaataaagagcttgagaagaagctggcaaaccaagaagaatgtcttaagcacagcaatcttaagtttaaagagaaatctgcagaatatacagcattggccagacaactggaagctgctttagaagaaggaagacaaaaggttgctgaagaaatagagaaaatgtcatctagagagagtgctttacaaattaaaatattagatctggaaactgagcttagaaagaaaaatgaagagcaaaatcaacttgtttgcaaaatgaacagtaaagcacaacatcaggaagtgtgtttgaaagaagtacaaaatagtcttgagaagtcggaaaatcaaaatgagagtattaagaattatttacagtttcttaaaacttcttatgtaacaatgtttgaataaattgtcaaatttattttctctaagtagtagatttttattatgagtctaaaatgtgattgggtaaaaaaataaatatactaccagttacattttatgatttatgagtggtagtattagaggtttttatgtaaagatttttgaaacataatttatctaactgaaactttaaaataggatagttgttactattcctgtttgctggataattcttatttatctttggtttaatttcttttaaaattaaattggttgttagaatatttttctcacacatagacatggaagtcagattcattctttgtgatgtttgtagccaccattcaagtgaatttgtagtaagtcttcggtcaatatgattttaaataatatatataattgttttatattatgatatataaatgtaaaatattctgaattttaatttttaataatggtgtaattacatactttctaaagctactaaatgtctcaatatactacacttaatattgtttcaagtatatgctgagttgccattataatttctgttaggttttaagtatacaattttaaatcatcgctattaagtaccaactgctaatgacagatgaaaacgtggtcatgcattatttctttataaagaatagatattcaggctgtcttcaat

SEQ ID NO: 430218 - DNA, 2696 bp, Homo sapiens
gccgccgttgccagagaagccactagccggttactagctgcgcttttgttccacttgagcgggcactcttctgcggcaagcaggtctaggaattcgcctggttcccacctcgcgtcccttgccttccttcctagtctacccactgtagtgccccctgcgtcccgctccctcctagccgactcagagcacaagaaggattgccacggtttccattgcagcagccgtggcgcctctgaccctttttttatatcgcggcgacggcgggctgtcgtcacgacgacgtgcggacgcagcggcgggggcgcgaatctttctgcattgaatttgaagatttctgaacagaaggaaatattaataaaagaattagacaccttcaaaagtgtaaaactagctttagaacatcttcttagaaagagagactacaaacaaacaggagacaatttatccagcatgttgctagaaaatctaactgataatgaaagtgaaaatactaatcttaagaagaaggtatttgaaaaggaggcccatatccaagaactttcttgtttgtttcagagtgaaaaggcaaatactttgaaagcaaaccgtttttcccaatcagtaaaagtagtacatgaacgactacagatccaaattcataaaagggaagccgagaacgataagttgaaagaatatgtaaagagcttagaaaccaagatagccaagtggaacctgcaatcaagaatgaataagaatgaggctatagtgatgaaagaagcaagtaggcaaaaaactgtagctttaaaaaaggcatctaaagtttacaaacaaaggcttgaccattttacaggagctattgaaaagcttacttcccaaattagagatcaggaagccaagttgtctgaaacaatttcagcttccaatgcctggaaaagtcattatgagaaaattgtaatagaaaaaaccgaattggaagtacagattgaaacaatgaaaaagcaaatcattaatcttttggaagatctgaagaaaatggaagaccatggaaaaaattcatgtgaagaaattcttagaaaagttcactcaattgaatatgaaaatgaaactctgaatcttgagaatacaaaattaaagactacacttgctgctttgaaggatgaagttgtatctgttgaaaatgaactctcagaattgcaagaagtagaaaaaaaacagaaaacccttattgaaatgtataaaactcaggtacaaaagttgcaagaagcagctgaaatagtaaaaagcagatgtgaaaatttgctacataaaaataaccaaataacaaaaaccaaaaataaaaatgtagagaagatgagaggccagatggagtctcatctgaaggagttagagcgtgtctgcgattccttgacggcggcggaacggaggcttcacgagtgtcaggagagtctgcagtgctgcaaggggaagtgtgcagaccaggaacacaccattagggagcttcagggccagaatatggatcatgtagcagattttgaagcagtgggaagaatattctgtcttggcatgggttgatggaaatcacaatcttctgacaaagctttctctggaagaggaaaactgtcttattcagctgaagtgtgaaaaccttcaacaaaaattagaacagatggacgcagaaaataaagagcttgagaagaagctggcaaaccaagaagaatgtcttaagcacagcaatcttaagtttaaagagaaatctgcagaatatacagcattggccagacaactggaagctgctttagaagaaggaagacaaaaggttgctgaagaaatagagaaaatgtcatctagagagagtgctttacaaattaaaatattagatctggaaactgagcttagaaagaaaaatgaagagcaaaatcaacttgtttgcaaaatgaacagtaaagcacaacatcaggaagtgtgtttgaaagaagtacaaaatagtcttgagaagtcggaaaatcaaaatgagagtattaagaattatttacagtttcttaaaacttcttatgtaacaatgtttgaataaattgtcaaatttattttctctaagtagtagatttttattatgagtctaaaatgtgattgggtaaaaaaataaatatactaccagttacattttatgatttatgagtggtagtattagaggtttttatgtaaagatttttgaaacataatttatctaactgaaactttaaaataggatagttgttactattcctgtttgctggataattcttatttatctttggtttaatttcttttaaaattaaattggttgttagaatatttttctcacacatagacatggaagtcagattcattctttgtgatgtttgtagccaccattcaagtgaatttgtagtaagtcttcggtcaatatgattttaaataatatatataattgttttatattatgatatataaatgtaaaatattctgaattttaatttttaataatggtgtaattacatactttctaaagctactaaatgtctcaatatactacacttaatattgtttcaagtatatgctgagttgccattataatttctgttaggttttaagtatacaattttaaatcatcgctattaagtaccaactgctaatgacagatgaaaacgtggtcatgcattatttctttataaagaatagatattcaggctgtcttcaat

SEQ ID NO: 430219 - DNA, 1864 bp, Homo sapiens
tctattgatttttcatatctaggcacatttccaagtttttttgtcagtaaatttagaaagttttaaaaataatatgtcctgtgtaaatcttaataaggatgttcataattattagtcactagctttgtgaaattcctaaattttagatggtattgcatgaaataaaaaataattattttatcaactttgttaatacatgagttatgtttttataataattctgtagcactggagtataaatgtattctaatgacttataaaatctatatcttttttgctagactacacttgctgctttgaaggatgaagttgtatctgttgaaaatgaactctcagaattgcaagaagtagaaaaaaaacagaaaacccttattgaaatgtataaaactcaggtacaaaagttgcaagaagcagctgaaatagtaaaaagcagatgtgaaaatttgctacataaaaataaccaaataacaaaaaccaaaaataaaaatgtagagaagatgagaggccagatggagtctcatctgaaggagttagagcgtgtctgcgattccttgacggcggcggaacggaggcttcacgagtgtcaggagagtctgcagtgctgcaaggggaagtgtgcagaccaggaacacaccattagggagcttcagggccagaatatggatcatgtagcagattttgaagcagtgggaagaatattctgtcttggcatgggttgatggaaatcacaatcttctgacaaagctttctctggaagaggaaaactgtcttattcagctgaagtgtgaaaaccttcaacaaaaattagaacagatggacgcagaaaataaagagcttgagaagaagctggcaaaccaagaagaatgtcttaagcacagcaatcttaagtttaaagagaaatctgcagaatatacagcattggccagacaactggaagctgctttagaagaaggaagacaaaaggttgctgaagaaatagagaaaatgtcatctagagagagtgctttacaaattaaaatattagatctggaaactgagcttagaaagaaaaatgaagagcaaaatcaacttgtttgcaaaatgaacagtaaagcacaacatcaggaagtgtgtttgaaagaagtacaaaatagtcttgagaagtcggaaaatcaaaatgagagtattaagaattatttacagtttcttaaaacttcttatgtaacaatgtttgaataaattgtcaaatttattttctctaagtagtagatttttattatgagtctaaaatgtgattgggtaaaaaaataaatatactaccagttacattttatgatttatgagtggtagtattagaggtttttatgtaaagatttttgaaacataatttatctaactgaaactttaaaataggatagttgttactattcctgtttgctggataattcttatttatctttggtttaatttcttttaaaattaaattggttgttagaatatttttctcacacatagacatggaagtcagattcattctttgtgatgtttgtagccaccattcaagtgaatttgtagtaagtcttcggtcaatatgattttaaataatatatataattgttttatattatgatatataaatgtaaaatattctgaattttaatttttaataatggtgtaattacatactttctaaagctactaaatgtctcaatatactacacttaatattgtttcaagtatatgctgagttgccattataatttctgttaggttttaagtatacaattttaaatcatcgctattaagtaccaactgctaatgacagatgaaaacgtggtcatgcattatttctttataaagaatagatattcaggctgtcttcaat

SEQ ID NO: 430220 - DNA, 838 bp, Homo sapiens
aaagcaacagacccagcagcaccctcaaagcccaaggtcacgtgagatggggcagagggacagtaagtgccggcaccccatacagaggtggagcctggtgggacagcggcgccattcagaagtacccgtcttcttgccgatgcccacggaggcactgtgtgagcagagtgcggggacctttgtaactggaatagggaaacccaagagacatggcagtaagcacgcgtgtgtgtttccgcggaagatgggaagagccttccagaacaggaaaaagtggttcaaactctagcctggcattgctccccgggagtttggtagaggaggcaatggctaggagcaatttctgccatttcttcatcttttcatgatttatgtcaattattatttcttccttgctggtgttctgcatgaaagatgggcgggtaaaaagtacacttgtagtggacacctctaatttcctttggacaagagctgggtaggaattggccttttgtgactctgcctgcccgaatctgtgtctatccgtatatccacacctagcgttgttaggtgtgacatgaacccctatgcctgcgtgggaatgtgcttattctggggcaggccttcctaaagggccctgggagaaatgaagaactgtggcccagcgaaaaagacatgtgatttacccagactcaactccacacaaaaaatgtcccatgtgtcacatcttatataaactaactcccaaattttcatggcagaaggcatagcagtgaccagccttcacaataaagaaggaaagaagtttgttggaaggattacccagtgagtgctagaacgtgcattgaaccgacgcaag

SEQ ID NO: 430221 - DNA, 1628 bp, Homo sapiens
  misc_feature (1062)..(1062): n is a, c, g, or t
  misc_feature (1259)..(1259): n is a, c, g, or t
agcagtttacggaagtgtaacgttgaggcccttcttgtgtatctggagaaaatagaggttctgactcctcaggagcaaaaaacataacctgaagagggaggaagtggatttggggttcaccatttcttggggcacacttgattgaaaactgagacttctgaagagaaggccagaagatacaaagacagaccatcccagttgaatgctgtcttccaagaacagaagaaaatgatccaggcccaggtaactgacttttggtttgttttattctttcctttgttccataatagatttgtagaagcctataaacatcaatttcactaatataaaaagtataaatttcaaaaagcaggatctggagagaagtaagcttagtttttaaactcaatatcatgcaaaatagtaggataaggaatataatgttcatagcattaacactaaattatgaattttgtgacaccatgcatggctggaggatcctgtggattatattagctgtcagcttgcatctaatatctctgacagccaatgtcacaagaaaatcataatttacatggtatgtcctgtttttgaagataaaacagattacttcctgggggttgccattatttcatggcactttggtctcaggaaatttcttcagtggttcttcctagagttgatgtggtggatggtgtccagaatagcagccttctcataaattcagatgcaggtttcctgtggctgtttcttgaaggactccttatatactgttacggaatagactaagcaaacagtaaacacagggaccaacacaagttaatttcagccttgtggcagtctggatttaacttggaataaaacctagacatcctgggaatatggcaggattccaggactttcaaatggttctcaatgaacagatagctgaactggtgtttgaatatagatttggagacagggagttgaaagtgatattgtctgaacaggacttggattggagtttacagatttcctttagactttcaccttgtagaaaatgccaagtccttattgtatagtaaataattgaacaaagggagntttggcctttgtgttcaagctaatggagggtgagctctgggcttctggaatatcttgctaatggtagtgtctttgtttgcttgggtcctttggccactggacagcctaaaaatacgaactatgatagatctgtgatctatgataggccagaaacttccagaactagaggctaaagttaaaacctgacttctgggagngtgtggacctaagatcagccacataggtcatctgtgattgtgtcccagtaaagtaagaaagtacacatatcaaaaaataaatttcggctgggcgcggtggctcatggctgtaatccagcactttgggagaccgaggtgggtggatcacgaggtctggagatcgagaccatcctggctcacaccgtgaaaccctgtctctactaaaaatacaaaaaattggtcgggtgtggtggcaggtgcctgtagtcccagctactcgggaggctgaggcaggagaatggcgtgaacccaggagacggaaattgcagtgagccgaaatggtgccactgcactccagcctgggtgacagagagactccatctcaaaaaa

SEQ ID NO: 430222 - DNA, 807 bp, Homo sapiens
agcagtttacggaagtgtaacgttgaggcccttcttgtgtatctggagaaaatagaggttctgactcctcaggagcaaaaaacataacctgaagagggaggaagtggatttggggttcaccatttcttggggcacacttgattgaaaactgagacttctgaagagaaggccagaagatacaaagacagaccatcccagttgaatgctgtcttccaagaacagaagaaaatgatccaggcccaggaatccataacactggaggatgtggctgtggacttcacttgggaggagtggcaactcctgggcgctgctcagaaggacctgtaccgggatgtgatgttggagaactacagcaacctggtggcagtggggtatcaagccagcaaaccggatgcactcttcaagttggaacaaggagaacaactgtggacaattgaagatggaatccacagtggagcctgttcaggtgagagaacccacaagacagaaggctatggaagtcacattctagacagtcagagaaggcagcacagctgtgaagggggtttgaggatatgtaaacagttcctctactcatctgtctcccagtgtgagaccagtttttctttgtaggaatttagagttaaaaaaaaacaaaacaaaacaaaaactctttatctcctcagagatctgattattttatctacatattgtttgtttgcctgcataattttcttcttcctcgggtttcaagtatttcccttcttcatgttgttccacctctcttgttacgaaattccaccttccaggcctctttccaaagaggaa

SEQ ID NO: 430223 - DNA, 849 bp, Homo sapiens
agcagtttacggaagtgtaacgttgaggcccttcttgtgtatctggagaaaatagaggttctgactcctcaggagcaaaaaacataacctgaagagggaggaagtggatttggggttcaccatttcttggggcacacttgattgaaaactgagacttctgaagagaaggccagaagatacaaagacagaccatcccagttgaatgctgtcttccaagaacagaagaaaatgatccaggcccaggaatccataacactggaggatgtggctgtggacttcacttgggaggagtggcaactcctgggcgctgctcagaaggacctgtaccgggatgtgatgttggagaactacagcaacctggtggcagtggggtatcaagccagcaaaccggatgcactcttcaagttggaacaaggagaacaactgtggacaattgaagatggaatccacagtggagcctgttcagagtcttgctctgtgcccaggctggagcgcaatggtgtgaacttggctcaccgcaacctccacctcctggattcaagcgattcttgtgcctatccccaacaccagcaccatacctggcacacggtgatcattcagtaagagtatgtggaatgaatgaatctgttctttggacgaaatgggcctccagcctctggtctgctggtcacagtgaattgcttgtattttaaggtctgttttgcaaggcacatttagaaagcagccaaatctgtctttattattagtgatctaaccttgttttatgctaactgctttcaccttttagtttgtttatactattactttttgccaatgtgcaaggaacattaaacatggagttttatttac

SEQ ID NO: 430224 - DNA, 2349 bp, Homo sapiens
agcagtttacggaagtgtaacgttgaggcccttcttgtgtatctggagaaaatagaggttctgactcctcaggagcaaaaaacataacctgaagagggaggaagtggatttggggttcaccatttcttggggcacacttgattgaaaactgagacttctgaagagaaggccagaagatacaaagacagaccatcccagttgaatgctgtcttccaagaacagaagaaaatgatccaggcccaggaatccataacactggaggatgtggctgtggacttcacttgggaggagtggcaactcctgggcgctgctcagaaggacctgtaccgggatgtgatgttggagaactacagcaacctggtggcagtggggtatcaagccagcaaaccggatgcactcttcaagttggaacaaggagaacaactgtggacaattgaagatggaatccacagtggagcctgttcagacatatggaaagttgatcatgtgctggagcgcttgcagagtgaaagcctggtgaacagaaggaaaccatgtcatgaacatgatgcatttgaaaatattgttcattgcagcaaaagtcagtttctgttagggcaaaatcatgatatatttgacttacgtggaaaaagtttgaaatccaatttaactttagttaaccagagcaaaggctatgaaataaagaactctgttgagtttactggaaatggggactcctttcttcatgctaaccatgaacgacttcatactgcaattaaattccctgcaagtcaaaaactcatcagcactaagtcccaattcatcagtcccaagcatcagaaaacacgaaaattagagaagcatcatgtgtgcagtgaatgtgggaaagccttcatcaagaagtcttggctaactgatcaccaggtaatgcatacaggagagaaaccccacagatgcagtctatgtgagaaagccttctccagaaagttcatgcttactgaacatcagcgaactcatacaggagaaaaaccttatgaatgccctgaatgtggcaaagcctttctcaagaaatcacggctcaacatacatcagaaaacacataccggagagaaaccctatatatgcagtgaatgtggaaaaggcttcatccagaaaggaaatctcattgtacaccagcgaattcatacaggtgagaaaccttatatatgcaatgaatgtggaaaaggcttcattcagaagacgtgtctcatagcacatcagagatttcacacaggaaagacgccctttgtgtgcagtgaatgtggaaaatcctgttctcagaaatcaggtctcattaaacatcaaagaattcacacaggagagaaaccctttgaatgtagtgaatgtgggaaagcctttagcacaaagcaaaagctcattgtccatcaaaggactcatacaggagagagaccctatggctgtaacgagtgtgggaaagcgtttgcgtatatgtcgtgtctggttaagcataagagaatacacacaagggagaaacaagaggcagccaaggtggaaaatcctcctgcagagaggcacagctcattacacaccagtgatgtcatgcaggagaaaaactctgctaacggggcgactacacaagtgccttctgtggcccctcagacatcattaaacatcagcggcctcctcgcaaacaggaacgtagtccttgtgggacagccagtggtcagatgtgcagcctcaggagataacagaggatttgcacaggacagaaaccttgtgaatgcagtgaatgtggttgtgccttccgtgatcaattatgtcttattttatgttacagaaaacccataggaagaaaactcagatctatgtggaaaagggttgagcaaaaatttgtagttcattatgtggccgaaaagcatacactgagagaacatgtataaggctgagatagcctgataaactcatcctattaaaatgtatgctgtgatacacaggcaaatttgatgttaacctaagcacatacacagcaattgctcgactgtgtcaattaaatgagtaaaggaagcccaagtacttttaagtggaggaaatgaagtactgtgaatttttaaaacagatgagataattggtgttgggagtgttgcagtgactgaaaagcttcataaggggcagttggtgggaaagggctaatactgtaatggtggaatgtgggacacatatgtgtcaattcagtttccttagaccagtgccagtgtggaggattaattgaaaaccaggaccataaactttcagaactttgtattatgcagagggatctgtgaaactagtcaatttgtttcattaaacaaatattttaaaattaattccttt

SEQ ID NO: 430225 - DNA, 1976 bp, Homo sapiens
agcagtttacggaagtgtaacgttgaggcccttcttgtgtatctggagaaaatagaggttctgactcctcaggagcaaaaaacataacctgaagagggaggaagtggatttggggttcaccatttcttggggcacacttgattgaaaactgagacttctgaagagaaggccagaagatacaaagacagaccatcccagttgaatgctgtcttccaagaacagaagaaaatgatccaggcccaggaatccataacactggaggatgtggctgtggacttcacttgggaggagtggcaactcctgggcgctgctcagaaggacctgtaccgggatgtgatgttggagaactacagcaacctggtggcagtggggtatcaagccagcaaaccggatgcactcttcaagttggaacaaggagaacaactgtggacaattgaagatggaatccacagtggagcctgttcagacatatggaaagttgatcatgtgctggagcgcttgcagagtgaaagcctggtgaacagaaggaaaccatgtcatgaacatgatgcatttgaaaatattgttcattgcagcaaaagtcagtttctgttagggcaaaatcatgatatatttgacttacgtggaaaaagtttgaaatccaatttaactttagttaaccagagcaaaggctatgaaataaagaactctgttgagtttactggaaatggggactcctttcttcatgctaaccatgaacgacttcatactgcaattaaattccctgcaagtcaaaaactcatcagcactaagtcccaattcatcagtcccaagcatcagaaaacacgaaaattagagaagcatcatgtgtgcagtgaatgtgggaaagccttcatcaagaagtcttggctaactgatcaccaggtaatgcatacaggagagaaaccccacagatgcagtctatgtgagaaagccttctccagaaagttcatgcttactgaacatcagcgaactcatacaggagaaaaaccttatgaatgccctgaatgtggcaaagcctttctcaagaaatcacggctcaacatacatcagaaaacacataccggagagaaaccctatatatgcagtgaatgtggaaaaggcttcatccagaaaggaaatctcattgtacaccagcgaattcatacaggtgagaaaccttatatatgcaatgaatgtggaaaaggcttcattcagaagacgtgtctcatagcacatcagagatttcacacaggaaagacgccctttgtgtgcagtgaatgtggaaaatcctgttctcagaaatcaggtctcattaaacatcaaagaattcacacaggagagaaaccctttgaatgtagtgaatgtgggaaagcctttagcacaaagcaaaagctcattgtccatcaaaggactcatacaggagagagaccctatggctgtaacgagtgtgggaaagcgtttgcgtatatgtcgtgtctggttaagcataagagaatacacacaagggagaaacaagaggcagccaaggtggaaaatcctcctgcagagaggcacagctcattacacaccagtgatgtcatgcaggagaaaaactctgctaacggggcgactacacaagtgccttctgtggcccctcagacatcattaaacatcagcggcctcctcgcaaacaggaacgtagtccttgtgggacagccagtggtcagatgtgcagcctcaggagataacagaggatttgcacaggacagaaaccttgtgaatgcagtgaatgtggttgtgccttccgtgatcaattatgtcttattttatgttacagaaaacccataggaagaaaactcagatctatgtggaaaagggttgagcaaaaatttgtagttcattatgtggccgaaaagcatacactgagagaacatgtataaggctgagatagcctgataaactcatcctattaaaatgtatgctgtgatacacaggca

SEQ ID NO: 430226 - DNA, 691 bp, Homo sapiens
aaatgaagactaatgactcatagactgtgtaccatatagtacttaatagatgagcttgcaatgaccatcacctcaattttttaaataacaccaagatccacaagccaaaataaacattgattaaaaagttatgttattcaagataactcagtcttcccaatctcaaagagaaaaaggaaactgagttatcttgaataacataactttttaatcaaatgtttattttggcttgtggatcttggtgttatttaagataactcagtttcctttttctctttgagattgggaagggctgggtctttaaaaacctgaagaggagttggtaagaggaaaaaatcctcaatgctttaaaaaactcaactggttagaagtccatacaactactatgctggcatggacagagatgtttcctgtcacagaactgttcactttcccatagaagtacttcctccaagccaactatataaagatgtaaatcagctcacccatgattgaaactgaaataatccttcaaaatagaagtaagacacctcacccaaaaagatcttttaaatcattgctagctgaactgctattggtcatagtagttggtggctgtgcaaagttctgtgggttaaagaaaggattaccctgcataccaaaagcagattgtcctatcacgttcatctgtgtccccattactgaactgccc

SEQ ID NO: 430227 - DNA, 5588 bp, Homo sapiens
agtctttttccccctcccttactcttcgtccccggtccctcccctccccacccctttccttctagctccgacgtttgcggccgcgggggcggcggaggatatggagtaaagccagagtcagtggccaggcacgaaggcagagcaggaacagccaggaggcgtttattaggggggcggggggaaagagccccagcaccgcccctcctggaagaaggaagaggtaactataactacccaatattgcagccatggagtccatgcttaataaattgaagagtactgttacaaaagtaacagctgatgtcactagtgctgtaatgggaaatcctgtcactagagaatttgatgttggtcgacacattgccagtggtggcaatgggctagcttggaagatttttaatggcacaaaaaagtcaacaaagcaggaagtggcagtttttgtctttgataaaaaactgattgacaagtatcaaaaatttgaaaaggatcaaatcattgattctctaaaacgaggagtccaacagttaactcggcttcgacaccctcgacttcttactgtccagcatcctttagaagaatccagggattgcttggcattttgtacagaaccagtttttgccagtttagccaatgttcttggtaactgggaaaatctaccttcccctatatctccagacattaaggattataaactttatgatgtagaaaccaaatatggtttgcttcaggtttctgaaggattgtcattcttgcatagcagtgtgaaaatggtgcatggaaatatcactcctgaaaatataattttgaataaaagtggagcctggaaaataatgggttttgatttttgtgtatcatcaaccaatccttctgaacaagagcctaaatttccttgtaaagaatgggacccaaatttaccttcattgtgtcttccaaatcctgaatatttggctcctgaatacatactttctgtgagctgtgaaacagccagtgatatgtattctttaggaactgttatgtatgctgtatttaataaagggaaacctatatttgaagtcaacaagcaagatatttacaagagtttcagtaggcagttggatcagttgagtcgtttaggatctagttcacttacaaatatacctgaggaagttcgtgaacatgtaaagctactgttaaatgtaactccgactgtaagaccagatgcagatcaaatgacaaagattcccttctttgatgatgttggtgcagtaacactgcaatattttgataccttattccaaagagataatcttcagaaatcacagtttttcaaaggactgccaaaggttctaccaaaactgcccaagcgtgtcattgtgcagagaattttgccttgtttgacttcagaatttgtaaaccctgacatggtaccttttgttttgcccaatgttctacttattgctgaggaatgcaccaaagaagaatatgtcaaattaattcttcctgaacttggccctgtgtttaagcagcaggagccaatccagattttgttaattttcctacaaaaaatggatttgctactaaccaaaacccctcctgatgagataaagaacagtgttctacccatggtttacagagcactagaagctccttccattcagatccaggagctctgtctaaacatcattccaacctttgcaaatcttatagactacccatccatgaaaaacgctttgataccaagaattaaaaatgcttgtctacaaacatcttcccttgcggttcgtgtaaattcattagtgtgcttaggaaagattttggaatacttggataagtggtttgtacttgatgatatcctacccttcttacaacaaattccatccaaggaacctgcggtcctcatgggaattttaggtatttacaaatgtacttttactcataagaagttgggaatcaccaaagagcagctggccggaaaagtgttgcctcatcttattcccctgagtattgaaaacaatcttaatcttaatcagttcaattctttcatttccgtcataaaagaaatgcttaatagattggagtctgaacataagactaaactggagcaacttcatataatgcaagaacagcagaaatctttggatataggaaatcaaatgaatgtttctgaggagatgaaagttacaaatattgggaatcagcaaattgacaaagtttttaacaacattggagcagaccttctgactggcagtgagtccgaaaataaagaggacgggttacagaataaacataaaagagcatcacttacacttgaagaaaaacaaaaattagcaaaagaacaagagcaggcacagaagctgaaaagccagcagcctcttaaaccccaagtgcacacacctgttgctactgttaaacagactaaggacttgacagacacactgatggataatatgtcatccttgaccagcctttctgttagtacccctaaatcttctgcttcaagtactttcacttctgttccttccatgggcattggtatgatgttttctacaccaactgataatacaaagagaaatttgacaaatggcctaaatgccaatatgggctttcagacttcaggattcaacatgcccgttaatacaaaccagaacttctacagtagtccaagcacagttggagtgaccaagatgactctgggaacacctcccactttgccaaacttcaatgctttgagtgttcctcctgctggtgcaaagcagacccaacaaagacccacagatatgtctgcccttaataatctctttggccctcagaaacccaaagttagcatgaaccagttatcacaacagaaaccaaatcagtggcttaatcagtttgtacctcctcaaggttctccaactatgggcagttcagtaatggggacacagatgaacgtgataggacaatctgcttttggtatgcagggtaatcctttctttaacccacagaactttgcacagccaccaactactatgaccaatagcagttcagctagcaatgatttaaaagatctttttgggtgaggtgtcttacttctattttgaaggattatttcagtttcaatcatgggtgagctgatttacatctttatatagttggcttggaggaagtacttctatgggaaagtgaacagttctgtgacaggaaacatctctgtccatgccagcatagtagttgtatggacttctaaccagttgagttttttaaagcattgaggattttttcctcttaccaactcctcttcaggtttttaaagacccagcccttcccaatctcaaagagaaaaaggaaactgagttatcttgaataacataactttttaatcaaatgtttattttggcttgtggatcttggtgttatttaaaaaattgaggtgatggtcattgcaagctcatctattaagtactatatggtacacagtctatgagtcattagtcttcattttaatatgtaaaaaatcttgatgctgtattgatttgtttgcatttaagatgacagtgagaaaatgataagcataaagagaagtatcaggttatttgctttttccaaacttttcagatgaactattgtttagtacagagactgagcaaatactacaaaattcaacttaaccttcatttcattggtttaaatgcgttattaaccatcttaagtgcaaactaatcattgtaaattatattttagcatggtctgcctcaaatagtaatgtatttttctgcattcacttggatatatttagaatcacttttttcctcctgtatcaaggaagaggtatgtgctgatttgtttggatatttgacaaggcactctgatgtgacttccctgactactaccttcatatttcatttcaaattcaaacttctgaggttgcagcatatatgaattgcattttcaaaagaagatttgtaagaattaaactatatttatgagtaaacttttgaggtttctgctgtattgtttcaaatgtaataaactttacttctgtaaaaattgagcagttgtatcttctgaccaccaacagattttcagcttgccatgatagtctgacctcattaattactgctactgaagttcaatttttttctaggaattttaggaaccttttgtttaaatattttaatttctattagccatttttaggaaggaaagaatcaattctcttaacaggaaacatgctttatttttcaaaacctttctctgatatttttctttaatttgctgattattcaaccacagagccttatgctataaatgtcatttgtattttaaaaaataatattccactcataaaactttaaaaccatctttcaacgaactatatatgtattatagttgctgccatagagttgatggtttttaattatctggaaccagcaatcatttaaaataaaccatattaagtttagtatgctggtattgtttattcattttatatgaatattcattgaaaatatatacacaatatatgtaatacacagcacttgattacaaaatgtaatttaattatattattgctggcagcattcagttaagagggtactttaaaaaatagaagtcagctttcacatctgatttctgtatgggctgtacttggttaacttgattttagaaaaaggactaacagaattgctaaagaaatgcatccaataaatgaaaaacagtaggaagatcaaatgtttttgtcaaatatattcacaacttgaccagattagctgtcctgtttgtaatgcaatattaatatgtcttttgggaaaaagcctacatatggaataaaataagtattgaagaatttttctttgtaacaatttagtagtcactgtttattgagaaattgttttttattttgtaaaataacatgatgttagtgttgaactcttaaacagaaagaaagcttaatataacagcttatagaacttgaactactaaatatgaaaataagtcatttgaaaaaaatacagtatgtaaaatttgttcattcgttgaggtaatggtgctatgtttttacaaaattgttcctacaccttttttctacttcaggtattttatttcaaccatttccatcaattgaactgttaccattgcctttttctgttgagaaattgcctctgaaaaatagtgctatttttcagcttaagtgttcttaagtgaatgaaattttcaaagtactagatcaccttaaaattatttcacgtactgaagacaattaagtccgttatgtttagagtagaaaatgtttaggttaaagagcatctgtcaacagaatctacaaaaaagattcccttgcatttgaattagttctctattctcctattgctaaatgtgtgatatatagagaggatgtataaaaggaaatggaaatagactatgtacttgtctggtttttgtttgtttttattttggaatgcttataagcctcctttacactgaataaggaagtagtttttgttttcttttgacctgtaaaatacctcacatggttgtttttacacatgaaagaaaaaggtatatgcgaacatacctgatatcaagaggagtatgcaccaaataaattttagctttgataaaactttcca

SEQ ID NO: 430228 - DNA, 5415 bp, Homo sapiens
gagaacgtagtacctttcggggacattggacactactctaggaccgggtaactataactacccaatattgcagccatggagtccatgcttaataaattgaagagtactgttacaaaagtaacagctgatgtcactagtgctgtaatgggaaatcctgtcactagagaatttgatgttggtcgacacattgccagtggtggcaatgggctagcttggaagatttttaatggcacaaaaaagtcaacaaagcaggaagtggcagtttttgtctttgataaaaaactgattgacaagtatcaaaaatttgaaaaggatcaaatcattgattctctaaaacgaggagtccaacagttaactcggcttcgacaccctcgacttcttactgtccagcatcctttagaagaatccagggattgcttggcattttgtacagaaccagtttttgccagtttagccaatgttcttggtaactgggaaaatctaccttcccctatatctccagacattaaggattataaactttatgatgtagaaaccaaatatggtttgcttcaggtttctgaaggattgtcattcttgcatagcagtgtgaaaatggtgcatggaaatatcactcctgaaaatataattttgaataaaagtggagcctggaaaataatgggttttgatttttgtgtatcatcaaccaatccttctgaacaagagcctaaatttccttgtaaagaatgggacccaaatttaccttcattgtgtcttccaaatcctgaatatttggctcctgaatacatactttctgtgagctgtgaaacagccagtgatatgtattctttaggaactgttatgtatgctgtatttaataaagggaaacctatatttgaagtcaacaagcaagatatttacaagagtttcagtaggcagttggatcagttgagtcgtttaggatctagttcacttacaaatatacctgaggaagttcgtgaacatgtaaagctactgttaaatgtaactccgactgtaagaccagatgcagatcaaatgacaaagattcccttctttgatgatgttggtgcagtaacactgcaatattttgataccttattccaaagagataatcttcagaaatcacagtttttcaaaggactgccaaaggttctaccaaaactgcccaagcgtgtcattgtgcagagaattttgccttgtttgacttcagaatttgtaaaccctgacatggtaccttttgttttgcccaatgttctacttattgctgaggaatgcaccaaagaagaatatgtcaaattaattcttcctgaacttggccctgtgtttaagcagcaggagccaatccagattttgttaattttcctacaaaaaatggatttgctactaaccaaaacccctcctgatgagataaagaacagtgttctacccatggtttacagagcactagaagctccttccattcagatccaggagctctgtctaaacatcattccaacctttgcaaatcttatagactacccatccatgaaaaacgctttgataccaagaattaaaaatgcttgtctacaaacatcttcccttgcggttcgtgtaaattcattagtgtgcttaggaaagattttggaatacttggataagtggtttgtacttgatgatatcctacccttcttacaacaaattccatccaaggaacctgcggtcctcatgggaattttaggtatttacaaatgtacttttactcataagaagttgggaatcaccaaagagcagctggccggaaaagtgttgcctcatcttattcccctgagtattgaaaacaatcttaatcttaatcagttcaattctttcatttccgtcataaaagaaatgcttaatagattggagtctgaacataagactaaactggagcaacttcatataatgcaagaacagcagaaatctttggatataggaaatcaaatgaatgtttctgaggagatgaaagttacaaatattgggaatcagcaaattgacaaagtttttaacaacattggagcagaccttctgactggcagtgagtccgaaaataaagaggacgggttacagaataaacataaaagagcatcacttacacttgaagaaaaacaaaaattagcaaaagaacaagagcaggcacagaagctgaaaagccagcagcctcttaaaccccaagtgcacacacctgttgctactgttaaacagactaaggacttgacagacacactgatggataatatgtcatccttgaccagcctttctgttagtacccctaaatcttctgcttcaagtactttcacttctgttccttccatgggcattggtatgatgttttctacaccaactgataatacaaagagaaatttgacaaatggcctaaatgccaatatgggctttcagacttcaggattcaacatgcccgttaatacaaaccagaacttctacagtagtccaagcacagttggagtgaccaagatgactctgggaacacctcccactttgccaaacttcaatgctttgagtgttcctcctgctggtgcaaagcagacccaacaaagacccacagatatgtctgcccttaataatctctttggccctcagaaacccaaagttagcatgaaccagttatcacaacagaaaccaaatcagtggcttaatcagtttgtacctcctcaaggttctccaactatgggcagttcagtaatggggacacagatgaacgtgataggacaatctgcttttggtatgcagggtaatcctttctttaacccacagaactttgcacagccaccaactactatgaccaatagcagttcagctagcaatgatttaaaagatctttttgggtgaggtgtcttacttctattttgaaggattatttcagtttcaatcatgggtgagctgatttacatctttatatagttggcttggaggaagtacttctatgggaaagtgaacagttctgtgacaggaaacatctctgtccatgccagcatagtagttgtatggacttctaaccagttgagttttttaaagcattgaggattttttcctcttaccaactcctcttcaggtttttaaagacccagcccttcccaatctcaaagagaaaaaggaaactgagttatcttgaataacataactttttaatcaaatgtttattttggcttgtggatcttggtgttatttaaaaaattgaggtgatggtcattgcaagctcatctattaagtactatatggtacacagtctatgagtcattagtcttcattttaatatgtaaaaaatcttgatgctgtattgatttgtttgcatttaagatgacagtgagaaaatgataagcataaagagaagtatcaggttatttgctttttccaaacttttcagatgaactattgtttagtacagagactgagcaaatactacaaaattcaacttaaccttcatttcattggtttaaatgcgttattaaccatcttaagtgcaaactaatcattgtaaattatattttagcatggtctgcctcaaatagtaatgtatttttctgcattcacttggatatatttagaatcacttttttcctcctgtatcaaggaagaggtatgtgctgatttgtttggatatttgacaaggcactctgatgtgacttccctgactactaccttcatatttcatttcaaattcaaacttctgaggttgcagcatatatgaattgcattttcaaaagaagatttgtaagaattaaactatatttatgagtaaacttttgaggtttctgctgtattgtttcaaatgtaataaactttacttctgtaaaaattgagcagttgtatcttctgaccaccaacagattttcagcttgccatgatagtctgacctcattaattactgctactgaagttcaatttttttctaggaattttaggaaccttttgtttaaatattttaatttctattagccatttttaggaaggaaagaatcaattctcttaacaggaaacatgctttatttttcaaaacctttctctgatatttttctttaatttgctgattattcaaccacagagccttatgctataaatgtcatttgtattttaaaaaataatattccactcataaaactttaaaaccatctttcaacgaactatatatgtattatagttgctgccatagagttgatggtttttaattatctggaaccagcaatcatttaaaataaaccatattaagtttagtatgctggtattgtttattcattttatatgaatattcattgaaaatatatacacaatatatgtaatacacagcacttgattacaaaatgtaatttaattatattattgctggcagcattcagttaagagggtactttaaaaaatagaagtcagctttcacatctgatttctgtatgggctgtacttggttaacttgattttagaaaaaggactaacagaattgctaaagaaatgcatccaataaatgaaaaacagtaggaagatcaaatgtttttgtcaaatatattcacaacttgaccagattagctgtcctgtttgtaatgcaatattaatatgtcttttgggaaaaagcctacatatggaataaaataagtattgaagaatttttctttgtaacaatttagtagtcactgtttattgagaaattgttttttattttgtaaaataacatgatgttagtgttgaactcttaaacagaaagaaagcttaatataacagcttatagaacttgaactactaaatatgaaaataagtcatttgaaaaaaatacagtatgtaaaatttgttcattcgttgaggtaatggtgctatgtttttacaaaattgttcctacaccttttttctacttcaggtattttatttcaaccatttccatcaattgaactgttaccattgcctttttctgttgagaaattgcctctgaaaaatagtgctatttttcagcttaagtgttcttaagtgaatgaaattttcaaagtactagatcaccttaaaattatttcacgtactgaagacaattaagtccgttatgtttagagtagaaaatgtttaggttaaagagcatctgtcaacagaatctacaaaaaagattcccttgcatttgaattagttctctattctcctattgctaaatgtgtgatatatagagaggatgtataaaaggaaatggaaatagactatgtacttgtctggtttttgtttgtttttattttggaatgcttataagcctcctttacactgaataaggaagtagtttttgttttcttttgacctgtaaaatacctcacatggttgtttttacacatgaaagaaaaaggtatatgcgaacatacctgatatcaagaggagtatgcaccaaataaattttagctttgataaaactttcca

SEQ ID NO: 430229 - DNA, 4963 bp, Homo sapiens
agtctttttccccctcccttactcttcgtccccggtccctcccctccccacccctttccttctagctccgacgtttgcggccgcgggggcggcggaggatatggagtaaagccagagtcagtggccaggcacgaaggcagagcaggaacagccaggaggcgtttattaggggggcggggggaaagagccccagcaccgcccctcctggaagaaggaagaggaagtggcagtttttgtctttgataaaaaactgattgacaagtatcaaaaatttgaaaaggatcaaatcattgattctctaaaacgaggagtccaacagttaactcggcttcgacaccctcgacttcttactgtccagcatcctttagaagaatccagggattgcttggcattttgtacagaaccagtttttgccagtttagccaatgttcttggtaactgggaaaatctaccttcccctatatctccagacattaaggattataaactttatgatgtagaaaccaaatatggtttgcttcaggtttctgaaggattgtcattcttgcatagcagtgtgaaaatggtgcatggaaatatcactcctgaaaatataattttgaataaaagtggagcctggaaaataatgggttttgatttttgtgtatcatcaaccaatccttctgaacaagagcctaaatttccttgtaaagaatgggacccaaatttaccttcattgtgtcttccaaatcctgaatatttggctcctgaatacatactttctgtgagctgtgaaacagccagtgatatgtattctttaggaactgttatgtatgctgtatttaataaagggaaacctatatttgaagtcaacaagcaagatatttacaagagtttcagtaggcagttggatcagttgagtcgtttaggatctagttcacttacaaatatacctgaggaagttcgtgaacatgtaaagctactgttaaatgtaactccgactgtaagaccagatgcagatcaaatgacaaagattcccttctttgatgatgttggtgcagtaacactgcaatattttgataccttattccaaagagataatcttcagaaatcacagtttttcaaaggactgccaaaggttctaccaaaactgcccaagcgtgtcattgtgcagagaattttgccttgtttgacttcagaatttgtaaaccctgacatggtaccttttgttttgcccaatgttctacttattgctgaggaatgcaccaaagaagaatatgtcaaattaattcttcctgaacttggccctgtgtttaagcagcaggagccaatccagattttgttaattttcctacaaaaaatggatttgctactaaccaaaacccctcctgatgagataaagaacagtgttctacccatggtttacagagcactagaagctccttccattcagatccaggagctctgtctaaacatcattccaacctttgcaaatcttatagactacccatccatgaaaaacgctttgataccaagaattaaaaatgcttgtctacaaacatcttcccttgcgcaaattgacaaagtttttaacaacattggagcagaccttctgactggcagtgagtccgaaaataaagaggacgggttacagaataaacataaaagagcatcacttacacttgaagaaaaacaaaaattagcaaaagaacaagagcaggcacagaagctgaaaagccagcagcctcttaaaccccaagtgcacacacctgttgctactgttaaacagactaaggacttgacagacacactgatggataatatgtcatccttgaccagcctttctgttagtacccctaaatcttctgcttcaagtactttcacttctgttccttccatgggcattggtatgatgttttctacaccaactgataatacaaagagaaatttgacaaatggcctaaatgccaatatgggctttcagacttcaggattcaacatgcccgttaatacaaaccagaacttctacagtagtccaagcacagttggagtgaccaagatgactctgggaacacctcccactttgccaaacttcaatgctttgagtgttcctcctgctggtgcaaagcagacccaacaaagacccacagatatgtctgcccttaataatctctttggccctcagaaacccaaagttagcatgaaccagttatcacaacagaaaccaaatcagtggcttaatcagtttgtacctcctcaaggttctccaactatgggcagttcagtaatggggacacagatgaacgtgataggacaatctgcttttggtatgcagggtaatcctttctttaacccacagaactttgcacagccaccaactactatgaccaatagcagttcagctagcaatgatttaaaagatctttttgggtgaggtgtcttacttctattttgaaggattatttcagtttcaatcatgggtgagctgatttacatctttatatagttggcttggaggaagtacttctatgggaaagtgaacagttctgtgacaggaaacatctctgtccatgccagcatagtagttgtatggacttctaaccagttgagttttttaaagcattgaggattttttcctcttaccaactcctcttcaggtttttaaagacccagcccttcccaatctcaaagagaaaaaggaaactgagttatcttgaataacataactttttaatcaaatgtttattttggcttgtggatcttggtgttatttaaaaaattgaggtgatggtcattgcaagctcatctattaagtactatatggtacacagtctatgagtcattagtcttcattttaatatgtaaaaaatcttgatgctgtattgatttgtttgcatttaagatgacagtgagaaaatgataagcataaagagaagtatcaggttatttgctttttccaaacttttcagatgaactattgtttagtacagagactgagcaaatactacaaaattcaacttaaccttcatttcattggtttaaatgcgttattaaccatcttaagtgcaaactaatcattgtaaattatattttagcatggtctgcctcaaatagtaatgtatttttctgcattcacttggatatatttagaatcacttttttcctcctgtatcaaggaagaggtatgtgctgatttgtttggatatttgacaaggcactctgatgtgacttccctgactactaccttcatatttcatttcaaattcaaacttctgaggttgcagcatatatgaattgcattttcaaaagaagatttgtaagaattaaactatatttatgagtaaacttttgaggtttctgctgtattgtttcaaatgtaataaactttacttctgtaaaaattgagcagttgtatcttctgaccaccaacagattttcagcttgccatgatagtctgacctcattaattactgctactgaagttcaatttttttctaggaattttaggaaccttttgtttaaatattttaatttctattagccatttttaggaaggaaagaatcaattctcttaacaggaaacatgctttatttttcaaaacctttctctgatatttttctttaatttgctgattattcaaccacagagccttatgctataaatgtcatttgtattttaaaaaataatattccactcataaaactttaaaaccatctttcaacgaactatatatgtattatagttgctgccatagagttgatggtttttaattatctggaaccagcaatcatttaaaataaaccatattaagtttagtatgctggtattgtttattcattttatatgaatattcattgaaaatatatacacaatatatgtaatacacagcacttgattacaaaatgtaatttaattatattattgctggcagcattcagttaagagggtactttaaaaaatagaagtcagctttcacatctgatttctgtatgggctgtacttggttaacttgattttagaaaaaggactaacagaattgctaaagaaatgcatccaataaatgaaaaacagtaggaagatcaaatgtttttgtcaaatatattcacaacttgaccagattagctgtcctgtttgtaatgcaatattaatatgtcttttgggaaaaagcctacatatggaataaaataagtattgaagaatttttctttgtaacaatttagtagtcactgtttattgagaaattgttttttattttgtaaaataacatgatgttagtgttgaactcttaaacagaaagaaagcttaatataacagcttatagaacttgaactactaaatatgaaaataagtcatttgaaaaaaatacagtatgtaaaatttgttcattcgttgaggtaatggtgctatgtttttacaaaattgttcctacaccttttttctacttcaggtattttatttcaaccatttccatcaattgaactgttaccattgcctttttctgttgagaaattgcctctgaaaaatagtgctatttttcagcttaagtgttcttaagtgaatgaaattttcaaagtactagatcaccttaaaattatttcacgtactgaagacaattaagtccgttatgtttagagtagaaaatgtttaggttaaagagcatctgtcaacagaatctacaaaaaagattcccttgcatttgaattagttctctattctcctattgctaaatgtgtgatatatagagaggatgtataaaaggaaatggaaatagactatgtacttgtctggtttttgtttgtttttattttggaatgcttataagcctcctttacactgaataaggaagtagtttttgttttcttttgacctgtaaaatacctcacatggttgtttttacacatgaaagaaaaaggtatatgcgaacatacctgatatcaagaggagtatgcaccaaataaattttagctttgataaaactttcca

SEQ ID NO: 430230 - DNA, 6206 bp, Homo sapiens
  misc_feature (6206)..(6206): n is a, c, g, or t
agtctttttccccctcccttactcttcgtccccggtccctcccctccccacccctttccttctagctccgacgtttgcggccgcgggggcggcggaggatatggagtaaagccagagtcagtggccaggcacgaaggcagagcaggaacagccaggaggcgtttattaggggggcggggggaaagagccccagcaccgcccctcctggaagaaggaagaggtaactataactacccaatattgcagccatggagtccatgcttaataaattgaagagtactgttacaaaagtaacagctgatgtcactagtgctgtaatgggaaatcctgtcactagagaatttgatgttggtcgacacattgccagtggtggcaatgggctagcttggaagatttttaatggcacaaaaaagtcaacaaagcaggaagtggcagtttttgtctttgataaaaaactgattgacaagtatcaaaaatttgaaaaggatcaaatcattgattctctaaaacgaggagtccaacagttaactcggcttcgacaccctcgacttcttactgtccagcatcctttagaagaatccagggattgcttggcattttgtacagaaccagtttttgccagtttagccaatgttcttggtaactgggaaaatctaccttcccctatatctccagacattaaggattataaactttatgatgtagaaaccaaatatggtttgcttcaggtttctgaaggattgtcattcttgcatagcagtgtgaaaatggtgcatggaaatatcactcctgaaaatataattttgaataaaagtggagcctggaaaataatgggttttgatttttgtgtatcatcaaccaatccttctgaacaagagcctaaatttccttgtaaagaatgggacccaaatttaccttcattgtgtcttccaaatcctgaatatttggctcctgaatacatactttctgtgagctgtgaaacagccagtgatatgtattctttaggaactgttatgtatgctgtatttaataaagggaaacctatatttgaagtcaacaagcaagatatttacaagagtttcagtaggcagttggatcagttgagtcgtttaggatctagttcacttacaaatatacctgaggaagttcgtgaacatgtaaagctactgttaaatgtaactccgactgtaagaccagatgcagatcaaatgacaaagattcccttctttgatgatgttggtgcagtaacactgcaatattttgataccttattccaaagagataatcttcagaaatcacagtttttcaaaggactgccaaaggttctaccaaaactgcccaagcgtgtcattgtgcagagaattttgccttgtttgacttcagaatttgtaaaccctgacatggtaccttttgttttgcccaatgttctacttattgctgaggaatgcaccaaagaagaatatgtcaaattaattcttcctgaacttggccctgtgtttaagcagcaggagccaatccagattttgttaattttcctacaaaaaatggatttgctactaaccaaaacccctcctgatgagataaagaacagtgttctacccatggtttacagagcactagaagctccttccattcagatccaggagctctgtctaaacatcattccaacctttgcaaatcttatagactacccatccatgaaaaacgctttgataccaagaattaaaaatgcttgtctacaaacatcttcccttgcggttcgtgtaaattcattagtgtgcttaggaaagattttggaatacttggataagtggtttgtacttgatgatatcctacccttcttacaacaaattccatccaaggaacctgcggtcctcatgggaattttaggtatttacaaatgtacttttactcataagaagttgggaatcaccaaagagcagctggccggaaaagtgttgcctcatcttattcccctgagtattgaaaacaatcttaatcttaatcagttcaattctttcatttccgtcataaaagaaatgcttaatagattggagtctgaacataagactaaactggagcaacttcatataatgcaagaacagcagaaatctttggatataggaaatcaaatgaatgtttctgaggagatgaaagttacaaatattgggaatcagcaaattgacaaagtttttaacaacattggagcagaccttctgactggcagtgagtccgaaaataaagaggacgggttacagaataaacataaaagagcatcacttacacttgaagaaaaacaaaaattagcaaaagaacaagagcaggcacagaagctgaaaagccagcagcctcttaaaccccaagtgcacacacctgttgctactgttaaacagactaaggacttgacagacacactgatggataatatgtcatccttgaccagcctttctgttagtacccctaaatcttctgcttcaagtactttcacttctgttccttccatgggcattggtatgatgttttctacaccaactgataatacaaagagaaatttgacaaatggcctaaatgccaatatgggctttcagacttcaggattcaacatgcccgttaatacaaaccagaacttctacagtagtccaagcacagttggagtgaccaagatgactctgggaacacctcccactttgccaaacttcaatgctttgagtgttcctcctgctggtgcaaagcagacccaacaaagacccacagatatgtctgcccttaataatctctttggccctcagaaacccaaagttagcatgaaccagttatcacaacagaaaccaaatcagtggcttaatcagtttgtacctcctcaaggttctccaactatgggcagttcagtaatggggacacagatgaacgtgataggacaatctgcttttggtatgcagggtaatcctttctttaacccacagaactttgcacagccaccaactactatgaccaatagcagttcagctagcaatgatttaaaagatctttttgggtgaggtgtcttacttctattttgaaggattatttcagtttcaatcatgggtgagctgatttacatctttatatagttggcttggaggaagtacttctatgggaaagtgaacagttctgtgacaggaaacatctctgtccatgccagcatagtagttgtatggacttctaaccagttgagttttttaaagcattgaggattttttcctcttaccaactcctcttcaggtttttaaagacccagcccttcccaatctcaaagagaaaaaggaaactgagttatcttgaataacataactttttaatcaaatgtttattttggcttgtggatcttggtgttatttaaaaaattgaggtgatggtcattgcaagctcatctattaagtactatatggtacacagtctatgagtcattagtcttcattttaatatgtaaaaaatcttgatgctgtattgatttgtttgcatttaagatgacagtgagaaaatgataagcataaagagaagtatcaggttatttgctttttccaaacttttcagatgaactattgtttagtacagagactgagcaaatactacaaaattcaacttaaccttcatttcattggtttaaatgcgttattaaccatcttaagtgcaaactaatcattgtaaattatattttagcatggtctgcctcaaatagtaatgtatttttctgcattcacttggatatatttagaatcacttttttcctcctgtatcaaggaagaggtatgtgctgatttgtttggatatttgacaaggcactctgatgtgacttccctgactactaccttcatatttcatttcaaattcaaacttctgaggttgcagcatatatgaattgcattttcaaaagaagatttgtaagaattaaactatatttatgagtaaacttttgaggtttctgctgtattgtttcaaatgtaataaactttacttctgtaaaaattgagcagttgtatcttctgaccaccaacagattttcagcttgccatgatagtctgacctcattaattactgctactgaagttcaatttttttctaggaattttaggaaccttttgtttaaatattttaatttctattagccatttttaggaaggaaagaatcaattctcttaacaggaaacatgctttatttttcaaaacctttctctgatatttttctttaatttgctgattattcaaccacagagccttatgctataaatgtcatttgtattttaaaaaataatattccactcataaaactttaaaaccatctttcaacgaactatatatgtattatagttgctgccatagagttgatggtttttaattatctggaaccagcaatcatttaaaataaaccatattaagtttagtatgctggtattgtttattcattttatatgaatattcattgaaaatatatacacaatatatgtaatacacagcacttgattacaaaatgtaatttaattatattattgctggcagcattcagttaagagggtactttaaaaaatagaagtcagctttcacatctgatttctgtatgggctgtacttggttaacttgattttagaaaaaggactaacagaattgctaaagaaatgcatccaataaatgaaaaacagtaggaagatcaaatgtttttgtcaaatatattcacaacttgaccagattagctgtcctgtttgtaatgcaatattaatatgtcttttgggaaaaagcctacatatggaataaaataagtattgaagaatttttctttgtaacaatttagtagtcactgtttattgagaaattgttttttattttgtaaaataacatgatgttagtgttgaactcttaaacagaaagaaagcttaatataacagcttatagaacttgaactactaaatatgaaaataagtcatttgaaaaaaatacagtatgtaaaatttgttcattcgttgaggtaatggtgctatgtttttacaaaattgttcctacaccttttttctacttcaggtattttatttcaaccatttccatcaattgaactgttaccattgcctttttctgttgagaaattgcctctgaaaaatagtgctatttttcagcttaagtgttcttaagtgaatgaaattttcaaagtactagatcaccttaaaattatttcacgtactgaagacaattaagtccgttatgtttagagtagaaaatgtttaggttaaagagcatctgtcaacagaatctacaaaaaagattcccttgcatttgaattagttctctattctcctattgctaaatgtgtgatatatagagaggatgtataaaaggaaatggaaatagactatgtacttgtctggtttttgtttgtttttattttggaatgcttataagcctcctttacactgaataaggaagtagtttttgttttcttttgacctgtaaaatacctcacatggttgtttttacacatgaaagaaaaaggtatatgcgaacatacctgatatcaagaggagtatgcaccaaataaattttagctttgataaaactttccaaaaaaaaaaaaaaaaaaaactaaacaaaacaaacaacaacaaaaaaaaaaaaaaagaagaacagaagaaaaaagaacaaaccagaaagagagaaaaagaaatggaaaaaacagaacaacaaaacagcagagggcagggtcaaaagagtaacagcaagaagaaacgaaaagccgagacaaacaaaacaagatgagaaggagagcacaccaacgaggatcagacctataatgaaaacagcaaacaaggccgacgaaaaagaacgaggtagagaggagcgacaaggaaaggaaagagtaaggtaataatggagacaaagaatataaaggttaggagtaagtaggatgagcggaaaaacagcaagagatatgagaaagagtaagataggatagtaaagtaatatgatgtggtgaggcaaataacaactgtggtcaatatgaatgatgatagtgtaggagctgatgtaagaacattattaagccggaggaagatacgaatagcaaaaatgaataagaagaataaagaagaaggtaagatacgagagtcagataatgataatggaatgatgtaaaagcagagaataaggagagtaacaaagaaaagtgacagaaacgaaaaacn

SEQ ID NO: 430231 - DNA, 3320 bp, Homo sapiens
agtctttttccccctcccttactcttcgtccccggtccctcccctccccacccctttccttctagctccgacgtttgcggccgcgggggcggcggaggatatggagtaaagccagagtcagtggccaggcacgaaggcagagcaggaacagccaggaggcgtttattaggggggcggggggaaagagccccagcaccgcccctcctggaagaaggaagaggtaactataactacccaatattgcagccatggagtccatgcttaataaattgaagagtactgttacaaaagtaacagctgatgtcactagtgctgtaatgggaaatcctgtcactagagaatttgatgttggtcgacacattgccagtggtggcaatgggctagcttggaagatttttaatggcacaaaaaagtcaacaaagcaggaagtggcagtttttgtctttgataaaaaactgattgacaagtatcaaaaatttgaaaaggatcaaatcattgattctctaaaacgaggagtccaacagttaactcggcttcgacaccctcgacttcttactgtccagcatcctttagaagaatccagggattgcttggcattttgtacagaaccagtttttgccagtttagccaatgttcttggtaactgggaaaatctaccttcccctatatctccagacattaaggattataaactttatgatgtagaaaccaaatatggtttgcttcaggtttctgaaggattgtcattcttgcatagcagtgtgaaaatggtgcatggaaatatcactcctgaaaatataattttgaataaaagtggagcctggaaaataatgggttttgatttttgtgtatcatcaaccaatccttctgaacaagagcctaaatttccttgtaaagaatgggacccaaatttaccttcattgtgtcttccaaatcctgaatatttggctcctgaatacatactttctgtgagctgtgaaacagccagtgatatgtattctttaggaactgttatgtatgctgtatttaataaagggaaacctatatttgaagtcaacaagcaagatatttacaagagtttcagtaggcagttggatcagttgagtcgtttaggatctagttcacttacaaatatacctgaggaagttcgtgaacatgtaaagctactgttaaatgtaactccgactgtaagaccagatgcagatcaaatgacaaagattcccttctttgatgatgttggtgcagtaacactgcaatattttgataccttattccaaagagataatcttcagaaatcacagtttttcaaaggactgccaaaggttctaccaaaactgcccaagcgtgtcattgtgcagagaattttgccttgtttgacttcagaatttgtaaaccctgacatggtaccttttgttttgcccaatgttctacttattgctgaggaatgcaccaaagaagaatatgtcaaattaattcttcctgaacttggccctgtgtttaagcagcaggagccaatccagattttgttaattttcctacaaaaaatggatttgctactaaccaaaacccctcctgatgagataaagaacagtgttctacccatggtttacagagcactagaagctccttccattcagatccaggagctctgtctaaacatcattccaacctttgcaaatcttatagactacccatccatgaaaaacgctttgataccaagaattaaaaatgcttgtctacaaacatcttcccttgcggttcgtgtaaattcattagtgtgcttaggaaagattttggaatacttggataagtggtttgtacttgatgatatcctacccttcttacaacaaattccatccaaggaacctgcggtcctcatgggaattttaggtatttacaaatgtacttttactcataagaagttgggaatcaccaaagagcagctggccggaaaagtgttgcctcatcttattcccctgagtattgaaaacaatcttaatcttaatcagttcaattctttcatttccgtcataaaagaaatgcttaatagattggagtctgaacataagactaaactggagcaacttcatataatgcaagaacagcagaaatctttggatataggaaatcaaatgaatgtttctgaggagatgaaagttacaaatattgggaatcagcaaattgacaaagtttttaacaacattggagcagaccttctgactggcagtgagtccgaaaataaagaggacgggttacagaataaacataaaagagcatcacttacacttgaagaaaaacaaaaattagcaaaagaacaagagcaggcacagaagctgaaaagccagcagcctcttaaaccccaagtgcacacacctgttgctactgttaaacagactaaggacttgacagacacactgatggataatatgtcatccttgaccagcctttctgttagtacccctaaatcttctgcttcaagtactttcacttctgttccttccatgggcattggtatgatgttttctacaccaactgataatacaaagagaaatttgacaaatggcctaaatgccaatatgggctttcagacttcaggattcaacatgcccgttaatacaaaccagaacttctacagtagtccaagcacagttggagtgaccaagatgactctgggaacacctcccactttgccaaacttcaatgctttgagtgttcctcctgctggtgcaaagcagacccaacaaagacccacagatatgtctgcccttaataatctctttggccctcagaaacccaaagttagcatgaaccagttatcacaacagaaaccaaatcagtggcttaatcagtttgtacctcctcaaggttctccaactatgggcagttcagtaatggggacacagatgaacgtgataggacaatctgcttttggtatgcagggtaatcctttctttaacccacagaactttgcacagccaccaactactatgaccaatagcagttcagctagcaatgatttaaaagatctttttgggtgaggtgtcttacttctattttgaaggattatttcagtttcaatcatgggtgagctgatttacatctttatatagttggcttggaggaagtacttctatgggaaagtgaacagttctgtgacaggaaacatctctgtccatgccagcatagtagttgtatggacttctaaccagttgagttttttaaagcattgaggattttttcctcttaccaactcctcttcaggtttttaaagacccagccgcctatattaaggcacatttgaataaattctattaccagtt

SEQ ID NO: 430232 - DNA, 1173 bp, Homo sapiens
gtatattttcaatgaatacacaatatatgtaatcaagtgctgtgtattacatatattgtgaatatatgtaatacacagcacttgattacaaaatgtaatttaattatattattgctggcagcattcagttaagagggtactttaaaaaatagaagtcagctttcacatctgatttctgtatgggctgtacttggttaacttgattttagaaaaaggactaacagaattgctaaagaaatgcatccaataaatgaaaaacagtaggaagatcaaatgtttttgtcaaatatattcacaacttgaccagattagctgtcctgtttgtaatgcaatattaatatgtcttttgggaaaaagcctacatatggaataaaataagtattgaagaatttttctttgtaacaatttagtagtcactgtttattgagaaattgttttttattttgtaaaataacatgatgttagtgttgaactcttaaacagaaagaaagcttaatataacagcttatagaacttgaactactaaatatgaaaataagtcatttgaaaaaaatacagtatgtaaaatttgttcattcgttgaggtaatggtgctatgtttttacaaaattgttcctacaccttttttctacttcaggtattttatttcaaccatttccatcaattgaactgttaccattgcctttttctgttgagaaattgcctctgaaaaatagtgctatttttcagcttaagtgttcttaagtgaatgaaattttcaaagtactagatcaccttaaaattatttcacgtactgaagacaattaagtccgttatgtttagagtagaaaatgtttaggttaaagagcatctgtcaacagaatctacaaaaaagattcccttgcatttgaattagttctctattctcctattgctaaatgtgtgatatatagagaggatgtataaaaggaaatggaaatagactatgtacttgtctggtttttgtttgtttttattttggaatgcttataagcctcctttacactgaataaggaagtagtttttgttttcttttgacctgtaaaatacctcacatggttgtttttacacatgaaagaaaaaggtatatgcgaacatacctgatatcaagaggagtatgcaccaaataaattttagctttgataaaactttcca

SEQ ID NO: 430233 - DNA, 257 bp, Homo sapiens
aattgacaaagtttttaacaacattggagcagaccttctgactggcagtgagtccgaaaataaagaggacgggttacagaataaacataaaagagtgagtttccttactgttctttcagccctcttattttatgctgtaggacttcctgtaaaccacagatttttgttgggaaatactgttcagcagcttaacaagaaacatttgtaattatctttctgaaattcctttatcagttaaacatgaccctaacccattt

SEQ ID NO: 430234 - DNA, 749 bp, Homo sapiens
tttgggagatcttacacttttcaaattaaactatgaataaatgcttatatagataagaaatgatcagttctccactatccttctgtttttctaggtaactataactacccaatattgcagccatggagtccatgcttaataaattgaagagtactgttacaaaagtaacagctgatgtcactagtgctgtaatgggaaatcctgtcactagagaatttgatgttggtcgacacattgccagtggtggcaatgggctagcttggaagatttttaatggcacaaaaaagtcaacaaagcaggtgagttttaattcagcatccacttggaaaaaacccacatgctaagaaccataaaatgcatgtgtgcatttttatgttaagaaatgccaaaagttctttaataggttcttaaatgggttctttagttctcattttatcttattaagtcatacaaaaaaacaaatgcttttaaacatgctctgaatctcctggttacacatatactgtttgacataccatatcatcttgaaatataattttgcttacttaataaacatgtcagttgagcaaacgagtatattagattgtaatatttagtgaagcatatgttttaggatagaaattgccgtgtttcttaaattttcttttcatatttgtcaatatgttactggcaaaatacccagttaaatttttcaacgttaagtgcgtcttagtgcagtcagtgctgggattacagcgtgagccaccgtg

SEQ ID NO: 430235 - DNA, 5383 bp, Homo sapiens
agtctttttccccctcccttactcttcgtccccggtccctcccctccccacccctttccttctagctccgacgtttgcggccgcgggggcggcggaggatatggagtaaagccagagtcagtggccaggcacgaaggcagagcaggaacagccaggaggcgtttattaggggggcggggggaaagagccccagcaccgcccctcctggaagaaggaagaggaagtggcagtttttgtctttgataaaaaactgattgacaagtatcaaaaatttgaaaaggatcaaatcattgattctctaaaacgaggagtccaacagttaactcggcttcgacaccctcgacttcttactgtccagcatcctttagaagaatccagggattgcttggcattttgtacagaaccagtttttgccagtttagccaatgttcttggtaactgggaaaatctaccttcccctatatctccagacattaaggattataaactttatgatgtagaaaccaaatatggtttgcttcaggtttctgaaggattgtcattcttgcatagcagtgtgaaaatggtgcatggaaatatcactcctgaaaatataattttgaataaaagtggagcctggaaaataatgggttttgatttttgtgtatcatcaaccaatccttctgaacaagagcctaaatttccttgtaaagaatgggacccaaatttaccttcattgtgtcttccaaatcctgaatatttggctcctgaatacatactttctgtgagctgtgaaacagccagtgatatgtattctttaggaactgttatgtatgctgtatttaataaagggaaacctatatttgaagtcaacaagcaagatatttacaagagtttcagtaggcagttggatcagttgagtcgtttaggatctagttcacttacaaatatacctgaggaagttcgtgaacatgtaaagctactgttaaatgtaactccgactgtaagaccagatgcagatcaaatgacaaagattcccttctttgatgatgttggtgcagtaacactgcaatattttgataccttattccaaagagataatcttcagaaatcacagtttttcaaaggactgccaaaggttctaccaaaactgcccaagcgtgtcattgtgcagagaattttgccttgtttgacttcagaatttgtaaaccctgacatggtaccttttgttttgcccaatgttctacttattgctgaggaatgcaccaaagaagaatatgtcaaattaattcttcctgaacttggccctgtgtttaagcagcaggagccaatccagattttgttaattttcctacaaaaaatggatttgctactaaccaaaacccctcctgatgagataaagaacagtgttctacccatggtttacagagcactagaagctccttccattcagatccaggagctctgtctaaacatcattccaacctttgcaaatcttatagactacccatccatgaaaaacgctttgataccaagaattaaaaatgcttgtctacaaacatcttcccttgcggttcgtgtaaattcattagtgtgcttaggaaagattttggaatacttggataagtggtttgtacttgatgatatcctacccttcttacaacaaattccatccaaggaacctgcggtcctcatgggaattttaggtatttacaaatgtacttttactcataagaagttgggaatcaccaaagagcagctggccggaaaagtgttgcctcatcttattcccctgagtattgaaaacaatcttaatcttaatcagttcaattctttcatttccgtcataaaagaaatgcttaatagattggagtctgaacataagactaaactggagcaacttcatataatgcaagaacagcagaaatctttggatataggaaatcaaatgaatgtttctgaggagatgaaagttacaaatattgggaatcagcaaattgacaaagtttttaacaacattggagcagaccttctgactggcagtgagtccgaaaataaagaggacgggttacagaataaacataaaagagcatcacttacacttgaagaaaaacaaaaattagcaaaagaacaagagcaggcacagaagctgaaaagccagcagcctcttaaaccccaagtgcacacacctgttgctactgttaaacagactaaggacttgacagacacactgatggataatatgtcatccttgaccagcctttctgttagtacccctaaatcttctgcttcaagtactttcacttctgttccttccatgggcattggtatgatgttttctacaccaactgataatacaaagagaaatttgacaaatggcctaaatgccaatatgggctttcagacttcaggattcaacatgcccgttaatacaaaccagaacttctacagtagtccaagcacagttggagtgaccaagatgactctgggaacacctcccactttgccaaacttcaatgctttgagtgttcctcctgctggtgcaaagcagacccaacaaagacccacagatatgtctgcccttaataatctctttggccctcagaaacccaaagttagcatgaaccagttatcacaacagaaaccaaatcagtggcttaatcagtttgtacctcctcaaggttctccaactatgggcagttcagtaatggggacacagatgaacgtgataggacaatctgcttttggtatgcagggtaatcctttctttaacccacagaactttgcacagccaccaactactatgaccaatagcagttcagctagcaatgatttaaaagatctttttgggtgaggtgtcttacttctattttgaaggattatttcagtttcaatcatgggtgagctgatttacatctttatatagttggcttggaggaagtacttctatgggaaagtgaacagttctgtgacaggaaacatctctgtccatgccagcatagtagttgtatggacttctaaccagttgagttttttaaagcattgaggattttttcctcttaccaactcctcttcaggtttttaaagacccagcccttcccaatctcaaagagaaaaaggaaactgagttatcttgaataacataactttttaatcaaatgtttattttggcttgtggatcttggtgttatttaaaaaattgaggtgatggtcattgcaagctcatctattaagtactatatggtacacagtctatgagtcattagtcttcattttaatatgtaaaaaatcttgatgctgtattgatttgtttgcatttaagatgacagtgagaaaatgataagcataaagagaagtatcaggttatttgctttttccaaacttttcagatgaactattgtttagtacagagactgagcaaatactacaaaattcaacttaaccttcatttcattggtttaaatgcgttattaaccatcttaagtgcaaactaatcattgtaaattatattttagcatggtctgcctcaaatagtaatgtatttttctgcattcacttggatatatttagaatcacttttttcctcctgtatcaaggaagaggtatgtgctgatttgtttggatatttgacaaggcactctgatgtgacttccctgactactaccttcatatttcatttcaaattcaaacttctgaggttgcagcatatatgaattgcattttcaaaagaagatttgtaagaattaaactatatttatgagtaaacttttgaggtttctgctgtattgtttcaaatgtaataaactttacttctgtaaaaattgagcagttgtatcttctgaccaccaacagattttcagcttgccatgatagtctgacctcattaattactgctactgaagttcaatttttttctaggaattttaggaaccttttgtttaaatattttaatttctattagccatttttaggaaggaaagaatcaattctcttaacaggaaacatgctttatttttcaaaacctttctctgatatttttctttaatttgctgattattcaaccacagagccttatgctataaatgtcatttgtattttaaaaaataatattccactcataaaactttaaaaccatctttcaacgaactatatatgtattatagttgctgccatagagttgatggtttttaattatctggaaccagcaatcatttaaaataaaccatattaagtttagtatgctggtattgtttattcattttatatgaatattcattgaaaatatatacacaatatatgtaatacacagcacttgattacaaaatgtaatttaattatattattgctggcagcattcagttaagagggtactttaaaaaatagaagtcagctttcacatctgatttctgtatgggctgtacttggttaacttgattttagaaaaaggactaacagaattgctaaagaaatgcatccaataaatgaaaaacagtaggaagatcaaatgtttttgtcaaatatattcacaacttgaccagattagctgtcctgtttgtaatgcaatattaatatgtcttttgggaaaaagcctacatatggaataaaataagtattgaagaatttttctttgtaacaatttagtagtcactgtttattgagaaattgttttttattttgtaaaataacatgatgttagtgttgaactcttaaacagaaagaaagcttaatataacagcttatagaacttgaactactaaatatgaaaataagtcatttgaaaaaaatacagtatgtaaaatttgttcattcgttgaggtaatggtgctatgtttttacaaaattgttcctacaccttttttctacttcaggtattttatttcaaccatttccatcaattgaactgttaccattgcctttttctgttgagaaattgcctctgaaaaatagtgctatttttcagcttaagtgttcttaagtgaatgaaattttcaaagtactagatcaccttaaaattatttcacgtactgaagacaattaagtccgttatgtttagagtagaaaatgtttaggttaaagagcatctgtcaacagaatctacaaaaaagattcccttgcatttgaattagttctctattctcctattgctaaatgtgtgatatatagagaggatgtataaaaggaaatggaaatagactatgtacttgtctggtttttgtttgtttttattttggaatgcttataagcctcctttacactgaataaggaagtagtttttgttttcttttgacctgtaaaatacctcacatggttgtttttacacatgaaagaaaaaggtatatgcgaacatacctgatatcaagaggagtatgcaccaaataaattttagctttgataaaactttcca

SEQ ID NO: 430236 - DNA, 4001 bp, Homo sapiens
agtctttttccccctcccttactcttcgtccccggtccctcccctccccacccctttccttctagctccgacgtttgcggccgcgggggcggcggaggatatggagtaaagccagagtcagtggccaggcacgaaggcagagcaggaacagccaggaggcgtttattaggggggcggggggaaagagccccagcaccgcccctcctggaagaaggaagaggtaactataactacccaatattgcagccatggagtccatgcttaataaattgaagagtactgttacaaaagtaacagctgatgtcactagtgctgtaatgggaaatcctgtcactagagaatttgatgttggtcgacacattgccagtggtggcaatgggctagcttggaagatttttaatggcacaaaaaagtcaacaaagcaggaagtggcagtttttgtctttgataaaaaactgattgacaagtatcaaaaatttgaaaaggatcaaatcattgattctctaaaacgaggagtccaacagttaactcggcttcgacaccctcgacttcttactgtccagcatcctttagaagaatccagggattgcttggcattttgtacagaaccagtttttgccagtttagccaatgttcttggtaactgggaaaatctaccttcccctatatctccagacattaaggattataaactttatgatgtagaaaccaaatatggtttgcttcaggtttctgaaggattgtcattcttgcatagcagtgtgaaaatggtgcatggaaatatcactcctgaaaatataattttgaataaaagtggagcctggaaaataatgggttttgatttttgtgtatcatcaaccaatccttctgaacaagagcctaaatttccttgtaaagaatgggacccaaatttaccttcattgtgtcttccaaatcctgaatatttggctcctgaatacatactttctgtgagctgtgaaacagccagtgatatgtattctttaggaactgttatgtatgctgtatttaataaagggaaacctatatttgaagtcaacaagcaagatatttacaagagtttcagtaggcagttggatcagttgagtcgtttaggatctagttcacttacaaatatacctgaggaagttcgtgaacatgtaaagctactgttaaatgtaactccgactgtaagaccagatgcagatcaaatgacaaagattcccttctttgatgatgttggtgcagtaacactgcaatattttgataccttattccaaagagataatcttcagaaatcacagtttttcaaaggactgccaaaggttctaccaaaactgcccaagcgtgtcattgtgcagagaattttgccttgtttgacttcagaatttgtaaaccctgacatggtaccttttgttttgcccaatgttctacttattgctgaggaatgcaccaaagaagaatatgtcaaattaattcttcctgaacttggccctgtgtttaagcagcaggagccaatccagattttgttaattttcctacaaaaaatggatttgctactaaccaaaacccctcctgatgagataaagaacagtgttctacccatggtttacagagcactagaagctccttccattcagatccaggagctctgtctaaacatcattccaacctttgcaaatcttatagactacccatccatgaaaaacgctttgataccaagaattaaaaatgcttgtctacaaacatcttcccttgcggttcgtgtaaattcattagtgtgcttaggaaagattttggaatacttggataagtggtttgtacttgatgatatcctacccttcttacaacaaattccatccaaggaacctgcggtcctcatgggaattttaggtatttacaaatgtacttttactcataagaagttgggaatcaccaaagagcagctggccggaaaagtgttgcctcatcttattcccctgagtattgaaaacaatcttaatcttaatcagttcaattctttcatttccgtcataaaagaaatgcttaatagattggagtctgaacataagactaaactggagcaacttcatataatgcaagaacagcagaaatctttggatataggaaatcaaatgaatgtttctgaggagatgaaagttacaaatattgggaatcagcaaattgacaaagtttttaacaacattggagcagaccttctgactggcagtgagtccgaaaataaagaggacgggttacagaataaacataaaagagcatcacttacacttgaagaaaaacaaaaattagcaaaagaacaagagcaggcacagaagctgaaaagccagcagcctcttaaaccccaagtgcacacacctgttgctactgttaaacagactaaggacttgacagacacactgatggataatatgtcatccttgaccagcctttctgttagtacccctaaatcttctgcttcaagtactttcacttctgttccttccatgggcattggtatgatgttttctacaccaactgataatacaaagagaaatttgacaaatggcctaaatgccaatatgggctttcagacttcaggattcaacatgcccgttaatacaaaccagaacttctacagtagtccaagcacagttggagtgaccaagatgactctgggaacacctcccactttgccaaacttcaatgctttgagtgttcctcctgctggtgcaaagcagacccaacaaagacccacagatatgtctgcccttaataatctctttggccctcagaaacccaaagttagcatgaaccagttatcacaacagaaaccaaatcagtggcttaatcagtttgtacctcctcaaggttctccaactatgggcagttcagtaatggggacacagatgaacgtgataggacaatctgcttttggtatgcagggtaatcctttctttaacccacagaactttgcacagccaccaactactatgaccaatagcagttcagctagcaatgatttaaaagatctttttgggtgaggtgtcttacttctattttgaaggattatttcagtttcaatcatgggtgagctgatttacatctttatatagttggcttggaggaagtacttctatgggaaagtgaacagttctgtgacaggaaacatctctgtccatgccagcatagtagttgtatggacttctaaccagttgagttttttaaagcattgaggattttttcctcttaccaactcctcttcaggtttttaaagacccagcccttcccaatctcaaagagaaaaaggaaactgagttatcttgaataacataactttttaatcaaatgtttattttggcttgtggatcttggtgttatttaaaaaattgaggtgatggtcattgcaagctcatctattaagtactatatggtacacagtctatgagtcattagtcttcattttaatatgtaaaaaatcttgatgctgtattgatttgtttgcatttaagatgacagtgagaaaatgataagcataaagagaagtatcaggttatttgctttttccaaacttttcagatgaactattgtttagtacagagactgagcaaatactacaaaattcaacttaaccttcatttcattggtttaaatgcgttattaaccatcttaagtgcaaactaatcattgtaaattatattttagcatggtctgcctcaaatagtaatgtatttttctgcattcacttggatatatttagaatcacttttttcctcctgtatcaaggaagaggtatgtgctgatttgtttggatatttgacaaggcactctgatgtgacttccctgactactaccttcatatttcatttcaaattcaaacttctgaggttgcagcatatatgaattgcattttcaaaagaagatttgtaagaattaaactatatttatgagtaaacttttgaggtttctgctgtattgtttcaaatgtaataaactttacttctgta

SEQ ID NO: 430237 - DNA, 5638 bp, Homo sapiens
agtctttttccccctcccttactcttcgtccccggtccctcccctccccacccctttccttctagctccgacgtttgcggccgcgggggcggcggaggatatggagtaaagccagagtcagtggccaggcacgaaggcagagcaggaacagccaggaggcgtttattaggggggcggggggaaagagccccagcaccgcccctcctggaagaaggaagaggtaactataactacccaatattgcagccatggagtccatgcttaataaattgaagagtactgttacaaaagtaacagctgatgtcactagtgctgtaatgggaaatcctgtcactagagaatttgatgttggtcgacacattgccagtggtggcaatgggctagcttggaagatttttaatggcacaaaaaagtcaacaaagcaggaagtggcagtttttgtctttgataaaaaactgattgacaagtatcaaaaatttgaaaaggatcaaatcattgattctctaaaacgaggagtccaacagttaactcggcttcgacaccctcgacttcttactgtccagcatcctttagaagaatccagggattgcttggcattttgtacagaaccagtttttgccagtttagccaatgttcttggtaactgggaaaatctaccttcccctatatctccagacattaaggattataaactttatgatgtagaaaccaaatatggtttgcttcaggtttctgaaggattgtcattcttgcatagcagtgtgaaaatggtgcatggaaatatcactcctgaaaatataattttgaataaaagtggagcctggaaaataatgggttttgatttttgtgtatcatcaaccaatccttctgaacaagagcctaaatttccttgtaaagaatgggacccaaatttaccttcattgtgtcttccaaatcctgaatatttggctcctgaatacatactttctgtgagctgtgaaacagccagtgatatgtattctttaggaactgttatgtatgctgtatttaataaagggaaacctatatttgaagtcaacaagcaagatatttacaagagtttcagtaggcagttggatcagttgagtcgtttaggatctagttcacttacaaatatacctgaggaagttcgtgaacatgtaaagctactgttaaatgtaactccgactgtaagaccagatgcagatcaaatgacaaagattcccttctttgatgatgttggtgcagtaacactgcaatattttgataccttattccaaagagataatcttcagaaatcacagtttttcaaaggactgccaaaggttctaccaaaactgcccaagcgtgtcattgtgcagagaattttgccttgtttgacttcagaatttgtaaaccctgacatggtaccttttgttttgcccaatgttctacttattgctgaggaatgcaccaaagaagaatatgtcaaattaattcttcctgaacttggccctgtgtttaagcagcaggagccaatccagattttgttaattttcctacaaaaaatggatttgctactaaccaaaacccctcctgatgagataaagaacagtgttctacccatggtttacagagcactagaagctccttccattcagatccaggagctctgtctaaacatcattccaacctttgcaaatcttatagactacccatccatgaaaaacgctttgataccaagaattaaaaatgcttgtctacaaacatcttcccttgcggttcgtgtaaattcattagtgtgcttaggaaagattttggaatacttggataagtggtttgtacttgatgatatcctacccttcttacaacaaattccatccaaggaacctgcggtcctcatgggaattttaggaaactgaggctcagagaggtaaaataagtgattcaagatcatataagtggtatttacaaatgtacttttactcataagaagttgggaatcaccaaagagcagctggccggaaaagtgttgcctcatcttattcccctgagtattgaaaacaatcttaatcttaatcagttcaattctttcatttccgtcataaaagaaatgcttaatagattggagtctgaacataagactaaactggagcaacttcatataatgcaagaacagcagaaatctttggatataggaaatcaaatgaatgtttctgaggagatgaaagttacaaatattgggaatcagcaaattgacaaagtttttaacaacattggagcagaccttctgactggcagtgagtccgaaaataaagaggacgggttacagaataaacataaaagagcatcacttacacttgaagaaaaacaaaaattagcaaaagaacaagagcaggcacagaagctgaaaagccagcagcctcttaaaccccaagtgcacacacctgttgctactgttaaacagactaaggacttgacagacacactgatggataatatgtcatccttgaccagcctttctgttagtacccctaaatcttctgcttcaagtactttcacttctgttccttccatgggcattggtatgatgttttctacaccaactgataatacaaagagaaatttgacaaatggcctaaatgccaatatgggctttcagacttcaggattcaacatgcccgttaatacaaaccagaacttctacagtagtccaagcacagttggagtgaccaagatgactctgggaacacctcccactttgccaaacttcaatgctttgagtgttcctcctgctggtgcaaagcagacccaacaaagacccacagatatgtctgcccttaataatctctttggccctcagaaacccaaagttagcatgaaccagttatcacaacagaaaccaaatcagtggcttaatcagtttgtacctcctcaaggttctccaactatgggcagttcagtaatggggacacagatgaacgtgataggacaatctgcttttggtatgcagggtaatcctttctttaacccacagaactttgcacagccaccaactactatgaccaatagcagttcagctagcaatgatttaaaagatctttttgggtgaggtgtcttacttctattttgaaggattatttcagtttcaatcatgggtgagctgatttacatctttatatagttggcttggaggaagtacttctatgggaaagtgaacagttctgtgacaggaaacatctctgtccatgccagcatagtagttgtatggacttctaaccagttgagttttttaaagcattgaggattttttcctcttaccaactcctcttcaggtttttaaagacccagcccttcccaatctcaaagagaaaaaggaaactgagttatcttgaataacataactttttaatcaaatgtttattttggcttgtggatcttggtgttatttaaaaaattgaggtgatggtcattgcaagctcatctattaagtactatatggtacacagtctatgagtcattagtcttcattttaatatgtaaaaaatcttgatgctgtattgatttgtttgcatttaagatgacagtgagaaaatgataagcataaagagaagtatcaggttatttgctttttccaaacttttcagatgaactattgtttagtacagagactgagcaaatactacaaaattcaacttaaccttcatttcattggtttaaatgcgttattaaccatcttaagtgcaaactaatcattgtaaattatattttagcatggtctgcctcaaatagtaatgtatttttctgcattcacttggatatatttagaatcacttttttcctcctgtatcaaggaagaggtatgtgctgatttgtttggatatttgacaaggcactctgatgtgacttccctgactactaccttcatatttcatttcaaattcaaacttctgaggttgcagcatatatgaattgcattttcaaaagaagatttgtaagaattaaactatatttatgagtaaacttttgaggtttctgctgtattgtttcaaatgtaataaactttacttctgtaaaaattgagcagttgtatcttctgaccaccaacagattttcagcttgccatgatagtctgacctcattaattactgctactgaagttcaatttttttctaggaattttaggaaccttttgtttaaatattttaatttctattagccatttttaggaaggaaagaatcaattctcttaacaggaaacatgctttatttttcaaaacctttctctgatatttttctttaatttgctgattattcaaccacagagccttatgctataaatgtcatttgtattttaaaaaataatattccactcataaaactttaaaaccatctttcaacgaactatatatgtattatagttgctgccatagagttgatggtttttaattatctggaaccagcaatcatttaaaataaaccatattaagtttagtatgctggtattgtttattcattttatatgaatattcattgaaaatatatacacaatatatgtaatacacagcacttgattacaaaatgtaatttaattatattattgctggcagcattcagttaagagggtactttaaaaaatagaagtcagctttcacatctgatttctgtatgggctgtacttggttaacttgattttagaaaaaggactaacagaattgctaaagaaatgcatccaataaatgaaaaacagtaggaagatcaaatgtttttgtcaaatatattcacaacttgaccagattagctgtcctgtttgtaatgcaatattaatatgtcttttgggaaaaagcctacatatggaataaaataagtattgaagaatttttctttgtaacaatttagtagtcactgtttattgagaaattgttttttattttgtaaaataacatgatgttagtgttgaactcttaaacagaaagaaagcttaatataacagcttatagaacttgaactactaaatatgaaaataagtcatttgaaaaaaatacagtatgtaaaatttgttcattcgttgaggtaatggtgctatgtttttacaaaattgttcctacaccttttttctacttcaggtattttatttcaaccatttccatcaattgaactgttaccattgcctttttctgttgagaaattgcctctgaaaaatagtgctatttttcagcttaagtgttcttaagtgaatgaaattttcaaagtactagatcaccttaaaattatttcacgtactgaagacaattaagtccgttatgtttagagtagaaaatgtttaggttaaagagcatctgtcaacagaatctacaaaaaagattcccttgcatttgaattagttctctattctcctattgctaaatgtgtgatatatagagaggatgtataaaaggaaatggaaatagactatgtacttgtctggtttttgtttgtttttattttggaatgcttataagcctcctttacactgaataaggaagtagtttttgttttcttttgacctgtaaaatacctcacatggttgtttttacacatgaaagaaaaaggtatatgcgaacatacctgatatcaagaggagtatgcaccaaataaattttagctttgataaaactttcca

SEQ ID NO: 430238 - DNA, 3491 bp, Homo sapiens
ggagggcttttaatctttaagcagcaaaatcacatttttattgaacttatttaaattattgacatttttctatttcagcacaaattgacaaagtttttaacaacattggagcagaccttctgactggcagtgagtccgaaaataaagaggacgggttacagaataaacataaaagagcatcacttacacttgaagaaaaacaaaaattagcaaaagaacaagagcaggcacagaagctgaaaagccagcagcctcttaaaccccaagtgcacacacctgttgctactgttaaacagactaaggacttgacagacacactgatggataatatgtcatccttgaccagcctttctgttagtacccctaaatcttctgcttcaagtactttcacttctgttccttccatgggcattggtatgatgttttctacaccaactgataatacaaagagaaatttgacaaatggcctaaatgccaatatgggctttcagacttcaggattcaacatgcccgttaatacaaaccagaacttctacagtagtccaagcacagttggagtgaccaagatgactctgggaacacctcccactttgccaaacttcaatgctttgagtgttcctcctgctggtgcaaagcagacccaacaaagacccacagatatgtctgcccttaataatctctttggccctcagaaacccaaagttagcatgaaccagttatcacaacagaaaccaaatcagtggcttaatcagtttgtacctcctcaaggttctccaactatgggcagttcagtaatggggacacagatgaacgtgataggacaatctgcttttggtatgcagggtaatcctttctttaacccacagaactttgcacagccaccaactactatgaccaatagcagttcagctagcaatgatttaaaagatctttttgggtgaggtgtcttacttctattttgaaggattatttcagtttcaatcatgggtgagctgatttacatctttatatagttggcttggaggaagtacttctatgggaaagtgaacagttctgtgacaggaaacatctctgtccatgccagcatagtagttgtatggacttctaaccagttgagttttttaaagcattgaggattttttcctcttaccaactcctcttcaggtttttaaagacccagcccttcccaatctcaaagagaaaaaggaaactgagttatcttgaataacataactttttaatcaaatgtttattttggcttgtggatcttggtgttatttaaaaaattgaggtgatggtcattgcaagctcatctattaagtactatatggtacacagtctatgagtcattagtcttcattttaatatgtaaaaaatcttgatgctgtattgatttgtttgcatttaagatgacagtgagaaaatgataagcataaagagaagtatcaggttatttgctttttccaaacttttcagatgaactattgtttagtacagagactgagcaaatactacaaaattcaacttaaccttcatttcattggtttaaatgcgttattaaccatcttaagtgcaaactaatcattgtaaattatattttagcatggtctgcctcaaatagtaatgtatttttctgcattcacttggatatatttagaatcacttttttcctcctgtatcaaggaagaggtatgtgctgatttgtttggatatttgacaaggcactctgatgtgacttccctgactactaccttcatatttcatttcaaattcaaacttctgaggttgcagcatatatgaattgcattttcaaaagaagatttgtaagaattaaactatatttatgagtaaacttttgaggtttctgctgtattgtttcaaatgtaataaactttacttctgtaaaaattgagcagttgtatcttctgaccaccaacagattttcagcttgccatgatagtctgacctcattaattactgctactgaagttcaatttttttctaggaattttaggaaccttttgtttaaatattttaatttctattagccatttttaggaaggaaagaatcaattctcttaacaggaaacatgctttatttttcaaaacctttctctgatatttttctttaatttgctgattattcaaccacagagccttatgctataaatgtcatttgtattttaaaaaataatattccactcataaaactttaaaaccatctttcaacgaactatatatgtattatagttgctgccatagagttgatggtttttaattatctggaaccagcaatcatttaaaataaaccatattaagtttagtatgctggtattgtttattcattttatatgaatattcattgaaaatatatacacaatatatgtaatacacagcacttgattacaaaatgtaatttaattatattattgctggcagcattcagttaagagggtactttaaaaaatagaagtcagctttcacatctgatttctgtatgggctgtacttggttaacttgattttagaaaaaggactaacagaattgctaaagaaatgcatccaataaatgaaaaacagtaggaagatcaaatgtttttgtcaaatatattcacaacttgaccagattagctgtcctgtttgtaatgcaatattaatatgtcttttgggaaaaagcctacatatggaataaaataagtattgaagaatttttctttgtaacaatttagtagtcactgtttattgagaaattgttttttattttgtaaaataacatgatgttagtgttgaactcttaaacagaaagaaagcttaatataacagcttatagaacttgaactactaaatatgaaaataagtcatttgaaaaaaatacagtatgtaaaatttgttcattcgttgaggtaatggtgctatgtttttacaaaattgttcctacaccttttttctacttcaggtattttatttcaaccatttccatcaattgaactgttaccattgcctttttctgttgagaaattgcctctgaaaaatagtgctatttttcagcttaagtgttcttaagtgaatgaaattttcaaagtactagatcaccttaaaattatttcacgtactgaagacaattaagtccgttatgtttagagtagaaaatgtttaggttaaagagcatctgtcaacagaatctacaaaaaagattcccttgcatttgaattagttctctattctcctattgctaaatgtgtgatatatagagaggatgtataaaaggaaatggaaatagactatgtacttgtctggtttttgtttgtttttattttggaatgcttataagcctcctttacactgaataaggaagtagtttttgttttcttttgacctgtaaaatacctcacatggttgtttttacacatgaaagaaaaaggtatatgcgaacatacctgatatcaagaggagtatgcaccaaataaattttagctttgataaaactttcca

SEQ ID NO: 430239 - DNA, 3208 bp, Homo sapiens
cgcggcgcacttggacttccctctccattcgccagccgcctcgctcccggaccccacggctgcaaactgatctggcgcgcggggaggaggagagcgcaggcgagcgaacccgcgagagagggagagagcgagcgagcaacagcgagagcgagagcgagagagccgggaggcagagggagtagtgaccgccttccggagccgggattcatgcctgtcctcgggaccagcgaaggggactttacggctgagtatgagccaggctgctaggagccaggtacccccacgcctgcagtccccgcgccgtgcccggaatgcgagctggacgcagggctctcccaagttcccaccgagccgaataaaaagcgtccgcccgcagctctccgccaaagacggacattgactccaggactccacagaatggagcaagaatgagaggaaaaaggccggcagaaaagcatgaactggaggtttgttgagctcctctacttcctgtttatatggggccgtatctcagtgcagccctcccaccaggaaccagctgggacagaccaacatgtctccaaggaatttgattggctcatttcagacagggggcctttccaccactccaggagctacctatcctttgtggaaagacaccgtcaaggatttacaaccagatataaaatatacagggagtttgcccgttggaaggtgaggaacacagccatcgagaggagagatctggtccgccatccagtgcccctcatgccggagtttcaaaggagcatccgcctgcttggcaggagacctaccactcagcagttcatcgataccatcatcaaaaagtacggcacccacctgctcatctcagccacattgggaggggaggaggctttgaccatgtatatggacaaaagtcgcctcgacaggaagtcagggaatgccactcaaagtgttgaagctctgcaccagctcgcatcatcctactttgttgaccgtgatggtaccatgaggaggcttcatgagatccagatatcaactggagcaatcaaggtcacagagacacgcactgggcctctgggctgtaacagttatgacaatctggactctgtgagttccgtccttctgcaaagcacggagagcaaactgcaccttcaaggtcttcagataatctttcctcagtatctgcaagagaagtttgtccagtcggccttgagctatatcatgtgcaatggggagggggagtacctgtgccagaacagccagtgtcgctgccaatgtgccgaggagtttccgcagtgcaactgccccatcacggacatccagatcatggagtacacgctggccaacatggccaagtcttgggccgaagcttataaggacctggagaattcagatgagtttaaatcatttatgaagcgcctccccagcaaccacttcctgaccatcggaagcatccatcagcactggggcaatgactgggacctgcagaaccgctacaagctcctgcagagtgccacggaggcacagagacaaaagatccaacgcactgcccgcaagcttttcggcctcagtgtacgctgtcgccacaatcccaaccaccagctgcctagagagaggacaattcagcagtggcttgcaagggtccagtcactcctctactgtaatgagaatgggttttggggaaccttcctggagagccagcggagctgcgtgtgccacggcagcaccacgctgtgccagcgccccatcccctgcgtgataggcgggaacaacagctgcgccatgtgcagcctggccaacatctccctctgcggctcctgcaacaagggctacaagctgtatcgaggccgctgtgaaccacagaacgtggactcggagcggagcgagcagttcatcagctttgagactgacctggacttccaggacctggagctgaagtacctgctgcagaagatggactcacgcctctacgtccacaccaccttcatcagcaacgagatccgcctcgacaccttctttgaccctcggtggcgcaagcgcatgtccctcactctcaagagcaacaagaaccgcatggacttcatccacatggtgatcggcatgtccatgcgcatctgccagatgcgcaacagcagcctggaccccatgttctttgtctatgtcaacccctttagcgggagccattcggagggctggaacatgcccttcggggaatttggctacccacgctgggagaagatccgtctccaaaacagccagtgctacaactggactcttttgctgggcaatcggtggaaaacatttttcgagacggtccacatctacctacgtagtcggactcggctacctaccctactgcgaaatgagactggccagggccccgtggacctgtcggatccctccaagaggcagttctacatcaagatctcagacgtgcaggtgtttgggtatagcctgaggttcaacgccgacctcctgcgcagtgcagtgcagcaggtcaaccagtcctacacacagggcggccagttctattcctcttcgtcagtgatgctcctcttgttggatattcgggaccgaattaatcgcctggcccctcctgtggccccggggaaaccccagctggacttgttctcctgtatgctgaaacaccgcctgaaactgaccaacagcgagatcatcagggtgaaccacgccttggacctgtacaacacggagatcctcaaacagtcggaccagatgacagccaaactctgctaacccgggactccttgccatggacttttcctgttgttgtacacacacaacagaacaaaatgaagcaaaacaaaacaaaaaaacccacaaaaatttgtaaaatgtaattaatattcaaagaaaaggaggaaaatcttcatttgttggaaatgaaaacgttctagcaactgtataaaagcgttgggcatgtttgttatttctatactcactctgtcatgaagaagggtctcagccttttgtggagcattgagggagttgcttcttaggcctcaggtgctgtattgggggagaagggagaaagcatatgcaatgaattgtaaagatctctgctgtgcaggtgctaagattaaacactaaaaagaaagagagatatatgtaatgtacaactgacactgccatttttcctttttggaggaaatggacatagataaagaagatatttcttcggttaagatttattccctcttta

SEQ ID NO: 430240 - DNA, 2655 bp, Homo sapiens
ggcagctgaagctgcagttccagggacgatgaggactactgtttgtttccaccccttcattctaaagaaacactcaaggaggcccagaaagaacaaatgatctcatttacaaccacagccgggagtttgcccgttggaaggtgaggaacacagccatcgagaggagagatctggtccgccatccagtgcccctcatgccggagtttcaaaggagcatccgcctgcttggcaggagacctaccactcagcagttcatcgataccatcatcaaaaagtacggcacccacctgctcatctcagccacattgggaggggaggaggctttgaccatgtatatggacaaaagtcgcctcgacaggaagtcagggaatgccactcaaagtgttgaagctctgcaccagctcgcatcatcctactttgttgaccgtgatggtaccatgaggaggcttcatgagatccagatatcaactggagcaatcaaggtcacagagacacgcactgggcctctgggctgtaacagttatgacaatctggactctgtgagttccgtccttctgcaaagcacggagagcaaactgcaccttcaaggtcttcagataatctttcctcagtatctgcaagagaagtttgtccagtcggccttgagctatatcatgtgcaatggggagggggagtacctgtgccagaacagccagtgtcgctgccaatgtgccgaggagtttccgcagtgcaactgccccatcacggacatccagatcatggagtacacgctggccaacatggccaagtcttgggccgaagcttataaggacctggagaattcagatgagtttaaatcatttatgaagcgcctccccagcaaccacttcctgaccatcggaagcatccatcagcactggggcaatgactgggacctgcagaaccgctacaagctcctgcagagtgccacggaggcacagagacaaaagatccaacgcactgcccgcaagcttttcggcctcagtgtacgctgtcgccacaatcccaaccaccagctgcctagagagaggacaattcagcagtggcttgcaagggtccagtcactcctctactgtaatgagaatgggttttggggaaccttcctggagagccagcggagctgcgtgtgccacggcagcaccacgctgtgccagcgccccatcccctgcgtgataggcgggaacaacagctgcgccatgtgcagcctggccaacatctccctctgcggctcctgcaacaagggctacaagctgtatcgaggccgctgtgaaccacagaacgtggactcggagcggagcgagcagttcatcagctttgagactgacctggacttccaggacctggagctgaagtacctgctgcagaagatggactcacgcctctacgtccacaccaccttcatcagcaacgagatccgcctcgacaccttctttgaccctcggtggcgcaagcgcatgtccctcactctcaagagcaacaagaaccgcatggacttcatccacatggtgatcggcatgtccatgcgcatctgccagatgcgcaacagcagcctggaccccatgttctttgtctatgtcaacccctttagcgggagccattcggagggctggaacatgcccttcggggaatttggctacccacgctgggagaagatccgtctccaaaacagccagtgctacaactggactcttttgctgggcaatcggtggaaaacatttttcgagacggtccacatctacctacgtagtcggactcggctacctaccctactgcgaaatgagactggccagggccccgtggacctgtcggatccctccaagaggcagttctacatcaagatctcagacgtgcaggtgtttgggtatagcctgaggttcaacgccgacctcctgcgcagtgcagtgcagcaggtcaaccagtcctacacacagggcggccagttctattcctcttcgtcagtgatgctcctcttgttggatattcgggaccgaattaatcgcctggcccctcctgtggccccggggaaaccccagctggacttgttctcctgtatgctgaaacaccgcctgaaactgaccaacagcgagatcatcagggtgaaccacgccttggacctgtacaacacggagatcctcaaacagtcggaccagatgacagccaaactctgctaacccgggactccttgccatggacttttcctgttgttgtacacacacaacagaacaaaatgaagcaaaacaaaacaaaaaaacccacaaaaatttgtaaaatgtaattaatattcaaagaaaaggaggaaaatcttcatttgttggaaatgaaaacgttctagcaactgtataaaagcgttgggcatgtttgttatttctatactcactctgtcatgaagaagggtctcagccttttgtggagcattgagggagttgcttcttaggcctcaggtgctgtattgggggagaagggagaaagcatatgcaatgaattgtaaagatctctgctgtgcaggtgctaagattaaacactaaaaagaaagagagatatatgtaatgtacaactgacactgccatttttcctttttggaggaaatggacatagataaagaagatatttcttcggttaagatttattccctcttta

SEQ ID NO: 430241 - DNA, 2798 bp, Homo sapiens
cgcggcgcacttggacttccctctccattcgccagccgcctcgctcccggaccccacggctgcaaactgatctggcgcgcggggaggaggagagcgcaggcgagcgaacccgcgagagagggagagagcgagcgagcaacagcgagagcgagagcgagagagccgggaggcagagggagtagtgaccgccttccggagccgggattcatgcctgtcctcgggaccagcgaaggggactttacggctgagtatgagccaggctgctaggagccaggtacccccacgcctgcagtccccgcgccgtgcccggaatgcgagctggacgcagggctctcccaagttcccaccgagccgaataaaaagcgtccgcccgcagctctccgccaaagacggacattgactccaggactccacagaatggagcaagaatgagaggaaaaaggccggcagaaaagcatgaactggaggtttgttgagctcctctacttcctgtttatatggggccgtatctcagtgcagccctcccaccaggaaccagctgggacagaccaacatgtctccaaggaatttgattggctcatttcagacagggggcctttccaccactccaggagctacctatcctttgtggaaagacaccgtcaaggatttacaaccagatataaaatatacagggagtttgcccgttggaaggtgaggaacacagccatcgagaggagagatctggtccgccatccagtgcccctcatgccggagtttcaaaggagcatccgcctgcttggcaggagacctaccactcagcagttcatcgataccatcatcaaaaagtacggcacccacctgctcatctcagccacattgggaggggaggaggctttgaccatgtatatggacaaaagtcgcctcgacaggaagtcagggaatgccactcaaagtgttgaagctttataaggacctggagaattcagatgagtttaaatcatttatgaagcgcctccccagcaaccacttcctgaccatcggaagcatccatcagcactggggcaatgactgggacctgcagaaccgctacaagctcctgcagagtgccacggaggcacagagacaaaagatccaacgcactgcccgcaagcttttcggcctcagtgtacgctgtcgccacaatcccaaccaccagctgcctagagagaggacaattcagcagtggcttgcaagggtccagtcactcctctactgtaatgagaatgggttttggggaaccttcctggagagccagcggagctgcgtgtgccacggcagcaccacgctgtgccagcgccccatcccctgcgtgataggcgggaacaacagctgcgccatgtgcagcctggccaacatctccctctgcggctcctgcaacaagggctacaagctgtatcgaggccgctgtgaaccacagaacgtggactcggagcggagcgagcagttcatcagctttgagactgacctggacttccaggacctggagctgaagtacctgctgcagaagatggactcacgcctctacgtccacaccaccttcatcagcaacgagatccgcctcgacaccttctttgaccctcggtggcgcaagcgcatgtccctcactctcaagagcaacaagaaccgcatggacttcatccacatggtgatcggcatgtccatgcgcatctgccagatgcgcaacagcagcctggaccccatgttctttgtctatgtcaacccctttagcgggagccattcggagggctggaacatgcccttcggggaatttggctacccacgctgggagaagatccgtctccaaaacagccagtgctacaactggactcttttgctgggcaatcggtggaaaacatttttcgagacggtccacatctacctacgtagtcggactcggctacctaccctactgcgaaatgagactggccagggccccgtggacctgtcggatccctccaagaggcagttctacatcaagatctcagacgtgcaggtgtttgggtatagcctgaggttcaacgccgacctcctgcgcagtgcagtgcagcaggtcaaccagtcctacacacagggcggccagttctattcctcttcgtcagtgatgctcctcttgttggatattcgggaccgaattaatcgcctggcccctcctgtggccccggggaaaccccagctggacttgttctcctgtatgctgaaacaccgcctgaaactgaccaacagcgagatcatcagggtgaaccacgccttggacctgtacaacacggagatcctcaaacagtcggaccagatgacagccaaactctgctaacccgggactccttgccatggacttttcctgttgttgtacacacacaacagaacaaaatgaagcaaaacaaaacaaaaaaacccacaaaaatttgtaaaatgtaattaatattcaaagaaaaggaggaaaatcttcatttgttggaaatgaaaacgttctagcaactgtataaaagcgttgggcatgtttgttatttctatactcactctgtcatgaagaagggtctcagccttttgtggagcattgagggagttgcttcttaggcctcaggtgctgtattgggggagaagggagaaagcatatgcaatgaattgtaaagatctctgctgtgcaggtgctaagattaaacactaaaaagaaagagagatatatgtaatgtacaactgacactgccatttttcctttttggaggaaatggacatagataaagaagatatttcttcggttaagatttattccctcttta

SEQ ID NO: 430242 - DNA, 2316 bp, Homo sapiens
cgcggcgcacttggacttccctctccattcgccagccgcctcgctcccggaccccacggctgcaaactgatctggcgcgcggggaggaggagagcgcaggcgagcgaacccgcgagagagggagagagcgagcgagcaacagcgagagcgagagcgagagagccgggaggcagagggagtagtgaccgccttccggagccgggattcatgcctgtcctcgggaccagcgaaggggactttacggctgagtatgagccaggctgctaggagccaggtacccccacgcctgcagtccccgcgccgtgcccggaatgcgagctggacgcagggctctcccaagttcccaccgagccgaataaaaagcgtccgcccgcagctctccgccaaagacggacattgactccagggacatccagatcatggagtacacgctggccaacatggccaagtcttgggccgaagcttataaggacctggagaattcagatgagtttaaatcatttatgaagcgcctccccagcaaccacttcctgaccatcggaagcatccatcagcactggggcaatgactgggacctgcagaaccgctacaagctcctgcagagtgccacggaggcacagagacaaaagatccaacgcactgcccgcaagcttttcggcctcagtgtacgctgtcgccacaatcccaaccaccagctgcctagagagaggacaattcagcagtggcttgcaagggtccagtcactcctctactgtaatgagaatgggttttggggaaccttcctggagagccagcggagctgcgtgtgccacggcagcaccacgctgtgccagcgccccatcccctgcgtgataggcgggaacaacagctgcgccatgtgcagcctggccaacatctccctctgcggctcctgcaacaagggctacaagctgtatcgaggccgctgtgaaccacagaacgtggactcggagcggagcgagcagttcatcagctttgagactgacctggacttccaggacctggagctgaagtacctgctgcagaagatggactcacgcctctacgtccacaccaccttcatcagcaacgagatccgcctcgacaccttctttgaccctcggtggcgcaagcgcatgtccctcactctcaagagcaacaagaaccgcatggacttcatccacatggtgatcggcatgtccatgcgcatctgccagatgcgcaacagcagcctggaccccatgttctttgtctatgtcaacccctttagcgggagccattcggagggctggaacatgcccttcggggaatttggctacccacgctgggagaagatccgtctccaaaacagccagtgctacaactggactcttttgctgggcaatcggtggaaaacatttttcgagacggtccacatctacctacgtagtcggactcggctacctaccctactgcgaaatgagactggccagggccccgtggacctgtcggatccctccaagaggcagttctacatcaagatctcagacgtgcaggtgtttgggtatagcctgaggttcaacgccgacctcctgcgcagtgcagtgcagcaggtcaaccagtcctacacacagggcggccagttctattcctcttcgtcagtgatgctcctcttgttggatattcgggaccgaattaatcgcctggcccctcctgtggccccggggaaaccccagctggacttgttctcctgtatgctgaaacaccgcctgaaactgaccaacagcgagatcatcagggtgaaccacgccttggacctgtacaacacggagatcctcaaacagtcggaccagatgacagccaaactctgctaacccgggactccttgccatggacttttcctgttgttgtacacacacaacagaacaaaatgaagcaaaacaaaacaaaaaaacccacaaaaatttgtaaaatgtaattaatattcaaagaaaaggaggaaaatcttcatttgttggaaatgaaaacgttctagcaactgtataaaagcgttgggcatgtttgttatttctatactcactctgtcatgaagaagggtctcagccttttgtggagcattgagggagttgcttcttaggcctcaggtgctgtattgggggagaagggagaaagcatatgcaatgaattgtaaagatctctgctgtgcaggtgctaagattaaacactaaaaagaaagagagatatatgtaatgtacaactgacactgccatttttcctttttggaggaaatggacatagataaagaagatatttcttcggttaagatttattccctcttta

SEQ ID NO: 430243 - DNA, 1736 bp, Homo sapiens
  misc_feature (91)..(91): n is a, c, g, or t
gagcgtgctagcagcacagagaagatccataccgcaactgtcccgaccagcattatcggccctcagtctgtactgctcgtcgccaactcantctccacactgaccatgtcttgccttataggtatgatggacaattcagcagtggcttgcaagggtccagtcactcctctactgtaatgagaatgggttttggggaaccttcctggagagccagcggagctgcgtgtgccacggcagcaccacgctgtgccagcgccccatcccctgcgtgataggcgggaacaacagctgcgccatgtgcagcctggccaacatctccctctgcggctcctgcaacaagggctacaagctgtatcgaggccgctgtgaaccacagaacgtggactcggagcggagcgagcagttcatcagctttgagactgacctggacttccaggacctggagctgaagtacctgctgcagaagatggactcacgcctctacgtccacaccaccttcatcagcaacgagatccgcctcgacaccttctttgaccctcggtggcgcaagcgcatgtccctcactctcaagagcaacaagaaccgcatggacttcatccacatggtgatcggcatgtccatgcgcatctgccagatgcgcaacagcagcctggaccccatgttctttgtctatgtcaacccctttagcgggagccattcggagggctggaacatgcccttcggggaatttggctacccacgctgggagaagatccgtctccaaaacagccagtgctacaactggactcttttgctgggcaatcggtggaaaacatttttcgagacggtccacatctacctacgtagtcggactcggctacctaccctactgcgaaatgagactggccagggccccgtggacctgtcggatccctccaagaggcagttctacatcaagatctcagacgtgcaggtgtttgggtatagcctgaggttcaacgccgacctcctgcgcagtgcagtgcagcaggtcaaccagtcctacacacagggcggccagttctattcctcttcgtcagtgatgctcctcttgttggatattcgggaccgaattaatcgcctggcccctcctgtggccccggggaaaccccagctggacttgttctcctgtatgctgaaacaccgcctgaaactgaccaacagcgagatcatcagggtgaaccacgccttggacctgtacaacacggagatcctcaaacagtcggaccagatgacagccaaactctgctaacccgggactccttgccatggacttttcctgttgttgtacacacacaacagaacaaaatgaagcaaaacaaaacaaaaaaacccacaaaaatttgtaaaatgtaattaatattcaaagaaaaggaggaaaatcttcatttgttggaaatgaaaacgttctagcaactgtataaaagcgttgggcatgtttgttatttctatactcactctgtcatgaagaagggtctcagccttttgtggagcattgagggagttgcttcttaggcctcaggtgctgtattgggggagaagggagaaagcatatgcaatgaattgtaaagatctctgctgtgcaggtgctaagattaaacactaaaaagaaagagagatatatgtaatgtacaactgacactgccatttttcctttttggaggaaatggacatagataaagaagatatttcttcggttaagatttattccctcttta

SEQ ID NO: 430244 - DNA, 281 bp, Homo sapiens
cactgctccatccagtcctttcatctttttggcagctccagttcgcattatcagttggataactgtaactcacagacccactcatggtagctaaccttctccaattttcctttatctcccaggacaattcagcagtggcttgcaagggtccagtcactcctctactgtaatgagaatgggttttggggaaccttcctggagagccagcggagctgcgtgtgccacggcagcaccacgctgtgccagcgccccatcccctgcgtgataggcgggaacaacag

SEQ ID NO: 430245 - DNA, 2852 bp, Homo sapiens
cttcatttctatctttactgaaaaattgaagagcaataccttgcactctcttttgaggttattctttttatttgttgcagtgatatgatgctaactaatttaacatgtacacagtaagctctggggctggaagcaaggtcatgcagactgagagagtgccttatcctgtaaaaccttacagcaaaatgacacttgaagaaagtttattttcacatgtaaaattttgactgacaaaaggaacctactactttaaacaatggttttattagaacatggtcagcaaatgtatcatgcctctgcaaattttagtgatgtttagagatgcctctaagtttgcagttggaggtttttgtgcttttagaaatgtgatgtgatccttagggtacctgttttgtctgttgtgttgagaaccaaacccattgaacaacttaaaaaattgggaaataattgtcagctattttgtatacatacacacaaaatatatacattatataatatgtatattatgtattatataatatatataaaatgttttgtatattttttacatatctgttaaaaaatgtactttgtttttttgtttgtttgttttgagatggagtctctctctgtcacccatgctggagtacagtggcgcgatctcagcccgctgcaacctctgcctcctgggttcatgcgactctcgtgcctcagcctcccaagtagctgagattacagttgggtgccaccatgtccggctaatttttgtatttttagtacagatggggtttcaccatgttggccagggtggtctcgagctcctgacctcaagtgatccacccaccttggcctcccaaagtgctgagattacaagcatgagccactgcacctagccaagaagtgtactttttgtttaatgattaccgaaagaagttctcctttagaagcattgacttatacaaattcccacattcacctcagttaatatcttcctttaggattcttggataatagaaattcttcctaaaacatactcagagatgcagctcattattaaattaaggtaaccacattctgtattgttgctagcttttcatgtaaacattattcacactttaaaggattaggtgtttaaatattgatggtcatctttgtctggtgttaggtgccagacacctggctgctgaatttgttttttccctcaccaaagttgtcatttggaacgccagctgggaggactttgaaggaaaagaaaatatatgacaataggcagtattgacacattgtttaaaatctttttcacaataaaacaaaacacccaagttgtcatattgttaaagttggaaatctataggtttttctttttttttttttttttctttttttgattctagatttcatggccagaacacaaattcacgtttcttgtcctaggacagggaattggtgacaaaatggattatactattttaataacagtggaaactttcaaactacatgtgtttacaccaaattcttggcttctcaaagcaacatgaattaaagcacagtatcaaggtgatgccctatgacaatgtttcaacacacacttgaaattttaagagaaatttcagttcttcactcaggaaatgtgctgtattctctaatgtactttcatgctgcagcatggagcctctttaaacagctttgggataattatagcagcacaagaagtttatctgcaaaatatttcaatcatcttggtacaatagatgacttttacatcatgtatattagccttatgtgatataaaatgtattacttagaaaatatacttaaaggaattatttctattataaatggtattcatgattgactacttaattaatgcacattagatttctcctaatataaaatgaaatgatgcagtttagttcatttcagtctagatgcccgtactaacaagaatacagttagataagttcattgtatctcaatgaagaatcattgaacttgaaacccaagtcccaaatgaatctgcaggaatgagcagtgctctgcgggggcaaacagccccagaggtcccagggttcttcctaggtaatgagagtatagctgtgatcaaggaaatgtgaacttctcttttgggaagatctgcgataattagctttatggaagcgaaaatggtttagagtggtgttgagcaattgttaagagttgaaatagacacacacatgcatgtgcttttgggaaacatgatgtgccaacgtattaatgtgcctgagggctccttgtggataggtcagtgtccacatttcagcactcagggcatgactgtacacaacctaagactatatatatattttttcattttcaaatgtacaaatacccatagaggtgatgtgcctggataagtcatttaaccatagcttagtgaaataaatgtgatggccctaaaaagtagaattttcactttcattacagccatgcctttattatgcagtctccatttctgtgtgatatttggtaatatcacatgtcaaatacatcaggactttgtttattttggctaactctaactatacaattgctgaacatagctttctgaaatagaaattataagagaaacccagtatgcctacagcattagtagcctaaatcctagattctagaatccaataaatttatagtagttcttaagaagtttcctttaaagcaacaaatagattattaaggcaaatttagataataacccaagttagcaataaaaccatgtgacattatagattatgtccagatactaactgctttgaccataatatcccaatgacaataaaaaatgatccttggtttaaaaattattaaatggtacttatttttatgtataacaagtg

SEQ ID NO: 430246 - DNA, 1813 bp, Homo sapiens
cttcatttctatctttactgaaaaattgaagagcaataccttgcactctcttttgaggttattctttttatttgttgcagtgatatgatgctaactaatttaacatgtacacagtaagctctggggctggaagcaaggtcatgcagactgagagagtgccttatcctgtaaaaccttacagcaaaatgacacttgaagaaagtttattttcacatgtaaaattttgactgacaaaaggaacctactactttaaacaatggttttattagaacatggtcagcaaatgtatcatgcctctgcaaattttagtgatgtttagagatgcctctaagtttgcagttggaggtttttgtgcttttagaaatgtgatgtgatccttagggtacctgttttgtctgttgtgttgagaaccaaacccattgaacaacttaaaaaattgggaaataattgtcagctattttgtatacatacacacaaaatatatacattatataatatgtatattatgtattatataatatatataaaatgttttgtatattttttacatatctgttaaaaaatgtactttgtttttttgtttgtttgttttgagatggagtctctctctgtcacccatgctggagtacagtggcgcgatctcagcccgctgcaacctctgcctcctgggttcatgcgactctcgtgcctcagcctcccaagtagctgagattacagttgggtgccaccatgtccggctaatttttgtatttttagtacagatggggtttcaccatgttggccagggtggtctcgagctcctgacctcaagtgatccacccaccttggcctcccaaagtgctgagattacaagcatgagccactgcacctagccaagaagtgtactttttgtttaatgattaccgaaagaagttctcctttagaagcattgacttatacaaattcccacattcacctcagttaatatcttcctttaggattcttggataatagaaattcttcctaaaacatactcagagatgcagctcattattaaattaaggtaaccacattctgtattgttgctagcttttcatgtaaacattattcacactttaaaggattaggtgtttaaatattgatggtcatctttgtctggtgttaggtgccagacacctggctgctgaatttgttttttccctcaccaaagttgtcatttggaacgccagctgggaggactttgaaggaaaagaaaatatatgacaataggcagtattgacacattgtttaaaatctttttcacaataaaacaaaacacccaagttgtcatattgttaaagttggaaatctataggtttttctttttttttttttttttctttttttgattctagatttcatggccagaacacaaattcacgtttcttgtcctaggacagggaattggtgacaaaatggattatactattttaataacagtggaaactttcaaactacatgtgtttacaccaaattcttggcttctcaaagcaacatgaattaaagcacagtatcaaggtgatgccctatgacaatgtttcaacacacacttgaaattttaagagaaatttcagttcttcactcaggaaatgtgctgtattctctaatgtactttcatgctgcagcatggagcctctttaaacagctttgggataattatagcagcacaagaagtttatctgcaaaatatttcaatcatcttggtacaatagatgacttttacatcatgtatattagccttatgtgatataaaatgtattacttagaaaatatacttaaaggaattatttctatt

SEQ ID NO: 430247 - DNA, 2572 bp, Homo sapiens
tcagtcacagctcccatgcctcagctttgtacctgttttcaaaagcacaactgaggtgtgcgggctggagctgtcttgcagtgattctggccttctggctcatggttcagtccagcagcctggctgacccactatttctcctctgcttcagaggaaacccaggaaatgcccttactgccaggctgagtctccacccatgctggttggtgctggctaggctgagggggccaccacttttcctggctagaagctacttgacctttgatgtttgagttctgtaagtcttcgtgttctgacttactgcttcagagggattggcctgtcccctttccctttctcggctatgggaaggaaggattgctcattggttgccttcatcagttacagcatgagacggaattcatcattccttccgaaacccctgatatttaatatttaatatttaaaaacccaaattatcaaaccattaagaactcattactggttctcagcctcctccagtactagcctcagtgtggctgctgcataagtatctgtagcctgtctacctcctgcagtggggccgctcgcctcttccctgtctactgctcaggctctcccacttcgtggcatccatgtaaagtaggtggcagggcagagatgtcactctcattcaacagggaggatgtctgttgctcagagaggttgtcctgaggggctgggtgattcctgggcctacattcttcccgaggctccaggccgctgtctctggaagtaaaagagccttgtctgaccttaatgcaagcagtctgtttgaacccctgtaggctgcattcaggagacagaaggtgtctgggccatcctgggcggccggtcagcgttgctaggcaggctcggctgtctggccgggacttgggcctgggtggcttttgagaccagtgaagaagggagagccggcctcatgccgatgcggcttgtggcacggctgggatgtgagggaggactcagatctacacacagaaacccctcttctccccgccctcccccagctcctacctgcctcccacgcctcaggtgtggctgcctgtgggaccatcccccaacccctttcctcgcacctccttgtcctcacccagttcctgcagtgtctctgacccacgcctcccgcctcctggccgacttgcccaggaggtgtctctggctcacctccgtctgttcatcaccttcctccccagtgtttccacttatcttggatgttttagattgaaacagcctgattcccggaagaatcctcttcattcattgctagtgcttcccctcacctcccactctccacttcccagtttgcaaatgtggctttcgcccaccaagtgaaagcggactgagagcagcccttggggacggcccggtgcctggctgcaaggccgcgctggggctctgtcttggtgcacatggcttgaccggactttccctgcttcccaccacttccctcactcccagacctccctcattctttttgtctcttctttttgcctaaagccagtccttaacaccctattcttcctctgcaggtggcttgcagacttttccccacctttggggctcgtggtggtggagagggcagctggtgttaagaatgtaggttaccgggcatgacccggcagatgcttgcccagtagttctggaggaaggcccgggaatctgcaaatgagcgcattccccaggcagttcccatgcaggtgatccacggaccacatgttgagaaactgcagtcacccttagggccacaccgtccctctccccgctgtcccctctctgtagtgactggccctgaccttcaggagtgcactttccactctaccaggaagccctatgacatcctcaggctccccagacctgcagcttgcatggggcccctcccttcttccacacccaccctccgtatggtcccctgctctgccctcgtgctttgctggcccctgcccgctactcccactctcagacacccaggggtggtgggccctaactggctggcccctcccagcgctgccctctgccgtccagatgctgcagtgtggccagatttaccttccagtaacatacttctagtcacccctcctcctgcgaagtgatctgcagtggctgtttgaccagaccacaaagttcacatctcctgagcttagtgtccgtggctgtccacctcccagccatacttgactgtccccaaactctccctgcagccacatgtttcccatgacctgtgggctctgcagatggacctctctccgctagagatgcccttctcccaaatggcttccctcctggaaggcccagcctgagtcctcgtctcctttccagtgcttctgccagaagcatccccatgatgttgtgaccgcacagcactttgtgtctcgctttgagcacttgccactctggctggtgctgctgccactgattgtgtactgtcttgctgccctttctagactgtgagctcctcgtgggcagggaccgcctgtgttctctgtatttcccacggcgcctagcacagtgccttgcacttgataggtgcttaataaatgtctgctcaactgaa

SEQ ID NO: 430248 - DNA, 3352 bp, Homo sapiens
ggcccggcccgcggcggcggcaaaggggcggaggggttcgctgccagcaattgccaagctgctgcggtcgtggcgggatggtatagccgggcctgagggcgggcggcggggcgcgggcgggggcgaggcggccgggaagggccgacgccgcctgactggcttgggagcagcggcagcaagctgagggggcgtcgccgccgccggcccccggcgccgccgcgggaggccgcgcccgccatggcggcccgggcggtgctggacgagttcactgcgccagctgagaaggcggagctgctggagcagagccgcggccgtatcgagggcctgtttggcgtgagcctagccgtgctcggcgcgctaggggctgaggagccgctgcccgcgcgcatctggctgcagctctgcggggcgcaggaggcggagcacagcgccaaggaatatattaaaggaatctgtgaacctgaactagaagaaagagaatgttaccccaaggacatgcactgcatttttgttggggcagagagcctgtttctgaaaagcttgattcaggatacttgtgctgacctctgcattctggacattggccttcttggcatcagaggaagtgctgaggctgtggtcatggctaggagtcacattcaacaatttgtaaagctctttgaaaataaagagaacctacccagtagtcagaaagaatcagaggtgaaaagggaattcaaacaatttgttgaagcccatgcagacaattacacaatggatttgttgattttgcccacttccttgaaaaaagaacttttgacactcacacaaggtgaggagaatctctttgaaacaggagatgatgaggttattgaaatgagagattctcaacaaacagagtttacacagaatgctgccacagggctgaatatttctagagatgaaactgttttgcaggaagaggcaagaaataaagctgggactcctgtttctgagcttacaaaacaaatggacacagtcctttctagctcaccagatgtgctttttgatccaataaatggtctaaccccagatgaagaggcactttccaatgagagaatttgtcagaaaaggagattttctgattctgaagaaaggcatacgaagaagcagttttctttggaaaatgttcaggagggggagattttacacgatgctaagacattggctggaaatgtaatagctgacctatctgattcttctgctgattctgaaaatttaagtccagatataaaagaaactactgaggaaatggaatacaacatcctcgtaaacttttttaaaaccatgggctactcccaagaaattgttgaaaaggtcattaaggtgtatggaccatctactgaaccattattgctcttagaggaaattgaaaaagaaaataaaagattccaagaagacagagaattttcagctggtacagtgtatccagagaccaacaaaaccaaaaataaaggtgtttatagcagcacaaatgagcttacaactgattccactccaaagaaaacacaggctcacacacagcaaaatatggtagaaaaattttctcagttaccattcaaagtggaagctaaaccatgtacctcaaattgtagaattaatactttcagaacagtgccaatagaacagaaacatgaagtctggggttcaaaccagaactacatttgtaacacagaccctgaaactgatggcctttcaccttctgttgcctctccaagtcccaaagaagtcaattttgtttcaaggggagcttcaagtcaccagcccagagttccactttttcctgaaaatggtttacaccagcagccagaacccttgcttccaaataatatgaaatctgcctgtgaaaaacgtttaggatgttgtagttctcctcattctaagccaaattgctcaaccctttctccaccaatgccactgccccagctgttaccttcggttactgatgcaaggtcggcaggaccttctgatcatattgattcctcagttactggggttcaaaggtttcgagatactctaaaaataccctacaagctggaattaaaaaatgaaccagggagaacggatttgaaacacattgttatagatgggagcaatgttgcaattacccatggtctgaaaaagttcttttcttgtcgtggaattgcaattgcagttgaatatttttggaagcttggcaacagaaacatcactgtatttgtccctcagtggagaacaaggcgtgatcctaatgtcacagaacagcacttcttaacccagctccaggagctcggaatattatctttaactcctgcccggatggtctttggagaaagaattgcttctcatgatgacaggtttctactacacttagcggacaaaactggtggcataattgtgacaaatgataatttcagagaatttgtgaatgagtcagtctcttggagagaaattattacaaaaaggctgctgcagtacacgttcgtgggggacatatttatggttcccgatgatcctctgggaagaagtggacctcgattagaggagtttcttcagaaggaagtctgtcttagagatatgcagcccctactcagtgccctgccaaatgtgggcatgtttgaccccagcttcagagtccctggcacccaggcagccagcaccaccaatacagcctccgacccggattcagggagccccttcaagccactggctccctcagcagccccacttcccactgctgccagccctccccagtctccagcagaacctgcccatgccagctcagagatcttctgcagaaaccaacgagctgagggaagcccttctgaagatcttccctgactcagagcaaagactgaaaatagaccagatcttggtggcccacccatacatgaaagatctaaatgcgctttctgccatggtgttggattgaagattgtgctgagcgctgagcttgcgctcagggctggctgatcaaactcaagctcacacctgtacctgatgggaatgaacataatgtgaagaaacttatttcccagtgtaaacgcagttgtacagaaaaaaaatgttttgggtataaatctgggttttcaaaaccagcttttttctatatataaattatgctgctattacagatttaacattttctgttaaaggaaagtctacattttctgcctgttcagaactgtttaatagcagttactcttgagtgtatttacctttttatgttttttaaactattttccttaaagccgaaaatattgacaaatggatatggttagcctttataaataaataaaaaaaaaagtgttgctttcttaaggaaagcaagacgtcttaaagtataaaaaaaaaa

SEQ ID NO: 430249 - DNA, 697 bp, Homo sapiens
tgccgttgttcatacctgcatgttgttcatgggagccccttcaagccactggctccctcagcagccccacttcccactgctgccagccctccccagtctccagcagaacctgcccatgccagctcagagatcttctgcagaaaccaacgagctgagggaagcccttctgaagatcttccctgactcagagcaaagactgaaaatagaccagatcttggtggcccacccatacatgaaagatctaaatgcgctttctgccatggtgttggattgaagattgtgctgagcgctgagcttgcgctcagggctggctgatcaaactcaagctcacacctgtacctgatgggaatgaacataatgtgaagaaacttatttcccagtgtaaacgcagttgtacagaaaaaaaatgttttgggtataaatctgggttttcaaaaccagcttttttctatatataaattatgctgctattacagatttaacattttctgttaaaggaaagtctacattttctgcctgttcagaactgtttaatagcagttactcttgagtgtatttacctttttatgttttttaaactattttccttaaagccgaaaatattgacaaatggatatggttagcctttataaataaataaaaaaaaaagtgttgctttcttaaggaaagcaagacgtcttaaagtataaaaaaaaaa

SEQ ID NO: 430250 - DNA, 482 bp, Homo sapiens
gacagtctttaaatcttatttttcaaagttatattgaaagttatattagaagaagaagcggcttcctaagcccagtacaaatctgcaagtcttaatgagaaatttgagggccagctgataaaacgttctgactattgtttttgtgtccaaaacagaaattaaaagggtttgacttgggtgttttccccgcttttaggcagttgagcagtcttaggatttgtaggctgacctgaccgttgctttggcatcaggtggctgctttgggatccttacgcaggccctgggcagtgaggaccctgtctctcagcctcatggtgttctgtgttgtaggctgctgcagtacacgttcgtgggggacatatttatggttcccgatgatcctctgggaagaagtggacctcgattagaggagtttcttcagaaggaagtctgtcttaggtatttcctttttcagattgtcttgtattaaaacttctatttca

SEQ ID NO: 430251 - DNA, 414 bp, Homo sapiens
tcccggggagaaaatgggcagaacacaaaacagctttaaattgaatttgagagaaattattacaaaaaggctgctgcagtacacgttcgtgggggacatatttatggttcccgatgatcctctgggaagaagtggacctcgattagaggagtttcttcagaaggaagtctgtcttagagatatgcagcccctactcagtgccctgccaaatgtgggcatgtttgaccccagcttcagagtccctggcacccaggcagccagcaccaccaatacagcctccgacccggattcagatacagaccagttacacttgaattaagatctgcgctcaaatctcctcccacctctctccctgcttttgcctcgctctgacttccatctggtatttccgattcacaaagcactttcctcccc

SEQ ID NO: 430252 - DNA, 2592 bp, Homo sapiens
ttttttaaaaccatgggctactcccaagaaattgttgaaaaggtcattaaggtgtatggaccatctactgaaccattattgctcttagaggaaattgaaaaagaaaataaaagattccaagaagacagagaattttcagctggtacagtgtatccagagaccaacaaaaccaaaaataaaggtgtttatagcagcacaaatgagcttacaactgattccactccaaagaaaacacagtcctttctagctcaccagatgtgctttttgatccaataaatggtctaaccccagatgaagaggcactttccaatgagagaatttgtcagaaaaggagattttctgattctgaagaaaggcatacgaagaagcagttttctttggaaaatgttcaggagggggagattttacacgatgctaagacattggctggaaatgtaatagctgacctatctgattcttctgctgattctgaaaatttaagtccagatataaaagaaactactgaggaaatggaatacaacatcctcgtaaacttttttaaaaccatgggctactcccaagaaattgttgaaaaggtcattaaggtgtatggaccatctactgaaccattattgctcttagaggaaattgaaaaagaaaataaaagattccaagaagacagagaattttcagctggtacagtgtatccagagaccaacaaaaccaaaaataaaggtgtttatagcagcacaaatgagcttacaactgattccactccaaagaaaacacaggctcacacacagcaaaatatggtagaaaaattttctcagttaccattcaaagtggaagctaaaccatgtacctcaaattgtagaattaatactttcagaacagtgccaatagaacagaaacatgaagtctggggttcaaaccagaactacatttgtaacacagaccctgaaactgatggcctttcaccttctgttgcctctccaagtcccaaagaagtcaattttgtttcaaggggagcttcaagtcaccagcccagagttccactttttcctgaaaatggtttacaccagcagccagaacccttgcttccaaataatatgaaatctgcctgtgaaaaacgtttaggatgttgtagttctcctcattctaagccaaattgctcaaccctttctccaccaatgccactgccccagctgttaccttcggttactgatgcaaggtcggcaggaccttctgatcatattgattcctcagttactggggttcaaaggtttcgagatactctaaaaataccctacaagctggaattaaaaaatgaaccagggagaacggatttgaaacacattgttatagatgggagcaatgttgcaattacccatggtctgaaaaagttcttttcttgtcgtggaattgcaattgcagttgaatatttttggaagcttggcaacagaaacatcactgtatttgtccctcagtggagaacaaggcgtgatcctaatgtcacagaacagcacttcttaacccagctccaggagctcggaatattatctttaactcctgcccggatggtctttggagaaagaattgcttctcatgatgacaggtttctactacacttagcggacaaaactggtggcataattgtgacaaatgataatttcagagaatttgtgaatgagtcagtctcttggagagaaattattacaaaaaggctgctgcagtacacgttcgtgggggacatatttatggttcccgatgatcctctgggaagaagtggacctcgattagaggagtttcttcagaaggaagtctgtcttagagatatgcagcccctactcagtgccctgccaaatgtgggcatgtttgaccccagcttcagagtccctggcacccaggcagccagcaccaccaatacagcctccgacccggattcagggagccccttcaagccactggctccctcagcagccccacttcccactgctgccagccctccccagtctccagcagaacctgcccatgccagctcagagatcttctgcagaaaccaacgagctgagggaagcccttctgaagatcttccctgactcagagcaaagactgaaaatagaccagatcttggtggcccacccatacatgaaagatctaaatgcgctttctgccatggtgttggattgaagattgtgctgagcgctgagcttgcgctcagggctggctgatcaaactcaagctcacacctgtacctgatgggaatgaacataatgtgaagaaacttatttcccagtgtaaacgcagttgtacagaaaaaaaatgttttgggtataaatctgggttttcaaaaccagcttttttctatatataaattatgctgctattacagatttaacattttctgttaaaggaaagtctacattttctgcctgttcagaactgtttaatagcagttactcttgagtgtatttacctttttatgttttttaaactattttccttaaagccgaaaatattgacaaatggatatggttagcctttataaataaataaaaaaaaaagtgttgctttcttaaggaaagcaagacgtcttaaagtataaaaaaaaaa

SEQ ID NO: 430253 - DNA, 1053 bp, Homo sapiens
  misc_feature (2)..(2): n is a, c, g, or t
gnccactctagattatcccctgtattggtggtgctccctcatagagcgcattgattccctggcacgccttgaggtgatgtcagtgaaatccccgcaggctcctctgtgggtgtctcatggcaccatctccacctcagtcttgcatcctgcctttggaagccagggagcggcatcctgagcctcaaggcctgccgcaggtaccttctaaaatagctctatgattttttgtttacttataacccaactcaccaggactcacttccattcacagagatatgcagcccctactcagtgccctgccaaatgtgggcatgtttgaccccagcttcagagtccctggcacccaggcagccagcaccaccaatacagcctccgacccggattcagggagccccttcaagccactggctccctcagcagccccacttcccactgctgccagccctccccagtctccagcagaacctgcccatgccagctcagagatcttctgcagaaaccaacgagctgagggaagcccttctgaagatcttccctgactcagagcaaagactgaaaatagaccagatcttggtggcccacccatacatgaaagatctaaatgcgctttctgccatggtgttggattgaagattgtgctgagcgctgagcttgcgctcagggctggctgatcaaactcaagctcacacctgtacctgatgggaatgaacataatgtgaagaaacttatttcccagtgtaaacgcagttgtacagaaaaaaaatgttttgggtataaatctgggttttcaaaaccagcttttttctatatataaattatgctgctattacagatttaacattttctgttaaaggaaagtctacattttctgcctgttcagaactgtttaatagcagttactcttgagtgtatttacctttttatgttttttaaactattttccttaaagccgaaaatattgacaaatggatatggttagcctttataaataaataaaaaaaaaagtgttgctttcttaaggaaagcaagacgtcttaaagtataaaaaaaaaa

SEQ ID NO: 430254 - DNA, 3255 bp, Homo sapiens
ggcccggcccgcggcggcggcaaaggggcggaggggttcgctgccagcaattgccaagctgctgcggtcgtggcgggatggtatagccgggcctgagggcgggcggcggggcgcgggcgggggcgaggcggccgggaagggccgacgccgcctgactggcttgggagcagcggcagcaagctgagggggcgtcgccgccgccggcccccggcgccgccgcgggaggccgcgcccgccatggcggcccgggcggtgctggacgagttcactgcgccagctgagaaggcggagctgctggagcagagccgcggccgtatcgagggcctgtttggcgtgagcctagccgtgctcggcgcgctaggggctgaggagccgctgcccgcgcgcatctggctgcagctctgcggggcgcaggaggcggagcacagcgccaaggaatatattaaaggaatctgtgaacctgaactagaagaaagagaatgttaccccaaggacatgcactgcatttttgttggggcagagagcctgtttctgaaaagcttgattcaggatacttgtgctgacctctgcattctggacattggccttcttggcatcagaggaagtgctgaggctgtggtcatggctaggagtcacattcaacaatttgtaaagctctttgaaaataaagagaacctacccagtagtcagaaagaatcagaggtgaaaagggaattcaaacaatttgttgaagcccatgcagacaattacacaatggatttgttgattttgcccacttccttgaaaaaagaacttttgacactcacacaaggtgaggagaatctctttgaaacaggagatgatgaggttattgaaatgagagattctcaacaaacagagtttacacagaatgctgccacagggctgaatatttctagagatgaaactgttttgcaggaagaggcaagaaataaagctgggactcctgtttctgagcttacaaaacaaatggacacagtcctttctagctcaccagatgtgctttttgatccaataaatggtctaaccccagatgaagaggcactttccaatgagagaatttgtcagaaaaggagattttctgattctgaagaaaggcatacgaagaagcagttttctttggaaaatgttcaggagggggagattttacacgatgctaagacattggctggaaatgtaatagctgacctatctgattcttctgctgattctgaaaatttaagtccagatataaaagaaactactgaggaaatggaatacaacatcctcgtaaacttttttaaaaccatgggctactcccaagaaattgttgaaaaggtcattaaggtgtatggaccatctactgaaccattattgctcttagaggaaattgaaaaagaaaataaaagattccaagaagacagagaattttcagctggtacagtgtatccagagaccaacaaaaccaaaaataaaggtgtttatagcagcacaaatgagcttacaactgattccactccaaagaaaacacaggctcacacacagcaaaatatggtagaaaaattttctcagttaccattcaaagtggaagctaaaccatgtacctcaaattgtagaattaatactttcagaacagtgccaatagaacagaaacatgaagtctggggttcaaaccagaactacatttgtaacacagaccctgaaactgatggcctttcaccttctgttgcctctccaagtcccaaagaagtcaattttgtttcaaggggagcttcaagtcaccagcccagagttccactttttcctgaaaatggtttacaccagcagccagaacccttgcttccaaataatatgaaatctgcctgtgaaaaacgtttaggatgttgtagttctcctcattctaagccaaattgctcaaccctttctccaccaatgccactgccccagctgttaccttcggttactgatgcaaggtcggcaggaccttctgatcatattgattcctcagttactggggttcaaaggtttcgagatactctaaaaataccctacaagctggaattaaaaaatgaaccagggagaacggatttgaaacacattgttatagatgggagcaatgttgcaattacccatggtctgaaaaagttcttttcttgtcgtggaattgcaattgcagttgaatatttttggaagcttggcaacagaaacatcactgtatttgtccctcagtggagaacaaggcgtgatcctaatgtcacaggtttctactacacttagcggacaaaactggtggcataattgtgacaaatgataatttcagagaatttgtgaatgagtcagtctcttggagagaaattattacaaaaaggctgctgcagtacacgttcgtgggggacatatttatggttcccgatgatcctctgggaagaagtggacctcgattagaggagtttcttcagaaggaagtctgtcttagagatatgcagcccctactcagtgccctgccaaatgtgggcatgtttgaccccagcttcagagtccctggcacccaggcagccagcaccaccaatacagcctccgacccggattcagggagccccttcaagccactggctccctcagcagccccacttcccactgctgccagccctccccagtctccagcagaacctgcccatgccagctcagagatcttctgcagaaaccaacgagctgagggaagcccttctgaagatcttccctgactcagagcaaagactgaaaatagaccagatcttggtggcccacccatacatgaaagatctaaatgcgctttctgccatggtgttggattgaagattgtgctgagcgctgagcttgcgctcagggctggctgatcaaactcaagctcacacctgtacctgatgggaatgaacataatgtgaagaaacttatttcccagtgtaaacgcagttgtacagaaaaaaaatgttttgggtataaatctgggttttcaaaaccagcttttttctatatataaattatgctgctattacagatttaacattttctgttaaaggaaagtctacattttctgcctgttcagaactgtttaatagcagttactcttgagtgtatttacctttttatgttttttaaactattttccttaaagccgaaaatattgacaaatggatatggttagcctttataaataaataaaaaaaaaagtgttgctttcttaaggaaagcaagacgtcttaaagtataaaaaaaaaa

SEQ ID NO: 430255 - DNA, 1830 bp, Homo sapiens
taatcacctatatcagagcttcaaagatccttaatttccccacagacttcctcagcaaaaggactacatgtgggaaatcaatgaaaacaggaatgagaagagaaagttaaaaattggttgcttttgttcctgccattggggcccaatggcagccgtacatttgtaacacagaccctgaaactgatggcctttcaccttctgttgcctctccaagtcccaaagaagtcaattttgtttcaaggggagcttcaagtcaccagcccagagttccactttttcctgaaaatggtttacaccagcagccagaacccttgcttccaaataatatgaaatctgcctgtgaaaaacgtttaggatgttgtagttctcctcattctaagccaaattgctcaaccctttctccaccaatgccactgccccagctgttaccttcggttactgatgcaaggtcggcaggaccttctgatcatattgattcctcagttactggggttcaaaggtttcgagatactctaaaaataccctacaagctggaattaaaaaatgaaccagggagaacggatttgaaacacattgttatagatgggagcaatgttgcaattacccatggtctgaaaaagttcttttcttgtcgtggaattgcaattgcagttgaatatttttggaagcttggcaacagaaacatcactgtatttgtccctcagtggagaacaaggcgtgatcctaatgtcacagaacagcacttcttaacccagctccaggagctcggaatattatctttaactcctgcccggatggtctttggagaaagaattgcttctcatgatgacaggtttctactacacttagcggacaaaactggtggcataattgtgacaaatgataatttcagagaatttgtgaatgagtcagtctcttggagagaaattattacaaaaaggctgctgcagtacacgttcgtgggggacatatttatggttcccgatgatcctctgggaagaagtggacctcgattagaggagtttcttcagaaggaagtctgtcttagagatatgcagcccctactcagtgccctgccaaatgtgggcatgtttgaccccagcttcagagtccctggcacccaggcagccagcaccaccaatacagcctccgacccggattcagggagccccttcaagccactggctccctcagcagccccacttcccactgctgccagccctccccagtctccagcagaacctgcccatgccagctcagagatcttctgcagaaaccaacgagctgagggaagcccttctgaagatcttccctgactcagagcaaagactgaaaatagaccagatcttggtggcccacccatacatgaaagatctaaatgcgctttctgccatggtgttggattgaagattgtgctgagcgctgagcttgcgctcagggctggctgatcaaactcaagctcacacctgtacctgatgggaatgaacataatgtgaagaaacttatttcccagtgtaaacgcagttgtacagaaaaaaaatgttttgggtataaatctgggttttcaaaaccagcttttttctatatataaattatgctgctattacagatttaacattttctgttaaaggaaagtctacattttctgcctgttcagaactgtttaatagcagttactcttgagtgtatttacctttttatgttttttaaactattttccttaaagccgaaaatattgacaaatggatatggttagcctttataaataaataaaaaaaaaagtgttgctttcttaaggaaagcaagacgtcttaaagtataaaaaaaaaa

SEQ ID NO: 430256 - DNA, 1146 bp, Homo sapiens
caaaatcaaaatcttcagaagagtaagacactgttaaaccttttgaaagctcccaagggtaccctggttagagccaaacagctggatggggtcagtcctcacagcagaagacctgggagggtggtgctccctcatagagcgcattgattccctggcacgccttgaggtgatgtcagtgaaatccccgcaggctcctctgtgggtgtctcatggcaccatctccacctcagtcttgcatcctgcctttggaagccagggagcggcatcctgagcctcaaggcctgccgcaggtaccttctaaaatagctctatgattttttgtttacttataacccaactcaccaggactcacttccattcacagagatatgcagcccctactcagtgccctgccaaatgtgggcatgtttgaccccagcttcagagtccctggcacccaggcagccagcaccaccaatacagcctccgacccggattcagggagccccttcaagccactggctccctcagcagccccacttcccactgctgccagccctccccagtctccagcagaacctgcccatgccagctcagagatcttctgcagaaaccaacgagctgagggaagcccttctgaagatcttccctgactcagagcaaagactgaaaatagaccagatcttggtggcccacccatacatgaaagatctaaatgcgctttctgccatggtgttggattgaagattgtgctgagcgctgagcttgcgctcagggctggctgatcaaactcaagctcacacctgtacctgatgggaatgaacataatgtgaagaaacttatttcccagtgtaaacgcagttgtacagaaaaaaaatgttttgggtataaatctgggttttcaaaaccagcttttttctatatataaattatgctgctattacagatttaacattttctgttaaaggaaagtctacattttctgcctgttcagaactgtttaatagcagttactcttgagtgtatttacctttttatgttttttaaactattttccttaaagccgaaaatattgacaaatggatatggttagcctttataaataaataaaaaaaaaagtgttgctttcttaaggaaagcaagacgtcttaaagtataaaaaaaaaa

SEQ ID NO: 430257 - DNA, 2606 bp, Homo sapiens
ggcccggcccgcggcggcggcaaaggggcggaggggttcgctgccagcaattgccaagctgctgcggtcgtggcgggatggtatagccgggcctgagggcgggcggcggggcgcgggcgggggcgaggcggccgggaagggccgacgccgcctgactggcttgggagcagcggcagcaagctgagggggcgtcgccgccgccggcccccggcgccgccgcgggaggccgcgcccgccatggcggcccgggcggtgctggacgagttcactgcgccagctgagaaggcggagctgctggagcagagccgcggccgtatcgagggcctgtttggcgtgagcctagccgtgctcggcgcgctaggggctgaggagccgctgcccgcgcgcatctggctgcagctctgcggggcgcaggaggcggagcacagcgccaaggaatatattaaaggaatctgtgaacctgaactagaagaaagagaatgttaccccaaggacatgcactgcatttttgttggggcagagagcctgtttctgaaaagcttgattcaggatacttgtgctgacctctgcattctggacattggccttcttggcatcagaggaagtgctgaggctgtggtcatggctaggagtcacattcaacaatttgtaaagctctttgaaaataaagagaacctacccagtagtcagaaagaatcagaggtgaaaagggaattcaaacaatttgttgaagcccatgcagacaattacacaatggatttgttgattttgcccacttccttgaaaaaagaacttttgacactcacacaaggtgaggagaatctctttgaaacaggagatgatgaggttattgaaatgagagattctcaacaaacagagtttacacagaatgctgccacagggctgaatatttctagagatgaaactgttttgcaggaagaggcaagaaataaagctgggactcctgtttctgagcttacaaaacaaatggacacagtcctttctagctcaccagatgtgctttttgatccaataaatggtctaaccccagatgaagaggcactttccaatgagagaatttgtcagaaaaggagattttctgattctgaagaaaggcatacgaagaagcagttttctttggaaaatgttcaggagggggagattttacacgatgctaagacattggctggaaatgtaatagctgacctatctgattcttctgctgattctgaaaatttaagtccagatataaaagaaactactgaggaaatggaatacaacatcctcgtaaacttttttaaaaccatgggctactcccaagaaattgttgaaaaggtcattaaggtgtatggaccatctactgaaccattattgctcttagaggaaattgaaaaagaaaataaaagattccaagaagacagagaattttcagctggtacagtgtatccagagaccaacaaaaccaaaaataaaggtgtttatagcagcacaaatgagcttacaactgattccactccaaagaaaacacaggctcacacacagcaaaatatggtagaaaaattttctcagttaccattcaaagtggaagctaaaccatgtacctcaaattgtagaattaatactttcagaacagtgccaatagaacagaaacatgaagtctggggttcaaaccagaactacatttgtaacacagaccctgaaactgatggcctttcaccttctgttgcctctccaagtcccaaagaagtcaattttgtttcaaggggagcttcaagtcaccagcccagagttccactttttcctgaaaatggtttacaccagcagccagaacccttgcttccaaataatatgaaatctgcctgtgaaaaacgtttaggatgttgtagttctcctcattctaagccaaattgctcaaccctttctccaccaatgccactgccccagctgttaccttcggttactgatgcaaggtcggcaggaccttctgatcatattgattcctcagttactggggttcaaaggtttcgagatactctaaaaataccctacaagctggaattaaaaaatgaaccagggagaacggatttgaaacacattgttatagatgggagcaatgttgcaattacccatggtctgaaaaagttcttttcttgtcgtggaattgcaattgcagttgaatatttttggaagcttggcaacagaaacatcactgtatttgtccctcagtggagaacaaggcgtgatcctaatgtcacagaacagcacttcttaacccagctccaggagctcggaatattatctttaactcctgcccggatggtctttggagaaagaattgcttctcatgatgacaggtttctactacacttagcggacaaaactggtggcataattgtgacaaatgataatttcagagaatttgtgaatgagtcagtacttgccactctggctggtgctgctgccactgattgtgtactgtcttgctgccctttctagactgtgagctcctcgtgggcagggaccgcctgtgttctctgtatttcccacggcgcctagcacagtgccttgcacttgataggtgcttaataaatgtctgctcaactgaa

SEQ ID NO: 430258 - DNA, 1220 bp, Homo sapiens
gacagtctttaaatcttatttttcaaagttatattgaaagttatattagaagaagaagcggcttcctaagcccagtacaaatctgcaagtcttaatgagaaatttgagggccagctgataaaacgttctgactattgtttttgtgtccaaaacagaaattaaaagggtttgacttgggtgttttccccgcttttaggcagttgagcagtcttaggatttgtaggctgacctgaccgttgctttggcatcaggtggctgctttgggatccttacgcaggccctgggcagtgaggaccctgtctctcagcctcatggtgttctgtgttgtaggctgctgcagtacacgttcgtgggggacatatttatggttcccgatgatcctctgggaagaagtggacctcgattagaggagtttcttcagaaggaagtctgtcttagagatatgcagcccctactcagtgccctgccaaatgtgggcatgtttgaccccagcttcagagtccctggcacccaggcagccagcaccaccaatacagcctccgacccggattcagggagccccttcaagccactggctccctcagcagccccacttcccactgctgccagccctccccagtctccagcagaacctgcccatgccagctcagagatcttctgcagaaaccaacgagctgagggaagcccttctgaagatcttccctgactcagagcaaagactgaaaatagaccagatcttggtggcccacccatacatgaaagatctaaatgcgctttctgccatggtgttggattgaagattgtgctgagcgctgagcttgcgctcagggctggctgatcaaactcaagctcacacctgtacctgatgggaatgaacataatgtgaagaaacttatttcccagtgtaaacgcagttgtacagaaaaaaaatgttttgggtataaatctgggttttcaaaaccagcttttttctatatataaattatgctgctattacagatttaacattttctgttaaaggaaagtctacattttctgcctgttcagaactgtttaatagcagttactcttgagtgtatttacctttttatgttttttaaactattttccttaaagccgaaaatattgacaaatggatatggttagcctttataaataaataaaaaaaaaagtgttgctttcttaaggaaagcaagacgtcttaaagtataaaaaaaaaa

SEQ ID NO: 430259 - DNA, 2629 bp, Homo sapiens
ggcccggcccgcggcggcggcaaaggggcggaggggttcgctgccagcaattgccaagctgctgcggtcgtggcgggatggtatagccgggcctgagggcgggcggcggggcgcgggcgggggcgaggcggccgggaagggccgacgccgcctgactggcttgggagcagcggcagcaagctgagggggcgtcgccgccgccggcccccggcgccgccgcgggaggccgcgcccgccatggcggcccgggcggtgctggacgagttcactgcgccagctgagaaggcggagctgctggagcagagccgcggccgtatcgagggcctgtttggcgtgagcctagccgtgctcggcgcgctaggggctgaggagccgctgcccgcgcgcatctggctgcagctctgcggggcgcaggaggcggagcacagcgccaaggaatatattaaaggaatctgtgaacctgaactagaagaaagagaatgttaccccaaggacatgcactgcatttttgttggggcagagagcctgtttctgaaaagcttgattcaggatacttgtgctgacctctgcattctggacattggccttcttggcatcagaggaagtgctgaggctgtggtcatggctaggagtcacattcaacaatttgtaaagctctttgaaaataaagagaacctacccagtagtcagaaagaatcagaggtgaaaagggaattcaaacaatttgttgaagcccatgcagacaattacacaatggatttgttgattttgcccacttccttgaaaaaagaacttttgacactcacacaaggtgaggagaatctctttgaaacaggagatgatgaggttattgaaatgagagattctcaacaaacagagtttacacagaatgctgccacagggctgaatatttctagagatgaaactgttttgcaggaagaggcaagaaataaagctgggactcctgtttctgagcttacaaaacaaatggacacagtcctttctagctcaccagatgtgctttttgatccaataaatggtctaaccccagatgaagaggcactttccaatgagagaatttgtcagaaaaggagattttctgattctgaagaaaggcatacgaagaagcagttttctttggaaaatgttcaggagggggagattttacacgatgctaagacattggctggaaatgtaatagctgacctatctgattcttctgctgattctgaaaatttaagtccagatataaaagaaactactgaggaaatggaatacaacatcctcgtaaacttttttaaaaccatgggctactcccaagaaattgttgaaaaggtcattaaggtgtatggaccatctactgaaccattattgctcttagaggaaattgaaaaagaaaataaaagattccaagaagacagagaattttcagctggtacagtgtatccagagaccaacaaaaccaaaaataaaggtgtttatagcagcacaaatgagcttacaactgattccactccaaagaaaacacaggctcacacacagcaaaatatggtagaaaaattttctcagttaccattcaaagtggaagctaaaccatgtacctcaaattgtagaattaatactttcagaacagtgccaatagaacagaaacatgaagtctggggttcaaaccagaactacatttgtaacacagaccctgaaactgatggcctttcaccttctgttgcctctccaagtcccaaagaagtcaattttgtttcaaggggagcttcaagtcaccagcccagagttccactttttcctgaaaatggtttacaccagcagccagaacccttgcttccaaataatatgaaatctgcctgtgaaaaacgtttaggatgttgtagttctcctcattctaagccaaattgctcaaccctttctccaccaatgccactgccccagctgttaccttcggttactgatgcaaggtcggcaggaccttctgatcatattgattcctcagttactggggttcaaaggtttcgagatactctaaaaataccctacaagctggaattaaaaaatgaaccagggagaacggatttgaaacacattgttatagatgggagcaatgttgcaattacccatggtctgaaaaagttcttttcttgtcgtggaattgcaattgcagttgaatatttttggaagcttggcaacagaaacatcactgtatttgtccctcagtggagaacaaggcgtgatcctaatgtcacagaacagcacttcttaacccagctccaggagctcggaatattatctttaactcctgcccggatggtctttggagaaagaattgcttctcatgatgacaggtttctactacacttagcggacaaaactggtggcataattgtgacaaatgataatttcagagaatttgtgaatgagtcagtctcttggagagaaattattacaaaaaggtaatattttcttctttgtctttggtcagaaaagttttgtttttaattgtttgtttctgtgtgcattttgttcgttttgttttctatattccttggctccacagaaggcaatataggggaccaaagtatcataagactgtgctgcactcccacttcataggtggctg

SEQ ID NO: 430260 - DNA, 1253 bp, Homo sapiens
cttttgtccgggtaacggccgaggcccgggcggccccccggtgcagacggacagtcgggcggccgcccggaaggaggacgccccaggcctcggcagagctgggccggagggcggagccgctccgggcgagtggtccgagggtccgcgtgcctggtgggcggtcggcggcgtgcgcacacgtccatgtgcatttgtgtttacgcacgcaccgcgccacggcgtcggccgggcaccggggaggtggcggacctgcgggcacgttggcgcgcgtgtgaacgcgcagccccctggtgcgtttggtgtgtgatcaacgcgtacacatgtggcgggtgtgcagatgccgcccgtgcccggcacggtgtgatgtgtgtacacggcctggagtgtaggggtggcgtgtcggagccccacactacaccacagggatgagcgtgtatccccttcagaggtgtgcctggggactccgtgtgcgcgactaggtgctctcctggggctggcaggggcatctgtccctttaccggtgcaatggggagggtgcacacggttcaccagctttcgggctagctgggtaggaggtgatgctgccccggtctggcacccactcccccgggcctctcctaacccataggacagtagtgctcctggcttgtgctgcccagaggctacctggctttccctaattcaccgaccccaggattaaccccatggtggttggtatcaggggatgaggccagagccctttgagctgtgcccctcacaggggtagggtcatggcctcagccatcccggtaccatctgtgcccagccggggactgggaacctggtttctccatgaggagccatcccagggcctgcaggagggactagaagccagaggactctgaggctccgcttcctggggactgcagggggatcagaatgtcccaagcttgggacagtctgggaaggcagtggccatcccatccagatgagtacatccctctctccttgcctacttccctcctaccagccgtcgcggaggccactgatcctgtgtggtgttcaccccaggacgtgggaggctgctctgtccctctggccttagtttccacatctgtatggtggggttggggggcatgagtcagcttctgttggccagcttactgccccctgtgccccaaggcagccccacccggaggaagctccctgcttccctcctggtctccacagccctcatcagccctgtttgtgtcaggggctggatgtggcaaaac

SEQ ID NO: 430261 - DNA, 425 bp, Homo sapiens
gcggcagggccggcgggggcctggagggtgagcaggggcctttcttcctgcagacagccctcagcgcctttttccaggagaccaacatcccctacagccaccatcaccaccagatgcacgcctggctagtttttgtatttttagtagacacggggtttcaccatgttggccaggctggtcttgaactgctgacctcaagtgatccacctgccttggcctcccaaagtgctgaggcaggagaattgcttgaacgtgggaggcggaggttgcagtgagccgagatcgctccattgcactccagcctgggcgataagagcaaaactccgtctcaaaacaaacaaaatcccagcgtagtggctcccgcctgtaatcccagctactcaggagactagcctgggcaacacagggagaacctgtctcttaaa

SEQ ID NO: 430262 - DNA, 1404 bp, Homo sapiens
aactataacagcgtctagtgagcaggctcggtggttatcgctaatggtggacgcgtgaggcggaggcgcgggcggcggagggaggccggagcgggcagcgcggcggcgccatgtccgtgaacatggacgagctcaagcaccaggtcatgatcaaccagttcgtgctgacggcgggctgcgcggccgaccaggcgaagcaactgctgcaggcggcccactggcagttcgagacagccctcagcgcctttttccaggagaccaacatcccctacagccaccatcaccaccagatgatgtgcacccccgccaatacccctgctacaccccccaacttccctgacgctctcaccatgttctcccgtctcaaggcctccgagagcttccacagcggtggcagcggcagcccgatggccgcgacagccacgtcacccccgccacacttcccccatgccgccaccagcagctctgcggcctccagctggcccacggcggcctcgcccccggggggcccacagcaccaccagccacagccgcccctgtggactccaacacccccttctccggcttcagactggccacccctggccccccaacaggccacctcagaacccagggcccaccctgccatggaggcagagagataagggaggcccctcccccctcccggaggccaggaccccgtggggcgggggagaggacgtctctgcgggcccccttcaccccttttctgtctgcaccccttgttccccggagccctggaggggagagcgcggactctagccaggcagggacacgtctggtgccagaacacgcagctgcccacacgcaaggtcatggccccagcggccccggcacatggagtggttcagagcggcctgggtgcctggcggacagaacttcagagaccacgcagccttccttcgaagacgcacctgcccagcccagcccaggggtgccgtggaggaccaccctggcggagacattgctgatccctggcttggagctccttgggggccggcaggcctcgacccccaccctagggaatgcagagcctctccgcatgtgtgcgcgtggccgtgtctgtgtatttctacgtgtgtcgctcttcagaagcaacctagttcctggggcagctggactttgcatgttagtgtgagcccccagccccctgcccgccgccccctccccagggccctgcctcctccccaccccctcgtcagccagcgttgctgttccttgcagagaaaaggattgtgggaaactccaggactcttcccaccgcctcccagcgcctgcctgctggggctgcctgcatgcctcccctgcacctgggggtacccgcatccacttcctttcccccttttaacaaaagagaagaacgaattccaaaccacaaaaaaaaaa

SEQ ID NO: 430263 - DNA, 1604 bp, Homo sapiens
tccccagttctggattgggcggaaggaggccgagctagttctgtgtataagcagcccctggccccggtgtacgagggcgctggtgcaggcggggctcgacctctttggagatgggtcagcaggagtcccggctccgtgggtcctgcacttaatcttgcctgtgccagctccccctgagacctggggggcgctggcctctggggcaatgaagctccttaccctacagcccccggggatgctgtggctgatggaaaggggtgggctgggaaagcctcgtggccccaggcaccgtgggctcctgagagtgaggctgggtcggttcatctcaaggcttctcctctgggaacccctgggcggcggacaggcttggggatctggggaaggaacacagagccttccgagaatgggccagccacgcatctccccttgggaggcagtgggggcccctccaggaaggggtgctcaccccatctctcctctcttcccctcacagatgtgcacccccgccaatacccctgctacaccccccaacttccctgacgctctcaccatgttctcccgtctcaaggcctccgagagcttccacagcggtggcagcggcagcccgatggccgcgacagccacgtcacccccgccacacttcccccatgccgccaccagcagctctgcggcctccagctggcccacggcggcctcgcccccggggggcccacagcaccaccagccacagccgcccctgtggactccaacacccccttctccggcttcagactggccacccctggccccccaacaggccacctcagaacccagggcccaccctgccatggaggcagagagataagggaggcccctcccccctcccggaggccaggaccccgtggggcgggggagaggacgtctctgcgggcccccttcaccccttttctgtctgcaccccttgttccccggagccctggaggggagagcgcggactctagccaggcagggacacgtctggtgccagaacacgcagctgcccacacgcaaggtcatggccccagcggccccggcacatggagtggttcagagcggcctgggtgcctggcggacagaacttcagagaccacgcagccttccttcgaagacgcacctgcccagcccagcccaggggtgccgtggaggaccaccctggcggagacattgctgatccctggcttggagctccttgggggccggcaggcctcgacccccaccctagggaatgcagagcctctccgcatgtgtgcgcgtggccgtgtctgtgtatttctacgtgtgtcgctcttcagaagcaacctagttcctggggcagctggactttgcatgttagtgtgagcccccagccccctgcccgccgccccctccccagggccctgcctcctccccaccccctcgtcagccagcgttgctgttccttgcagagaaaaggattgtgggaaactccaggactcttcccaccgcctcccagcgcctgcctgctggggctgcctgcatgcctcccctgcacctgggggtacccgcatccacttcctttcccccttttaacaaaagagaagaacgaattccaaaccacaaaaaaaaaa

SEQ ID NO: 430264 - DNA, 629 bp, Homo sapiens
cacgccccttcccgggcttcgcgtcccctagggtgccggccccgctcccccggggcgcccggcgcaccgtggggactacatatcccagcatgccgcggcgccggcggagcgaggcgaggcgcggtgagtcagagccgcacagtaaatatttgtattagccggagccggctcgctaatggtggacgcgtgaggcggaggcgcgggcggcggagggaggccggagcgggcagcgcggcggcgccatgtccgtgaacatggacgagctcaagcaccaggtcatgatcaaccagttcgtgctgacggcgggctgcgcggccgaccaggcgaagcaactgctgcaggcggcccactggcagttcgagacagccctcagcgcctttttccaggagaccaacatcccctacagccaccatcaccaccagatgatgtgcacccccgccaatacccctgctacaccccccaacttccctgacgctctcaccatgttctcccgtctcaaggcctccgagagcttccacagcggtggcagcggcagcccgatggccgcgacagccacgtcacccccgcatccacttcctttcccccttttaacaaaagagaagaacgaattccaaaccacaaaaaaaaaa

SEQ ID NO: 430265 - DNA, 512 bp, Homo sapiens
cacgccccttcccgggcttcgcgtcccctagggtgccggccccgctcccccggggcgcccggcgcaccgtggggactacatatcccagcatgccgcggcgccggcggagcgaggcgaggcgcggtgagtcagagccgcacagtaaatatttgtattagccggagccggctcgctaatggtggacgcgtgaggcggaggcgcgggcggcggagggaggccggagcgggcagcgcggcggcgccatgtccgtgaacatggacgagctcaagcaccaggtcatgatcaaccagttcgtgctgacggcgggctgcgcggccgaccaggcgaagcaactgctgcaggcggcccactggcagttcgagacagccctcagcgcctttttccaggagaccaacatcccctacagccaccatcaccaccagatgctcccctgcacctgggggtacccgcatccacttcctttcccccttttaacaaaagagaagaacgaattccaaaccacaaaaaaaaaa

SEQ ID NO: 430266 - DNA, 1536 bp, Homo sapiens
cacgccccttcccgggcttcgcgtcccctagggtgccggccccgctcccccggggcgcccggcgcaccgtggggactacatatcccagcatgccgcggcgccggcggagcgaggcgaggcgcggtgagtcagagccgcacagtaaatatttgtattagccggagccggctcgctaatggtggacgcgtgaggcggaggcgcgggcggcggagggaggccggagcgggcagcgcggcggcgccatgtccgtgaacatggacgagctcaagcaccaggtcatgatcaaccagttcgtgctgacggcgggctgcgcggccgaccaggcgaagcaactgctgcaggcggcccactggcagttcgagacagccctcagcgcctttttccaggagaccaacatcccctacagccaccatcaccaccagatgatgtgcacccccgccaatacccctgctacaccccccaacttccctgacgctctcaccatgttctcccgtctcaaggcctccgagagcttccacagcggtggcagcggcagcccgatggccgcgacagccacgtcacccccgccacacttcccccatgccgccaccagcagctctgcggcctccagctggcccacggcggcctcgcccccggggggcccacagcaccaccagccacagccgcccctgtggactccaacacccccttctccggcttcagactggccacccctggccccccaacaggccacctcagaacccagggcccaccctgccatggaggcagagagataagggaggcccctcccccctcccggaggccaggaccccgtggggcgggggagaggacgtctctgcgggcccccttcaccccttttctgtctgcaccccttgttccccggagccctggaggggagagcgcggactctagccaggcagggacacgtctggtgccagaacacgcagctgcccacacgcaaggtcatggccccagcggccccggcacatggagtggttcagagcggcctgggtgcctggcggacagaacttcagagaccacgcagccttccttcgaagacgcacctgcccagcccagcccaggggtgccgtggaggaccaccctggcggagacattgctgatccctggcttggagctccttgggggccggcaggcctcgacccccaccctagggaatgcagagcctctccgcatgtgtgcgcgtggccgtgtctgtgtatttctacgtgtgtcgctcttcagaagcaacctagttcctggggcagctggactttgcatgttagtgtgagcccccagccccctgcccgccgccccctccccagggccctgcctcctccccaccccctcgtcagccagcgttgctgttccttgcagagaaaaggattgtgggaaactccaggactcttcccaccgcctcccagcgcctgcctgctggggctgcctgcatgcctcccctgcacctgggggtacccgcatccacttcctttcccccttttaacaaaagagaagaacgaattccaaaccacaaaaaaaaaa

SEQ ID NO: 430267 - DNA, 1622 bp, Homo sapiens
cttttgtccgggtaacggccgaggcccgggcggccccccggtgcagacggacagtcgggcggccgcccggaaggaggacgccccaggcctcggcagagctgggccggagggcggagccgctccgggcgagtggtccgagggtccgcgtgcctggtgggcggtcggcggcgtgcgcacacgtccatgtgcatttgtgtttacgcacgcaccgcgccacggcgtcggccgggcaccggggaggtggcggacctgcgggcacgttggcgcgcgtgtgaacgcgcagccccctggtgcgtttggtgtgtgatcaacgcgtacacatgtggcgggtgtgcagatgccgcccgtgcccggcacggtgtgatgtgtgtacacggcctggagtgtaggggtggcgtgtcggagccccacactacaccacagggatgagcgtgtatccccttcagagacagccctcagcgcctttttccaggagaccaacatcccctacagccaccatcaccaccagatgatgtgcacccccgccaatacccctgctacaccccccaacttccctgacgctctcaccatgttctcccgtctcaaggcctccgagagcttccacagcggtggcagcggcagcccgatggccgcgacagccacgtcacccccgccacacttcccccatgccgccaccagcagctctgcggcctccagctggcccacggcggcctcgcccccggggggcccacagcaccaccagccacagccgcccctgtggactccaacacccccttctccggcttcagactggccacccctggccccccaacaggccacctcagaacccagggcccaccctgccatggaggcagagagataagggaggcccctcccccctcccggaggccaggaccccgtggggcgggggagaggacgtctctgcgggcccccttcaccccttttctgtctgcaccccttgttccccggagccctggaggggagagcgcggactctagccaggcagggacacgtctggtgccagaacacgcagctgcccacacgcaaggtcatggccccagcggccccggcacatggagtggttcagagcggcctgggtgcctggcggacagaacttcagagaccacgcagccttccttcgaagacgcacctgcccagcccagcccaggggtgccgtggaggaccaccctggcggagacattgctgatccctggcttggagctccttgggggccggcaggcctcgacccccaccctagggaatgcagagcctctccgcatgtgtgcgcgtggccgtgtctgtgtatttctacgtgtgtcgctcttcagaagcaacctagttcctggggcagctggactttgcatgttagtgtgagcccccagccccctgcccgccgccccctccccagggccctgcctcctccccaccccctcgtcagccagcgttgctgttccttgcagagaaaaggattgtgggaaactccaggactcttcccaccgcctcccagcgcctgcctgctggggctgcctgcatgcctcccctgcacctgggggtacccgcatccacttcctttcccccttttaacaaaagagaagaacgaattccaaaccacaaaaaaaaaa

SEQ ID NO: 430268 - DNA, 1297 bp, Homo sapiens
cacgccccttcccgggcttcgcgtcccctagggtgccggccccgctcccccggggcgcccggcgcaccgtggggactacatatcccagcatgccgcggcgccggcggagcgaggcgaggcgcgacagccctcagcgcctttttccaggagaccaacatcccctacagccaccatcaccaccagatgatgtgcacccccgccaatacccctgctacaccccccaacttccctgacgctctcaccatgttctcccgtctcaaggcctccgagagcttccacagcggtggcagcggcagcccgatggccgcgacagccacgtcacccccgccacacttcccccatgccgccaccagcagctctgcggcctccagctggcccacggcggcctcgcccccggggggcccacagcaccaccagccacagccgcccctgtggactccaacacccccttctccggcttcagactggccacccctggccccccaacaggccacctcagaacccagggcccaccctgccatggaggcagagagataagggaggcccctcccccctcccggaggccaggaccccgtggggcgggggagaggacgtctctgcgggcccccttcaccccttttctgtctgcaccccttgttccccggagccctggaggggagagcgcggactctagccaggcagggacacgtctggtgccagaacacgcagctgcccacacgcaaggtcatggccccagcggccccggcacatggagtggttcagagcggcctgggtgcctggcggacagaacttcagagaccacgcagccttccttcgaagacgcacctgcccagcccagcccaggggtgccgtggaggaccaccctggcggagacattgctgatccctggcttggagctccttgggggccggcaggcctcgacccccaccctagggaatgcagagcctctccgcatgtgtgcgcgtggccgtgtctgtgtatttctacgtgtgtcgctcttcagaagcaacctagttcctggggcagctggactttgcatgttagtgtgagcccccagccccctgcccgccgccccctccccagggccctgcctcctccccaccccctcgtcagccagcgttgctgttccttgcagagaaaaggattgtgggaaactccaggactcttcccaccgcctcccagcgcctgcctgctggggctgcctgcatgcctcccctgcacctgggggtacccgcatccacttcctttcccccttttaacaaaagagaagaacgaattccaaaccacaaaaaaaaaa

SEQ ID NO: 430269 - DNA, 719 bp, Homo sapiens
  misc_feature (28)..(28): n is a, c, g, or t
tggtggtcagaaggatccctttgcgatngaattgaccctccaaaggtttacccacctgtcccagctgagaagaggaagcccatccgggtgctgtctctctttgatggaatcgctacagggctcctggtgctgaaggacttgggcattcaggtggaccgctacattgcctcggaggtgtgtgaggactccatcacggtgggcatggtgcggcaccaggggaagatcatgtacgtcggggacgtccgcagcgtcacacagaagcatatccaggagtggggcccattcgatctggtgattgggggcagtccctgcaatgacctctccatcgtcaaccctgctcgcaagggcctctacgagggcactggccggctcttctttgagttctaccgcctcctgcatgatgcgcggcccaaggagggagatgatcgccccttcttctggctctttgagaatgtggtggccatgggcgttagtgacaagagggacatctcgcgatttctcgagtccaaccctgtgatgattgatgccaaagaagtgtcagctgcacacagggcccgctacttctggggtaaccttcccggtatgaacaggccgttggcatccactgtgaatgataagctggagctgcaggagtgtctggagcatggcaggatagccaagttcaccaaagtgagactattactatcgagtcttattccatcgccatctaaatactcctg

SEQ ID NO: 430270 - DNA, 1700 bp, Homo sapiens
  misc_feature (5)..(5): n is a, c, g, or t
gcganagcagaggacgagccgggacgcggcgccgcggcaccagggcgcgcagccgggccggcccgaccccaccggccatacggtggagccatcgaagcccccacccacaggctgacagaggcaccgttcaccagagggctcaacaccgggatctatgtttaagttttaactctcgcctccaaagaccacgataattccttccccaaagcccagcagccccccagccccgcgcagccccagcctgcctcccggcgcccagatgcccgccatgccctccagcggccccggggacaccagcagctctgctgcggagcgggaggaggaccgaaaggacggagaggagcaggaggagccgcgtggcaaggaggagcgccaagagcccagcaccacggcacggaaggtggggcggcctgggaggaagcgcaagcaccccccggtggaaagcggtgacacgccaaaggaccctgcggtgatctccaagtccccatccatggcccaggactcaggcgcctcagagctattacccaatggggacttggagaagcggagtgagccccagccagaggaggggagccctgctggggggcagaagggcggggccccagcagagggagagggtgcagctgagaccctgcctgaagcctcaagagcagtggaaaatggctgctgcacccccaaggagggccgaggagcccctgcagaagcgggtgagtcctcagcaccaggggcagcctcttctgggcccaccagcataccctgagagtcagggacttggctctccagcaggtcccaggaaggatggtctgggtcgtggctaaaggtctgcttgccaaggctatggcctggaggctactggctggatgcagcctgcgcatatgttttatttggcccatagagtgttttaaacatttaaaaaattagttgccagtatttaaaaatcaaaaaatttcacataaaaatctggagttttggcttctcatgaaaaaaaaaaaagctagatctggcaacagcgggctttcataacgccaacgattgctagactgggataatggcggtccctccatcgccttctgtggctggttgtgggccttagttttctgcagctctacctggcctgcttactctcccacgtgccatgcagttcctgggggttgctgtatttgtagcccctggcctgggcactcaagggcagcagataccctgtttgcctccctgagtgcagaggtcctgagcccaccctagttgggctgactcaactggaaatttggttgtgacagtggcgtggggagagggctgggtgattgtattctgtgtactgcccagcccaggcctcttcatctggggactttttggcctaaccctggaagcctggaaagttgcccacttttctctttcaggttaagccagcaatttcagggccaaccgagctgtaaacatgttagtaatgaggacaactagcatttgtacagggcttcacagtttacaaagcgctttctcatacattatcacatttgatcctcccagggccctgccaggttgttttgcatatgtgcattttaatttcaaaaagtcttccttccaagcgtgtatgatgaaatgagtaaattgattaattggcgtaacttattttgcatggatccaacctaatgttcatgcaggatagagaacatttccagaatacaaatttccaaacttattaa

SEQ ID NO: 430271 - DNA, 1779 bp, Homo sapiens
gcagtgggctctggcggaggtcgggagaactgcagggcgaaggccgccgggggctccgcgggctgcggggggaggcacttgacaccggcccggggagaggaggggccgctgtccctgcggccagtgctggatgcggggacccagcgcagaagcagcgccaggtggagccatcgaagcccccacccacaggctgacagaggcaccgttcaccagagggctcaacaccgggatctatgtttaagttttaactctcgcctccaaagaccacgataattccttccccaaagcccagcagccccccagccccgcgcagccccagcctgcctcccggcgcccagatgcccgccatgccctccagcggccccggggacaccagcagctctgctgcggagcgggaggaggaccgaaaggacggagaggagcaggaggagccgcgtggcaaggaggagcgccaagagcccagcaccacggcacggaaggtggggcggcctgggaggaagcgcaagcaccccccggtggaaagcggtgacacgccaaaggaccctgcggtgatctccaagtccccatccatggcccaggactcaggcgcctcagagctattacccaatggggacttggagaagcggagtgagccccagccagaggaggggagccctgctggggggcagaagggcggggccccagcagagggagagggtgcagctgagaccctgcctgaagcctcaagagcagtggaaaatggctgctgcacccccaaggagggccgaggagcccctgcagaagcgggtgagtcctcagcaccaggggcagcctcttctgggcccaccagcataccctgagagtcagggacttggctctccagcaggtcccaggaaggatggtctgggtcgtggctaaaggtctgcttgccaaggctatggcctggaggctactggctggatgcagcctgcgcatatgttttatttggcccatagagtgttttaaacatttaaaaaattagttgccagtatttaaaaatcaaaaaatttcacataaaaatctggagttttggcttctcatgaaaaaaaaaaaagctagatctggcaacagcgggctttcataacgccaacgattgctagactgggataatggcggtccctccatcgccttctgtggctggttgtgggccttagttttctgcagctctacctggcctgcttactctcccacgtgccatgcagttcctgggggttgctgtatttgtagcccctggcctgggcactcaagggcagcagataccctgtttgcctccctgagtgcagaggtcctgagcccaccctagttgggctgactcaactggaaatttggttgtgacagtggcgtggggagagggctgggtgattgtattctgtgtactgcccagcccaggcctcttcatctggggactttttggcctaaccctggaagcctggaaagttgcccacttttctctttcaggttaagccagcaatttcagggccaaccgagctgtaaacatgttagtaatgaggacaactagcatttgtacagggcttcacagtttacaaagcgctttctcatacattatcacatttgatcctcccagggccctgccaggttgttttgcatatgtgcattttaatttcaaaaagtcttccttccaagcgtgtatgatgaaatgagtaaattgattaattggcgtaacttattttgcatggatccaacctaatgttcatgcaggatagagaacatttccagaatacaaatttccaaacttattaa

SEQ ID NO: 430272 - DNA, 497 bp, Homo sapiens
tcggtaccctttgcgatggaattgaccctccaaaggtttacccacctgtcccagctgagaagaggaagcccatccgggtgctgtctctctttgatggaatcgctacagggctcctggtgctgaaggacttgggcattcaggtggaccgctacattgcctcggaggtgtgtgaggactccatcacggtgggcatggtgcggcaccaggggaagatcatgtacgtcggggacgtccgcagcgtcacacagaagcatatccaggagtggggcccattcgatctggtgattgggggcagtccctgcaatgacctctccatcgtcaaccctgctcgcaagggcctctacgtccaaccctgtgatgattgatgccaaagaagtgtcagctgcacacagggcccgctacttctggggtaaccttcccggtatgaacagttcagcaaagtgaggaccattactacggaggtcaaatccatcgcaaaggtaacctctagggtagca

SEQ ID NO: 430273 - DNA, 4301 bp, Homo sapiens
  misc_feature (5)..(5): n is a, c, g, or t
gcganagcagaggacgagccgggacgcggcgccgcggcaccagggcgcgcagccgggccggcccgaccccaccggccatacggtggagccatcgaagcccccacccacaggctgacagaggcaccgttcaccagagggctcaacaccgggatctatgtttaagttttaactctcgcctccaaagaccacgataattccttccccaaagcccagcagccccccagccccgcgcagccccagcctgcctcccggcgcccagatgcccgccatgccctccagcggccccggggacaccagcagctctgctgcggagcgggaggaggaccgaaaggacggagaggagcaggaggagccgcgtggcaaggaggagcgccaagagcccagcaccacggcacggaaggtggggcggcctgggaggaagcgcaagcaccccccggtggaaagcggtgacacgccaaaggaccctgcggtgatctccaagtccccatccatggcccaggactcaggcgcctcagagctattacccaatggggacttggagaagcggagtgagccccagccagaggaggggagccctgctggggggcagaagggcggggccccagcagagggagagggtgcagctgagaccctgcctgaagcctcaagagcagtggaaaatggctgctgcacccccaaggagggccgaggagcccctgcagaagcgggcaaagaacagaaggagaccaacatcgaatccatgaaaatggagggctcccggggccggctgcggggtggcttgggctgggagtccagcctccgtcagcggcccatgccgaggctcaccttccaggcgggggacccctactacatcagcaagcgcaagcgggacgagtggctggcacgctggaaaagggaggctgagaagaaagccaaggtcattgcaggaatgaatgctgtggaagaaaaccaggggcccggggagtctcagaaggtggaggaggccagccctcctgctgtgcagcagcccactgaccccgcatcccccactgtggctaccacgcctgagcccgtggggtccgatgctggggacaagaatgccaccaaagcaggcgatgacgagccagagtacgaggacggccggggctttggcattggggagctggtgtgggggaaactgcggggcttctcctggtggccaggccgcattgtgtcttggtggatgacgggccggagccgagcagctgaaggcacccgctgggtcatgtggttcggagacggcaaattctcagtggtgtgtgttgagaagctgatgccgctgagctcgttttgcagtgcgttccaccaggccacgtacaacaagcagcccatgtaccgcaaagccatctacgaggtcctgcaggtggccagcagccgcgcggggaagctgttcccggtgtgccacgacagcgatgagagtgacactgccaaggccgtggaggtgcagaacaagcccatgattgaatgggccctggggggcttccagccttctggccctaagggcctggagccaccagaagaagagaagaatccctacaaagaagtgtacacggacatgtgggtggaacctgaggcagctgcctacgcaccacctccaccagccaaaaagccccggaagagcacagcggagaagcccaaggtcaaggagattattgatgagcgcacaagagagcggctggtgtacgaggtgcggcagaagtgccggaacattgaggacatctgcatctcctgtgggagcctcaatgttaccctggaacaccccctcttcgttggaggaatgtgccaaaactgcaagaactgctttctggagtgtgcgtaccagtacgacgacgacggctaccagtcctactgcaccatctgctgtgggggccgtgaggtgctcatgtgcggaaacaacaactgctgcaggtgcttttgcgtggagtgtgtggacctcttggtggggccgggggctgcccaggcagccattaaggaagacccctggaactgctacatgtgcgggcacaagggtacctacgggctgctgcggcggcgagaggactggccctcccggctccagatgttcttcgctaataaccacgaccaggaatttgaccctccaaaggtttacccacctgtcccagctgagaagaggaagcccatccgggtgctgtctctctttgatggaatcgctacagggctcctggtgctgaaggacttgggcattcaggtggaccgctacattgcctcggaggtgtgtgaggactccatcacggtgggcatggtgcggcaccaggggaagatcatgtacgtcggggacgtccgcagcgtcacacagaagcatatccaggagtggggcccattcgatctggtgattgggggcagtccctgcaatgacctctccatcgtcaaccctgctcgcaagggcctctacgagggcactggccggctcttctttgagttctaccgcctcctgcatgatgcgcggcccaaggagggagatgatcgccccttcttctggctctttgagaatgtggtggccatgggcgttagtgacaagagggacatctcgcgatttctcgagtccaaccctgtgatgattgatgccaaagaagtgtcagctgcacacagggcccgctacttctggggtaaccttcccggtatgaacaggccgttggcatccactgtgaatgataagctggagctgcaggagtgtctggagcatggcaggatagccaagttcagcaaagtgaggaccattactacgaggtcaaactccataaagcagggcaaagaccagcattttcctgtcttcatgaatgagaaagaggacatcttatggtgcactgaaatggaaagggtatttggtttcccagtccactatactgacgtctccaacatgagccgcttggcgaggcagagactgctgggccggtcatggagcgtgccagtcatccgccacctcttcgctccgctgaaggagtattttgcgtgtgtgtaagggacatgggggcaaactgaggtagcgacacaaagttaaacaaacaaacaaaaaacacaaaacataataaaacaccaagaacatgaggatggagagaagtatcagcacccagaagagaaaaaggaatttaaaacaaaaaccacagaggcggaaataccggagggctttgccttgcgaaaagggttggacatcatctcctgatttttcaatgttattcttcagtcctatttaaaaacaaaaccaagctcccttcccttcctcccccttcccttttttttcggtcagaccttttattttctactcttttcagaggggttttctgtttgtttgggttttgtttcttgctgtgactgaaacaagaaggttattgcagcaaaaatcagtaacaaaaaatagtaacaataccttgcagaggaaaggtgggagagaggaaaaaaggaaattctatagaaatctatatattgggttgtttttttttttgttttttgttttttttttttgggtttttttttttactatatatcttttttttgttgtctctagcctgatcagataggagcacaagcaggggacggaaagagagagacactcaggcggcagcattccctcccagccactgagctgtcgtgccagcaccattcctggtcacgcaaaacagaacccagttagcagcagggagacgagaacaccacacaagacatttttctacagtatttcaggtgcctaccacacaggaaaccttgaagaaaatcagtttctagaagccgctgttacctcttgtttacagtttatatatatatgatagatatgagatatatatataaaaggtactgttaactactgtacaacccgacttcataatggtgctttcaaacagcgagatgagtaaaaacatcagcttccacgttgccttctgcgcaaagggtttcaccaaggatggagaaagggagacagcttgcagatggcgcgttctcacggtgggctcttccccttggtttgtaacgaagtgaaggaggagaacttgggagccaggttctccctgccaaaaagggggctagatgaggtggtcgggcccgtggacagctgagagtgggattcatccagactcatgcaataaccctttgattgttttctaaaaggagactccctcggcaagatggcagagggtacggagtcttcaggcccagtttctcactttagccaattcgagggctccttgtggtgggatcagaactaatccagagtgtgggaaagtgacagtcaaaaccccacctggagcaaataaaaaaacatacaaaacgta

SEQ ID NO: 430274 - DNA, 3842 bp, Homo sapiens
  misc_feature (5)..(5): n is a, c, g, or t
gcganagcagaggacgagccgggacgcggcgccgcggcaccagggcgcgcagccgggccggcccgaccccaccggccatacggtggagccatcgaagcccccacccacaggctgacagaggcaccgttcaccagagggctcaacaccgggatctatgtttaagttttaactctcgcctccaaagaccacgataattccttccccaaagcccagcagccccccagccccgcgcagccccagcctgcctcccggcgcccagatgcccgccatgccctccagcggccccggggacaccagcagctctgctgcggagcgggaggaggaccgaaaggacggagaggagcaggaggagccgcgtggcaaggaggagcgccaagagcccagcaccacggcacggaaggtggggcggcctgggaggaagcgcaagcaccccccggtggaaagcggtgacacgccaaaggaccctgcggtgatctccaagtccccatccatggcccaggactcaggcgcctcagagctattacccaatggggacttggagaagcggagtgagccccagccagaggaggggagccctgctggggggcagaagggcggggccccagcagagggagagggtgcagctgagaccctgcctgaagcctcaagagcagtggaaaatggctgctgcacccccaaggagggccgaggagcccctgcagaagcgggcaaagaacagaaggagaccaacatcgaatccatgaaaatggagggctcccggggccggctgcggggtggcttgggctgggagtccagcctccgtcagcggcccatgccgaggctcaccttccaggcgggggacccctactacatcagcaagcgcaagcgggacgagtggctggcacgctggaaaagggaggctgagaagaaagccaaggtcattgcaggaatgaatgctgtggaagaaaaccaggggcccggggagtctcagaaggtggaggaggccagccctcctgctgtgcagcagcccactgaccccgcatcccccactgtggctaccacgcctgagcccgtggggtccgatgctggggacaagaatgccaccaaagcaggcgatgacgagccagagtacgaggacggccggggctttggcattggggagctggtgtgggggaaactgcggggcttctcctggtggccaggccgcattgtgtcttggtggatgacgggccggagccgagcagctgaaggcacccgctgggtcatgtggttcggagacggcaaattctcagtggtgtgtgttgagaagctgatgccgctgagctcgttttgcagtgcgttccaccaggccacgtacaacaagcagcccatgtaccgcaaagccatctacgaggtcctgcaggtggccagcagccgcgcggggaagctgttcccggtgtgccacgacagcgatgagagtgacactgccaaggccgtggaggtgcagaacaagcccatgattgaatgggccctggggggcttccagccttctggccctaagggcctggagccaccagaagaagagaagaatccctacaaagaagtgtacacggacatgtgggtggaacctgaggcagctgcctacgcaccacctccaccagccaaaaagccccggaagagcacagcggagaagcccaaggtcaaggagattattgatgagcgcacaagagagcggctggtgtacgaggtgcggcagaagtgccggaacattgaggacatctgcatctcctgtgggagcctcaatgttaccctggaacaccccctcttcgttggaggaatgtgccaaaactgcaagaactgctttctggagtgtgcgtaccagtacgacgacgacggctaccagtcctactgcaccatctgctgtgggggccgtgaggtgctcatgtgcggaaacaacaactgctgcaggtgcttttgcgtggagtgtgtggacctcttggtggggccgggggctgcccaggcagccattaaggaagacccctggaactgctacatgtgcgggcacaagggtacctacgggctgctgcggcggcgagaggactggccctcccggctccagatgttcttcgctaataaccacgaccaggaatttgaccctccaaaggtttacccacctgtcccagctgagaagaggaagcccatccgggtgctgtctctctttgatggaatcgctacagggctcctggtgctgaaggacttgggcattcaggtggaccgctacattgcctcggaggtgtgtgaggactccatcacggtgggcatggtgcggcaccaggggaagatcatgtacgtcggggacgtccgcagcgtcacacagaagcatatccaggagtggggcccattcgatctggtgattgggggcagtccctgcaatgacctctccatcgtcaaccctgctcgcaagggcctctacgagggcactggccggctcttctttgagttctaccgcctcctgcatgatgcgcggcccaaggagggagatgatcgccccttcttctggctctttgagaatgtggtggccatgggcgttagtgacaagagggacatctcgcgatttctcgagtccaaccctgtgatgattgatgccaaagaagtgtcagctgcacacagggcccgctacttctggggtaaccttcccggtatgaacaggccgttggcatccactgtgaatgataagctggagctgcaggagtgtctggagcatggcaggatagccaagttcagcaaagtgaggaccattactacgaggtcaaactccataaagcagggcaaagaccagcattttcctgtcttcatgaatgagaaagaggacatcttatggtgcactgaaatggaaagggtatttggtttcccagtccactatactgacgtctccaacatgagccgcttggcgaggcagagactgctgggccggtcatggagcgtgccagtcatccgccacctcttcgctccgctgaaggagtattttgcgtgtgtgtaagggacatgggggcaaactgaggtagcgacacaaagttaaacaaacaaacaaaaaacacaaaacataataaaacaccaagaacatgaggatggagagaagtatcagcacccagaagagaaaaaggaatttaaaacaaaaaccacagaggcggaaataccggagggctttgccttgcgaaaagggttggacatcatctcctgatttttcaatgttattcttcagtcctatttaaaaacaaaaccaagctcccttcccttcctcccccttcccttttttttcggtcagaccttttattttctactcttttcagaggggttttctgtttgtttgggttttgtttcttgctgtgactgaaacaagaaggttattgcagcaaaaatcagtaacaaaaaatagtaacaataccttgcagaggaaaggtgggagagaggaaaaaaggaaattctatagaaatctatatattgggttgtttttttttttgttttttgttttttttttttgggtttttttttttactatatatcttttttttgttgtctctagcctgatcagataggagcacaagcaggggacggaaagagagagacactcaggcggcagcattccctcccagccactgagctgtcgtgccagcaccattcctggtcacgcaaaacagaacccagttagcagcagggagacgagaacaccacacaagacatttttctacagtatttcaggtgcctaccacacaggaaaccttgaagaaaatcagtttctagaagccgctgttacctcttgtttacagtttatatatatatgatagatatgagatatatatataaaaggtactgttaactactgt

SEQ ID NO: 430275 - DNA, 4652 bp, Homo sapiens
  misc_feature (5)..(5): n is a, c, g, or t
gcganagcagaggacgagccgggacgcggcgccgcggcaccagggcgcgcagccgggccggcccgaccccaccggccatacggtggagccatcgaagcccccacccacaggctgacagaggcaccgttcaccagagggctcaacaccgggatctatgtttaagttttaactctcgcctccaaagaccacgataattccttccccaaagcccagcagccccccagccccgcgcagccccagcctgcctcccggcgcccagatgcccgccatgccctccagcggccccggggacaccagcagctctgctgcggagcgggaggaggaccgaaaggacggagaggagcaggaggagccgcgtggcaaggaggagcgccaagagcccagcaccacggcacggaaggtggggcggcctgggaggaagcgcaagcaccccccggtggaaagcggtgacacgccaaaggaccctgcggtgatctccaagtccccatccatggcccaggactcaggcgcctcagagctattacccaatggggacttggagaagcggagtgagccccagccagaggaggggagccctgctggggggcagaagggcggggccccagcagagggagagggtgcagctgagaccctgcctgaagcctcaagagcagtggaaaatggctgctgcacccccaaggagggccgaggagcccctgcagaagcgggcaaagaacagaaggagaccaacatcgaatccatgaaaatggagggctcccggggccggctgcggggtggcttgggctgggagtccagcctccgtcagcggcccatgccgaggctcaccttccaggcgggggacccctactacatcagcaagcgcaagcgggacgagtggctggcacgctggaaaagggaggctgagaagaaagccaaggtcattgcaggaatgaatgctgtggaagaaaaccaggggcccggggagtctcagaaggtggaggaggccagccctcctgctgtgcagcagcccactgaccccgcatcccccactgtggctaccacgcctgagcccgtggggtccgatgctggggacaagaatgccaccaaagcaggcgatgacgagccagagtacgaggacggccggggctttggcattggggagctggtgtgggggaaactgcggggcttctcctggtggccaggccgcattgtgtcttggtggatgacgggccggagccgagcagctgaaggcacccgctgggtcatgtggttcggagacggcaaattctcagtggtgtgtgttgagaagctgatgccgctgagctcgttttgcagtgcgttccaccaggccacgtacaacaagcagcccatgtaccgcaaagccatctacgaggtcctgcaggtggccagcagccgcgcggggaagctgttcccggtgtgccacgacagcgatgagagtgacactgccaaggccgtggaggtgcagaacaagcccatgattgaatgggccctggggggcttccagccttctggccctaagggcctggagccaccagaagaagagaagaatccctacaaagaagtgtacacggacatgtgggtggaacctgaggcagctgcctacgcaccacctccaccagccaaaaagccccggaagagcacagcggagaagcccaaggtcaaggagattattgatgagcgcacaagagagcggctggtgtacgaggtgcggcagaagtgccggaacattgaggacatctgcatctcctgtgggagcctcaatgttaccctggaacaccccctcttcgttggaggaatgtgccaaaactgcaagaactgctttctggagtgtgcgtaccagtacgacgacgacggctaccagtcctactgcaccatctgctgtgggggccgtgaggtgctcatgtgcggaaacaacaactgctgcaggtgcttttgcgtggagtgtgtggacctcttggtggggccgggggctgcccaggcagccattaaggaagacccctggaactgctacatgtgcgggcacaagggtacctacgggctgctgcggcggcgagaggactggccctcccggctccagatgttcttcgctaataaccacgaccaggaatttgaccctccaaaggtttacccacctgtcccagctgagaagaggaagcccatccgggtgctgtctctctttgatggaatcgctacagggctcctggtgctgaaggacttgggcattcaggtggaccgctacattgcctcggaggtgtgtgaggactccatcacggtgggcatggtgcggcaccaggggaagatcatgtacgtcggggacgtccgcagcgtcacacagaagcatatccaggagtggggcccattcgatctggtgattgggggcagtccctgcaatgacctctccatcgtcaaccctgctcgcaagggcctctacgagggcactggccggctcttctttgagttctaccgcctcctgcatgatgcgcggcccaaggagggagatgatcgccccttcttctggctctttgagaatgtggtggccatgggcgttagtgacaagagggacatctcgcgatttctcgagtccaaccctgtgatgattgatgccaaagaagtgtcagctgcacacagggcccgctacttctggggtaaccttcccggtatgaacaggccgttggcatccactgtgaatgataagctggagctgcaggagtgtctggagcatggcaggatagccaagttcagcaaagtgaggaccattactacgaggtcaaactccataaagcagggcaaagaccagcattttcctgtcttcatgaatgagaaagaggacatcttatggtgcactgaaatggaaagggtatttggtttcccagtccactatactgacgtctccaacatgagccgcttggcgaggcagagactgctgggccggtcatggagcgtgccagtcatccgccacctcttcgctccgctgaaggagtattttgcgtgtgtgtaagggacatgggggcaaactgaggtagcgacacaaagttaaacaaacaaacaaaaaacacaaaacataataaaacaccaagaacatgaggatggagagaagtatcagcacccagaagagaaaaaggaatttaaaacaaaaaccacagaggcggaaataccggagggctttgccttgcgaaaagggttggacatcatctcctgatttttcaatgttattcttcagtcctatttaaaaacaaaaccaagctcccttcccttcctcccccttcccttttttttcggtcagaccttttattttctactcttttcagaggggttttctgtttgtttgggttttgtttcttgctgtgactgaaacaagaaggttattgcagcaaaaatcagtaacaaaaaatagtaacaataccttgcagaggaaaggtgggagagaggaaaaaaggaaattctatagaaatctatatattgggttgtttttttttttgttttttgttttttttttttgggtttttttttttactatatatcttttttttgttgtctctagcctgatcagataggagcacaagcaggggacggaaagagagagacactcaggcggcagcattccctcccagccactgagctgtcgtgccagcaccattcctggtcacgcaaaacagaacccagttagcagcagggagacgagaacaccacacaagacatttttctacagtatttcaggtgcctaccacacaggaaaccttgaagaaaatcagtttctagaagccgctgttacctcttgtttacagtttatatatatatgatagatatgagatatatatataaaaggtactgttaactactgtacaacccgacttcataatggtgctttcaaacagcgagatgagtaaaaacatcagcttccacgttgccttctgcgcaaagggtttcaccaaggatggagaaagggagacagcttgcagatggcgcgttctcacggtgggctcttccccttggtttgtaacgaagtgaaggaggagaacttgggagccaggttctccctgccaaaaagggggctagatgaggtggtcgggcccgtggacagctgagagtgggattcatccagactcatgcaataaccctttgattgttttctaaaaggagactccctcggcaagatggcagagggtacggagtcttcaggcccagtttctcactttagccaattcgagggctccttgtggtgggatcagaactaatccagagtgtgggaaagtgacagtcaaaaccccacctggagcaaataaaaaaacatacaaaacgtactggtgctttcctgtctaagtcgccttttgtgtgttcttttatgaggcccccaccatccacccctctgtgcacaaggcggctcccggcccctggaatgtgatgtttttggtcatctccaaaggctgcagttttatactgggaggctgatgacaccttttattataattattcttatggttctggttataattatgtttgttttaagattttctttaagaaaacaaaaacccaacacccttccctttaggtttcaaaccaaggtgcgggagcagggtgcttctgagttagcggtggctctggtgccctggctcccacccctcgggccaggtgggccactgggcatggtgaca

SEQ ID NO: 430276 - DNA, 3561 bp, Homo sapiens
ccttgaagtcagagggccgtgtttcctagattcagtaaaaggctaatggttctcagagctaagtatcaaggatttcattctcctttgtagggatcctggagcgggttgtgagaaggaatgggcgcgtggatcgtagcctgaaagacgagtgtgatacggctgagaagaaagccaaggtcattgcaggaatgaatgctgtggaagaaaaccaggggcccggggagtctcagaaggtggaggaggccagccctcctgctgtgcagcagcccactgaccccgcatcccccactgtggctaccacgcctgagcccgtggggtccgatgctggggacaagaatgccaccaaagcaggcgatgacgagccagagtacgaggacggccggggctttggcattggggagctggtgtgggggaaactgcggggcttctcctggtggccaggccgcattgtgtcttggtggatgacgggccggagccgagcagctgaaggcacccgctgggtcatgtggttcggagacggcaaattctcagtggtgtgtgttgagaagctgatgccgctgagctcgttttgcagtgcgttccaccaggccacgtacaacaagcagcccatgtaccgcaaagccatctacgaggtcctgcaggtggccagcagccgcgcggggaagctgttcccggtgtgccacgacagcgatgagagtgacactgccaaggccgtggaggtgcagaacaagcccatgattgaatgggccctggggggcttccagccttctggccctaagggcctggagccaccagaagaagagaagaatccctacaaagaagtgtacacggacatgtgggtggaacctgaggcagctgcctacgcaccacctccaccagccaaaaagccccggaagagcacagcggagaagcccaaggtcaaggagattattgatgagcgcacaagagagcggctggtgtacgaggtgcggcagaagtgccggaacattgaggacatctgcatctcctgtgggagcctcaatgttaccctggaacaccccctcttcgttggaggaatgtgccaaaactgcaagaactgctttctggagtgtgcgtaccagtacgacgacgacggctaccagtcctactgcaccatctgctgtgggggccgtgaggtgctcatgtgcggaaacaacaactgctgcaggtgcttttgcgtggagtgtgtggacctcttggtggggccgggggctgcccaggcagccattaaggaagacccctggaactgctacatgtgcgggcacaagggtacctacgggctgctgcggcggcgagaggactggccctcccggctccagatgttcttcgctaataaccacgaccaggaatttgaccctccaaaggtttacccacctgtcccagctgagaagaggaagcccatccgggtgctgtctctctttgatggaatcgctacagggctcctggtgctgaaggacttgggcattcaggtggaccgctacattgcctcggaggtgtgtgaggactccatcacggtgggcatggtgcggcaccaggggaagatcatgtacgtcggggacgtccgcagcgtcacacagaagcatatccaggagtggggcccattcgatctggtgattgggggcagtccctgcaatgacctctccatcgtcaaccctgctcgcaagggcctctacgagggcactggccggctcttctttgagttctaccgcctcctgcatgatgcgcggcccaaggagggagatgatcgccccttcttctggctctttgagaatgtggtggccatgggcgttagtgacaagagggacatctcgcgatttctcgagtccaaccctgtgatgattgatgccaaagaagtgtcagctgcacacagggcccgctacttctggggtaaccttcccggtatgaacaggccgttggcatccactgtgaatgataagctggagctgcaggagtgtctggagcatggcaggatagccaagttcagcaaagtgaggaccattactacgaggtcaaactccataaagcagggcaaagaccagcattttcctgtcttcatgaatgagaaagaggacatcttatggtgcactgaaatggaaagggtatttggtttcccagtccactatactgacgtctccaacatgagccgcttggcgaggcagagactgctgggccggtcatggagcgtgccagtcatccgccacctcttcgctccgctgaaggagtattttgcgtgtgtgtaagggacatgggggcaaactgaggtagcgacacaaagttaaacaaacaaacaaaaaacacaaaacataataaaacaccaagaacatgaggatggagagaagtatcagcacccagaagagaaaaaggaatttaaaacaaaaaccacagaggcggaaataccggagggctttgccttgcgaaaagggttggacatcatctcctgatttttcaatgttattcttcagtcctatttaaaaacaaaaccaagctcccttcccttcctcccccttcccttttttttcggtcagaccttttattttctactcttttcagaggggttttctgtttgtttgggttttgtttcttgctgtgactgaaacaagaaggttattgcagcaaaaatcagtaacaaaaaatagtaacaataccttgcagaggaaaggtgggagagaggaaaaaaggaaattctatagaaatctatatattgggttgtttttttttttgttttttgttttttttttttgggtttttttttttactatatatcttttttttgttgtctctagcctgatcagataggagcacaagcaggggacggaaagagagagacactcaggcggcagcattccctcccagccactgagctgtcgtgccagcaccattcctggtcacgcaaaacagaacccagttagcagcagggagacgagaacaccacacaagacatttttctacagtatttcaggtgcctaccacacaggaaaccttgaagaaaatcagtttctagaagccgctgttacctcttgtttacagtttatatatatatgatagatatgagatatatatataaaaggtactgttaactactgtacaacccgacttcataatggtgctttcaaacagcgagatgagtaaaaacatcagcttccacgttgccttctgcgcaaagggtttcaccaaggatggagaaagggagacagcttgcagatggcgcgttctcacggtgggctcttccccttggtttgtaacgaagtgaaggaggagaacttgggagccaggttctccctgccaaaaagggggctagatgaggtggtcgggcccgtggacagctgagagtgggattcatccagactcatgcaataaccctttgattgttttctaaaaggagactccctcggcaagatggcagagggtacggagtcttcaggcccagtttctcactttagccaattcgagggctccttgtggtgggatcagaactaatccagagtgtgggaaagtgacagtcaaaaccccacctggagcaaataaaaaaacatacaaaacgta

SEQ ID NO: 430277 - DNA, 3337 bp, Homo sapiens
ccgattttgctctgtcttgcctcattcagatggagctccctcctggctgtcctgccccccagatgcccagggctggggttgccatggggggatcagggtggcagggcctcgtgaccactgtgtaatgatttctgctccttggggctccaggacggccggggctttggcattggggagctggtgtgggggaaactgcggggcttctcctggtggccaggccgcattgtgtcttggtggatgacgggccggagccgagcagctgaaggcacccgctgggtcatgtggttcggagacggcaaattctcagtggtgtgtgttgagaagctgatgccgctgagctcgttttgcagtgcgttccaccaggccacgtacaacaagcagcccatgtaccgcaaagccatctacgaggtcctgcaggtggccagcagccgcgcggggaagctgttcccggtgtgccacgacagcgatgagagtgacactgccaaggccgtggaggtgcagaacaagcccatgattgaatgggccctggggggcttccagccttctggccctaagggcctggagccaccagaagaagagaagaatccctacaaagaagtgtacacggacatgtgggtggaacctgaggcagctgcctacgcaccacctccaccagccaaaaagccccggaagagcacagcggagaagcccaaggtcaaggagattattgatgagcgcacaagagagcggctggtgtacgaggtgcggcagaagtgccggaacattgaggacatctgcatctcctgtgggagcctcaatgttaccctggaacaccccctcttcgttggaggaatgtgccaaaactgcaagaactgctttctggagtgtgcgtaccagtacgacgacgacggctaccagtcctactgcaccatctgctgtgggggccgtgaggtgctcatgtgcggaaacaacaactgctgcaggtgcttttgcgtggagtgtgtggacctcttggtggggccgggggctgcccaggcagccattaaggaagacccctggaactgctacatgtgcgggcacaagggtacctacgggctgctgcggcggcgagaggactggccctcccggctccagatgttcttcgctaataaccacgaccaggaatttgaccctccaaaggtttacccacctgtcccagctgagaagaggaagcccatccgggtgctgtctctctttgatggaatcgctacagggctcctggtgctgaaggacttgggcattcaggtggaccgctacattgcctcggaggtgtgtgaggactccatcacggtgggcatggtgcggcaccaggggaagatcatgtacgtcggggacgtccgcagcgtcacacagaagcatatccaggagtggggcccattcgatctggtgattgggggcagtccctgcaatgacctctccatcgtcaaccctgctcgcaagggcctctacgagggcactggccggctcttctttgagttctaccgcctcctgcatgatgcgcggcccaaggagggagatgatcgccccttcttctggctctttgagaatgtggtggccatgggcgttagtgacaagagggacatctcgcgatttctcgagtccaaccctgtgatgattgatgccaaagaagtgtcagctgcacacagggcccgctacttctggggtaaccttcccggtatgaacaggccgttggcatccactgtgaatgataagctggagctgcaggagtgtctggagcatggcaggatagccaagttcagcaaagtgaggaccattactacgaggtcaaactccataaagcagggcaaagaccagcattttcctgtcttcatgaatgagaaagaggacatcttatggtgcactgaaatggaaagggtatttggtttcccagtccactatactgacgtctccaacatgagccgcttggcgaggcagagactgctgggccggtcatggagcgtgccagtcatccgccacctcttcgctccgctgaaggagtattttgcgtgtgtgtaagggacatgggggcaaactgaggtagcgacacaaagttaaacaaacaaacaaaaaacacaaaacataataaaacaccaagaacatgaggatggagagaagtatcagcacccagaagagaaaaaggaatttaaaacaaaaaccacagaggcggaaataccggagggctttgccttgcgaaaagggttggacatcatctcctgatttttcaatgttattcttcagtcctatttaaaaacaaaaccaagctcccttcccttcctcccccttcccttttttttcggtcagaccttttattttctactcttttcagaggggttttctgtttgtttgggttttgtttcttgctgtgactgaaacaagaaggttattgcagcaaaaatcagtaacaaaaaatagtaacaataccttgcagaggaaaggtgggagagaggaaaaaaggaaattctatagaaatctatatattgggttgtttttttttttgttttttgttttttttttttgggtttttttttttactatatatcttttttttgttgtctctagcctgatcagataggagcacaagcaggggacggaaagagagagacactcaggcggcagcattccctcccagccactgagctgtcgtgccagcaccattcctggtcacgcaaaacagaacccagttagcagcagggagacgagaacaccacacaagacatttttctacagtatttcaggtgcctaccacacaggaaaccttgaagaaaatcagtttctagaagccgctgttacctcttgtttacagtttatatatatatgatagatatgagatatatatataaaaggtactgttaactactgtacaacccgacttcataatggtgctttcaaacagcgagatgagtaaaaacatcagcttccacgttgccttctgcgcaaagggtttcaccaaggatggagaaagggagacagcttgcagatggcgcgttctcacggtgggctcttccccttggtttgtaacgaagtgaaggaggagaacttgggagccaggttctccctgccaaaaagggggctagatgaggtggtcgggcccgtggacagctgagagtgggattcatccagactcatgcaataaccctttgattgttttctaaaaggagactccctcggcaagatggcagagggtacggagtcttcaggcccagtttctcactttagccaattcgagggctccttgtggtgggatcagaactaatccagagtgtgggaaagtgacagtcaaaaccccacctggagcaaataaaaaaacatacaaaacgta

SEQ ID NO: 430278 - DNA, 2224 bp, Homo sapiens
  misc_feature (28)..(28): n is a, c, g, or t
tggtggtcagaaggatccctttgcgatngaattgaccctccaaaggtttacccacctgtcccagctgagaagaggaagcccatccgggtgctgtctctctttgatggaatcgctacagggctcctggtgctgaaggacttgggcattcaggtggaccgctacattgcctcggaggtgtgtgaggactccatcacggtgggcatggtgcggcaccaggggaagatcatgtacgtcggggacgtccgcagcgtcacacagaagcatatccaggagtggggcccattcgatctggtgattgggggcagtccctgcaatgacctctccatcgtcaaccctgctcgcaagggcctctacgagggcactggccggctcttctttgagttctaccgcctcctgcatgatgcgcggcccaaggagggagatgatcgccccttcttctggctctttgagaatgtggtggccatgggcgttagtgacaagagggacatctcgcgatttctcgagtccaaccctgtgatgattgatgccaaagaagtgtcagctgcacacagggcccgctacttctggggtaaccttcccggtatgaacaggccgttggcatccactgtgaatgataagctggagctgcaggagtgtctggagcatggcaggatagccaagttcagcaaagtgaggaccattactacgaggtcaaactccataaagcagggcaaagaccagcattttcctgtcttcatgaatgagaaagaggacatcttatggtgcactgaaatggaaagggtatttggtttcccagtccactatactgacgtctccaacatgagccgcttggcgaggcagagactgctgggccggtcatggagcgtgccagtcatccgccacctcttcgctccgctgaaggagtattttgcgtgtgtgtaagggacatgggggcaaactgaggtagcgacacaaagttaaacaaacaaacaaaaaacacaaaacataataaaacaccaagaacatgaggatggagagaagtatcagcacccagaagagaaaaaggaatttaaaacaaaaaccacagaggcggaaataccggagggctttgccttgcgaaaagggttggacatcatctcctgatttttcaatgttattcttcagtcctatttaaaaacaaaaccaagctcccttcccttcctcccccttcccttttttttcggtcagaccttttattttctactcttttcagaggggttttctgtttgtttgggttttgtttcttgctgtgactgaaacaagaaggttattgcagcaaaaatcagtaacaaaaaatagtaacaataccttgcagaggaaaggtgggagagaggaaaaaaggaaattctatagaaatctatatattgggttgtttttttttttgttttttgttttttttttttgggtttttttttttactatatatcttttttttgttgtctctagcctgatcagataggagcacaagcaggggacggaaagagagagacactcaggcggcagcattccctcccagccactgagctgtcgtgccagcaccattcctggtcacgcaaaacagaacccagttagcagcagggagacgagaacaccacacaagacatttttctacagtatttcaggtgcctaccacacaggaaaccttgaagaaaatcagtttctagaagccgctgttacctcttgtttacagtttatatatatatgatagatatgagatatatatataaaaggtactgttaactactgtacaacccgacttcataatggtgctttcaaacagcgagatgagtaaaaacatcagcttccacgttgccttctgcgcaaagggtttcaccaaggatggagaaagggagacagcttgcagatggcgcgttctcacggtgggctcttccccttggtttgtaacgaagtgaaggaggagaacttgggagccaggttctccctgccaaaaagggggctagatgaggtggtcgggcccgtggacagctgagagtgggattcatccagactcatgcaataaccctttgattgttttctaaaaggagactccctcggcaagatggcagagggtacggagtcttcaggcccagtttctcactttagccaattcgagggctccttgtggtgggatcagaactaatccagagtgtgggaaagtgacagtcaaaaccccacctggagcaaataaaaaaacatacaaaacgta

SEQ ID NO: 430279 - DNA, 2233 bp, Homo sapiens
  misc_feature (26)..(26): n is a, c, g, or t
  misc_feature (42)..(42): n is a, c, g, or t
atgtgatctcgcgttctagaggatcnctttgcgatggaatangaccctccaaaggtttacccacctgtcccagctgagaagaggaagcccatccgggtgctgtctctctttgatggaatcgctacagggctcctggtgctgaaggacttgggcattcaggtggaccgctacattgcctcggaggtgtgtgaggactccatcacggtgggcatggtgcggcaccaggggaagatcatgtacgtcggggacgtccgcagcgtcacacagaagcatatccaggagtggggcccattcgatctggtgattgggggcagtccctgcaatgacctctccatcgtcaaccctgctcgcaagggcctctacgagggcactggccggctcttctttgagttctaccgcctcctgcatgatgcgcggcccaaggagggagatgatcgccccttcttctggctctttgagaatgtggtggccatgggcgttagtgacaagagggacatctcgcgatttctcgagtccaaccctgtgatgattgatgccaaagaagtgtcagctgcacacagggcccgctacttctggggtaaccttcccggtatgaacaggccgttggcatccactgtgaatgataagctggagctgcaggagtgtctggagcatggcaggatagccaagttcagcaaagtgaggaccattactacgaggtcaaactccataaagcagggcaaagaccagcattttcctgtcttcatgaatgagaaagaggacatcttatggtgcactgaaatggaaagggtatttggtttcccagtccactatactgacgtctccaacatgagccgcttggcgaggcagagactgctgggccggtcatggagcgtgccagtcatccgccacctcttcgctccgctgaaggagtattttgcgtgtgtgtaagggacatgggggcaaactgaggtagcgacacaaagttaaacaaacaaacaaaaaacacaaaacataataaaacaccaagaacatgaggatggagagaagtatcagcacccagaagagaaaaaggaatttaaaacaaaaaccacagaggcggaaataccggagggctttgccttgcgaaaagggttggacatcatctcctgatttttcaatgttattcttcagtcctatttaaaaacaaaaccaagctcccttcccttcctcccccttcccttttttttcggtcagaccttttattttctactcttttcagaggggttttctgtttgtttgggttttgtttcttgctgtgactgaaacaagaaggttattgcagcaaaaatcagtaacaaaaaatagtaacaataccttgcagaggaaaggtgggagagaggaaaaaaggaaattctatagaaatctatatattgggttgtttttttttttgttttttgttttttttttttgggtttttttttttactatatatcttttttttgttgtctctagcctgatcagataggagcacaagcaggggacggaaagagagagacactcaggcggcagcattccctcccagccactgagctgtcgtgccagcaccattcctggtcacgcaaaacagaacccagttagcagcagggagacgagaacaccacacaagacatttttctacagtatttcaggtgcctaccacacaggaaaccttgaagaaaatcagtttctagaagccgctgttacctcttgtttacagtttatatatatatgatagatatgagatatatatataaaaggtactgttaactactgtacaacccgacttcataatggtgctttcaaacagcgagatgagtaaaaacatcagcttccacgttgccttctgcgcaaagggtttcaccaaggatggagaaagggagacagcttgcagatggcgcgttctcacggtgggctcttccccttggtttgtaacgaagtgaaggaggagaacttgggagccaggttctccctgccaaaaagggggctagatgaggtggtcgggcccgtggacagctgagagtgggattcatccagactcatgcaataaccctttgattgttttctaaaaggagactccctcggcaagatggcagagggtacggagtcttcaggcccagtttctcactttagccaattcgagggctccttgtggtgggatcagaactaatccagagtgtgggaaagtgacagtcaaaaccccacctggagcaaataaaaaaacatacaaaacgta

SEQ ID NO: 430280 - DNA, 3631 bp, Homo sapiens
ccttgaagtcagagggccgtgtttcctagattcagtaaaaggctaatggttctcagagctaagtatcaaggatttcattctcctttgtagggatcctggagcgggttgtgagaaggaatgggcgcgtggatcgtagcctgaaagacgagtgtgatacggctgagaagaaagccaaggtcattgcaggaatgaatgctgtggaagaaaaccaggggcccggggagtctcagaaggtggaggaggccagccctcctgctgtgcagcagcccactgaccccgcatcccccactgtggctaccacgcctgagcccgtggggtccgatgctggggacaagaatgccaccaaagcaggcgatgacgagccagagtacgaggacggccggggctttggcattggggagctggtgtgggggaaactgcggggcttctcctggtggccaggccgcattgtgtcttggtggatgacgggccggagccgagcagctgaaggcacccgctgggtcatgtggttcggagacggcaaattctcagtggtgtgtgttgagaagctgatgccgctgagctcgttttgcagtgcgttccaccaggccacgtacaacaagcagcccatgtaccgcaaagccatctacgaggtcctgcaggtggccagcagccgcgcggggaagctgttcccggtgtgccacgacagcgatgagagtgacactgccaaggccgtggaggtgcagaacaagcccatgattgaatgggccctggggggcttccagccttctggccctaagggcctggagccaccagaagaagagaagaatccctacaaagaagtgtacacggacatgtgggtggaacctgaggcagctgcctacgcaccacctccaccagccaaaaagccccggaagagcacagcggagaagcccaaggtcaaggagattattgatgagcgcacaagagagcggctggtgtacgaggtgcggcagaagtgccggaacattgaggacatctgcatctcctgtgggagcctcaatgttaccctggaacaccccctcttcgttggaggaatgtgccaaaactgcaagaactgctttctggagtgtgcgtaccagtacgacgacgacggctaccagtcctactgcaccatctgctgtgggggccgtgaggtgctcatgtgcggaaacaacaactgctgcaggtgcttttgcgtggagtgtgtggacctcttggtggggccgggggctgcccaggcagccattaaggaagacccctggaactgctacatgtgcgggcacaagggtacctacgggctgctgcggcggcgagaggactggccctcccggctccagatgttcttcgctaataaccacgaccaggaatttgaccctccaaaggtttacccacctgtcccagctgagaagaggaagcccatccgggtgctgtctctctttgatggaatcgctacaggctcacctgccgagaccagggtgccagggagatggctccaagtaacggtgctgtctgctggctggtgcagggctcctggtgctgaaggacttgggcattcaggtggaccgctacattgcctcggaggtgtgtgaggactccatcacggtgggcatggtgcggcaccaggggaagatcatgtacgtcggggacgtccgcagcgtcacacagaagcatatccaggagtggggcccattcgatctggtgattgggggcagtccctgcaatgacctctccatcgtcaaccctgctcgcaagggcctctacgagggcactggccggctcttctttgagttctaccgcctcctgcatgatgcgcggcccaaggagggagatgatcgccccttcttctggctctttgagaatgtggtggccatgggcgttagtgacaagagggacatctcgcgatttctcgagtccaaccctgtgatgattgatgccaaagaagtgtcagctgcacacagggcccgctacttctggggtaaccttcccggtatgaacaggccgttggcatccactgtgaatgataagctggagctgcaggagtgtctggagcatggcaggatagccaagttcagcaaagtgaggaccattactacgaggtcaaactccataaagcagggcaaagaccagcattttcctgtcttcatgaatgagaaagaggacatcttatggtgcactgaaatggaaagggtatttggtttcccagtccactatactgacgtctccaacatgagccgcttggcgaggcagagactgctgggccggtcatggagcgtgccagtcatccgccacctcttcgctccgctgaaggagtattttgcgtgtgtgtaagggacatgggggcaaactgaggtagcgacacaaagttaaacaaacaaacaaaaaacacaaaacataataaaacaccaagaacatgaggatggagagaagtatcagcacccagaagagaaaaaggaatttaaaacaaaaaccacagaggcggaaataccggagggctttgccttgcgaaaagggttggacatcatctcctgatttttcaatgttattcttcagtcctatttaaaaacaaaaccaagctcccttcccttcctcccccttcccttttttttcggtcagaccttttattttctactcttttcagaggggttttctgtttgtttgggttttgtttcttgctgtgactgaaacaagaaggttattgcagcaaaaatcagtaacaaaaaatagtaacaataccttgcagaggaaaggtgggagagaggaaaaaaggaaattctatagaaatctatatattgggttgtttttttttttgttttttgttttttttttttgggtttttttttttactatatatcttttttttgttgtctctagcctgatcagataggagcacaagcaggggacggaaagagagagacactcaggcggcagcattccctcccagccactgagctgtcgtgccagcaccattcctggtcacgcaaaacagaacccagttagcagcagggagacgagaacaccacacaagacatttttctacagtatttcaggtgcctaccacacaggaaaccttgaagaaaatcagtttctagaagccgctgttacctcttgtttacagtttatatatatatgatagatatgagatatatatataaaaggtactgttaactactgtacaacccgacttcataatggtgctttcaaacagcgagatgagtaaaaacatcagcttccacgttgccttctgcgcaaagggtttcaccaaggatggagaaagggagacagcttgcagatggcgcgttctcacggtgggctcttccccttggtttgtaacgaagtgaaggaggagaacttgggagccaggttctccctgccaaaaagggggctagatgaggtggtcgggcccgtggacagctgagagtgggattcatccagactcatgcaataaccctttgattgttttctaaaaggagactccctcggcaagatggcagagggtacggagtcttcaggcccagtttctcactttagccaattcgagggctccttgtggtgggatcagaactaatccagagtgtgggaaagtgacagtcaaaaccccacctggagcaaataaaaaaacatacaaaacgta

SEQ ID NO: 430281 - DNA, 3412 bp, Homo sapiens
ccttgaagtcagagggccgtgtttcctagattcagtaaaaggctaatggttctcagagctaagtatcaaggatttcattctcctttgtagggatcctggagcgggttgtgagaaggaatgggcgcgtggatcgtagcctgaaagacgagtgtgatacggctgagaagaaagccaaggtcattgcaggaatgaatgctgtggaagaaaaccaggggcccggggagtctcagaaggtggaggaggccagccctcctgctgtgcagcagcccactgaccccgcatcccccactgtggctaccacgcctgagcccgtggggtccgatgctggggacaagaatgccaccaaagcaggcgatgacgagccagagtacgaggacggccggggctttggcattggggagctggtgtgggggaaactgcggggcttctcctggtggccaggccgcattgtgtcttggtggatgacgggccggagccgagcagctgaaggcacccgctgggtcatgtggttcggagacggcaaattctcagtggtgtgtgttgagaagctgatgccgctgagctcgttttgcagtgcgttccaccaggccacgtacaacaagcagcccatgtaccgcaaagccatctacgaggtcctgcaggtggccagcagccgcgcggggaagctgttcccggtgtgccacgacagcgatgagagtgacactgccaaggccgtggaggtgcagaacaagcccatgattgaatgggccctggggggcttccagccttctggccctaagggcctggagccaccagaagaagagaagaatccctacaaagaagtgtacacggacatgtgggtggaacctgaggcagctgcctacgcaccacctccaccagccaaaaagccccggaagagcacagcggagaagcccaaggtcaaggagattattgatgagcgcacaagagagcggctggtgtacgaggtgcggcagaagtgccggaacattgaggacatctgcatctcctgtgggagcctcaatgttaccctggaacaccccctcttcgttggaggaatgtgccaaaactgcaagaactgctttctggagtgtgcgtaccagtacgacgacgacggctaccagtcctactgcaccatctgctgtgggggccgtgaggtgctcatgtgcggaaacaacaactgctgcaggtgcttttgcgtggagtgtgtggacctcttggtggggccgggggctgcccaggcagccattaaggaagacccctggaactgctacatgtgcgggcacaagggtacctacgggctgctgcggcggcgagaggactggccctcccggctccagatgttcttcgctaataaccacgaccaggaatttgaccctccaaaggtttacccacctgtcccagctgagaagaggaagcccatccgggtgctgtctctctttgatggaatcgctacagggctcctggtgctgaaggacttgggcattcaggtggaccgctacattgcctcggaggtgtgtgaggactccatcacggtgggcatggtgcggcaccaggggaagatcatgtacgtcggggacgtccgcagcgtcacacagaagcatatccaggagtggggcccattcgatctggtgattgggggcagtccctgcaatgacctctccatcgtcaaccctgctcgcaagggcctctacgtccaaccctgtgatgattgatgccaaagaagtgtcagctgcacacagggcccgctacttctggggtaaccttcccggtatgaacaggccgttggcatccactgtgaatgataagctggagctgcaggagtgtctggagcatggcaggatagccaagttcagcaaagtgaggaccattactacgaggtcaaactccataaagcagggcaaagaccagcattttcctgtcttcatgaatgagaaagaggacatcttatggtgcactgaaatggaaagggtatttggtttcccagtccactatactgacgtctccaacatgagccgcttggcgaggcagagactgctgggccggtcatggagcgtgccagtcatccgccacctcttcgctccgctgaaggagtattttgcgtgtgtgtaagggacatgggggcaaactgaggtagcgacacaaagttaaacaaacaaacaaaaaacacaaaacataataaaacaccaagaacatgaggatggagagaagtatcagcacccagaagagaaaaaggaatttaaaacaaaaaccacagaggcggaaataccggagggctttgccttgcgaaaagggttggacatcatctcctgatttttcaatgttattcttcagtcctatttaaaaacaaaaccaagctcccttcccttcctcccccttcccttttttttcggtcagaccttttattttctactcttttcagaggggttttctgtttgtttgggttttgtttcttgctgtgactgaaacaagaaggttattgcagcaaaaatcagtaacaaaaaatagtaacaataccttgcagaggaaaggtgggagagaggaaaaaaggaaattctatagaaatctatatattgggttgtttttttttttgttttttgttttttttttttgggtttttttttttactatatatcttttttttgttgtctctagcctgatcagataggagcacaagcaggggacggaaagagagagacactcaggcggcagcattccctcccagccactgagctgtcgtgccagcaccattcctggtcacgcaaaacagaacccagttagcagcagggagacgagaacaccacacaagacatttttctacagtatttcaggtgcctaccacacaggaaaccttgaagaaaatcagtttctagaagccgctgttacctcttgtttacagtttatatatatatgatagatatgagatatatatataaaaggtactgttaactactgtacaacccgacttcataatggtgctttcaaacagcgagatgagtaaaaacatcagcttccacgttgccttctgcgcaaagggtttcaccaaggatggagaaagggagacagcttgcagatggcgcgttctcacggtgggctcttccccttggtttgtaacgaagtgaaggaggagaacttgggagccaggttctccctgccaaaaagggggctagatgaggtggtcgggcccgtggacagctgagagtgggattcatccagactcatgcaataaccctttgattgttttctaaaaggagactccctcggcaagatggcagagggtacggagtcttcaggcccagtttctcactttagccaattcgagggctccttgtggtgggatcagaactaatccagagtgtgggaaagtgacagtcaaaaccccacctggagcaaataaaaaaacatacaaaacgta

SEQ ID NO: 430282 - DNA, 2050 bp, Homo sapiens
ccttgaagtcagagggccgtgtttcctagattcagtaaaaggctaatggttctcagagctaagtatcaaggatttcattctcctttgtagggatcctggagcgggttgtgagaaggaatgggcgcgtggatcgtagcctgaaagacgagtgtgatacggctgagaagaaagccaaggtcattgcaggaatgaatgctgtggaagaaaaccaggggcccggggagtctcagaaggtggaggaggccagccctcctgctgtgcagcagcccactgaccccgcatcccccactgtggctaccacgcctgagcccgtggggtccgatgctggggacaagaatgccaccaaagcaggcgatgacgagccagagtacgaggacggccggggctttggcattggggagctggtgtgggggaaactgcggggcttctcctggtggccaggccgcattgtgtcttggtggatgacgggccggagccgagcagctgaaggcacccgctgggtcatgtggttcggagacggcaaattctcagtggtgtgtgttgagaagctgatgccgctgagctcgttttgcagtgcgttccaccaggccacgtacaacaagcagcccatgtaccgcaaagccatctacgaggtcctgcaggtggccagcagccgcgcggggaagctgttcccggtgtgccacgacagcgatgagagtgacactgccaaggccgtggaggtgcagaacaagcccatgattgaatgggccctggggggcttccagccttctggccctaagggcctggagccaccagaagaagagaagaatccctacaaagaagtgtacacggacatgtgggtggaacctgaggcagctgcctacgcaccacctccaccagccaaaaagccccggaagagcacagcggagaagcccaaggtcaaggagattattgatgagcgcacaagagagcggctggtgtacgaggtgcggcagaagtgccggaacattgaggacatctgcatctcctgtgggagcctcaatgttaccctggaacaccccctcttcgttggaggaatgtgccaaaactgcaagaactgctttctggagtgtgcgtaccagtacgacgacgacggctaccagtcctactgcaccatctgctgtgggggccgtgaggtgctcatgtgcggaaacaacaactgctgcaggtgcttttgcgtggagtgtgtggacctcttggtggggccgggggctgcccaggcagccattaaggaagacccctggaactgctacatgtgcgggcacaagggtacctacgggctgctgcggcggcgagaggactggccctcccggctccagatgttcttcgctaataaccacgaccaggaatttgaccctccaaaggtttacccacctgtcccagctgagaagaggaagcccatccgggtgctgtctctctttgatggaatcgctacagggctcctggtgctgaaggacttgggcattcaggtggaccgctacattgcctcggaggtgtgtgaggactccatcacggtgggcatggtgcggcaccaggggaagatcatgtacgtcggggacgtccgcagcgtcacacagaagcatatccaggagtggggcccattcgatctggtgattgggggcagtccctgcaatgacctctccatcgtcaaccctgctcgcaagggcctctacgagggcactggccggctcttctttgagttctaccgcctcctgcatgatgcgcggcccaaggagggagatgatcgccccttcttctggctctttgagaatgtggtggccatgggcgttagtgacaagagggacatctcgcgatttctcgagtccaaccctgtgatgattgatgccaaagaagtgtcagctgcacacagggcccgctacttctggggtaaccttcccggtatgaacaggccgttggcatccactgtgaatgataagctggagctgcaggagtgtctggagcatggcaggatagccaagttcgcaaagtggaggaccattactacgagtcaatccattgcataagtccgtga

SEQ ID NO: 430283 - DNA, 2064 bp, Homo sapiens
  misc_feature (2002)..(2002): n is a, c, g, or t
  misc_feature (2005)..(2005): n is a, c, g, or t
  misc_feature (2008)..(2008): n is a, c, g, or t
  misc_feature (2011)..(2011): n is a, c, g, or t
  misc_feature (2018)..(2018): n is a, c, g, or t
  misc_feature (2027)..(2027): n is a, c, g, or t
  misc_feature (2031)..(2031): n is a, c, g, or t
ccttgaagtcagagggccgtgtttcctagattcagtaaaaggctaatggttctcagagctaagtatcaaggatttcattctcctttgtagggatcctggagcgggttgtgagaaggaatgggcgcgtggatcgtagcctgaaagacgagtgtgatacggctgagaagaaagccaaggtcattgcaggaatgaatgctgtggaagaaaaccaggggcccggggagtctcagaaggtggaggaggccagccctcctgctgtgcagcagcccactgaccccgcatcccccactgtggctaccacgcctgagcccgtggggtccgatgctggggacaagaatgccaccaaagcaggcgatgacgagccagagtacgaggacggccggggctttggcattggggagctggtgtgggggaaactgcggggcttctcctggtggccaggccgcattgtgtcttggtggatgacgggccggagccgagcagctgaaggcacccgctgggtcatgtggttcggagacggcaaattctcagtggtgtgtgttgagaagctgatgccgctgagctcgttttgcagtgcgttccaccaggccacgtacaacaagcagcccatgtaccgcaaagccatctacgaggtcctgcaggtggccagcagccgcgcggggaagctgttcccggtgtgccacgacagcgatgagagtgacactgccaaggccgtggaggtgcagaacaagcccatgattgaatgggccctggggggcttccagccttctggccctaagggcctggagccaccagaagaagagaagaatccctacaaagaagtgtacacggacatgtgggtggaacctgaggcagctgcctacgcaccacctccaccagccaaaaagccccggaagagcacagcggagaagcccaaggtcaaggagattattgatgagcgcacaagagagcggctggtgtacgaggtgcggcagaagtgccggaacattgaggacatctgcatctcctgtgggagcctcaatgttaccctggaacaccccctcttcgttggaggaatgtgccaaaactgcaagaactgctttctggagtgtgcgtaccagtacgacgacgacggctaccagtcctactgcaccatctgctgtgggggccgtgaggtgctcatgtgcggaaacaacaactgctgcaggtgcttttgcgtggagtgtgtggacctcttggtggggccgggggctgcccaggcagccattaaggaagacccctggaactgctacatgtgcgggcacaagggtacctacgggctgctgcggcggcgagaggactggccctcccggctccagatgttcttcgctaataaccacgaccaggaatttgaccctccaaaggtttacccacctgtcccagctgagaagaggaagcccatccgggtgctgtctctctttgatggaatcgctacagggctcctggtgctgaaggacttgggcattcaggtggaccgctacattgcctcggaggtgtgtgaggactccatcacggtgggcatggtgcggcaccaggggaagatcatgtacgtcggggacgtccgcagcgtcacacagaagcatatccaggagtggggcccattcgatctggtgattgggggcagtccctgcaatgacctctccatcgtcaaccctgctcgcaagggcctctacgagggcactggccggctcttctttgagttctaccgcctcctgcatgatgcgcggcccaaggagggagatgatcgccccttcttctggctctttgagaatgtggtggccatgggcgttagtgacaagagggacatctcgcgatttctcgagtccaaccctgtgatgattgatgccaaagaagtgtcagctgcacacagggcccgctacttctggggtaaccttcccggtatgaacaggccgttggcatccactgtgaatgataagctggagctgcaggagtgtctggagcatggcaggatagccaagttagnaantgngancatatangagtcaatncatncaaggtccgaccgatcgatcagcaaaaaataaa

SEQ ID NO: 430284 - DNA, 2048 bp, Homo sapiens
ccttgaagtcagagggccgtgtttcctagattcagtaaaaggctaatggttctcagagctaagtatcaaggatttcattctcctttgtagggatcctggagcgggttgtgagaaggaatgggcgcgtggatcgtagcctgaaagacgagtgtgatacggctgagaagaaagccaaggtcattgcaggaatgaatgctgtggaagaaaaccaggggcccggggagtctcagaaggtggaggaggccagccctcctgctgtgcagcagcccactgaccccgcatcccccactgtggctaccacgcctgagcccgtggggtccgatgctggggacaagaatgccaccaaagcaggcgatgacgagccagagtacgaggacggccggggctttggcattggggagctggtgtgggggaaactgcggggcttctcctggtggccaggccgcattgtgtcttggtggatgacgggccggagccgagcagctgaaggcacccgctgggtcatgtggttcggagacggcaaattctcagtggtgtgtgttgagaagctgatgccgctgagctcgttttgcagtgcgttccaccaggccacgtacaacaagcagcccatgtaccgcaaagccatctacgaggtcctgcaggtggccagcagccgcgcggggaagctgttcccggtgtgccacgacagcgatgagagtgacactgccaaggccgtggaggtgcagaacaagcccatgattgaatgggccctggggggcttccagccttctggccctaagggcctggagccaccagaagaagagaagaatccctacaaagaagtgtacacggacatgtgggtggaacctgaggcagctgcctacgcaccacctccaccagccaaaaagccccggaagagcacagcggagaagcccaaggtcaaggagattattgatgagcgcacaagagagcggctggtgtacgaggtgcggcagaagtgccggaacattgaggacatctgcatctcctgtgggagcctcaatgttaccctggaacaccccctcttcgttggaggaatgtgccaaaactgcaagaactgctttctggagtgtgcgtaccagtacgacgacgacggctaccagtcctactgcaccatctgctgtgggggccgtgaggtgctcatgtgcggaaacaacaactgctgcaggtgcttttgcgtggagtgtgtggacctcttggtggggccgggggctgcccaggcagccattaaggaagacccctggaactgctacatgtgcgggcacaagggtacctacgggctgctgcggcggcgagaggactggccctcccggctccagatgttcttcgctaataaccacgaccaggaatttgaccctccaaaggtttacccacctgtcccagctgagaagaggaagcccatccgggtgctgtctctctttgatggaatcgctacagggctcctggtgctgaaggacttgggcattcaggtggaccgctacattgcctcggaggtgtgtgaggactccatcacggtgggcatggtgcggcaccaggggaagatcatgtacgtcggggacgtccgcagcgtcacacagaagcatatccaggagtggggcccattcgatctggtgattgggggcagtccctgcaatgacctctccatcgtcaaccctgctcgcaagggcctctacgagggcactggccggctcttctttgagttctaccgcctcctgcatgatgcgcggcccaaggagggagatgatcgccccttcttctggctctttgagaatgtggtggccatgggcgttagtgacaagagggacatctcgcgatttctcgagtccaaccctgtgatgattgatgccaaagaagtgtcagctgcacacagggcccgctacttctggggtaaccttcccggtatgaacaggccgttggcatccactgtgaatgataagctggagctgcaggagtgtctggagcatggcaggatagccaagttcagcatagtgtgtcattacttcggggtctattccatcgcaatagagatc

SEQ ID NO: 430285 - DNA, 1844 bp, Homo sapiens
ccttgaagtcagagggccgtgtttcctagattcagtaaaaggctaatggttctcagagctaagtatcaaggatttcattctcctttgtagggatcctggagcgggttgtgagaaggaatgggcgcgtggatcgtagcctgaaagacgagtgtgatacggctgagaagaaagccaaggtcattgcaggaatgaatgctgtggaagaaaaccaggggcccggggagtctcagaaggtggaggaggccagccctcctgctgtgcagcagcccactgaccccgcatcccccactgtggctaccacgcctgagcccgtggggtccgatgctggggacaagaatgccaccaaagcaggcgatgacgagccagagtacgaggacggccggggctttggcattggggagctggtgtgggggaaactgcggggcttctcctggtggccaggccgcattgtgtcttggtggatgacgggccggagccgagcagctgaaggcacccgctgggtcatgtggttcggagacggcaaattctcagtggtgtgtgttgagaagctgatgccgctgagctcgttttgcagtgcgttccaccaggccacgtacaacaagcagcccatgtaccgcaaagccatctacgaggtcctgcaggtggccagcagccgcgcggggaagctgttcccggtgtgccacgacagcgatgagagtgacactgccaaggccgtggaggtgcagaacaagcccatgattgaatgggccctggggggcttccagccttctggccctaagggcctggagccaccagaagaagagaagaatccctacaaagaagtgtacacggacatgtgggtggaacctgaggcagctgcctacgcaccacctccaccagccaaaaagccccggaagagcacagcggagaagcccaaggtcaaggagattattgatgagcgcacaagagagcggctggtgtacgaggtgcggcagaagtgccggaacattgaggacatctgcatctcctgtgggagcctcaatgttaccctggaacaccccctcttcgttggaggaatgtgccaaaactgcaagaactgctttctggagtgtgcgtaccagtacgacgacgacggctaccagtcctactgcaccatctgctgtgggggccgtgaggtgctcatgtgcggaaacaacaactgctgcaggtgcttttgcgtggagtgtgtggacctcttggtggggccgggggctgcccaggcagccattaaggaagacccctggaactgctacatgtgcgggcacaagggtacctacgggctgctgcggcggcgagaggactggccctcccggctccagatgttcttcgctaataaccacgaccaggaatttgaccctccaaaggtttacccacctgtcccagctgagaagaggaagcccatccgggtgctgtctctctttgatggaatcgctacagggctcctggtgctgaaggacttgggcattcaggtggaccgctacattgcctcggaggtgtgtgaggactccatcacggtgggcatggtgcggcaccaggggaagatcatgtacgtcggggacgtccgcagcgtcacacagaagcatatccaggagtggggcccattcgatctggtgattgggggcagtccctgcaatgacctctccatcgtcaaccctgctcgcaagggcctctacgtccaaccctgtgatgattgatgccaaagaagtgtcagctgcacacagggcccgctacttctggggtaaccttcccggtatgaacagttcagcaaagtgaggaccattactacggaggtcaaatccatcgcaaaggtaacctctagggtagca

SEQ ID NO: 430286 - DNA, 1483 bp, Homo sapiens
ccttgaagtcagagggccgtgtttcctagattcagtaaaaggctaatggttctcagagctaagtatcaaggatttcattctcctttgtagggatcctggagcgggttgtgagaaggaatgggcgcgtggatcgtagcctgaaagacgagtgtgatacggctgagaagaaagccaaggtcattgcaggaatgaatgctgtggaagaaaaccaggggcccggggagtctcagaaggtggaggaggccagccctcctgctgtgcagcagcccactgaccccgcatcccccactgtggctaccacgcctgagcccgtggggtccgatgctggggacaagaatgccaccaaagcaggcgatgacgagccagagtacgaggacggccggggctttggcattggggagctggtgtgggggaaactgcggggcttctcctggtggccaggccgcattgtgtcttggtggatgacgggccggagccgagcagctgaaggcacccgctgggtcatgtggttcggagacggcaaattctcagtggtgtgtgttgagaagctgatgccgctgagctcgttttgcagtgcgttccaccaggccacgtacaacaagcagcccatgtaccgcaaagccatctacgaggtcctgcaggtggccagcagccgcgcggggaagctgttcccggtgtgccacgacagcgatgagagtgacactgccaaggccgtggaggtgcagaacaagcccatgattgaatgggccctggggggcttccagccttctggccctaagggcctggagccaccagaagaagagaagaatccctacaaagaagtgtacacggacatgtgggtggaacctgaggcagctgcctacgcaccacctccaccagccaaaaagccccggaagagcacagcggagaagcccaaggtcaaggagattattgatgagcgcacaagagagcggctggtgtacgaggtgcggcagaagtgccggaacattgaggacatctgcatctcctgtgggagcctcaatgttaccctggaacaccccctcttcgttggaggaatgtgccaaaactgcaagaactgctttctggagtgtgcgtaccagtacgacgacgacggctaccagtcctactgcaccatctgctgtgggggccgtgaggtgctcatgtgcggaaacaacaactgctgcaggtgcttttgcgtggagtgtgtggaccttcccggcccctggaatgtgatgtttttggtcatctccaaaggctgcagttttatactgggaggctgatgacaccttttattataattattcttatggttctggttataattatgtttgttttaagattttctttaagaaaacaaaaacccaacacccttccctttaggtttcaaaccaaggtgcgggagcagggtgcttctgagttagcggtggctctggtgccctggctcccacccctcgggccaggtgggccactgggcatggtgaca

SEQ ID NO: 430287 - DNA, 436 bp, Homo sapiens
tggggctgtcgccctcagcctggtgctggtggatctggctcaggaccctcggcctgggaggattggggcaggggtcaggacttgaggattaccccgggaatccctcctgagtaacctggaaccagggctgcttctcatgagcaggtttctgtcctgctgtcactccatccctgtttgtggatggtggcattggtgctctgagatgatggcgttcgagactggggtcacagtgcctcccttttccgtggggcaccctggactcttttctggctgccgctctggcacaccccttttttgtggctggtctggtgctgggctccggcccggggagggagaggcccttcggtggtactcaccccatcccctccctctgctttccagacatctgcatctcctgtgggagcctcaatgttaccctggaacaccccctcttcgt

SEQ ID NO: 430288 - DNA, 235 bp, Homo sapiens
gctgtgcgcagggtgtgtgggtctaggagcctggctggagggccagcgctgggtgggagcttgggacaccgctgggcctgcatctgacctgttgtgctcactgcttaggaccctccaaaggtttacccacctgtcccagctgagaagaggaagcccatccgggtgctgtctctctttgatggaatcgctacaggtgaggggtgcaggcccaagaggtgctggccgccttgtccca

SEQ ID NO: 430289 - DNA, 216 bp, Homo sapiens
ccctctctgccttttctcccccagggtatttggtttcccagtccactatactgacgtctccaacatgagccgcttggcgaggcagagactgctgggccggtcatggagcgtgccagtcatccgccacctcttcgctccgctgaaggagtattttgcgtgtgtgtaagggacatgggggcaaactgaggtagcgacacaaagttaaacaaacaaaca

SEQ ID NO: 430290 - DNA, 2224 bp, Homo sapiens
gagaaggaagagacagaggatttcaaggagagggaataagccctccaagttacaactgtcccagctgagaagaggaagcccatccgggtgctgtctctctttgatggaatcgctacagggctcctggtgctgaaggacttgggcattcaggtggaccgctacattgcctcggaggtgtgtgaggactccatcacggtgggcatggtgcggcaccaggggaagatcatgtacgtcggggacgtccgcagcgtcacacagaagcatatccaggagtggggcccattcgatctggtgattgggggcagtccctgcaatgacctctccatcgtcaaccctgctcgcaagggcctctacgagggcactggccggctcttctttgagttctaccgcctcctgcatgatgcgcggcccaaggagggagatgatcgccccttcttctggctctttgagaatgtggtggccatgggcgttagtgacaagagggacatctcgcgatttctcgagtccaaccctgtgatgattgatgccaaagaagtgtcagctgcacacagggcccgctacttctggggtaaccttcccggtatgaacaggccgttggcatccactgtgaatgataagctggagctgcaggagtgtctggagcatggcaggatagccaagttcagcaaagtgaggaccattactacgaggtcaaactccataaagcagggcaaagaccagcattttcctgtcttcatgaatgagaaagaggacatcttatggtgcactgaaatggaaagggtatttggtttcccagtccactatactgacgtctccaacatgagccgcttggcgaggcagagactgctgggccggtcatggagcgtgccagtcatccgccacctcttcgctccgctgaaggagtattttgcgtgtgtgtaagggacatgggggcaaactgaggtagcgacacaaagttaaacaaacaaacaaaaaacacaaaacataataaaacaccaagaacatgaggatggagagaagtatcagcacccagaagagaaaaaggaatttaaaacaaaaaccacagaggcggaaataccggagggctttgccttgcgaaaagggttggacatcatctcctgatttttcaatgttattcttcagtcctatttaaaaacaaaaccaagctcccttcccttcctcccccttcccttttttttcggtcagaccttttattttctactcttttcagaggggttttctgtttgtttgggttttgtttcttgctgtgactgaaacaagaaggttattgcagcaaaaatcagtaacaaaaaatagtaacaataccttgcagaggaaaggtgggagagaggaaaaaaggaaattctatagaaatctatatattgggttgtttttttttttgttttttgttttttttttttgggtttttttttttactatatatcttttttttgttgtctctagcctgatcagataggagcacaagcaggggacggaaagagagagacactcaggcggcagcattccctcccagccactgagctgtcgtgccagcaccattcctggtcacgcaaaacagaacccagttagcagcagggagacgagaacaccacacaagacatttttctacagtatttcaggtgcctaccacacaggaaaccttgaagaaaatcagtttctagaagccgctgttacctcttgtttacagtttatatatatatgatagatatgagatatatatataaaaggtactgttaactactgtacaacccgacttcataatggtgctttcaaacagcgagatgagtaaaaacatcagcttccacgttgccttctgcgcaaagggtttcaccaaggatggagaaagggagacagcttgcagatggcgcgttctcacggtgggctcttccccttggtttgtaacgaagtgaaggaggagaacttgggagccaggttctccctgccaaaaagggggctagatgaggtggtcgggcccgtggacagctgagagtgggattcatccagactcatgcaataaccctttgattgttttctaaaaggagactccctcggcaagatggcagagggtacggagtcttcaggcccagtttctcactttagccaattcgagggctccttgtggtgggatcagaactaatccagagtgtgggaaagtgacagtcaaaaccccacctggagcaaataaaaaaacatacaaaacgta

SEQ ID NO: 430291 - DNA, 3256 bp, Homo sapiens
ccttgaagtcagagggccgtgtttcctagattcagtaaaaggctaatggttctcagagctaagtatcaaggatttcattctcctttgtagggatcctggagcgggttgtgagaaggaatgggcgcgtggatcgtagcctgaaagacgagtgtgatacggctgagaagaaagccaaggtcattgcaggaatgaatgctgtggaagaaaaccaggggcccggggagtctcagaaggtggaggaggccagccctcctgctgtgcagcagcccactgaccccgcatcccccactgtggctaccacgcctgagcccgtggggtccgatgctggggacaagaatgccaccaaagcaggcgatgacgagccagagtacgaggacggccggggctttggcattggggagctggtgtgggggaaactgcggggcttctcctggtggccaggccgcattgtgtcttggtggatgacgggccggagccgagcagctgaaggcacccgctgggtcatgtggttcggagacggcaaattctcagtggtgtgtgttgagaagctgatgccgctgagctcgttttgcagtgcgttccaccaggccacgtacaacaagcagcccatgtaccgcaaagccatctacgaggtcctgcaggtggccagcagccgcgcggggaagctgttcccggtgtgccacgacagcgatgagagtgacactgccaaggccgtggaggtgcagaacaagcccatgattgaatgggccctggggggcttccagccttctggccctaagggcctggagccaccagaagaagagaagaatccctacaaagaagtgtacacggacatgtgggtggaacctgaggcagctgcctacgcaccacctccaccagccaaaaagccccggaagagcacagcggagaagcccaaggtcaaggagattattgatgagcgcacaagagagcggctggtgtacgaggtgcggcagaagtgccggaacattgaggacatctgcatctcctgtgggagcctcaatgttaccctggaacaccccctcttcgttggaggaatgtgccaaaactgcaagaactgctttctggagtgtgcgtaccagtacgacgacgacggctaccagtcctactgcaccatctgctgtgggggccgtgaggtgctcatgtgcggaaacaacaactgctgcaggtgcttttgcgtggagtgtgtggacctcttggtggggccgggggctgcccaggcagccattaaggaagatcatgtacgtcggggacgtccgcagcgtcacacagaagcatatccaggagtggggcccattcgatctggtgattgggggcagtccctgcaatgacctctccatcgtcaaccctgctcgcaagggcctctacgagggcactggccggctcttctttgagttctaccgcctcctgcatgatgcgcggcccaaggagggagatgatcgccccttcttctggctctttgagaatgtggtggccatgggcgttagtgacaagagggacatctcgcgatttctcgagtccaaccctgtgatgattgatgccaaagaagtgtcagctgcacacagggcccgctacttctggggtaaccttcccggtatgaacaggccgttggcatccactgtgaatgataagctggagctgcaggagtgtctggagcatggcaggatagccaagttcagcaaagtgaggaccattactacgaggtcaaactccataaagcagggcaaagaccagcattttcctgtcttcatgaatgagaaagaggacatcttatggtgcactgaaatggaaagggtatttggtttcccagtccactatactgacgtctccaacatgagccgcttggcgaggcagagactgctgggccggtcatggagcgtgccagtcatccgccacctcttcgctccgctgaaggagtattttgcgtgtgtgtaagggacatgggggcaaactgaggtagcgacacaaagttaaacaaacaaacaaaaaacacaaaacataataaaacaccaagaacatgaggatggagagaagtatcagcacccagaagagaaaaaggaatttaaaacaaaaaccacagaggcggaaataccggagggctttgccttgcgaaaagggttggacatcatctcctgatttttcaatgttattcttcagtcctatttaaaaacaaaaccaagctcccttcccttcctcccccttcccttttttttcggtcagaccttttattttctactcttttcagaggggttttctgtttgtttgggttttgtttcttgctgtgactgaaacaagaaggttattgcagcaaaaatcagtaacaaaaaatagtaacaataccttgcagaggaaaggtgggagagaggaaaaaaggaaattctatagaaatctatatattgggttgtttttttttttgttttttgttttttttttttgggtttttttttttactatatatcttttttttgttgtctctagcctgatcagataggagcacaagcaggggacggaaagagagagacactcaggcggcagcattccctcccagccactgagctgtcgtgccagcaccattcctggtcacgcaaaacagaacccagttagcagcagggagacgagaacaccacacaagacatttttctacagtatttcaggtgcctaccacacaggaaaccttgaagaaaatcagtttctagaagccgctgttacctcttgtttacagtttatatatatatgatagatatgagatatatatataaaaggtactgttaactactgtacaacccgacttcataatggtgctttcaaacagcgagatgagtaaaaacatcagcttccacgttgccttctgcgcaaagggtttcaccaaggatggagaaagggagacagcttgcagatggcgcgttctcacggtgggctcttccccttggtttgtaacgaagtgaaggaggagaacttgggagccaggttctccctgccaaaaagggggctagatgaggtggtcgggcccgtggacagctgagagtgggattcatccagactcatgcaataaccctttgattgttttctaaaaggagactccctcggcaagatggcagagggtacggagtcttcaggcccagtttctcactttagccaattcgagggctccttgtggtgggatcagaactaatccagagtgtgggaaagtgacagtcaaaaccccacctggagcaaataaaaaaacatacaaaacgta

SEQ ID NO: 430292 - DNA, 2056 bp, Homo sapiens
ccttgaagtcagagggccgtgtttcctagattcagtaaaaggctaatggttctcagagctaagtatcaaggatttcattctcctttgtagggatcctggagcgggttgtgagaaggaatgggcgcgtggatcgtagcctgaaagacgagtgtgatacggctgagaagaaagccaaggtcattgcaggaatgaatgctgtggaagaaaaccaggggcccggggagtctcagaaggtggaggaggccagccctcctgctgtgcagcagcccactgaccccgcatcccccactgtggctaccacgcctgagcccgtggggtccgatgctggggacaagaatgccaccaaagcaggcgatgacgagccagagtacgaggacggccggggctttggcattggggagctggtgtgggggaaactgcggggcttctcctggtggccaggccgcattgtgtcttggtggatgacgggccggagccgagcagctgaaggcacccgctgggtcatgtggttcggagacggcaaattctcagtggtgtgtgttgagaagctgatgccgctgagctcgttttgcagtgcgttccaccaggccacgtacaacaagcagcccatgtaccgcaaagccatctacgaggtcctgcaggtggccagcagccgcgcggggaagctgttcccggtgtgccacgacagcgatgagagtgacactgccaaggccgtggaggtgcagaacaagcccatgattgaatgggccctggggggcttccagccttctggccctaagggcctggagccaccagaagaagagaagaatccctacaaagaagtgtacacggacatgtgggtggaacctgaggcagctgcctacgcaccacctccaccagccaaaaagccccggaagagcacagcggagaagcccaaggtcaaggagattattgatgagcgcacaagagagcggctggtgtacgaggtgcggcagaagtgccggaacattgaggacatctgcatctcctgtgggagcctcaatgttaccctggaacaccccctcttcgttggaggaatgtgccaaaactgcaagaactgctttctggagtgtgcgtaccagtacgacgacgacggctaccagtcctactgcaccatctgctgtgggggccgtgaggtgctcatgtgcggaaacaacaactgctgcaggtgcttttgcgtggagtgtgtggacctcttggtggggccgggggctgcccaggcagccattaaggaagacccctggaactgctacatgtgcgggcacaagggtacctacgggctgctgcggcggcgagaggactggccctcccggctccagatgttcttcgctaataaccacgaccaggaatttgaccctccaaaggtttacccacctgtcccagctgagaagaggaagcccatccgggtgctgtctctctttgatggaatcgctacagggctcctggtgctgaaggacttgggcattcaggtggaccgctacattgcctcggaggtgtgtgaggactccatcacggtgggcatggtgcggcaccaggggaagatcatgtacgtcggggacgtccgcagcgtcacacagaagcatatccaggagtggggcccattcgatctggtgattgggggcagtccctgcaatgacctctccatcgtcaaccctgctcgcaagggcctctacgagggcactggccggctcttctttgagttctaccgcctcctgcatgatgcgcggcccaaggagggagatgatcgccccttcttctggctctttgagaatgtggtggccatgggcgttagtgacaagagggacatctcgcgatttctcgagtccaaccctgtgatgattgatgccaaagaagtgtcagctgcacacagggcccgctacttctggggtaaccttcccggtatgaacaggccgttggcatccactgtgaatgataagctggagctgcaggagtgtctggagcatggcaggatagccaagttcaccaaagtgagactattactatcgagtcttattccatcgccatctaaatactcctg

SEQ ID NO: 430293 - DNA, 2063 bp, Homo sapiens
ccttgaagtcagagggccgtgtttcctagattcagtaaaaggctaatggttctcagagctaagtatcaaggatttcattctcctttgtagggatcctggagcgggttgtgagaaggaatgggcgcgtggatcgtagcctgaaagacgagtgtgatacggctgagaagaaagccaaggtcattgcaggaatgaatgctgtggaagaaaaccaggggcccggggagtctcagaaggtggaggaggccagccctcctgctgtgcagcagcccactgaccccgcatcccccactgtggctaccacgcctgagcccgtggggtccgatgctggggacaagaatgccaccaaagcaggcgatgacgagccagagtacgaggacggccggggctttggcattggggagctggtgtgggggaaactgcggggcttctcctggtggccaggccgcattgtgtcttggtggatgacgggccggagccgagcagctgaaggcacccgctgggtcatgtggttcggagacggcaaattctcagtggtgtgtgttgagaagctgatgccgctgagctcgttttgcagtgcgttccaccaggccacgtacaacaagcagcccatgtaccgcaaagccatctacgaggtcctgcaggtggccagcagccgcgcggggaagctgttcccggtgtgccacgacagcgatgagagtgacactgccaaggccgtggaggtgcagaacaagcccatgattgaatgggccctggggggcttccagccttctggccctaagggcctggagccaccagaagaagagaagaatccctacaaagaagtgtacacggacatgtgggtggaacctgaggcagctgcctacgcaccacctccaccagccaaaaagccccggaagagcacagcggagaagcccaaggtcaaggagattattgatgagcgcacaagagagcggctggtgtacgaggtgcggcagaagtgccggaacattgaggacatctgcatctcctgtgggagcctcaatgttaccctggaacaccccctcttcgttggaggaatgtgccaaaactgcaagaactgctttctggagtgtgcgtaccagtacgacgacgacggctaccagtcctactgcaccatctgctgtgggggccgtgaggtgctcatgtgcggaaacaacaactgctgcaggtgcttttgcgtggagtgtgtggacctcttggtggggccgggggctgcccaggcagccattaaggaagacccctggaactgctacatgtgcgggcacaagggtacctacgggctgctgcggcggcgagaggactggccctcccggctccagatgttcttcgctaataaccacgaccaggaatttgaccctccaaaggtttacccacctgtcccagctgagaagaggaagcccatccgggtgctgtctctctttgatggaatcgctacagggctcctggtgctgaaggacttgggcattcaggtggaccgctacattgcctcggaggtgtgtgaggactccatcacggtgggcatggtgcggcaccaggggaagatcatgtacgtcggggacgtccgcagcgtcacacagaagcatatccaggagtggggcccattcgatctggtgattgggggcagtccctgcaatgacctctccatcgtcaaccctgctcgcaagggcctctacgagggcactggccggctcttctttgagttctaccgcctcctgcatgatgcgcggcccaaggagggagatgatcgccccttcttctggctctttgagaatgtggtggccatgggcgttagtgacaagagggacatctcgcgatttctcgagtccaaccctgtgatgattgatgccaaagaagtgtcagctgcacacagggcccgctacttctggggtaaccttcccggtatgaacaggccgttggcatccactgtgaatgataagctggagctgcaggagtgtctggagcatggcaggatagccaagttcagcaaagtgaggaccattactacggaggtcaaatccatcgcaaaggtaacctctagggtagca

SEQ ID NO: 430294 - DNA, 2262 bp, Homo sapiens
ccttgaagtcagagggccgtgtttcctagattcagtaaaaggctaatggttctcagagctaagtatcaaggatttcattctcctttgtagggatcctggagcgggttgtgagaaggaatgggcgcgtggatcgtagcctgaaagacgagtgtgatacggctgagaagaaagccaaggtcattgcaggaatgaatgctgtggaagaaaaccaggggcccggggagtctcagaaggtggaggaggccagccctcctgctgtgcagcagcccactgaccccgcatcccccactgtggctaccacgcctgagcccgtggggtccgatgctggggacaagaatgccaccaaagcaggcgatgacgagccagagtacgaggacggccggggctttggcattggggagctggtgtgggggaaactgcggggcttctcctggtggccaggccgcattgtgtcttggtggatgacgggccggagccgagcagctgaaggcacccgctgggtcatgtggttcggagacggcaaattctcagtggtgtgtgttgagaagctgatgccgctgagctcgttttgcagtgcgttccaccaggccacgtacaacaagcagcccatgtaccgcaaagccatctacgaggtcctgcaggtggccagcagccgcgcggggaagctgttcccggtgtgccacgacagcgatgagagtgacactgccaaggccgtggaggtgcagaacaagcccatgattgaatgggccctggggggcttccagccttctggccctaagggcctggagccaccagaagaagagaagaatccctacaaagaagtgtacacggacatgtgggtggaacctgaggcagctgcctacgcaccacctccaccagccaaaaagccccggaagagcacagcggagaagcccaaggtcaaggagattattgatgagcgcacaagagagcggctggtgtacgaggtgcggcagaagtgccggaacattgaggacatctgcatctcctgtgggagcctcaatgttaccctggaacaccccctcttcgttggaggaatgtgccaaaactgcaagaactgctttctggagtgtgcgtaccagtacgacgacgacggctaccagtcctactgcaccatctgctgtgggggccgtgaggtgctcatgtgcggaaacaacaactgctgcaggtgcttttgcgtggagtgtgtggacctcttggtggggccgggggctgcccaggcagccattaaggaagacccctggaactgctacatgtgcgggcacaagggtacctacgggctgctgcggcggcgagaggactggccctcccggctccagatgttcttcgctaataaccacgaccaggaatttgaccctccaaaggtttacccacctgtcccagctgagaagaggaagcccatccgggtgctgtctctctttgatggaatcgctacagggctcctggtgctgaaggacttgggcattcaggtggaccgctacattgcctcggaggtgtgtgaggactccatcacggtgggcatggtgcggcaccaggggaagatcatgtacgtcggggacgtccgcagcgtcacacagaagcatatccaggagtggggcccattcgatctggtgattgggggcagtccctgcaatgacctctccatcgtcaaccctgctcgcaagggcctctacgagggcactggccggctcttctttgagttctaccgcctcctgcatgatgcgcggcccaaggagggagatgatcgccccttcttctggctctttgagaatgtggtggccatgggcgttagtgacaagagggacatctcgcgatttctcgaggtacaaaatagccacctgtactagtgggctagtggccactgaattgaacagtgtagaggacaacccaccatcgcagaagttcatttggacaatgctgatctagaacgttccagtgacagcttgtggaatgtggctaggtgtaattccagcttctcctggaggctgcaggctagcccagtgtgtggctcctgagagagaatccaaccctgtgatgattgatgccaaagaagtgtcagctgcacacagggcccgctacttctggggtaaccttcccggtatgaacaggccgttggcatccactgtgaatgataagctggagctgcaggagtgtctggagcatggcaggatagccaagttcagcaaagtgaggaccattactacggaggtcaaatccatcgcaaaggtaacctctagggtagca

SEQ ID NO: 430295 - DNA, 1917 bp, Homo sapiens
ccttgaagtcagagggccgtgtttcctagattcagtaaaaggctaatggttctcagagctaagtatcaaggatttcattctcctttgtagggatcctggagcgggttgtgagaaggaatgggcgcgtggatcgtagcctgaaagacgagtgtgatacggctgagaagaaagccaaggtcattgcaggaatgaatgctgtggaagaaaaccaggggcccggggagtctcagaaggtggaggaggccagccctcctgctgtgcagcagcccactgaccccgcatcccccactgtggctaccacgcctgagcccgtggggtccgatgctggggacaagaatgccaccaaagcaggcgatgacgagccagagtacgaggacggccggggctttggcattggggagctggtgtgggggaaactgcggggcttctcctggtggccaggccgcattgtgtcttggtggatgacgggccggagccgagcagctgaaggcacccgctgggtcatgtggttcggagacggcaaattctcagtggtgtgtgttgagaagctgatgccgctgagctcgttttgcagtgcgttccaccaggccacgtacaacaagcagcccatgtaccgcaaagccatctacgaggtcctgcaggtggccagcagccgcgcggggaagctgttcccggtgtgccacgacagcgatgagagtgacactgccaaggccgtggaggtgcagaacaagcccatgattgaatgggccctggggggcttccagccttctggccctaagggcctggagccaccagaagaagagaagaatccctacaaagaagtgtacacggacatgtgggtggaacctgaggcagctgcctacgcaccacctccaccagccaaaaagccccggaagagcacagcggagaagcccaaggtcaaggagattattgatgagcgcacaagagagcggctggtgtacgaggtgcggcagaagtgccggaacattgaggacatctgcatctcctgtgggagcctcaatgttaccctggaacaccccctcttcgttggaggaatgtgccaaaactgcaagaactgctttctggagtgtgcgtaccagtacgacgacgacggctaccagtcctactgcaccatctgctgtgggggccgtgaggtgctcatgtgcggaaacaacaactgctgcaggtgcttttgcgtggagtgtgtggacctcttggtggggccgggggctgcccaggcagccattaaggaagacccctggaactgctacatgtgcgggcacaagggtacctacgggctgctgcggcggcgagaggactggccctcccggctccagatgttcttcgctaataaccacgaccaggaatttgaccctccaaaggtttacccacctgtcccagctgagaagaggaagcccatccgggtgctgtctctctttgatggaatcgctacagatccaggagtggggcccattcgatctggtgattgggggcagtccctgcaatgacctctccatcgtcaaccctgctcgcaagggcctctacgagggcactggccggctcttctttgagttctaccgcctcctgcatgatgcgcggcccaaggagggagatgatcgccccttcttctggctctttgagaatgtggtggccatgggcgttagtgacaagagggacatctcgcgatttctcgagtccaaccctgtgatgattgatgccaaagaagtgtcagctgcacacagggcccgctacttctggggtaaccttcccggtatgaacaggccgttggcatccactgtgaatgataagctggagctgcaggagtgtctggagcatggcaggatagccaagttcagcaaagtgaggaccattactacggaggtcaaatccatcgcaaaggtaacctctagggtagca

SEQ ID NO: 430296 - DNA, 439 bp, Homo sapiens
cttccgggttccagcaattctcctgcctcagcctcccgagtagctggaattacaggtgcctgtcacatacccgactaattttttgttatttttagtagagacgggatttcactatgttggtcagactggtctccaactcctgaccttggcctcccgaagtgttgagattataggtgtgagccaccacacccagccctggaggaatattctttacctgttatgaggttaacactttatttgtatcagttattattattagatctagcctgaaaacccatagccctaaattggaacaggcatgcctgtttttgcacccaaaagttgccttttggcccgccaagcccccctcttcctataccaatataaacctgaaaccgcaggccccacaagcagacgaggagatgaagaacagaatgacagaatggcttggcagagagaa

SEQ ID NO: 430297 - DNA, 3495 bp, Homo sapiens
gtggtgggctacaccagtttcgcgcggccgctcgccgtcccccgcccagtcgtactcggcgccccagctcggtgctgccgccatcttcttggaggacaggaggagaggcgaaggctccccctccccgtgatcgctccgcactcccgccaccacctgccctcccgcgaccgcctctctcctcctcagtgggcacttgtctccttctaacaaacggccttccccccactccagttacccaccgcaaggcgaagattctcattacctgttccactcttataagcataagaaaaccgagctcataaggacgaagcttcacaaaagatgtctaagcaacagccaactcagtttataaatccagaaacacctggctatgttggatttgcaaacctccccaatcaagttcaccgaaaatcagtgaaaaaaggttttgagttcacactgatggtggtcggtgaatcaggtctaggaaaatcgactctcataaacagcctattcctaactgatctgtacccagaaagagtcatacctggagcagcagaaaaaattgaaagaactgtccagattgaggcttcaactgttgaaattgaagagcgaggggtcaagctacgcctgacagtggtagatacccctggctatggtgacgctatcaactgcagagattgttttaagacaattatctcctatattgatgagcaatttgagaggtacctgcatgacgagagcggcttgaacaggcggcacatcattgataatagggtgcattgttgcttttactttatttcaccttttggacatggacttaagcccttagatgtggcgtttatgaaggcaatacacaacaaggtgaatattgtgcctgtcattgcaaaagctgacactctcaccctgaaggaacgggagcggctgaagaaaaggattctggatgaaattgaagaacataacatcaaaatctatcacttacctgatgcagaatcagatgaagatgaagattttaaagagcagactagacttctcaaggctagcatcccattctctgtggttggatccaatcagttgattgaagccaaaggaaagaaggtcagaggccgcctctacccctggggtgttgtggaagtggagaacccagagcacaatgactttctgaagctgagaaccatgctcatcacccacatgcaggatctccaggaggtgacccaggaccttcattatgaaaacttccgttctgagagactcaagagaggcggcaggaaagtggagaatgaggacatgaataaagaccagatcttgctggaaaaagaagctgagctccgccgcatgcaagagatgattgcaaggatgcaggcgcagatgcagatgcagatgcagggcggggatggcgatggcggggctctcgggcaccacgtgtaaggtgatgtgcacatatcaagaagtcagagaaaacactttcctggataaaaaagaaaacattccagatgcatgatccagctgtgtgttttcaatccttgggagggtgccatccacattttaacagtacctgtgcctgagaatttaatttttaaaagactttgatgtgtttttgtatgaagtacttttaacgtatgtatttcattgctgtgtcacactctgtgttttgtgaggtgaatgtcttccttttctttctccctaaccactaatgttagaattgatttccaagaatcggcatgtatacttaatactgaatttctttgatttaactgacttaacaactgactaaccattgatgagcactcctgatttttatctagaacattcagatttaccataatgttccttagtggtagaggtgtgtgcctagtgatgtagaaagatacactgacttggtgcaaggccatctgcttaccacatcacaccacttggagatctttgcttccttgcttttatgtttgtacacaacacctaaaaccagttttgctgctataattctatactgttgattcgtctgcgattttatctgttaaccaaataaaacataatagaatttcctaatgagatatatctttatacttaaacagcttttttagaggtgagttttaaagaagtctcttaattctgatgctaggttgtttttaaaaccactatgcaaagaactcaccacaagccaccttttgtagtgttctccactaatactggttatcctgtgctacagagaaaatcaaagcagtcataagctccagttttcgtattgcaaataagactcttacctacaaaatgagattcagtgaactaatttggtttttactcaaccaaattaaaaatttttttaaggaaaattagcagttggtctattcagaatcaaacctttttatattttatactgcactttagtgtattttctgtcactgtaggtatagaagatctgcctcccctgtggaaattggggtctgttggtgggcttgcccctgaagcctggcttgggttgaaaagtgttcccgccctaaggccttggtgccctgaacctctgatgcctaccgggttctcctgatttgagtttcctttaaatactccctttttgagtaattttctgatgggaggaaagtagcagtcatcatctttttgtgtgcaggctgtctcatttatttttagccattgtcgtttcattcattttgtgtaatataaaccgtgtgtcatgtcaaagtgaaagacatttcaaatctgtagcataggctagtgggcaggtccgcacagtcgaagccacacctggtctgttttctgtgcactgtagccttagtgtcacctttcttcttgtgtctccttatggtacactccagcggttgccttttttatcatttctactgaagttgggaaattcaaccccagaaattgacagatgaaaggagacaatggttgtgtagggagatggagaaaatgcttaatctgaggatgagacagggttttttcatttttgtgggggctagaaaaaacataaaatgaggcagttaaataataatagttaatgaaggtgtgctacagaaaataatctggtgttcttgctaactttgcccttcactgttgcttaattgtgaacagccaaaagctatatgttatggcttattgtgtgaaggtaactaagaagtggtgttccatgacttcagagtacatccatgcggagtccattatttgagtttgacatttaataactttgctggaaaatctgtaaaaaagaaaaacaagtttgctagtgactaagccccgcatatgtgagtgaaagtacttcaggcacgctgcctcctggtaacagctatgcagggagggaggacccacactgctacacttctgatcccctttggttttactacccaaatctaaatagatacttttgataatagataactgctcttttactaagacatagtctctacctatagaaatgtattttgaaaacacttattttacacagcaattttgtatccatttaaactaaccttttatcaataaagcactattgtttagatatta

SEQ ID NO: 430298 - DNA, 2129 bp, Homo sapiens
gtggtgggctacaccagtttcgcgcggccgctcgccgtcccccgcccagtcgtactcggcgccccagctcggtgctgccgccatcttcttggaggacaggaggagaggcgaaggctccccctccccgtgatcgctccgcactcccgccaccacctgccctcccgcgaccgcctctctcctcctcagtgggcacttgtctccttctaacaaacggccttccccccactccagttacccaccgcaaggcgaagattctcattacctgttccactcttataagcataagaaaaccgagctcataagcatacagaaactgctgtaaaagaagaagttgtgggtatttttttttttttttttgtctggaggaatggggacaccaaaactcatttggcagcagaggtgagacgaagcttcacaaaagatgtctaagcaacagccaactcagtttataaatccagaaacacctggctatgttggatttgcaaacctccccaatcaagttcaccgaaaatcagtgaaaaaaggttttgagttcacactgatggtggtcggtgaatcaggtctaggaaaatcgactctcataaacagcctattcctaactgatctgtacccagaaagagtcatacctggagcagcagaaaaaattgaaagaactgtccagattgaggcttcaactgttgaaattgaagagcgaggggtcaagctacgcctgacagtggtagatacccctggctatggtgacgctatcaactgcagagattgttttaagacaattatctcctatattgatgagcaatttgagaggtacctgcatgacgagagcggcttgaacaggcggcacatcattgataatagggtgcattgttgcttttactttatttcaccttttggacatggacttaagcccttagatgtggcgtttatgaaggcaatacacaacaaggtgaatattgtgcctgtcattgcaaaagctgacactctcaccctgaaggaacgggagcggctgaagaaaaggattctggatgaaattgaagaacataacatcaaaatctatcacttacctgatgcagaatcagatgaagatgaagattttaaagagcagactagacttctcaaggctagcatcccattctctgtggttggatccaatcagttgattgaagccaaaggaaagaaggtcagaggccgcctctacccctggggtgttgtggaagtggagaacccagagcacaatgactttctgaagctgagaaccatgctcatcacccacatgcaggatctccaggaggtgacccaggaccttcattatgaaaacttccgttctgagagactcaagagaggcggcaggaaagtggagaatgaggacatgaataaagaccagatcttgctggaaaaagaagctgagctccgccgcatgcaagagatgattgcaaggatgcaggcgcagatgcagatgcagatgcagggcggggatggcgatggcggggctctcgggcaccacgtgtaaggtgatgtgcacatatcaagaagtcagagaaaacactttcctggataaaaaagaaaacattccagatgcatgatccagctgtgtgttttcaatccttgggagggtgccatccacattttaacagtacctgtgcctgagaatttaatttttaaaagactttgatgtgtttttgtatgaagtacttttaacgtatgtatttcattgctgtgtcacactctgtgttttgtgaggtgaatgtcttccttttctttctccctaaccactaatgttagaattgatttccaagaatcggcatgtatacttaatactgaatttctttgatttaactgacttaacaactgactaaccattgatgagcactcctgatttttatctagaacattcagatttaccataatgttccttagtggtagaggtgtgtgcctagtgatgtagaaagatacactgacttggtgcaaggccatctgcttaccacatcacaccacttggagatctttgcttccttgcttttatgtttgtacacaacacctaaaaccagttttgctgctataattctatactgttgattcgtctgcgattttatctgttaaccaaataaaacataatagaatttcctaatgag

SEQ ID NO: 430299 - DNA, 309 bp, Homo sapiens
gcacgagcaaatctaaatagatacttttgatttgggtagtaaaaccaaaggggatcagaagtgtagcagtgtgggtcctccctccctgcatagctgttaccaggaggcagcgtgcctgaagtacttctgatcccctttggttttactacccaaatctaaatagatacttttgataatagataactgctcttttactaagacatagtctctacctatagaaatgtattttgaaaacacttattttacacagcaattttgtatccatttaaactaaccttttatcaataaagcactattgtttagatatta

SEQ ID NO: 430300 - DNA, 611 bp, Homo sapiens
taagagttgtgggtgagtatttttcaatatttaaataggtgtagttgaagtaagatgaactaataatgatggcacttttacagaagagaagaattgcttgaacctaggaggtggaggttgcagtgagccaagatcatgccactacactccagcccgtgcgacagagtgagacaccatctcaatataaaaagagaaatgataaatacatgtcattttaaattttaaagtagaattttttgggggggtagcaaataactatttgttgcagtgttatgattctgatttctttcgattcttaggaaagtggagaatgaggacatgaataaagaccagatcttgctggaaaaagaagctgaggtaagtaggaaagtactattggttggttggttggttggttgttttgtttgttttgagacagagttttgcactccagcctaggagacagagtgagactctgtcttaagaaaatttatcatattgtcttatctttctttggttattgtttctgtttggcttgcatattcgtatcatttacttgattttctctttagctgttgctttttttattgattggtaaaaagtctttatgtaataactcctcactattttgg

SEQ ID NO: 430301 - DNA, 2495 bp, Homo sapiens
tgcctgtaatgccagttacccaggaggctaaggtgggagaattgcttgaacctaggaggtggaggttgcagtgagccaagatcatgccactacactccagcccgtgcgacagagtgagacaccatctcaatataaaaagagaaatgataaatacatgtcattttaaattttaaagtagaattttttgggggggtagcaaataactatttgttgcagtgttatgattctgatttctttcgattcttaggaaagtggagaatgaggacatgaataaagaccagatcttgctggaaaaagaagctgagctccgccgcatgcaagagatgattgcaaggatgcaggcgcagatgcagatgcagatgcagggcggggatggcgatggcggggctctcgggcaccacgtgtaaggtgatgtgcacatatcaagaagtcagagaaaacactttcctggataaaaaagaaaacattccagatgcatgatccagctgtgtgttttcaatccttgggagggtgccatccacattttaacagtacctgtgcctgagaatttaatttttaaaagactttgatgtgtttttgtatgaagtacttttaacgtatgtatttcattgctgtgtcacactctgtgttttgtgaggtgaatgtcttccttttctttctccctaaccactaatgttagaattgatttccaagaatcggcatgtatacttaatactgaatttctttgatttaactgacttaacaactgactaaccattgatgagcactcctgatttttatctagaacattcagatttaccataatgttccttagtggtagaggtgtgtgcctagtgatgtagaaagatacactgacttggtgcaaggccatctgcttaccacatcacaccacttggagatctttgcttccttgcttttatgtttgtacacaacacctaaaaccagttttgctgctataattctatactgttgattcgtctgcgattttatctgttaaccaaataaaacataatagaatttcctaatgagatatatctttatacttaaacagcttttttagaggtgagttttaaagaagtctcttaattctgatgctaggttgtttttaaaaccactatgcaaagaactcaccacaagccaccttttgtagtgttctccactaatactggttatcctgtgctacagagaaaatcaaagcagtcataagctccagttttcgtattgcaaataagactcttacctacaaaatgagattcagtgaactaatttggtttttactcaaccaaattaaaaatttttttaaggaaaattagcagttggtctattcagaatcaaacctttttatattttatactgcactttagtgtattttctgtcactgtaggtatagaagatctgcctcccctgtggaaattggggtctgttggtgggcttgcccctgaagcctggcttgggttgaaaagtgttcccgccctaaggccttggtgccctgaacctctgatgcctaccgggttctcctgatttgagtttcctttaaatactccctttttgagtaattttctgatgggaggaaagtagcagtcatcatctttttgtgtgcaggctgtctcatttatttttagccattgtcgtttcattcattttgtgtaatataaaccgtgtgtcatgtcaaagtgaaagacatttcaaatctgtagcataggctagtgggcaggtccgcacagtcgaagccacacctggtctgttttctgtgcactgtagccttagtgtcacctttcttcttgtgtctccttatggtacactccagcggttgccttttttatcatttctactgaagttgggaaattcaaccccagaaattgacagatgaaaggagacaatggttgtgtagggagatggagaaaatgcttaatctgaggatgagacagggttttttcatttttgtgggggctagaaaaaacataaaatgaggcagttaaataataatagttaatgaaggtgtgctacagaaaataatctggtgttcttgctaactttgcccttcactgttgcttaattgtgaacagccaaaagctatatgttatggcttattgtgtgaaggtaactaagaagtggtgttccatgacttcagagtacatccatgcggagtccattatttgagtttgacatttaataactttgctggaaaatctgtaaaaaagaaaaacaagtttgctagtgactaagccccgcatatgtgagtgaaagtacttcaggcacgctgcctcctggtaacagctatgcagggagggaggacccacactgctacacttctgatcccctttggttttactacccaaatctaaatagatacttttgataatagataactgctcttttactaagacatagtctctacctatagaaatgtattttgaaaacacttattttacacagcaattttgtatccatttaaactaaccttttatcaataaagcactattgtttagatatta

SEQ ID NO: 430302 - DNA, 3198 bp, Homo sapiens
  misc_feature (8)..(8): n is a, c, g, or t
cgcgacgntgggcgggtccgcggcgcggtcggtcggcgcctattctcgggctgtttggcggacgaagcttcacaaaagatgtctaagcaacagccaactcagtttataaatccagaaacacctggctatgttggatttgcaaacctccccaatcaagttcaccgaaaatcagtgaaaaaaggttttgagttcacactgatggtggtcggtgaatcaggtctaggaaaatcgactctcataaacagcctattcctaactgatctgtacccagaaagagtcatacctggagcagcagaaaaaattgaaagaactgtccagattgaggcttcaactgttgaaattgaagagcgaggggtcaagctacgcctgacagtggtagatacccctggctatggtgacgctatcaactgcagagattgttttaagacaattatctcctatattgatgagcaatttgagaggtacctgcatgacgagagcggcttgaacaggcggcacatcattgataatagggtgcattgttgcttttactttatttcaccttttggacatggacttaagcccttagatgtggcgtttatgaaggcaatacacaacaaggtgaatattgtgcctgtcattgcaaaagctgacactctcaccctgaaggaacgggagcggctgaagaaaaggattctggatgaaattgaagaacataacatcaaaatctatcacttacctgatgcagaatcagatgaagatgaagattttaaagagcagactagacttctcaaggctagcatcccattctctgtggttggatccaatcagttgattgaagccaaaggaaagaaggtcagaggccgcctctacccctggggtgttgtggaagtggagaacccagagcacaatgactttctgaagctgagaaccatgctcatcacccacatgcaggatctccaggaggtgacccaggaccttcattatgaaaacttccgttctgagagactcaagagaggcggcaggaaagtggagaatgaggacatgaataaagaccagatcttgctggaaaaagaagctgagctccgccgcatgcaagagatgattgcaaggatgcaggcgcagatgcagatgcagatgcagggcggggatggcgatggcggggctctcgggcaccacgtgtaaggtgatgtgcacatatcaagaagtcagagaaaacactttcctggataaaaaagaaaacattccagatgcatgatccagctgtgtgttttcaatccttgggagggtgccatccacattttaacagtacctgtgcctgagaatttaatttttctgtgtcacactctgtgttttgtgaggtgaatgtcttccttttctttctccctaaccactaatgttagaattgatttccaagaatcggcatgtatacttaatactgaatttctttgatttaactgacttaacaactgactaaccattgatgagcactcctgatttttatctagaacattcagatttaccataatgttccttagtggtagaggtgtgtgcctagtgatgtagaaagatacactgacttggtgcaaggccatctgcttaccacatcacaccacttggagatctttgcttccttgcttttatgtttgtacacaacacctaaaaccagttttgctgctataattctatactgttgattcgtctgcgattttatctgttaaccaaataaaacataatagaatttcctaatgagatatatctttatacttaaacagcttttttagaggtgagttttaaagaagtctcttaattctgatgctaggttgtttttaaaaccactatgcaaagaactcaccacaagccaccttttgtagtgttctccactaatactggttatcctgtgctacagagaaaatcaaagcagtcataagctccagttttcgtattgcaaataagactcttacctacaaaatgagattcagtgaactaatttggtttttactcaaccaaattaaaaatttttttaaggaaaattagcagttggtctattcagaatcaaacctttttatattttatactgcactttagtgtattttctgtcactgtaggtatagaagatctgcctcccctgtggaaattggggtctgttggtgggcttgcccctgaagcctggcttgggttgaaaagtgttcccgccctaaggccttggtgccctgaacctctgatgcctaccgggttctcctgatttgagtttcctttaaatactccctttttgagtaattttctgatgggaggaaagtagcagtcatcatctttttgtgtgcaggctgtctcatttatttttagccattgtcgtttcattcattttgtgtaatataaaccgtgtgtcatgtcaaagtgaaagacatttcaaatctgtagcataggctagtgggcaggtccgcacagtcgaagccacacctggtctgttttctgtgcactgtagccttagtgtcacctttcttcttgtgtctccttatggtacactccagcggttgccttttttatcatttctactgaagttgggaaattcaaccccagaaattgacagatgaaaggagacaatggttgtgtagggagatggagaaaatgcttaatctgaggatgagacagggttttttcatttttgtgggggctagaaaaaacataaaatgaggcagttaaataataatagttaatgaaggtgtgctacagaaaataatctggtgttcttgctaactttgcccttcactgttgcttaattgtgaacagccaaaagctatatgttatggcttattgtgtgaaggtaactaagaagtggtgttccatgacttcagagtacatccatgcggagtccattatttgagtttgacatttaataactttgctggaaaatctgtaaaaaagaaaaacaagtttgctagtgactaagccccgcatatgtgagtgaaagtacttcaggcacgctgcctcctggtaacagctatgcagggagggaggacccacactgctacacttctgatcccctttggttttactacccaaatctaaatagatacttttgataatagataactgctcttttactaagacatagtctctacctatagaaatgtattttgaaaacacttattttacacagcaattttgtatccatttaaactaaccttttatcaataaagcactattgtttagatatta

SEQ ID NO: 430303 - DNA, 2200 bp, Homo sapiens
acaaaatactagcaaacagaatccaacagcatattaagaaaattaaggccaggcacatggctcacgcttgtaatcccagcactttgggaggcggaggcgggtggatcacgaggtcaggagtttgagaccagcctgaccaatgtggtgaaaccccgtctctactgaaaatacaaaaatcagctgggcgtggtggtgtgtgcctgtaatttgggagggtgccatccacattttaacagtacctgtgcctgagaatttaatttttaaaagactttgatgtgtttttgtatgaagtacttttaacgtatgtatttcattgctgtgtcacactctgtgttttgtgaggtgaatgtcttccttttctttctccctaaccactaatgttagaattgatttccaagaatcggcatgtatacttaatactgaatttctttgatttaactgacttaacaactgactaaccattgatgagcactcctgatttttatctagaacattcagatttaccataatgttccttagtggtagaggtgtgtgcctagtgatgtagaaagatacactgacttggtgcaaggccatctgcttaccacatcacaccacttggagatctttgcttccttgcttttatgtttgtacacaacacctaaaaccagttttgctgctataattctatactgttgattcgtctgcgattttatctgttaaccaaataaaacataatagaatttcctaatgagatatatctttatacttaaacagcttttttagaggtgagttttaaagaagtctcttaattctgatgctaggttgtttttaaaaccactatgcaaagaactcaccacaagccaccttttgtagtgttctccactaatactggttatcctgtgctacagagaaaatcaaagcagtcataagctccagttttcgtattgcaaataagactcttacctacaaaatgagattcagtgaactaatttggtttttactcaaccaaattaaaaatttttttaaggaaaattagcagttggtctattcagaatcaaacctttttatattttatactgcactttagtgtattttctgtcactgtaggtatagaagatctgcctcccctgtggaaattggggtctgttggtgggcttgcccctgaagcctggcttgggttgaaaagtgttcccgccctaaggccttggtgccctgaacctctgatgcctaccgggttctcctgatttgagtttcctttaaatactccctttttgagtaattttctgatgggaggaaagtagcagtcatcatctttttgtgtgcaggctgtctcatttatttttagccattgtcgtttcattcattttgtgtaatataaaccgtgtgtcatgtcaaagtgaaagacatttcaaatctgtagcataggctagtgggcaggtccgcacagtcgaagccacacctggtctgttttctgtgcactgtagccttagtgtcacctttcttcttgtgtctccttatggtacactccagcggttgccttttttatcatttctactgaagttgggaaattcaaccccagaaattgacagatgaaaggagacaatggttgtgtagggagatggagaaaatgcttaatctgaggatgagacagggttttttcatttttgtgggggctagaaaaaacataaaatgaggcagttaaataataatagttaatgaaggtgtgctacagaaaataatctggtgttcttgctaactttgcccttcactgttgcttaattgtgaacagccaaaagctatatgttatggcttattgtgtgaaggtaactaagaagtggtgttccatgacttcagagtacatccatgcggagtccattatttgagtttgacatttaataactttgctggaaaatctgtaaaaaagaaaaacaagtttgctagtgactaagccccgcatatgtgagtgaaagtacttcaggcacgctgcctcctggtaacagctatgcagggagggaggacccacactgctacacttctgatcccctttggttttactacccaaatctaaatagatacttttgataatagataactgctcttttactaagacatagtctctacctatagaaatgtattttgaaaacacttattttacacagcaattttgtatccatttaaactaaccttttatcaataaagcactattgtttagatatta

SEQ ID NO: 430304 - DNA, 2072 bp, Homo sapiens
acccactactggcagccccaaatctgcacctcccgcggctgcggggctcctgcgtctcccgttccagctctgactcagcacaggaagccccgcagcccattttaacagtacctgtgcctgagaatttaatttttaaaagactttgatgtgtttttgtatgaagtacttttaacgtatgtatttcattgctgtgtcacactctgtgttttgtgaggtgaatgtcttccttttctttctccctaaccactaatgttagaattgatttccaagaatcggcatgtatacttaatactgaatttctttgatttaactgacttaacaactgactaaccattgatgagcactcctgatttttatctagaacattcagatttaccataatgttccttagtggtagaggtgtgtgcctagtgatgtagaaagatacactgacttggtgcaaggccatctgcttaccacatcacaccacttggagatctttgcttccttgcttttatgtttgtacacaacacctaaaaccagttttgctgctataattctatactgttgattcgtctgcgattttatctgttaaccaaataaaacataatagaatttcctaatgagatatatctttatacttaaacagcttttttagaggtgagttttaaagaagtctcttaattctgatgctaggttgtttttaaaaccactatgcaaagaactcaccacaagccaccttttgtagtgttctccactaatactggttatcctgtgctacagagaaaatcaaagcagtcataagctccagttttcgtattgcaaataagactcttacctacaaaatgagattcagtgaactaatttggtttttactcaaccaaattaaaaatttttttaaggaaaattagcagttggtctattcagaatcaaacctttttatattttatactgcactttagtgtattttctgtcactgtaggtatagaagatctgcctcccctgtggaaattggggtctgttggtgggcttgcccctgaagcctggcttgggttgaaaagtgttcccgccctaaggccttggtgccctgaacctctgatgcctaccgggttctcctgatttgagtttcctttaaatactccctttttgagtaattttctgatgggaggaaagtagcagtcatcatctttttgtgtgcaggctgtctcatttatttttagccattgtcgtttcattcattttgtgtaatataaaccgtgtgtcatgtcaaagtgaaagacatttcaaatctgtagcataggctagtgggcaggtccgcacagtcgaagccacacctggtctgttttctgtgcactgtagccttagtgtcacctttcttcttgtgtctccttatggtacactccagcggttgccttttttatcatttctactgaagttgggaaattcaaccccagaaattgacagatgaaaggagacaatggttgtgtagggagatggagaaaatgcttaatctgaggatgagacagggttttttcatttttgtgggggctagaaaaaacataaaatgaggcagttaaataataatagttaatgaaggtgtgctacagaaaataatctggtgttcttgctaactttgcccttcactgttgcttaattgtgaacagccaaaagctatatgttatggcttattgtgtgaaggtaactaagaagtggtgttccatgacttcagagtacatccatgcggagtccattatttgagtttgacatttaataactttgctggaaaatctgtaaaaaagaaaaacaagtttgctagtgactaagccccgcatatgtgagtgaaagtacttcaggcacgctgcctcctggtaacagctatgcagggagggaggacccacactgctacacttctgatcccctttggttttactacccaaatctaaatagatacttttgataatagataactgctcttttactaagacatagtctctacctatagaaatgtattttgaaaacacttattttacacagcaattttgtatccatttaaactaaccttttatcaataaagcactattgtttagatatta

SEQ ID NO: 430305 - DNA, 3285 bp, Homo sapiens
  misc_feature (8)..(8): n is a, c, g, or t
cgcgacgntgggcgggtccgcggcgcggtcggtcggcgcctattctcgggctgtttggcggacgaagcttcacaaaagatgtctaagcaacagccaactcagtttataaatccagaaacacctggctatgttggatttgcaaacctccccaatcaagttcaccgaaaatcagtgaaaaaaggttttgagttcacactgatggtggtcggtgaatcaggtctaggaaaatcgactctcataaacagcctattcctaactgatctgtacccagaaagagtcatacctggagcagcagaaaaaattgaaagaactgtccagattgaggcttcaactgttgaaattgaagagcgaggggtcaagctacgcctgacagtggtagatacccctggctatggtgacgctatcaactgcagagattgttttaagacaattatctcctatattgatgagcaatttgagaggtacctgcatgacgagagcggcttgaacaggcggcacatcattgataatagggtgcattgttgcttttactttatttcaccttttggacatggacttaagcccttagatgtggcgtttatgaaggcaatacacaacaaggtgaatattgtgcctgtcattgcaaaagctgacactctcaccctgaaggaacgggagcggctgaagaaaaggattctggatgaaattgaagaacataacatcaaaatctatcacttacctgatgcagaatcagatgaagatgaagattttaaagagcagactagacttctcaaggctagcatcccattctctgtggttggatccaatcagttgattgaagccaaaggaaagaaggtcagaggccgcctctacccctggggtgttgtggaagtggagaacccagagcacaatgactttctgaagctgagaaccatgctcatcacccacatgcaggatctccaggaggtgacccaggaccttcattatgaaaacttccgttctgagagactcaagagaggcggcaggaaagtggagaatgaggacatgaataaagaccagatcttgctggaaaaagaagctgagctccgccgcatgcaagagatgattgcaaggatgcaggcgcagatgcagatgcagatgcagggcggggatggcgatggcggggctctcgggcaccacgtgtaaggtgatgtgcacatatcaagaagtcagagaaaacactttcctggataaaaaagaaaacattccagatgcatgatccagctgtgtgttttcaatccttgggagggtgccatccacattttaacagtacctgtgcctgagaatttaatttttaaaagactttgatgtgtttttgtatgaagtacttttaacgtatgtatttcattgctgtgtcacactctgtgttttgtgaggtgaatgtcttccttttctttctccctaaccactaatgttagaattgatttccaagaatcggcatgtatacttaatactgaatttctttgatttaactgacttaacaactgactaaccattgatgagcactcctgatttttatctagaacattcagatttaccataatgttccttagtggtagaggtgtgtgcctagtgatgtagaaagatacactgacttggtgcaaggccatctgcttaccacatcacaccacttggagatctttgcttccttgcttttatgtttgtacacaacacctaaaaccagttttgctgctataattctatactgttgattcgtctgcgattttatctgttaaccaaataaaacataatagaatttcctaatgagatatatctttatacttaaacagcttttttagaggtgagttttaaagaagtctcttaattctgatgctaggttgtttttaaaaccactatgcaaagaactcaccacaagccaccttttgtagtgttctccactaatactggttatcctgtgctacagagaaaatcaaagcagtcataagctccagttttcgtattgcaaataagactcttacctacaaaatgagattcagtgaactaatttggtttttactcaaccaaattaaaaatttttttaaggaaaattagcagttggtctattcagaatcaaacctttttatattttatactgcactttagtgtattttctgtcactgtaggtatagaagatctgcctcccctgtggaaattggggtctgttggtgggcttgcccctgaagcctggcttgggttgaaaagtgttcccgccctaaggccttggtgccctgaacctctgatgcctaccgggttctcctgatttgagtttcctttaaatactccctttttgagtaattttctgatgggaggaaagtagcagtcatcatctttttgtgtgcaggctgtctcatttatttttagccattgtcgtttcattcattttgtgtaatataaaccgtgtgtcatgtcaaagtgaaagacatttcaaatctgtagcataggctagtgggcaggtccgcacagtcgaagccacacctggtctgttttctgtgcactgtagccttagtgtcacctttcttcttgtgtctccttatggtacactccagcggttgccttttttatcatttctactgaagttgggaaattcaaccccagaaattgacagatgaaaggagacaatggttgtgtagggagatggagaaaatgcttaatctgaggatgagacagggttttttcatttttgtgggggctagaaaaaacataaaatgaggcagttaaataataatagttaatgaaggtgtgctacagaaaataatctggtgttcttgctaactttgcccttcactgttgcttaattgtgaacagccaaaagctatatgttatggcttattgtgtgaaggtaactaagaagtggtgttccatgacttcagagtacatccatgcggagtccattatttgagtttgacatttaataactttgctggaaaatctgtaaaaaagaaaaacaagtttgctagtgactaagccccgcatatgtgagtgaaagtacttcaggcacgctgcctcctggtaacagctatgcagggagggaggacccacactgctacacttctgatcccctttggttttactacccaaatctaaatagatacttttgataatagataactgctcttttactaagacatagtctctacctatagaaatgtattttgaaaacacttattttacacagcaattttgtatccatttaaactaaccttttatcaataaagcactattgtttagatattacaacaacacaaaagacttataaaataacggggt

SEQ ID NO: 430306 - DNA, 3576 bp, Homo sapiens
  misc_feature (8)..(8): n is a, c, g, or t
  misc_feature (3576)..(3576): n is a, c, g, or t
cgcgacgntgggcgggtccgcggcgcggtcggtcggcgcctattctcgggctgtttggcggacgaagcttcacaaaagatgtctaagcaacagccaactcagtttataaatccagaaacacctggctatgttggatttgcaaacctccccaatcaagttcaccgaaaatcagtgaaaaaaggttttgagttcacactgatggtggtcggtgaatcaggtctaggaaaatcgactctcataaacagcctattcctaactgatctgtacccagaaagagtcatacctggagcagcagaaaaaattgaaagaactgtccagattgaggcttcaactgttgaaattgaagagcgaggggtcaagctacgcctgacagtggtagatacccctggctatggtgacgctatcaactgcagagattgttttaagacaattatctcctatattgatgagcaatttgagaggtacctgcatgacgagagcggcttgaacaggcggcacatcattgataatagggtgcattgttgcttttactttatttcaccttttggacatggacttaagcccttagatgtggcgtttatgaaggcaatacacaacaaggtgaatattgtgcctgtcattgcaaaagctgacactctcaccctgaaggaacgggagcggctgaagaaaaggattctggatgaaattgaagaacataacatcaaaatctatcacttacctgatgcagaatcagatgaagatgaagattttaaagagcagactagacttctcaaggctagcatcccattctctgtggttggatccaatcagttgattgaagccaaaggaaagaaggtcagaggccgcctctacccctggggtgttgtggaagtggagaacccagagcacaatgactttctgaagctgagaaccatgctcatcacccacatgcaggatctccaggaggtgacccaggaccttcattatgaaaacttccgttctgagagactcaagagaggcggcaggaaagtggagaatgaggacatgaataaagaccagatcttgctggaaaaagaagctgagctccgccgcatgcaagagatgattgcaaggatgcaggcgcagatgcagatgcagatgcagggcggggatggcgatggcggggctctcgggcaccacgtgtaaggtgatgtgcacatatcaagaagtcagagaaaacactttcctggataaaaaagaaaacattccagatgcatgatccagctgtgtgttttcaatccttgggagggtgccatccacattttaacagtacctgtgcctgagaatttaatttttaaaagactttgatgtgtttttgtatgaagtacttttaacgtatgtatttcattgctgtgtcacactctgtgttttgtgaggtgaatgtcttccttttctttctccctaaccactaatgttagaattgatttccaagaatcggcatgtatacttaatactgaatttctttgatttaactgacttaacaactgactaaccattgatgagcactcctgatttttatctagaacattcagatttaccataatgttccttagtggtagaggtgtgtgcctagtgatgtagaaagatacactgacttggtgcaaggccatctgcttaccacatcacaccacttggagatctttgcttccttgcttttatgtttgtacacaacacctaaaaccagttttgctgctataattctatactgttgattcgtctgcgattttatctgttaaccaaataaaacataatagaatttcctaatgagatatatctttatacttaaacagcttttttagaggtgagttttaaagaagtctcttaattctgatgctaggttgtttttaaaaccactatgcaaagaactcaccacaagccaccttttgtagtgttctccactaatactggttatcctgtgctacagagaaaatcaaagcagtcataagctccagttttcgtattgcaaataagactcttacctacaaaatgagattcagtgaactaatttggtttttactcaaccaaattaaaaatttttttaaggaaaattagcagttggtctattcagaatcaaacctttttatattttatactgcactttagtgtattttctgtcactgtaggtatagaagatctgcctcccctgtggaaattggggtctgttggtgggcttgcccctgaagcctggcttgggttgaaaagtgttcccgccctaaggccttggtgccctgaacctctgatgcctaccgggttctcctgatttgagtttcctttaaatactccctttttgagtaattttctgatgggaggaaagtagcagtcatcatctttttgtgtgcaggctgtctcatttatttttagccattgtcgtttcattcattttgtgtaatataaaccgtgtgtcatgtcaaagtgaaagacatttcaaatctgtagcataggctagtgggcaggtccgcacagtcgaagccacacctggtctgttttctgtgcactgtagccttagtgtcacctttcttcttgtgtctccttatggtacactccagcggttgccttttttatcatttctactgaagttgggaaattcaaccccagaaattgacagatgaaaggagacaatggttgtgtagggagatggagaaaatgcttaatctgaggatgagacagggttttttcatttttgtgggggctagaaaaaacataaaatgaggcagttaaataataatagttaatgaaggtgtgctacagaaaataatctggtgttcttgctaactttgcccttcactgttgcttaattgtgaacagccaaaagctatatgttatggcttattgtgtgaaggtaactaagaagtggtgttccatgacttcagagtacatccatgcggagtccattatttgagtttgacatttaataactttgctggaaaatctgtaaaaaagaaaaacaagtttgctagtgactaagccccgcatatgtgagtgaaagtacttcaggcacgctgcctcctggtaacagctatgcagggagggaggacccacactgctacacttctgatcccctttggttttactacccaaatctaaatagatacttttgataatagataactgctcttttactaagacatagtctctacctatagaaatgtattttgaaaacacttattttacacagcaattttgtatccatttaaactaaccttttatcaataaagcactattgtttagatattaaaaacagtaaacaatggaaggtaacaactacgacaagaccaaaacaggctgaggagccaaccggcacacgcctgacagacagcaacgaaaccatacgcgaagaccctaacgaaaaaaaaaaccacaggactcggggggggtgaataacaaaccagggcgcggcccacacccagcaacatcagagagcagcaacccagaagcaaaaacacgaggcggggcaaacacgcagagaacgacgtggtacgagaccccccgggggagcgtgacccaccaaacgcgggaaactctggctagcacacccggcggagcgttaaaaagagcagn

SEQ ID NO: 430307 - DNA, 3215 bp, Homo sapiens
  misc_feature (8)..(8): n is a, c, g, or t
cgcgacgntgggcgggtccgcggcgcggtcggtcggcgcctattctcgggctgtttggcggacgaagcttcacaaaagatgtctaagcaacagccaactcagtttataaatccagaaacacctggctatgttggatttgcaaacctccccaatcaagttcaccgaaaatcagtgaaaaaaggttttgagttcacactgatggtggtcggtgaatcaggtctaggaaaatcgactctcataaacagcctattcctaactgatctgtacccagaaagagtcatacctggagcagcagaaaaaattgaaagaactgtccagattgaggcttcaactgttgaaattgaagagcgaggggtcaagctacgcctgacagtggtagatacccctggctatggtgacgctatcaactgcagagattgttttaagacaattatctcctatattgatgagcaatttgagaggtacctgcatgacgagagcggcttgaacaggcggcacatcattgataatagggtgcattgttgcttttactttatttcaccttttggacatggacttaagcccttagatgtggcgtttatgaaggcaatacacaacaaggtgaatattgtgcctgtcattgcaaaagctgacactctcaccctgaaggaacgggagcggctgaagaaaaggattctggatgaaattgaagaacataacatcaaaatctatcacttacctgatgcagaatcagatgaagatgaagattttaaagagcagactagacttctcaaggctagcatcccattctctgtggttggatccaatcagttgattgaagccaaaggaaagaaggtcagaggccgcctctacccctggggtgttgtggaagtggagaacccagagcacaatgactttctgaagctgagaaccatgctcatcacccacatgcaggatctccaggaggtgacccaggaccttcattatgaaaacttccgttctgagagactcaagagaggcggcaggaaagtggagaatgaggacatgaataaagaccagatcttgctggaaaaagaagctgagctccgccgcatgcaagagatgattgcaaggatgcaggcgcagatgcagatgcagatgcagggcggggatggcgatggcggggctctcgggcaccacgtgtaaggtgatgtgcacatatcaagaagtcagagaaaacactttcctggataaaaaagaaaacattccagatgcatgatccagctgtgtgttttcaatccttgggagggtgccatccacattttaacagtacctgtgcctgagaatttaatttttaaaagactttgatgtgtttttgtatgaagtacttttaacgtatgtatttcattgctgtgtcacactctgtgttttgtgaggtgaatgtcttccttttctttctccctaaccactaatgttagaattgatttccaagaatcggcatgtatacttaatactgaatttctttgatttaactgacttaacaactgactaaccattgatgagcactcctgatttttatctagaacattcagatttaccataatgttccttagtggtagaggtgtgtgcctagtgatgtagaaagatacactgacttggtgcaaggccatctgcttaccacatcacaccacttggagatctttgcttccttgcttttatgtttgtacacaacacctaaaaccagttttgctgctataattctatactgttgattcgtctgcgattttatctgttaaccaaataaaacataatagaatttcctaatgagatatatctttatacttaaacagcttttttagaggtgagttttaaagaagtctcttaattctgatgctaggttgtttttaaaaccactatgcaaagaactcaccacaagccaccttttgtagtgttctccactaatactggttatcctgtgctacagagaaaatcaaagcagtcataagctccagttttcgtattgcaaataagactcttacctacaaaatgagattcagtgaactaatttggtttttactcaaccaaattaaaaatttttttaaggaaaattagcagttggtctattcagaatcaaacctttttatattttatactgcactttagtgtattttctgtcactgtaggtatagaagatctgcctcccctgtggaaattggggtctgttggtgggcttgcccctgaagcctggcttgggttgaaaagtgttcccgccctaaggccttggtgccctgaacctctgatgcctaccgggttctcctgatttgagtttcctttaaatactccctttttgagtaattttctgatgggaggaaagtagcagtcatcatctttttgtgtgcaggctgtctcatttatttttagccattgtcgtttcattcattttgtgtaatataaaccgtgtgtcatgtcaaagtgaaagacatttcaaatctgtagcataggctagtgggcaggtccgcacagtcgaagccacacctggtctgttttctgtgcactgtagccttagtgtcacctttcttcttgtgtctccttatggtacactccagcggttgccttttttatcatttctactgaagttgggaaattcaaccccagaaattgacagatgaaaggagacaatggttgtgtagggagatggagaaaatgcttaatctgaggatgagacagggttttttcatttttgtgggggctagaaaaaacataaaatgaggcagttaaataataatagttaatgaaggtgtgctacagaaaataatctggtgttcttgctaactttgcccttcactgttgcttaattgtgaacagccaaaagctatatgttatggcttattgtgtgaaggtaactaagaagtggtgttccatgacttcagagtacatccatgcggagtccattatttgagtttgacatttaataactttgctggaaaatctgtaaaaaagaaaaacaagtttgctagtgactaagccccgcatatgtgagtgaaagtacttcaggcacgctgcctcctggtaacagctatgcagggagggaggacccacactgctacacttctgatcccctttggttttactacccaaatctaaatagatacttttgataatagataactgctcttttactaagacatagtctctacctatagaaatgtattttgaaaacacttattttacacagcgtccacgcagcgtgccactac

SEQ ID NO: 430308 - DNA, 1480 bp, Homo sapiens
gaggaaggacccagagtgacttgctggagccttagtcaccaaacgctcttgcagcttagtgggaaaggtgttcattgtaaaatacggtatttacacaaaatgcacaaaaatacgtatgtacagtttaataagttactgtaaggaaaacatccatgtcacccccaactgagtccaagttggttgctttagtttcatcatcacagtgacaccttagaatagtcctgagggtatgtgcttagttcacactttactgatgaggaaattgttgccgctccgagagtttaaaagtatttgctgatggtgccatgacttttaaacgatggcctgctgactctagaggctggtcctgcataaccagttaatggcatgtgactggggaagtgagggtacagtggaaagagacaaggatgcctcagcgatgcagctcatttgaagcaggaagcagtgacaggtgtttgcttattttctctgagcttcattttcaactgcctaccgggttctcctgatttgagtttcctttaaatactccctttttgagtaattttctgatgggaggaaagtagcagtcatcatctttttgtgtgcaggctgtctcatttatttttagccattgtcgtttcattcattttgtgtaatataaaccgtgtgtcatgtcaaagtgaaagacatttcaaatctgtagcataggctagtgggcaggtccgcacagtcgaagccacacctggtctgttttctgtgcactgtagccttagtgtcacctttcttcttgtgtctccttatggtacactccagcggttgccttttttatcatttctactgaagttgggaaattcaaccccagaaattgacagatgaaaggagacaatggttgtgtagggagatggagaaaatgcttaatctgaggatgagacagggttttttcatttttgtgggggctagaaaaaacataaaatgaggcagttaaataataatagttaatgaaggtgtgctacagaaaataatctggtgttcttgctaactttgcccttcactgttgcttaattgtgaacagccaaaagctatatgttatggcttattgtgtgaaggtaactaagaagtggtgttccatgacttcagagtacatccatgcggagtccattatttgagtttgacatttaataactttgctggaaaatctgtaaaaaagaaaaacaagtttgctagtgactaagccccgcatatgtgagtgaaagtacttcaggcacgctgcctcctggtaacagctatgcagggagggaggacccacactgctacacttctgatcccctttggttttactacccaaatctaaatagatacttttgataatagataactgctcttttactaagacatagtctctacctatagaaatgtattttgaaaacacttattttacacagcaattttgtatccatttaaactaaccttttatcaataaagcactattgtttagatatta

SEQ ID NO: 430309 - DNA, 3239 bp, Homo sapiens
  misc_feature (8)..(8): n is a, c, g, or t
cgcgacgntgggcgggtccgcggcgcggtcggtcggcgcctattctcgggctgtttggcggacgaagcttcacaaaagatgtctaagcaacagccaactcagtttataaatccagaaacacctggctatgttggatttgcaaacctccccaatcaagttcaccgaaaatcagtgaaaaaaggttttgagttcacactgatggtggtcggtgaatcaggtctaggaaaatcgactctcataaacagcctattcctaactgatctgtacccagaaagagtcatacctggagcagcagaaaaaattgaaagaactgtccagattgaggcttcaactgttgaaattgaagagcgaggggtcaagctacgcctgacagtggtagatacccctggctatggtgacgctatcaactgcagagattgttttaagacaattatctcctatattgatgagcaatttgagaggtacctgcatgacgagagcggcttgaacaggcggcacatcattgataatagggtgcattgttgcttttactttatttcaccttttggacatggacttaagcccttagatgtggcgtttatgaaggcaatacacaacaaggtgaatattgtgcctgtcattgcaaaagctgacactctcaccctgaaggaacgggagcggctgaagaaaaggattctggatgaaattgaagaacataacatcaaaatctatcacttacctgatgcagaatcagatgaagatgaagattttaaagagcagactagacttctcaaggctagcatcccattctctgtggttggatccaatcagttgattgaagccaaaggaaagaaggtcagaggccgcctctacccctggggtgttgtggaagtggagaacccagagcacaatgactttctgaagctgagaaccatgctcatcacccacatgcaggatctccaggaggtgacccaggaccttcattatgaaaacttccgttctgagagactcaagagaggcggcaggaaagtggagaatgaggacatgaataaagaccagatcttgctggaaaaagaagctgagctccgccgcatgcaagagatgattgcaaggatgcaggcgcagatgcagatgcagatgcagggcggggatggcgatggcggggctctcgggcaccacgtgtaaggtgatgtgcacatatcaagaagtcagagaaaacactttcctggataaaaaagaaaacattccagatgcatgatccagctgtgtgttttcaatccttgggagggtgccatccacattttaacagtacctgtgcctgagaatttaatttttaaaagactttgatgtgtttttgtatgaagtacttttaacgtatgtatttcattgctgtgtcacactctgtgttttgtgaggtgaatgtcttccttttctttctccctaaccactaatgttagaattgatttccaagaatcggcatgtatacttaatactgaatttctttgatttaactgacttaacaactgactaaccattgatgagcactcctgatttttatctagaacattcagatttaccataatgttccttagtggtagaggtgtgtgcctagtgatgtagaaagatacactgacttggtgcaaggccatctgcttaccacatcacaccacttggagatctttgcttccttgcttttatgtttgtacacaacacctaaaaccagttttgctgctataattctatactgttgattcgtctgcgattttatctgttaaccaaataaaacataatagaatttcctaatgagatatatctttatacttaaacagcttttttagaggtgagttttaaagaagtctcttaattctgatgctaggttgtttttaaaaccactatgcaaagaactcaccacaagccaccttttgtagtgttctccactaatactggttatcctgtgctacagagaaaatcaaagcagtcataagctccagttttcgtattgcaaataagactcttacctacaaaatgagattcagtgaactaatttggtttttactcaaccaaattaaaaatttttttaaggaaaattagcagttggtctattcagaatcaaacctttttatattttatactgcactttagtgtattttctgtcactgtaggtatagaagatctgcctcccctgtggaaattggggtctgttggtgggcttgcccctgaagcctggcttgggttgaaaagtgttcccgccctaaggccttggtgccctgaacctctgatgcctaccgggttctcctgatttgagtttcctttaaatactccctttttgagtaattttctgatgggaggaaagtagcagtcatcatctttttgtgtgcaggctgtctcatttatttttagccattgtcgtttcattcattttgtgtaatataaaccgtgtgtcatgtcaaagtgaaagacatttcaaatctgtagcataggctagtgggcaggtccgcacagtcgaagccacacctggtctgttttctgtgcactgtagccttagtgtcacctttcttcttgtgtctccttatggtacactccagcggttgccttttttatcatttctactgaagttgggaaattcaaccccagaaattgacagatgaaaggagacaatggttgtgtagggagatggagaaaatgcttaatctgaggatgagacagggttttttcatttttgtgggggctagaaaaaacataaaatgaggcagttaaataataatagttaatgaaggtgtgctacagaaaataatctggtgttcttgctaactttgcccttcactgttgcttaattgtgaacagccaaaagctatatgttatggcttattgtgtgaaggtaactaagaagtggtgttccatgacttcagagtacatccatgcggagtccattatttgagtttgacatttaataactttgctggaaaatctgtaaaaaagaaaaacaagtttgctagtgactaagccccgcatatgtgagtgaaagtacttcaggcacgctgcctcctggtaacagctatgcagggagggaggacccacactgctacacttctgatcccctttggttttactacccaaatctaaatagatacttttgataatagataactgctcttttactaagacatagtctctacctatagaaatgtattttgggtacacgcattttcctcagctaaaacgtcgcccagtgaacccgtcttcatgctcatagccgtttc

SEQ ID NO: 430310 - DNA, 837 bp, Homo sapiens
acctcagatcgtcgatgcgcttcacgcgcttctcgaccggctgcaggcgctgataggcacccgcttcgtcgaccacacctggtctgttttctgtgcactgtagccttagtgtcacctttcttcttgtgtctccttatggtacactccagcggttgccttttttatcatttctactgaagttgggaaattcaaccccagaaattgacagatgaaaggagacaatggttgtgtagggagatggagaaaatgcttaatctgaggatgagacagggttttttcatttttgtgggggctagaaaaaacataaaatgaggcagttaaataataatagttaatgaaggtgtgctacagaaaataatctggtgttcttgctaactttgcccttcactgttgcttaattgtgaacagccaaaagctatatgttatggcttattgtgtgaaggtaactaagaagtggtgttccatgacttcagagtacatccatgcggagtccattatttgagtttgacatttaataactttgctggaaaatctgtaaaaaagaaaaacaagtttgctagtgactaagccccgcatatgtgagtgaaagtacttcaggcacgctgcctcctggtaacagctatgcagggagggaggacccacactgctacacttctgatcccctttggttttactacccaaatctaaatagatacttttgataatagataactgctcttttactaagacatagtctctacctatagaaatgtattttgaaaacacttattttacacagcaattttgtatccatttaaactaaccttttatcaataaagcactattgtttagatatta

SEQ ID NO: 430311 - DNA, 827 bp, Homo sapiens
gcggccgctccaacatcagaatggtaacactaaggctacagtgcacagaaaacagaccaggtgtggcttcgactgtgcggacctgcccactagccttagtgtcacctttcttcttgtgtctccttatggtacactccagcggttgccttttttatcatttctactgaagttgggaaattcaaccccagaaattgacagatgaaaggagacaatggttgtgtagggagatggagaaaatgcttaatctgaggatgagacagggttttttcatttttgtgggggctagaaaaaacataaaatgaggcagttaaataataatagttaatgaaggtgtgctacagaaaataatctggtgttcttgctaactttgcccttcactgttgcttaattgtgaacagccaaaagctatatgttatggcttattgtgtgaaggtaactaagaagtggtgttccatgacttcagagtacatccatgcggagtccattatttgagtttgacatttaataactttgctggaaaatctgtaaaaaagaaaaacaagtttgctagtgactaagccccgcatatgtgagtgaaagtacttcaggcacgctgcctcctggtaacagctatgcagggagggaggacccacactgctacacttctgatcccctttggttttactacccaaatctaaatagatacttttgataatagataactgctcttttactaagacatagtctctacctatagaaatgtattttgaaaacacttattttacacagcaattttgtatccatttaaactaaccttttatcaataaagcactattgtttagatatta

SEQ ID NO: 430312 - DNA, 2381 bp, Homo sapiens
  misc_feature (8)..(8): n is a, c, g, or t
cgcgacgntgggcgggtccgcggcgcggtcggtcggcgcctattctcgggctgtttggcggacgaagcttcacaaaagatgtctaagcaacagccaactcagtttataaatccagaaacacctggctatgttggatttgcaaacctccccaatcaagttcaccgaaaatcagtgaaaaaaggttttgagttcacactgatggtggtcggtgaatcaggtctaggaaaatcgactctcataaacagcctattcctaactgatctgtacccagaaagagtcatacctggagcagcagaaaaaattgaaagaactgtccagattgaggcttcaactgttgaaattgaagagcgaggggtcaagctacgcctgacagtggtagatacccctggctatggtgacgctatcaactgcagagattgttttaagacaattatctcctatattgatgagcaatttgagaggtacctgcatgacgagagcggcttgaacaggcggcacatcattgataatagggtgcattgttgcttttactttatttcaccttttggacatggacttaagcccttagatgtggcgtttatgaaggcaatacacaacaaggtgaatattgtgcctgtcattgcaaaagctgacactctcaccctgaaggaacgggagcggctgaagaaaaggattctggatgaaattgaagaacataacatcaaaatctatcacttacctgatgcagaatcagatgaagatgaagattttaaagagcagactagacttctcaaggctagcatcccattctctgtggttggatccaatcagttgattgaagccaaaggaaagaaggtcagaggccgcctctacccctggggtgttgtggaagtggagaacccagagcacaatgactttctgaagctgagaaccatgctcatcacccacatgcaggatctccaggaggtgacccaggaccttcattatgaaaacttccgttctgagagactcaagagaggcggcaggaaagtggagaatgaggacatgaataaagaccagatcttgctggaaaaagaagctgagctccgccgcatgcaagagatgattgcaaggatgcaggcgcagatgcagatgcagatgcagggcggggatggcgatggcggggctctcgggcaccacgtgtaaggtgatgtgcacatatcaagaagtcagagaaaacactttcctggataaaaaagaaaacattccagatgcatgatccagctgtgtgttttcaatccttgggagggtgccatccacattttaacagtacctgtgcctgagaatttaatttttaaaagactttgatgtgtttttgtatgaagtacttttaacgtatgtatttcattgctgtgtcacactctgtgttttgtgaggtgaatgtcttccttttctttctccctaaccactaatgttagaattgatttccaagaatcggcatgtatacttaatactgaatttctttgatttaactgacttaacaactgactaaccattgatgagcactcctgatttttatctagaacattcagatttaccataatgttccttagtggtagaggtgtgtgcctagtgatgtagaaagatacactgacttggtgcaaggccatctgcttaccacatcacaccacttggagatctttgcttccttgcttttatgtttgtacacaacacctaaaaccagttttgctgctataattctatactgttgattcgtctgcgattttatctgttaaccaaataaaacataatagaatttcctaatgagatatatctttatacttaaacagcttttttagaggtgagttttaaagaagtctcttaattctgatgctaggttgtttttaaaaccactatgcaaagaactcaccacaagccaccttttgtagtgttctccactaatactggttatcctgtgctacagagaaaatcaaagcagtcataagctccagttttcgtattgcaaataagactcttacctacaaaatgagattcagtgaactaatttggtttttactcaaccaaattaaaaatttttttaaggaaaattagcagttggtctattcagaatcaaacctttttatattttatactgcactttagtgtattttctgtcactgtaggtatagaagatctgcctcccctgtggaaattggggtctgttggtgggcttgcccctgaagcctggcttgggttgaaaagtgttcccgccctaaggccttggtgccctgaacctctgatgcctaccgggttctcctgatttgagtttcctttaaatactccctttttgagtaattttctgatgggaggaaagtagcagtcatcatctttttgtgtaaactgattgggatcctctagacgac

SEQ ID NO: 430313 - DNA, 2105 bp, Homo sapiens
  misc_feature (8)..(8): n is a, c, g, or t
cgcgacgntgggcgggtccgcggcgcggtcggtcggcgcctattctcgggctgtttggcggacgaagcttcacaaaagatgtctaagcaacagccaactcagtttataaatccagaaacacctggctatgttggatttgcaaacctccccaatcaagttcaccgaaaatcagtgaaaaaaggttttgagttcacactgatggtggtcggtgaatcaggtctaggaaaatcgactctcataaacagcctattcctaactgatctgtacccagaaagagtcatacctggagcagcagaaaaaattgaaagaactgtccagattgaggcttcaactgttgaaattgaagagcgaggggtcaagctacgcctgacagtggtagatacccctggctatggtgacgctatcaactgcagagattgttttaagacaattatctcctatattgatgagcaatttgagaggtacctgcatgacgagagcggcttgaacaggcggcacatcattgataatagggtgcattgttgcttttactttatttcaccttttggacatggacttaagcccttagatgtggcgtttatgaaggcaatacacaacaaggtgaatattgtgcctgtcattgcaaaagctgacactctcaccctgaaggaacgggagcggctgaagaaaaggattctggatgaaattgaagaacataacatcaaaatctatcacttacctgatgcagaatcagatgaagatgaagattttaaagagcagactagacttctcaaggctagcatcccattctctgtggttggatccaatcagttgattgaagccaaaggaaagaaggtcagaggccgcctctacccctggggtgttgtggaagtggagaacccagagcacaatgactttctgaagctgagaaccatgctcatcacccacatgcaggatctccaggaggtgacccaggaccttcattatgaaaacttccgttctgagagactcaagagaggcggcaggaaagtggagaatgaggacatgaataaagaccagatcttgctggaaaaagaagctgagctccgccgcatgcaagagatgattgcaaggatgcaggcgcagatgcagatgcagatgcagggcggggatggcgatggcggggctctcgggcaccacgtgtaaggtgatgtgcacatatcaagaagtcagagaaaacactttcctggataaaaaagaaaacattccagatgcatgatccagctgtgtgttttcaatccttgggagggtgccatccacattttaacagtacctgtgcctgagaatttaatttttaaaagactttgatgtgtttttgtatgaagtacttttaacgtatgtatttcattgctgtgtcacactctgtgttttgtgaggtgaatgtcttccttttctttctccctaaccactaatgttagaattgatttccaagaatcggcatgtatacttaatactgaatttctttgatttaactgacttaacaactgactaaccattgatgagcactcctgatttttatctagaacattcagatttaccataatgttccttagtggtagaggtgtgtgcctagtgatgtagaaagatacactgacttggtgcaaggccatctgcttaccacatcacaccacttggagatctttgcttccttgcttttatgtttgtacacaacacctaaaaccagttttgctgctataattctatactgttgattcgtctgcgattttatctgttaaccaaataaaacataatagaatttcctaatgagatatatctttatacttaaacagcttttttagaggtgagttttaaagaagtctcttaattctgatgctaggttgtttttaaaaccactatgcaaagaactcaccacaagccaccttttgtagtgttctccactaatactggttatcctgtgctacagagaaaatcaaagcagtcataagctccagttttcgtattgcaaataagactcttacctacaaaatgagattcagtgaactaatttggtttttactcaaccaaattaaaaattttttaattgtctttttctctttttcttaatcaactaggttgtatcgagctac

SEQ ID NO: 430314 - DNA, 1810 bp, Homo sapiens
  misc_feature (8)..(8): n is a, c, g, or t
cgcgacgntgggcgggtccgcggcgcggtcggtcggcgcctattctcgggctgtttggcggacgaagcttcacaaaagatgtctaagcaacagccaactcagtttataaatccagaaacacctggctatgttggatttgcaaacctccccaatcaagttcaccgaaaatcagtgaaaaaaggttttgagttcacactgatggtggtcggtgaatcaggtctaggaaaatcgactctcataaacagcctattcctaactgatctgtacccagaaagagtcatacctggagcagcagaaaaaattgaaagaactgtccagattgaggcttcaactgttgaaattgaagagcgaggggtcaagctacgcctgacagtggtagatacccctggctatggtgacgctatcaactgcagagattgttttaagacaattatctcctatattgatgagcaatttgagaggtacctgcatgacgagagcggcttgaacaggcggcacatcattgataatagggtgcattgttgcttttactttatttcaccttttggacatggacttaagcccttagatgtggcgtttatgaaggcaatacacaacaaggtgaatattgtgcctgtcattgcaaaagctgacactctcaccctgaaggaacgggagcggctgaagaaaaggattctggatgaaattgaagaacataacatcaaaatctatcacttacctgatgcagaatcagatgaagatgaagattttaaagagcagactagacttctcaaggctagcatcccattctctgtggttggatccaatcagttgattgaagccaaaggaaagaaggtcagaggccgcctctacccctggggtgttgtggaagtggagaacccagagcacaatgactttctgaagctgagaaccatgctcatcacccacatgcaggatctccaggaggtgacccaggaccttcattatgaaaacttccgttctgagagactcaagagaggcggcaggaaagtggagaatgaggacatgaataaagaccagatcttgctggaaaaagaagctgagctccgccgcatgcaagagatgattgcaaggatgcaggcgcagatgcagatgcagatgcagggcggggatggcgatggcggggctctcgggcaccacgtgtaaggtgatgtgcacatatcaagaagtcagagtgtgttttgttttcttttttctagaaaacactttcctggataaaaaagaaaacattccagatgcatgatccagctgtgtgttttcaatccttgggagggtgccatccacattttaacagtacctgtgcctgagaatttaatttttaaaagactttgatgtgtttttgtatgaagtacttttaacgtatgtatttcattgctgtgtcacactctgtgttttgtgaggtgaatgtcttccttttctttctccctaaccactaatgttagaattgatttccaagaatcggcatgtatacttaatactgaatttctttgatttaactgacttaacaactgactaaccattgatgagcactcctgatttttatctagaacattcagatttaccataatgttccttagtggtagaggtgtgtgcctagtgatgtagaaagatacactgacttggtgcaaggccatctgcttaccacatcacaccacttggagatctttgcttccttgcttttatgtttgtacacaacacctaaaaccagttttgctgctataattctatactgttgattcgtctgcgattttatctgttaaccaaataaaacataatagaatttcctaatgag

SEQ ID NO: 430315 - DNA, 199 bp, Homo sapiens
tgccttttgctcagtttatgacctttgttaaggagaaaagtagaactgttaataattaacgcagcagacattgcctcactcccacttaagtgtgttttgttttcttttttctagaaaacactttcctggataaaaaagaaaacattccagatgcatgatccagctgtgtgttttcaatccttgggagggtgccatccac

SEQ ID NO: 430316 - DNA, 3252 bp, Homo sapiens
  misc_feature (8)..(8): n is a, c, g, or t
cgcgacgntgggcgggtccgcggcgcggtcggtcggcgcctattctcgggctgtttggcggacgaagcttcacaaaagatgtctaagcaacagccaactcagtttataaatccagaaacacctggctatgttggatttgcaaacctccccaatcaagttcaccgaaaatcagtgaaaaaaggttttgagttcacactgatggtggtcggtgaatcaggtctaggaaaatcgactctcataaacagcctattcctaactgatctgtacccagaaagagtcatacctggagcagcagaaaaaattgaaagaactgtccagattgaggcttcaactgttgaaattgaagagcgaggggtcaagctacgcctgacagtggtagatacccctggctatggtgacgctatcaactgcagagattgttttaagacaattatctcctatattgatgagcaatttgagaggtacctgcatgacgagagcggcttgaacaggcggcacatcattgataatagggtgcattgttgcttttactttatttcaccttttggacatggacttaagcccttagatgtggcgtttatgaaggcaatacacaacaaggtgaatattgtgcctgtcattgcaaaagctgacactctcaccctgaaggaacgggagcggctgaagaaaaggattctggatgaaattgaagaacataacatcaaaatctatcacttacctgatgcagaatcagatgaagatgaagattttaaagagcagactagacttctcaaggctagcatcccattctctgtggttggatccaatcagttgattgaagccaaaggaaagaaggtcagaggccgcctctacccctggggtgttgtggaagtggagaacccagagcacaatgactttctgaagctgagaaccatgctcatcacccacatgcaggatctccaggaggtgacccaggaccttcattatgaaaacttccgttctgagagactcaagagaggcggcaggaaagtggagaatgaggacatgaataaagaccagatcttgctggaaaaagaagctgagctccgccgcatgcaagagatgattgcaaggatgcaggcgcagatgcagatgcagatgcagggcggggatggcgatggcggggctctcgggcaccacgtgtaaggtgatgtgcacatatcaagaagtcagagaaaacactttcctggataaaaaagaaaacattccagatgcatgatccagctgtgtgttttcaatccttgggagggtgccatccacattttaacagtacctgtgcctgagaatttaatttttaaaagactttgatgtgtttttgtatgaagtacttttaacgtatgtatttcattgctgtgtcacactctgtgttttgtgaggtgaatgtcttccttttctttctccctaaccactaatgttagaattgatttccaagaatcggcatgtatacttaatactgaatttctttgatttaactgacttaacaactgactaaccattgatgagcactcctgatttttatctagaacattcagatttaccataatgttccttagtggtagaggtgtgtgcctagtgatgtagaaagatacactgacttggtgcaaggccatctgcttaccacatcacaccacttggagatctttgcttccttgcttttatgtttgtacacaacacctaaaaccagttttgctgctataattctatactgttgattcgtctgcgattttatctgttaaccaaataaaacataatagaatttcctaatgagatatatctttatacttaaacagcttttttagaggtgagttttaaagaagtctcttaattctgatgctaggttgtttttaaaaccactatgcaaagaactcaccacaagccaccttttgtagtgttctccactaatactggttatcctgtgctacagagaaaatcaaagcagtcataagctccagttttcgtattgcaaataagactcttacctacaaaatgagattcagtgaactaatttggtttttactcaaccaaattaaaaatttttttaaggaaaattagcagttggtctattcagaatcaaacctttttatattttatactgcactttagtgtattttctgtcactgtaggtatagaagatctgcctcccctgtggaaattggggtctgttggtgggcttgcccctgaagcctggcttgggttgaaaagtgttcccgccctaaggccttggtgccctgaacctctgatgcctaccgggttctcctgatttgagtttcctttaaatactccctttttgagtaattttctgatgggaggaaagtagcagtcatcatctttttgtgtgcaggctgtctcatttatttttagccattgtcgtttcattcattttgtgtaatataaaccgtgtgtcatgtcaaagtgaaagacatttcaaatctgtagcataggctagtgggcaggtccgcacagtcgaagccacacctggtctgttttctgtgcactgtagccttagtgtcacctttcttcttgtgtctccttatggtacactccagcggttgccttttttatcatttctactgaagttgggaaattcaaccccagaaattgacagatgaaaggagacaatggttgtgtagggagatggagaaaatgcttaatctgaggatgagacagggttttttcatttttgtgggggctagaaaaaacataaaatgaggcagttaaataataatagttaatgaaggtgtgctacagaaaataatctggtgttcttgctaactttgcccttcactgttgcttaattgtgaacagccaaaagctatatgttatggcttattgtgtgaaggtaactaagaagtggtgttccatgacttcagagtacatccatgcggagtccattatttgagtttgacatttaataactttgctggaaaatctgtaaaaaagaaaaacaagtttgctagtgactaagccccgcatatgtgagtgaaagtacttcaggcacgctgcctcctggtaacagctatgcagggagggaggacccacactgctacacttctgatcccctttggttttactacccaaatctaaatagatacttttgataatagataactgctcttttactaagacatagtctctacctatagaaatgtattttgaaaacacttattttacacagcaattttgtatccatttaaactaaccttttatcaataaagcactattgtttagatatta

SEQ ID NO: 430317 - DNA, 3153 bp, Homo sapiens
  misc_feature (8)..(8): n is a, c, g, or t
cgcgacgntgggcgggtccgcggcgcggtcggtcggcgcctattctcgggctgtttggcggacgaagcttcacaaaagatgtctaagcaacagccaactcagtttataaatccagaaacacctggctatgttggatttgcaaacctccccaatcaagttcaccgaaaatcagtgaaaaaaggttttgagttcacactgatggtggtcggtgaatcaggtctaggaaaatcgactctcataaacagcctattcctaactgatctgtacccagaaagagtcatacctggagcagcagaaaaaattgaaagaactgtccagattgaggcttcaactgttgaaattgaagagcgaggggtcaagctacgcctgacagtggtagatacccctggctatggtgacgctatcaactgcagagattgttttaagacaattatctcctatattgatgagcaatttgagaggtacctgcatgacgagagcggcttgaacaggcggcacatcattgataatagggtgcattgttgcttttactttatttcaccttttggacatggacttaagcccttagatgtggcgtttatgaaggcaatacacaacaaggtgaatattgtgcctgtcattgcaaaagctgacactctcaccctgaaggaacgggagcggctgaagaaaaggattctggatgaaattgaagaacataacatcaaaatctatcacttacctgatgcagaatcagatgaagatgaagattttaaagagcagactagacttctcaaggctagcatcccattctctgtggttggatccaatcagttgattgaagccaaaggaaagaaggatctccaggaggtgacccaggaccttcattatgaaaacttccgttctgagagactcaagagaggcggcaggaaagtggagaatgaggacatgaataaagaccagatcttgctggaaaaagaagctgagctccgccgcatgcaagagatgattgcaaggatgcaggcgcagatgcagatgcagatgcagggcggggatggcgatggcggggctctcgggcaccacgtgtaaggtgatgtgcacatatcaagaagtcagagaaaacactttcctggataaaaaagaaaacattccagatgcatgatccagctgtgtgttttcaatccttgggagggtgccatccacattttaacagtacctgtgcctgagaatttaatttttaaaagactttgatgtgtttttgtatgaagtacttttaacgtatgtatttcattgctgtgtcacactctgtgttttgtgaggtgaatgtcttccttttctttctccctaaccactaatgttagaattgatttccaagaatcggcatgtatacttaatactgaatttctttgatttaactgacttaacaactgactaaccattgatgagcactcctgatttttatctagaacattcagatttaccataatgttccttagtggtagaggtgtgtgcctagtgatgtagaaagatacactgacttggtgcaaggccatctgcttaccacatcacaccacttggagatctttgcttccttgcttttatgtttgtacacaacacctaaaaccagttttgctgctataattctatactgttgattcgtctgcgattttatctgttaaccaaataaaacataatagaatttcctaatgagatatatctttatacttaaacagcttttttagaggtgagttttaaagaagtctcttaattctgatgctaggttgtttttaaaaccactatgcaaagaactcaccacaagccaccttttgtagtgttctccactaatactggttatcctgtgctacagagaaaatcaaagcagtcataagctccagttttcgtattgcaaataagactcttacctacaaaatgagattcagtgaactaatttggtttttactcaaccaaattaaaaatttttttaaggaaaattagcagttggtctattcagaatcaaacctttttatattttatactgcactttagtgtattttctgtcactgtaggtatagaagatctgcctcccctgtggaaattggggtctgttggtgggcttgcccctgaagcctggcttgggttgaaaagtgttcccgccctaaggccttggtgccctgaacctctgatgcctaccgggttctcctgatttgagtttcctttaaatactccctttttgagtaattttctgatgggaggaaagtagcagtcatcatctttttgtgtgcaggctgtctcatttatttttagccattgtcgtttcattcattttgtgtaatataaaccgtgtgtcatgtcaaagtgaaagacatttcaaatctgtagcataggctagtgggcaggtccgcacagtcgaagccacacctggtctgttttctgtgcactgtagccttagtgtcacctttcttcttgtgtctccttatggtacactccagcggttgccttttttatcatttctactgaagttgggaaattcaaccccagaaattgacagatgaaaggagacaatggttgtgtagggagatggagaaaatgcttaatctgaggatgagacagggttttttcatttttgtgggggctagaaaaaacataaaatgaggcagttaaataataatagttaatgaaggtgtgctacagaaaataatctggtgttcttgctaactttgcccttcactgttgcttaattgtgaacagccaaaagctatatgttatggcttattgtgtgaaggtaactaagaagtggtgttccatgacttcagagtacatccatgcggagtccattatttgagtttgacatttaataactttgctggaaaatctgtaaaaaagaaaaacaagtttgctagtgactaagccccgcatatgtgagtgaaagtacttcaggcacgctgcctcctggtaacagctatgcagggagggaggacccacactgctacacttctgatcccctttggttttactacccaaatctaaatagatacttttgataatagataactgctcttttactaagacatagtctctacctatagaaatgtattttgaaaacacttattttacacagcaattttgtatccatttaaactaaccttttatcaataaagcactattgtttagatatta

SEQ ID NO: 430318 - DNA, 2918 bp, Homo sapiens
  misc_feature (8)..(8): n is a, c, g, or t
cgcgacgntgggcgggtccgcggcgcggtcggtcggcgcctattctcgggctgtttggcggacgaagcttcacaaaagatgtctaagcaacagccaactcagtttataaatccagaaacacctggctatgttggatttgcaaacctccccaatcaagttcaccgaaaatcagtgaaaaaaggttttgagttcacactgatggtggtcggtgaatcaggtctaggaaaatcgactctcataaacagcctattcctaactgatctgtacccagaaagagtcatacctggagcagcagaaaaaattgaaagaactgtccagattgaggcttcaactgttgaaattgaagagcgaggggtcaagctacgcctgacagtggtagatacccctggctatggtgacgctatcaactgcagagattgttttaagacaattatctcctatattgatgagcaatttgagaggtacctgcatgacgagagcggcttgaacaggcggcacatcattgataatagggtgcattgttgcttttactttatttcaccttttggacatggacttaagcccttagatgtggcgtttatgaaggcaatacacaacaaggtgaatattgtgcctgtcattgcaaaagctgacactctcaccctgaaggaacgggagcggctgaagaaaaggattctggatgaaattgaagaacataacatcaaaatctatcacttacctgatgcagaatcagatgaagatgaagattttaaagagcagactagacttctcaaggctagcatcccattctctgtggttggatccaatcagttgattgaagccaaaggaaagaaggtcagaggccgcctctacccctggggtgttgtggaagtggagaacccagagcacaatgactttctgaagctgagaaccatgctcatcacccacatgcgaaagtggagaatgaggacatgaataaagaccagatcttgctggaaaaagaagctgagctccgccgcatgcaagagatgattgcaaggatgcaggcgcagatgcagatgcagatgcagggcggggatggcgatggcggggctctcgggcaccacgtgtaaggtgatgtgcacatatcaagaagtcagagaaaacactttcctggataaaaaagaaaacattccagatgcatgatccagctgtgtgttttcaatccttgggagggtgccatccacattttaacagtacctgtgcctgagaatttaatttttaaaagactttgatgtgtttttgtatgaagtacttttaacgtatgtatttcattgctgtgtcacactctgtgttttgtgaggtgaatgtttccttgcttttatgtttgtacacaacacctaaaaccagttttgctgctataattctatactgttgattcgtctgcgattttatctgttaaccaaataaaacataatagaatttcctaatgagatatatctttatacttaaacagcttttttagaggtgagttttaaagaagtctcttaattctgatgctaggttgtttttaaaaccactatgcaaagaactcaccacaagccaccttttgtagtgttctccactaatactggttatcctgtgctacagagaaaatcaaagcagtcataagctccagttttcgtattgcaaataagactcttacctacaaaatgagattcagtgaactaatttggtttttactcaaccaaattaaaaatttttttaaggaaaattagcagttggtctattcagaatcaaacctttttatattttatactgcactttagtgtattttctgtcactgtaggtatagaagatctgcctcccctgtggaaattggggtctgttggtgggcttgcccctgaagcctggcttgggttgaaaagtgttcccgccctaaggccttggtgccctgaacctctgatgcctaccgggttctcctgatttgagtttcctttaaatactccctttttgagtaattttctgatgggaggaaagtagcagtcatcatctttttgtgtgcaggctgtctcatttatttttagccattgtcgtttcattcattttgtgtaatataaaccgtgtgtcatgtcaaagtgaaagacatttcaaatctgtagcataggctagtgggcaggtccgcacagtcgaagccacacctggtctgttttctgtgcactgtagccttagtgtcacctttcttcttgtgtctccttatggtacactccagcggttgccttttttatcatttctactgaagttgggaaattcaaccccagaaattgacagatgaaaggagacaatggttgtgtagggagatggagaaaatgcttaatctgaggatgagacagggttttttcatttttgtgggggctagaaaaaacataaaatgaggcagttaaataataatagttaatgaaggtgtgctacagaaaataatctggtgttcttgctaactttgcccttcactgttgcttaattgtgaacagccaaaagctatatgttatggcttattgtgtgaaggtaactaagaagtggtgttccatgacttcagagtacatccatgcggagtccattatttgagtttgacatttaataactttgctggaaaatctgtaaaaaagaaaaacaagtttgctagtgactaagccccgcatatgtgagtgaaagtacttcaggcacgctgcctcctggtaacagctatgcagggagggaggacccacactgctacacttctgatcccctttggttttactacccaaatctaaatagatacttttgataatagataactgctcttttactaagacatagtctctacctatagaaatgtattttgaaaacacttattttacacagcaattttgtatccatttaaactaaccttttatcaataaagcactattgtttagatatta

SEQ ID NO: 430319 - DNA, 3286 bp, Homo sapiens
  misc_feature (8)..(8): n is a, c, g, or t
cgcgacgntgggcgggtccgcggcgcggtcggtcggcgcctattctcgggctgtttggcggacgaagcttcacaaaagatgtctaagcaacagccaactcagtttataaatccagaaacacctggctatgttggatttgcaaacctccccaatcaagttcaccgaaaatcagtgaaaaaaggttttgagttcacactgatggtggtcggtgaatcaggtctaggaaaatcgactctcataaacagcctattcctaactgatctgtacccagaaagagtcatacctggagcagcagaaaaaattgaaagaactgtccagattgaggcttcaactgttgaaattgaagagcgaggggtcaagctacgcctgacagtggtagatacccctggctatggtgacgctatcaactgcagagattgttttaagacaattatctcctatattgatgagcaatttgagaggtacctgcatgacgagagcggcttgaacaggcggcacatcattgataatagggtgcattgttgcttttactttatttcaccttttggacatggacttaagcccttagatgtggcgtttatgaaggcaatacacaacaaggtgaatattgtgcctgtcattgcaaaagctgacactctcaccctgaaggaacgggagcggctgaagaaaaggattctggatgaaattgaagaacataacatcaaaatctatcacttacctgatgcagaatcagatgaagatgaagattttaaagagcagactagacttctcaaggctagcatcccattctctgtggttggatccaatcagttgattgaagccaaaggaaagaaggtcagaggccgcctctacccctggggtgttgtggaagtggagaacccagagcacaatgactttctgaagctgagaaccatgctcatcacccacatgcaggatctccaggaggtgacccaggaccttcattatgaaaacttccgttctgagagactcaagagaggcggcaggaaagtggagaatgaggacatgaataaagaccagatcttgctggaaaaagaagctgagctccgccgcatgcaagagatgattgcaaggatgcaggcgcagatgcagatgcagatgcagggcggggatggcgatggcggggctctcgggcaccacgtgtaaggtgatgtgcacatatcaagaagtcagagaaaacactttcctggataaaaaagaaaacattccagatgcatgatccagctgtgtgttttcaatccttgggagggtgccatccacattttaacagtacctgtgcctgagaatttaatttttaaaagactttgatgtgtttttgtatgaagtacttttaacgtatgtatttcattgctgtgtcacactctgtgttttgtgaggtgaatgtcttccttttctttctccctaaccactaatgttagaattgatttccaagaatcggcatgtatacttaatactgaatttctttgatttaactgacttaacaactgactaaccattgatgagcactcctgatttttatctagaacattcagatttaccataatgttccttagtggtagaggtgtgtgcctagtgatgtagaaagatacactgacttggtgcaaggccatctgcttaccacatcacaccacttggagatctttgcttccttgcttttatgtttgtacacaacacctaaaaccagttttgctgctataattctatactgttgattcgtctgcgattttatctgttaaccaaataaaacataatagaatttcctaatgagatatatctttatacttaaacagcttttttagaggtgagttttaaagaagtctcttaattctgatgctaggttgtttttaaaaccactatgcaaagaactcaccacaagccaccttttgtagtgttctccactaatactggttatcctgtgctacagagaaaatcaaagcagtcataagctccagttttcgtattgcaaataagactcttacctacaaaatgagattcagtgaactaatttggtttttactcaaccaaattaaaaatttttttaaggaaaattagcagttggtctattcagaatcaaacctttttatattttatactgcactttagtgtattttctgtcactgtaggtatagaagatctgcctcccctgtggaaattggggtctgttggtgggcttgcccctgaagcctggcttgggttgaaaagtgttcccgccctaaggccttggtgccctgaacctctgatgcctaccgggttctcctgatttgagtttcctttaaatactccctttttgagtaattttctgatgggaggaaagtagcagtcatcatctttttgtgtgcaggctgtctcatttatttttagccattgtcgtttcattcattttgtgtaatataaaccgtgtgtcatgtcaaagtgaaagacatttcaaatctgtagcataggctagtgggcaggtccgcacagtcgaagccacacctggtctgttttctgtgcactgtagccttagtgtcacctttcttcttgtgtctccttatggtacactccagcggttgccttttttatcatttctactgaagttgggaaattcaaccccagaaattgacagatgaaaggagacaatggttgtgtagggagatggagaaaatgcttaatctgaggatgagacagggttttttcatttttgtgggggctagaaaaaacataaaatgaggcagttaaataataatagttaatgaaggtgtgctacagaaaataatctggtgttcttgctaactttgcccttcactgttgcttaattgtgaacagccaaaagctatatgttatggcttattgtgtgaaggtaactaagaagtggtgttccatgacttcagagtacatccatgcggagtccattatttgagtttgacatttaataactttgctggaaaatctgtaaaaaagaaaaacaagtttgctagtgactaagccccgcatatgtgagtgaaagtacttcaggcacgctgcctcctggtaacagctatgcagggagggaggacccacactgctacacttctgatcccctttggttttactacccaaatctaaatagatacttttgataatagataactgctcttttactaagacatagtctctacctatagaaatgtattttgaaaacacttattttacacagcaattttgtatccatttaaactaaccttttatcaataaagcactattgtttagatattactgtttgtggaggtagcactactgtttgtggagg

SEQ ID NO: 430320 - DNA, 1249 bp, Homo sapiens
  misc_feature (8)..(8): n is a, c, g, or t
cgcgacgntgggcgggtccgcggcgcggtcggtcggcgcctattctcgggctgtttggcggacgaagcttcacaaaagatgtctaagcaacagccaactcagtttataaatccagaaacacctggctatgttggatttgcaaacctccccaatcaagttcaccgaaaatcagtgaaaaaaggttttgagttcacactgatggtggtcggtgaatcaggtctaggaaaatcgactctcataaacagcctattcctatgcctaccgggttctcctgatttgagtttcctttaaatactccctttttgagtaattttctgatgggaggaaagtagcagtcatcatctttttgtgtgcaggctgtctcatttatttttagccattgtcgtttcattcattttgtgtaatataaaccgtgtgtcatgtcaaagtgaaagacatttcaaatctgtagcataggctagtgggcaggtccgcacagtcgaagccacacctggtctgttttctgtgcactgtagccttagtgtcacctttcttcttgtgtctccttatggtacactccagcggttgccttttttatcatttctactgaagttgggaaattcaaccccagaaattgacagatgaaaggagacaatggttgtgtagggagatggagaaaatgcttaatctgaggatgagacagggttttttcatttttgtgggggctagaaaaaacataaaatgaggcagttaaataataatagttaatgaaggtgtgctacagaaaataatctggtgttcttgctaactttgcccttcactgttgcttaattgtgaacagccaaaagctatatgttatggcttattgtgtgaaggtaactaagaagtggtgttccatgacttcagagtacatccatgcggagtccattatttgagtttgacatttaataactttgctggaaaatctgtaaaaaagaaaaacaagtttgctagtgactaagccccgcatatgtgagtgaaagtacttcaggcacgctgcctcctggtaacagctatgcagggagggaggacccacactgctacacttctgatcccctttggttttactacccaaatctaaatagatacttttgataatagataactgctcttttactaagacatagtctctacctatagaaatgtattttgaaaacacttattttacacagcaattttgtatccatttaaactaaccttttatcaataaagcactattgtttagatatta

SEQ ID NO: 430321 - DNA, 3192 bp, Homo sapiens
  misc_feature (8)..(8): n is a, c, g, or t
cgcgacgntgggcgggtccgcggcgcggtcggtcggcgcctattctcgggctgtttggcggacgaagcttcacaaaagatgtctaagcaacagccaactcagtttataaatccagaaacacctggctatgttggatttgcaaacctccccaatcaagttcaccgaaaatcagtgaaaaaaggttttgagttcacactgatggtggtcggtgaatcaggtctaggaaaatcgactctcataaacagcctattcctaactgatctgtacccagaaagagtcatacctggagcagcagaaaaaattgaaagaactgtccagattgaggcttcaactgttgaaattgaagagcgaggggtcaagctacgcctgacagtggtagatacccctggctatggtgacgctatcaactgcagagattgttttaagacaattatctcctatattgatgagcaatttgagaggtacctgcatgacgagagcggcttgaacaggcggcacatcattgataatagggtgcattgttgcttttactttatttcaccttttggacatggacttaagcccttagatgtggcgtttatgaaggcaatacacaacaaggtgaatattgtgcctgtcattgcaaaagctgacactctcaccctgaaggaacgggagcggctgaagaaaaggattctggatgaaattgaagaacataacatcaaaatctatcacttacctgatgcagaatcagatgaagatgaagattttaaagagcagactagacttctcaaggctagcatcccattctctgtggttggatccaatcagttgattgaagccaaaggaaagaaggtcagaggccgcctctacccctggggtgttgtggaagtggagaacccagagcacaatgactttctgaagctgagaaccatgctcatcacccacatgcaggatctccaggaggtgacccaggaccttcattatgaaaacttccgttctgagagactcaagagaggcggcaggaaagtggagaatgaggacatgaataaagaccagatcttgctggaaaaagaagctgagctccgccgcatgcaagagatgattgcaaggatgcaggcgcagatgcagatgcagatgcagggcggggatggcgatggcggggctctcgggcaccacgtgtaaggtgatgtgcacatatcaagaagtcagagaaaacactttcctggataaaaaagaaaacattccagatgcatgatccagctgtgtgttttcaatccttgggagggtgccatccacattttaacagtacctgtgcctgagaatttaatttttaaaagactttgatgtgtttttgtatgaagtacttttaacgtatgtatttcattgctgtgtcacactctgtgttttgtgaggtgaatgtcttccttttctttctccctaaccactaatgttagaattgatttccaagaatcggcatgtatacttaatactgaatttctttgatttaactgacttaacaactgactaaccattgatgagcactcctgatttttatctagaacattcagatttaccataatgttccttagtggtagaggtgtgtgcctagtgatgtagaaagatacactgacttggtgcaaggccatctgcttaccacatcacaccacttggagatctttgcttccttgcttttatgtttgtacacaacacctaaaaccagttttgctgctataattctatactgttgattcgtctgcgattttatctgttaaccaaataaaacataatagaatttcctaatgagatatatctttatacttaaacagcttttttagaggtgagttttaaagaagtctcttaattctgatgctaggttgtttttaaaaccactatgcaaagaactcaccacaagccaccttttgtagtgttctccactaatactggttatcctgtgctacagagaaaatcaaagcagtcataagctccagttttcgtattgcaaataagactcttacctacaaaatgagattcagtgaactaatttggtttttactcaaccaaattaaaaatttttttaaggaaaattagcagttggtctattcagaatcaaacctttttatattttatactgcactttagtgtattttctgtcactgtaggtatagaagatctgcctcccctgtggaaattggggtctgttggtgggcttgcccctgaagcctggcttgggttgaaaagtgttcccgccctaaggccttggtgccctgaacctctgatgcctaccgggttctcctgatttgagtttcctttaaatactccctttttgagtaattttctgatgggaggaaagtagcagtcatcatctttttgtgtgcaggctgtctcatttatttttagccattgtcgtttcattcattttgtgtaatataaaccgtgtgtcatgtcaaagtgaaagacatttcaaatctgtagcataggctagtgggcaggtccgcacagtcgaagccacacctggtctgttttctgtgcactgtagccttagtgtcacctttcttcttgtgtctccttatggtacactccagcggttgccttttttatcatttctactgaagttgggaaattcaaccccagaaattgacagatgaaaggagacaatggttgtgtagggagatggagaaaatgcttaatctgaggatgagacagggttttttcatttttgtgggggctagaaaaaacataaaatgaggcagttaaataataatagttaatgaaggtgtgctacagaaaataatctggtgttcttgctaactttgcccttcactgttgcttaattgtgaacagccaaaagctatatgttatggcttattgtgtgaaggtaactaagaagtggtgttccatgacttcagagtacatccatgcggagtccattatttgagtttgacatttaataactttgctggaaaatctgtaaaaaagaaaaacaagtttgctagtgactaagccccgcatatgtgagtgaaagtacttcaggcacgctgcctcctgactacccaaatctaaatagatacttttgataatagataactgctcttttactaagacatagtctctacctatagaaatgtattttgaaaacacttattttacacagcaattttgtatccatttaaactaaccttttatcaataaagcactattgtttagatatta

SEQ ID NO: 430322 - DNA, 2483 bp, Homo sapiens
  misc_feature (8)..(8): n is a, c, g, or t
cgcgacgntgggcgggtccgcggcgcggtcggtcggcgcctattctcgggctgtttggcggacgaagcttcacaaaagatgtctaagcaacagccaactcagtttataaatccagaaacacctggctatgttggatttgcaaacctccccaatcaagttcaccgaaaatcagtgaaaaaaggttttgagttcacactgatggtggtcggtgaatcaggtctaggaaaatcgactctcataaacagcctattcctaactgatctgtacccagaaagagtcatacctggagcagcagaaaaaattgaaagaactgtccagattgaggcttcaactgttgaaattgaagagcgaggggtcaagctacgcctgacagtggtagatacccctggctatggtgacgctatcaactgcagagattgttttaagacaattatctcctatattgatgagcaatttgagaggtacctgcatgacgagagcggcttgaacaggcggcacatcattgataatagggtgcattgttgcttttactttatttcaccttttggacatggacttaagcccttagatgtggcgtttatgaaggcaatacacaacaaggtgaatattgtgcctgtcattgcaaaagctgacactctcaccctgaaggaacgggagcggctgaagaaaaggattctggatgaaattgaagaacataacatcaaaatctatcacttacctgatgcagaatcagatgaagatgaagattttaaagagcagactagacttctcaaggctagcatcccattctctgtggttggatccaatcagttgattgaagccaaaggaaagaaggtcagaggccgcctctacccctggggtgttgtggaagtggagaacccagagcacaatgactttctgaagctgagaaccatgctcatcacccacatgcaggatctccaggaggtgacccaggaccttcattatgaaaacttccgttctgagagactcaagagaggcggcaggaaagtggagaatgaggacatgaataaagaccagatcttgctggaaaaagaagctgagctccgccgcatgcaagagatgattgcaaggatgcaggcgcagatgcagatgcagatgcagggcggggatggcgatggcggggctctcgggcaccacgtgtaaggtgatgtgcacatatcaagaagtcagagaaaacactttcctggataaaaaagaaaacattccagatgcatgatccagctgtgtgttttcaatccttgggagggtgccatccacattttaacagtacctgtgcctgagaatttaatttttaaaagactttgatgtgtttttgtatgaagtacttttaacgtatgtatttcattgctgtgtcacactctgtgttttgtgaggtgaatgtcttccttttctttctccctaaccactaatgttagaattgatttccaagaatcggcatgtatacttaatactgaatttctttgatttaactgacttaacaactgactaaccattgatgagcactcctgatttttatctagaacattcagatttaccataatgttccttagtggtagaggtgtgtgcctagtgatgtagaaagatacactgacttggtgcaaggccatctgcttaccacatcacaccacttggagatctttgcttccttgcttttatgtttgtacacaacacctaaaaccagttttgctgctataattctatactgttgattcgtctgcgattttatctgttaaccaaataaaacataatagaatttcctaatgagatatatctttatacttaaacagcttttttagaggtgagttttaaagaagtctcttaattctgatgctaggttgtttttaaaaccactatgcaaagaactcaccacaagccaccttttgtagtgttctccactaatactggttatcctgtgctacagagaaaatcaaagcagtcataagctccagttttcgtattgcaaataagactcttacctacaaaatgagattcagtgaactaatttggtttttactcaaccaaattaaaaatttttttaaggaaaattagcagttggtctattcagaatcaaacctttttatattttatactgcactttagtgtattttctgtcactgtaggtatagaagatctgcctcccctgtggaaattggggtctgttggtgggcttgcccctgaagcctggcttgggttgaaaagtgttcccgccctaaggccttggtgccctgaacctctgagtaacagctatgcagggagggaggacccacactgctacacttctgatcccctttggttttactacccaaatctaaatagatacttttgataatagataactgctcttttactaagacatagtctctacctatagaaatgtattttgaaaacacttattttacacagcaattttgtatccatttaaactaaccttttatcaataaagcactattgtttagatatta

SEQ ID NO: 430323 - DNA, 2013 bp, Homo sapiens
  misc_feature (8)..(8): n is a, c, g, or t
cgcgacgntgggcgggtccgcggcgcggtcggtcggcgcctattctcgggctgtttggcggacgaagcttcacaaaagatgtctaagcaacagccaactcagtttataaatccagaaacacctggctatgttggatttgcaaacctccccaatcaagttcaccgaaaatcagtgaaaaaaggttttgagttcacactgatggtggtcggtgaatcaggtctaggaaaatcgactctcataaacagcctattcctaactgatctgtacccagaaagagtcatacctggagcagcagaaaaaattgaaagaactgtccagattgaggcttcaactgttgaaattgaagagcgaggggtcaagctacgcctgacagtggtagatacccctggctatggtgacgctatcaactgcagagattgttttaagacaattatctcctatattgatgagcaatttgagaggtacctgcatgacgagagcggcttgaacaggcggcacatcattgataatagggtgcattgttgcttttactttatttcaccttttggacatggacttaagcccttagatgtggcgtttatgaaggcaatacacaacaaggtgaatattgtgcctgtcattgcaaaagctgacactctcaccctgaaggaacgggagcggctgaagaaaaggattctggatgaaattgaagaacataacatcaaaatctatcacttacctgatgcagaatcagatgaagatgaagattttaaagagcagactagacttctcaaggctagcatcccattctctgtggttggatccaatcagttgattgaagccaaaggaaagaaggtcagaggccgcctctacccctggggtgttgtggaagtggagaacccagagcacaatgactttctgaagctgagaaccatgctcatcacccacatgcaggatctccaggaggtgacccaggaccttcattatgaaaacttccgttctgagagactcaagagaggcggcaggaaagtggagaatgaggacatgaataaagaccagatcttgctggaaaaagaagctgagctccgccgcatgcaagagatgattgcaaggatgcaggcgcagatgcagatgcagatgcagggcggggatggcgatggcggggctctcgggcaccacgtgtaaggtgatgtgcacatatcaagaagtcagagaaaacactttcctggataaaaaagaaaacattccagatgcatgatccagctgtgtgttttcaatccttgggagggtgccatccacattttaacagtacctgtgcctgagaatttaatttttaaaagactttgatgtgtttttgtatgaagtacttttaacgtatgtatttcattgctgtgtcacactctgtgttttgtgaggtgaatgtcttccttttctttctccctaaccactaatgttagaattgatttccaagaatcggcatgtatacttaatactgaatttctttgatttaactgacttaacaactgactaaccattgatgagcactcctgatttttatctagaacattcagatttaccataatgttccttagtggtagaggtgtgtgcctagtgatgtagaaagatacactgacttggtgcaaggccatctgcttaccacatcacaccacttggagatctttgcttccttgcttttatgtttgtacacaacacctaaaaccagttttgctgctataattctatactgttgattcgtctgcgattttatctgttaaccaaataaaacataatagaatttcctaatgagatatatctttatacttaaacagcttttttagaggtgagttttaaagaagtctcttaattctgatgctaggttgtttttaaaaccactatgcaaagaactcaccacaagccaccttttgtagtgttctccactaatactggttatcctgtgctacagagaaaatcaaagcagtcataagctccagttttcgtatgcatccgcctgacaggggtcctctaggcgcctcg

SEQ ID NO: 430324 - DNA, 1525 bp, Homo sapiens
  misc_feature (8)..(8): n is a, c, g, or t
cgcgacgntgggcgggtccgcggcgcggtcggtcggcgcctattctcgggctgtttggcggacgaagcttcacaaaagatgtctaagcaacagccaactcagtttataaatccagaaacacctggctatgttggatttgcaaacctccccaatcaagttcaccgaaaatcagtgaaaaaaggttttgagttcacactgatggtggtcggtgaatcaggtctaggaaaatcgactctcataaacagcctattcctaactgatctgtacccagaaagagtcatacctggagcagcagaaaaaattgaaagaactgtccagattgaggcttcaactgttgaaattgaagagcgaggggtcaagctacgcctgacagtggtagatacccctggctatggtgacgctatcaactgcagagattgttttaagacaattatctcctatattgatgagcaatttgagaggtacctgcatgacgagagcggcttgaacaggcggcacatcattgataatagggtgcattgttgcttttactttatttcaccttttggacatggacttaagcccttagatgtggcgtttatgaaggcaatacacaacaaggtgaatattgtgcctgtcattgcaaaagctgacactctcaccctgaaggaacgggagcggctgaagaaaaggattctggatgaaattgaagaacataacatcaaaatctatcacttacctgatgcagaatcagatgaagatgaagattttaaagagcagactagacttctcaaggctagcatcccattctctgtggttggatccaatcagttgattgaagccaaaggaaagaaggtcagaggccgcctctacccctggggtgttgtggaagtggagaacccagagcacaatgactttctgaagctgagaaccatgctcatcacccacatgcaggatctccaggaggtgacccaggaccttcattatgaaaacttccgttctgagagactcaagagaggcggcaggaaagtggagaatgaggacatgaataaagaccagatcttgctggaaaaagaagctgagctccgccgcatgcaagagatgattgcaaggatgcaggcgcagatgcagatgcagatgcagggcggggatggcgatggcggggctctcgggcaccacgtgtaaggtgatgtgcacatatcaagaagtcagagaaaacactttcctggataaaaaagaaaacattccagatgcatgatccagctgtgtgttttcaatccttgggagggtgccatccacattttaacagtacctgtgcctgagaatttaatttttaaaagactttgatgtgtttttgtatgaagtacttttaacgtatgtatttcattgctgtgtcacactctgtgttttgtgaggtgaatgtttccttgcttttatgtttgtacacaacacctaaaaccagttttgctgctataattctatactgttgattcgtctgcgattttatctgttaaccaaataaaacataatagaatttcctaatgag

SEQ ID NO: 430325 - DNA, 436 bp, Homo sapiens
aaaaaaaaaaagtaaaacttaaaaagaaaaccttttaaaaatgaaaagtagggccaggcatggtggctcgtgcctgtcctcccaaagtgctggaattacaggtgtgagccaccgtgcccggccaagtatctcttttctacagccttattaaactaactacaaacatttattttccaatttagttttactttcagtgcatatcaaagttgttgtactcttcagaccaacaaattaacttgagggcaacataaggagaccttgtctctaaaaaaaaattaaaaaatcagacatgtggcacatgcctatagtcccagcttctctggaggctcaggctggaggattgcttgaccccaggaacttgaggttgcagtgagctatgatggcatcactgcactccagcctgggtgacagagcaagatcctgtctataaaccaca

SEQ ID NO: 430326 - DNA, 4483 bp, Homo sapiens
tcagattggttgatgccacaccagtcaaggtagagtctgatagggcagtatcttaataaccctacccatgacttaactgttggatttgaaaggaaaacgtaggatttgctcttgtccccttacccgccacaaaattttgataatttgtttaaaagggagaggcagaggaaaagactagaagcataaatagctgctttaggtttgccagaggcacatagcttaacattagttcttaatatcgatgttatttttactaatgtaattaatcaacagagcaccaagattctttcatggtgaaaagggtgggcttctgttttggtatcttaaaatgtttcttttaaaatatacatcacctgtgtgagaaccaggaccacctgggagagtgatgaatcattggctccactcaaaagcattgctttactgagttttaaatttcacactgttttgccgctcaagaaaggtcttaaagtagttaaaggatgccagcaatagtgcgaatagaattttcggttgtctgcataataaaaacacccattgcagcatgattggtatgttgctcttgcattattgggaatggtaaatcagttatgggctagaaactatggaatggccgtcctcatatgtgatgggattgctgattcagacttccctattttccatacaattttgttatgtgcagagttctaaagccattttataatactgcagtatccccccccccccacctttttttttttgagacggactgtctgttgcccaggctggagtacagtggcgcaatcttggctcactgcaacctccacctccctggttcaagcaattcccctgcctcagcctcccatgtagctgggattacgggcgcacaccaccacacctggctaatttgtattcttagtagagacggggtttcaccatgttgaccagactggtctcgaactcctgacctcaggcaatctgcccgcctcagcctcccaaagtgctggaattacaggtgtgagccaccgtgcccggccaagtatctcttttctacagccttattaaactaactacaaacatttattttccaatttagttttactttcagtgcatatcaaagttgttgtactcttcagaccaacaaattaacttgagggcaaattacatagctttccatgtacccttttttcctcaggtgctaatcaaaggctctgaaaatggatactgctttagtgatgtctgctttattcttaaaatgcttatttcttttgctagatgtaaagatttggtgttaacaaaagtggttttaatatgtaaatatgaatgaatgcctttagtttaccctgtttgtctattattaatctgttttcatttatccttcatagaggaggatcctttcatgatcttgaatacatttcattagatattgttgcattttaagaatgaaaatacaactgttttctgtcttagattaatcctgctgctatgagaaactgaaaatcaagaatgtgatgcactttttacattactatataccatacatataccataggttgctttgatacctttcctgtagcacagccactaacaagagtgaatgaattataaaattctttttgggagggaatcaatacaagtaactaattcttagctgatattgtcctatgaaggacaataacttaggaatataagaattctgttaatagtacactttttggccttaaatgtcttctactactgaaaatagtttaaatcttagctttgtttctattattccctctctctgcctcagaaagaggaattgggaagaatggcttaaaggacgtggtgtcattgatttgttgctgatcttttagaaaacatttgtctatgtaagctggggacttattttttgtttgtatatagaggggaaatagtgctgccctgaaccaatcagatttagtttaaatcaaatcaatcaaaactccagctgtttctcttgtctttttacttagcaaaggaaaactttagtgaatgctacttgacaagaagaaaagtcatttctcaagcacatacccaaacttgaaggtgattgaacccaaaataatgggtgggaaacaccaaatgaggtggaggaatgagaaagatgtgtgggccaaagctatctggttatattttgatgttgccaatatcgcaaagccaaaattttaatttgcttatttaatatatttgttggccagagatctatttttatatcaatgtgccttgcatgtatattaaaaaaaaaaaattggaaacgccatgtagtaatgcctgagatagtcgatggttcttaccacctcactaatttttatgcagtatgaaatgctcattctattgcccaactggtgctctctgtttaaagttacagatcttgcgaaactggaactattttataagctggggaagtgatttactttttttgttgtatcttttttgttcttagtctgttagtggctgtcctgtagtgggaaatagtaaaaggattcttcactcccttctcccctcagcaccttcttcaagtaaacatttcttgtgtgctttgaaaaaagtttcagcttgctgtctcttttagtgttttaaagaagtgttatacaaagcattgtttgcaaaatatagggagataatggagtccactttaatttggaattctgtgtgagctatgatccaagttatcagctctttccaactttaaaaattttgttaaaagcaccttgcttagaaaattttaaatatttatgtctgcaacaattgtctcaaaataataaactgtgcaattcttgtcattaaaaaaaaaaaagatctgaattttccctaatgtgacttgttagtttctctctgtatttcctgccagtgtaaatgtgaaagctttgcttgcattacgttttagaaatgcattttgcacactcgaattttgccgaagctccgtgaaaaggttagatctaagtagatgaataaagctatgcacatgttttgaaagtttaatttgtgtgtcattaccaaaagtgaccgatttgtccttactactttgctgttgttagctttaccatctttggaaacttggctcaaagttacatagttctgggctagctcatcagtggaactaggagagaggaaaactggcacctattttaataaagttcaatttaaacgagagcttgacttgtatctattaaagagcttttcttgaaacagggcagttttatcagctttacaaatcattggatgctcttccttagtaatattttggtttatttgatcaaatagaaatggaaagtaattcaaactgaaagacccttttttgtcatatggaacttggtgacgattttttgtcttaaagctggtttaaaggtaggataggcttttacctttattgctttagcataaatttggtttactgaattgactggcttgagattagaattattcagttgtttgtaagatcaaagcactggttgttttaaagataacgtgtatcttttaaaaaattgcccaagctgattagaacaagtttaggagttgggtacatttggttcaagtgctgcaatctgtatgtactaaatagctttactttgtgtatgtgtacttataatgtgtagatgtactactacccaggttttgtcaaatcatcttttttaaagtttttttttttttaattggttcaggacctttgtaggagaggctaatatgtttaagtagaagatattactgatagcattttccccatgctcctacataaaaaataaatatttccattttatagctttttcaatatacagaagagggttacttcttcatcaagtatattgttgcctttgaggacacagcaaaacccttctatatgtatcttcattgatagtggcagttaaaaactaagttatccagttaagacttaaaaggtgacccatattaattgcatggccttaaaaggcagaaatgcaggagtgtagcaagcatcattttagatggctatggttcctcttccgcatctgtcagtagttcacttatgttcagtcttagaacctactggaggagtgaagtaatttctctgtctcgtgcagaggcactaaggagctgagttacctcttaatctgggggaatggataataagtggagtacagttatgttaaaggatgttccccccgctcaaaaaaaagtttcaatgtttgttttgcccagtcaaaaatataggtcttttctacatataagaacagtcaccagaaattttcccttttgctaaatgcttaggtatttgctatagctgtttctgatgtcatggattctgaggaagtgtcatttacgtgatgatcttcctttattgatgtcttcatcatgttcagtgttttaaaaatataaattacaaacactctacaaccatacccagatttacttattttatcagaaaaaaaacttgagaaatttgtagatcaaattgagagacaataagtgtacattgttgaataaaaaattttaaagtttaaaaaaaaaa

SEQ ID NO: 430327 - DNA, 4429 bp, Homo sapiens
tcagattggttgatgccacaccagtcaaggtagagtctgatagggcagtatcttaataaccctacccatgacttaactgttggatttgaaaggaaaacgtaggatttgctcttgtccccttacccgccacaaaattttgataatttgtttaaaagggagaggcagaggaaaagactagaagcataaatagctgctttaggtttgccagaggcacatagcttaacattagttcttaatatcgatgttatttttactaatgtaattaatcaacagagcaccaagattctttcatggtgaaaagggtgggcttctgttttggtatcttaaaatgtttcttttaaaatatacatcacctgtgtgagaaccaggaccacctgggagagtgatgaatcattggctccactcaaaagcattgctttactgagttttaaatttcacactgttttgccgctcaagaaaggtcttaaagtagttaaaggatgccagcaatagtgcgaatagaattttcggttgtctgcataataaaaacacccattgcagcatgattggtatgttgctcttgcattattgggaatggtaaatcagttatgggctagaaactatggaatggccgtcctcatatgtgatgggattgctgattcagacttccctattttccatacaattttgttatgtgcagagttctaaagccattttataatactgcagtatccccccccccccacctttttttttttgagacggactgtctgttgcccaggctggagtacagtggcgcaatcttggctcactgcaacctccacctccctggttcaagcaattcccctgcctcagcctcccatgtagctgggattacgggcgcacaccaccacacctggctaatttgtattcttagtagagacggggtttcaccatgttgaccagactggtctcgaactcctgacctcaggcaatctgcccgcctcagcctcccaaagtgctggaattacaggtgtgagccaccgtgcccggccaagtatctcttttctacagccttattaaactaactacaaacatttattttccaatttagttttactttcagtgcatatcaaagttgttgtactcttcagaccaacaaattaacttgagggcaaattacatagctttccatgtacccttttttcctcaggtgctaatcaaaggctctgaaaatggatactgctttagtgatgtctgctttattcttaaaatgcttatttcttttgctagatgtaaagatttggtgttaacaaaagtggttttaatatgtaaatatgaatgaatgcctttagtttaccctgtttgtctattattaatctgttttcatttatccttcatagaggaggatcctttcatgatcttgaatacatttcattagatattgttgcattttaagaatgaaaatacaactgttttctgtcttagattaatcctgctgctatgagaaactgaaaatcaagaatgtgatgcactttttacattactatataccatacatataccataggttgctttgatacctttcctgtagcacagccactaacaagagtgaatgaattattcctatgaaggacaataacttaggaatataagaattctgttaatagtacactttttggccttaaatgtcttctactactgaaaatagtttaaatcttagctttgtttctattattccctctctctgcctcagaaagaggaattgggaagaatggcttaaaggacgtggtgtcattgatttgttgctgatcttttagaaaacatttgtctatgtaagctggggacttattttttgtttgtatatagaggggaaatagtgctgccctgaaccaatcagatttagtttaaatcaaatcaatcaaaactccagctgtttctcttgtctttttacttagcaaaggaaaactttagtgaatgctacttgacaagaagaaaagtcatttctcaagcacatacccaaacttgaaggtgattgaacccaaaataatgggtgggaaacaccaaatgaggtggaggaatgagaaagatgtgtgggccaaagctatctggttatattttgatgttgccaatatcgcaaagccaaaattttaatttgcttatttaatatatttgttggccagagatctatttttatatcaatgtgccttgcatgtatattaaaaaaaaaaaattggaaacgccatgtagtaatgcctgagatagtcgatggttcttaccacctcactaatttttatgcagtatgaaatgctcattctattgcccaactggtgctctctgtttaaagttacagatcttgcgaaactggaactattttataagctggggaagtgatttactttttttgttgtatcttttttgttcttagtctgttagtggctgtcctgtagtgggaaatagtaaaaggattcttcactcccttctcccctcagcaccttcttcaagtaaacatttcttgtgtgctttgaaaaaagtttcagcttgctgtctcttttagtgttttaaagaagtgttatacaaagcattgtttgcaaaatatagggagataatggagtccactttaatttggaattctgtgtgagctatgatccaagttatcagctctttccaactttaaaaattttgttaaaagcaccttgcttagaaaattttaaatatttatgtctgcaacaattgtctcaaaataataaactgtgcaattcttgtcattaaaaaaaaaaaagatctgaattttccctaatgtgacttgttagtttctctctgtatttcctgccagtgtaaatgtgaaagctttgcttgcattacgttttagaaatgcattttgcacactcgaattttgccgaagctccgtgaaaaggttagatctaagtagatgaataaagctatgcacatgttttgaaagtttaatttgtgtgtcattaccaaaagtgaccgatttgtccttactactttgctgttgttagctttaccatctttggaaacttggctcaaagttacatagttctgggctagctcatcagtggaactaggagagaggaaaactggcacctattttaataaagttcaatttaaacgagagcttgacttgtatctattaaagagcttttcttgaaacagggcagttttatcagctttacaaatcattggatgctcttccttagtaatattttggtttatttgatcaaatagaaatggaaagtaattcaaactgaaagacccttttttgtcatatggaacttggtgacgattttttgtcttaaagctggtttaaaggtaggataggcttttacctttattgctttagcataaatttggtttactgaattgactggcttgagattagaattattcagttgtttgtaagatcaaagcactggttgttttaaagataacgtgtatcttttaaaaaattgcccaagctgattagaacaagtttaggagttgggtacatttggttcaagtgctgcaatctgtatgtactaaatagctttactttgtgtatgtgtacttataatgtgtagatgtactactacccaggttttgtcaaatcatcttttttaaagtttttttttttttaattggttcaggacctttgtaggagaggctaatatgtttaagtagaagatattactgatagcattttccccatgctcctacataaaaaataaatatttccattttatagctttttcaatatacagaagagggttacttcttcatcaagtatattgttgcctttgaggacacagcaaaacccttctatatgtatcttcattgatagtggcagttaaaaactaagttatccagttaagacttaaaaggtgacccatattaattgcatggccttaaaaggcagaaatgcaggagtgtagcaagcatcattttagatggctatggttcctcttccgcatctgtcagtagttcacttatgttcagtcttagaacctactggaggagtgaagtaatttctctgtctcgtgcagaggcactaaggagctgagttacctcttaatctgggggaatggataataagtggagtacagttatgttaaaggatgttccccccgctcaaaaaaaagtttcaatgtttgttttgcccagtcaaaaatataggtcttttctacatataagaacagtcaccagaaattttcccttttgctaaatgcttaggtatttgctatagctgtttctgatgtcatggattctgaggaagtgtcatttacgtgatgatcttcctttattgatgtcttcatcatgttcagtgttttaaaaatataaattacaaacactctacaaccatacccagatttacttattttatcagaaaaaaaacttgagaaatttgtagatcaaattgagagacaataagtgtacattgttgaataaaaaattttaaagtttaaaaaaaaaa

SEQ ID NO: 430328 - DNA, 4427 bp, Homo sapiens
tcagattggttgatgccacaccagtcaaggtagagtctgatagggcagtatcttaataaccctacccatgacttaactgttggatttgaaaggaaaacgtaggatttgctcttgtccccttacccgccacaaaattttgataatttgtttaaaagggagaggcagaggaaaagactagaagcataaatagctgctttaggtttgccagaggcacatagcttaacattagttcttaatatcgatgttatttttactaatgtaattaatcaacagagcaccaagattctttcatggtgaaaagggtgggcttctgttttggtatcttaaaatgtttcttttaaaatatacatcacctgtgtgagaaccaggaccacctgggagagtgatgaatcattggctccactcaaaagcattgctttactgagttttaaatttcacactgttttgccgctcaagaaaggtcttaaagtagttaaaggatgccagcaatagtgcgaatagaattttcggttgtctgcataataaaaacacccattgcagcatgattggtatgttgctcttgcattattgggaatggtaaatcagttatgggctagaaactatggaatggccgtcctcatatgtgatgggattgctgattcagacttccctattttccatacaattttgttatgtgcagagttctaaagccattttataatactgcagtatccccccccccccacctttttttttttgagacggactgtctgttgcccaggctggagtacagtggcgcaatcttggctcactgcaacctccacctccctggttcaagcaattcccctgcctcagcctcccatgtagctgggattacgggcgcacaccaccacacctggctaatttgtattcttagtagagacggggtttcaccatgttgaccagactggtctcgaactcctgacctcaggcaatctgcccgcctcagcctcccaaagtgctggaattacaggtgtgagccaccgtgcccggccaagtatctcttttctacagccttattaaactaactacaaacatttattttccaatttagttttactttcagtgcatatcaaagttgttgtactcttcagaccaacaaattaacttgagggcaaattacatagctttccatgtacccttttttcctcaggtgctaatcaaaggctctgaaaatggatactgctttagtgatgtctgctttattcttaaaatgcttatttcttttgctagatgtaaagatttggtgttaacaaaagtggttttaatatgtaaatatgaatgaatgcctttagtttaccctgtttgtctattattaatctgttttcatttatccttcatagaggaggatcctttcatgatcttgaatacatttcattagatattgttgcattttaagaatgaaaatacaactgttttctgtcttagattaatcctgctgctatgagaaactgaaaatcaagaatgtgatgcactttttacattactatataccatacatataccataggttgctttgatacctttcctgtagcacagccactaacaagagtgaatgaattataaaattctttttgggagggaatcaatacaaaattctgttaatagtacactttttggccttaaatgtcttctactactgaaaatagtttaaatcttagctttgtttctattattccctctctctgcctcagaaagaggaattgggaagaatggcttaaaggacgtggtgtcattgatttgttgctgatcttttagaaaacatttgtctatgtaagctggggacttattttttgtttgtatatagaggggaaatagtgctgccctgaaccaatcagatttagtttaaatcaaatcaatcaaaactccagctgtttctcttgtctttttacttagcaaaggaaaactttagtgaatgctacttgacaagaagaaaagtcatttctcaagcacatacccaaacttgaaggtgattgaacccaaaataatgggtgggaaacaccaaatgaggtggaggaatgagaaagatgtgtgggccaaagctatctggttatattttgatgttgccaatatcgcaaagccaaaattttaatttgcttatttaatatatttgttggccagagatctatttttatatcaatgtgccttgcatgtatattaaaaaaaaaaaattggaaacgccatgtagtaatgcctgagatagtcgatggttcttaccacctcactaatttttatgcagtatgaaatgctcattctattgcccaactggtgctctctgtttaaagttacagatcttgcgaaactggaactattttataagctggggaagtgatttactttttttgttgtatcttttttgttcttagtctgttagtggctgtcctgtagtgggaaatagtaaaaggattcttcactcccttctcccctcagcaccttcttcaagtaaacatttcttgtgtgctttgaaaaaagtttcagcttgctgtctcttttagtgttttaaagaagtgttatacaaagcattgtttgcaaaatatagggagataatggagtccactttaatttggaattctgtgtgagctatgatccaagttatcagctctttccaactttaaaaattttgttaaaagcaccttgcttagaaaattttaaatatttatgtctgcaacaattgtctcaaaataataaactgtgcaattcttgtcattaaaaaaaaaaaagatctgaattttccctaatgtgacttgttagtttctctctgtatttcctgccagtgtaaatgtgaaagctttgcttgcattacgttttagaaatgcattttgcacactcgaattttgccgaagctccgtgaaaaggttagatctaagtagatgaataaagctatgcacatgttttgaaagtttaatttgtgtgtcattaccaaaagtgaccgatttgtccttactactttgctgttgttagctttaccatctttggaaacttggctcaaagttacatagttctgggctagctcatcagtggaactaggagagaggaaaactggcacctattttaataaagttcaatttaaacgagagcttgacttgtatctattaaagagcttttcttgaaacagggcagttttatcagctttacaaatcattggatgctcttccttagtaatattttggtttatttgatcaaatagaaatggaaagtaattcaaactgaaagacccttttttgtcatatggaacttggtgacgattttttgtcttaaagctggtttaaaggtaggataggcttttacctttattgctttagcataaatttggtttactgaattgactggcttgagattagaattattcagttgtttgtaagatcaaagcactggttgttttaaagataacgtgtatcttttaaaaaattgcccaagctgattagaacaagtttaggagttgggtacatttggttcaagtgctgcaatctgtatgtactaaatagctttactttgtgtatgtgtacttataatgtgtagatgtactactacccaggttttgtcaaatcatcttttttaaagtttttttttttttaattggttcaggacctttgtaggagaggctaatatgtttaagtagaagatattactgatagcattttccccatgctcctacataaaaaataaatatttccattttatagctttttcaatatacagaagagggttacttcttcatcaagtatattgttgcctttgaggacacagcaaaacccttctatatgtatcttcattgatagtggcagttaaaaactaagttatccagttaagacttaaaaggtgacccatattaattgcatggccttaaaaggcagaaatgcaggagtgtagcaagcatcattttagatggctatggttcctcttccgcatctgtcagtagttcacttatgttcagtcttagaacctactggaggagtgaagtaatttctctgtctcgtgcagaggcactaaggagctgagttacctcttaatctgggggaatggataataagtggagtacagttatgttaaaggatgttccccccgctcaaaaaaaagtttcaatgtttgttttgcccagtcaaaaatataggtcttttctacatataagaacagtcaccagaaattttcccttttgctaaatgcttaggtatttgctatagctgtttctgatgtcatggattctgaggaagtgtcatttacgtgatgatcttcctttattgatgtcttcatcatgttcagtgttttaaaaatataaattacaaacactctacaaccatacccagatttacttattttatcagaaaaaaaacttgagaaatttgtagatcaaattgagagacaataagtgtacattgttgaataaaaaattttaaagtttaaaaaaaaaa

SEQ ID NO: 430329 - DNA, 4429 bp, Homo sapiens
tcagattggttgatgccacaccagtcaaggtagagtctgatagggcagtatcttaataaccctacccatgacttaactgttggatttgaaaggaaaacgtaggatttgctcttgtccccttacccgccacaaaattttgataatttgtttaaaagggagaggcagaggaaaagactagaagcataaatagctgctttaggtttgccagaggcacatagcttaacattagttcttaatatcgatgttatttttactaatgtaattaatcaacagagcaccaagattctttcatggtgaaaagggtgggcttctgttttggtatcttaaaatgtttcttttaaaatatacatcacctgtgtgagaaccaggaccacctgggagagtgatgaatcattggctccactcaaaagcattgctttactgagttttaaatttcacactgttttgccgctcaagaaaggtcttaaagtagttaaaggatgccagcaatagtgcgaatagaattttcggttgtctgcataataaaaacacccattgcagcatgattggtatgttgctcttgcattattgggaatggtaaatcagttatgggctagaaactatggaatggccgtcctcatatgtgatgggattgctgattcagacttccctattttccatacaattttgttatgtgcagagttctaaagccattttataatactgcagtatccccccccccccacctttttttttttgagacggactgtctgttgcccaggctggagtacagtggcgcaatcttggctcactgcaacctccacctccctggttcaagcaattcccctgcctcagcctcccatgtagctgggattacgggcgcacaccaccacacctggctaatttgtattcttagtagagacggggtttcaccatgttgaccagactggtctcgaactcctgacctcaggcaatctgcccgcctcagcctcccaaagtgctggaattacaggtgtgagccaccgtgcccggccaagtatctcttttctacagccttattaaactaactacaaacatttattttccaatttagttttactttcagtgcatatcaaagttgttgtactcttcagaccaacaaattaacttgagggcaaattacatagctttccatgtacccttttttcctcaggtgctaatcaaaggctctgaaaatggatactgctttagtgatgtctgctttattcttaaaatgcttatttcttttgctagatgtaaagatttggtgttaacaaaagtggttttaatatgtaaatatgaatgaatgcctttagtttaccctgtttgtctattattaatctgttttcatttatccttcatagaggaggatcctttcatgatcttgaatacatttcattagatattgttgcattttaagaatgatcaagaatgtgatgcactttttacattactatataccatacatataccataggttgctttgatacctttcctgtagcacagccactaacaagagtgaatgaattataaaattctttttgggagggaatcaatacaagtaactaattcttagctgatattgtcctatgaaggacaataacttaggaatataagaattctgttaatagtacactttttggccttaaatgtcttctactactgaaaatagtttaaatcttagctttgtttctattattccctctctctgcctcagaaagaggaattgggaagaatggcttaaaggacgtggtgtcattgatttgttgctgatcttttagaaaacatttgtctatgtaagctggggacttattttttgtttgtatatagaggggaaatagtgctgccctgaaccaatcagatttagtttaaatcaaatcaatcaaaactccagctgtttctcttgtctttttacttagcaaaggaaaactttagtgaatgctacttgacaagaagaaaagtcatttctcaagcacatacccaaacttgaaggtgattgaacccaaaataatgggtgggaaacaccaaatgaggtggaggaatgagaaagatgtgtgggccaaagctatctggttatattttgatgttgccaatatcgcaaagccaaaattttaatttgcttatttaatatatttgttggccagagatctatttttatatcaatgtgccttgcatgtatattaaaaaaaaaaaattggaaacgccatgtagtaatgcctgagatagtcgatggttcttaccacctcactaatttttatgcagtatgaaatgctcattctattgcccaactggtgctctctgtttaaagttacagatcttgcgaaactggaactattttataagctggggaagtgatttactttttttgttgtatcttttttgttcttagtctgttagtggctgtcctgtagtgggaaatagtaaaaggattcttcactcccttctcccctcagcaccttcttcaagtaaacatttcttgtgtgctttgaaaaaagtttcagcttgctgtctcttttagtgttttaaagaagtgttatacaaagcattgtttgcaaaatatagggagataatggagtccactttaatttggaattctgtgtgagctatgatccaagttatcagctctttccaactttaaaaattttgttaaaagcaccttgcttagaaaattttaaatatttatgtctgcaacaattgtctcaaaataataaactgtgcaattcttgtcattaaaaaaaaaaaagatctgaattttccctaatgtgacttgttagtttctctctgtatttcctgccagtgtaaatgtgaaagctttgcttgcattacgttttagaaatgcattttgcacactcgaattttgccgaagctccgtgaaaaggttagatctaagtagatgaataaagctatgcacatgttttgaaagtttaatttgtgtgtcattaccaaaagtgaccgatttgtccttactactttgctgttgttagctttaccatctttggaaacttggctcaaagttacatagttctgggctagctcatcagtggaactaggagagaggaaaactggcacctattttaataaagttcaatttaaacgagagcttgacttgtatctattaaagagcttttcttgaaacagggcagttttatcagctttacaaatcattggatgctcttccttagtaatattttggtttatttgatcaaatagaaatggaaagtaattcaaactgaaagacccttttttgtcatatggaacttggtgacgattttttgtcttaaagctggtttaaaggtaggataggcttttacctttattgctttagcataaatttggtttactgaattgactggcttgagattagaattattcagttgtttgtaagatcaaagcactggttgttttaaagataacgtgtatcttttaaaaaattgcccaagctgattagaacaagtttaggagttgggtacatttggttcaagtgctgcaatctgtatgtactaaatagctttactttgtgtatgtgtacttataatgtgtagatgtactactacccaggttttgtcaaatcatcttttttaaagtttttttttttttaattggttcaggacctttgtaggagaggctaatatgtttaagtagaagatattactgatagcattttccccatgctcctacataaaaaataaatatttccattttatagctttttcaatatacagaagagggttacttcttcatcaagtatattgttgcctttgaggacacagcaaaacccttctatatgtatcttcattgatagtggcagttaaaaactaagttatccagttaagacttaaaaggtgacccatattaattgcatggccttaaaaggcagaaatgcaggagtgtagcaagcatcattttagatggctatggttcctcttccgcatctgtcagtagttcacttatgttcagtcttagaacctactggaggagtgaagtaatttctctgtctcgtgcagaggcactaaggagctgagttacctcttaatctgggggaatggataataagtggagtacagttatgttaaaggatgttccccccgctcaaaaaaaagtttcaatgtttgttttgcccagtcaaaaatataggtcttttctacatataagaacagtcaccagaaattttcccttttgctaaatgcttaggtatttgctatagctgtttctgatgtcatggattctgaggaagtgtcatttacgtgatgatcttcctttattgatgtcttcatcatgttcagtgttttaaaaatataaattacaaacactctacaaccatacccagatttacttattttatcagaaaaaaaacttgagaaatttgtagatcaaattgagagacaataagtgtacattgttgaataaaaaattttaaagtttaaaaaaaaaa

SEQ ID NO: 430330 - DNA, 4429 bp, Homo sapiens
tcagattggttgatgccacaccagtcaaggtagagtctgatagggcagtatcttaataaccctacccatgacttaactgttggatttgaaaggaaaacgtaggatttgctcttgtccccttacccgccacaaaattttgataatttgtttaaaagggagaggcagaggaaaagactagaagcataaatagctgctttaggtttgccagaggcacatagcttaacattagttcttaatatcgatgttatttttactaatgtaattaatcaacagagcaccaagattctttcatggtgaaaagggtgggcttctgttttggtatcttaaaatgtttcttttaaaatatacatcacctgtgtgagaaccaggaccacctgggagagtgatgaatcattggctccactcaaaagcattgctttactgagttttaaatttcacactgttttgccgctcaagaaaggtcttaaagtagttaaaggatgccagcaatagtgcgaatagaattttcggttgtctgcataataaaaacacccattgcagcatgattggtatgttgctcttgcattattgggaatggtaaatcagttatgggctagaaactatggaatggccgtcctcatatgtgatgggattgctgattcagacttccctattttccatacaattttgttatgtgcagagttctaaagccattttataatactgcagtatccccccccccccacctttttttttttgagacggactgtctgttgcccaggctggagtacagtggcgcaatcttggctcactgcaacctccacctccctggttcaagcaattcccctgcctcagcctcccatgtagctgggattacgggcgcacaccaccacacctggctaatttgtattcttagtagagacggggtttcaccatgttgaccagactggtctcgaactcctgacctcaggcaatctgcccgcctcagcctcccaaagtgctggaattacaggtgtgagccaccgtgcccggccaagtatctcttttctacagccttattaaactaactacaaacatttattttccaatttagttttactttcagtgcatatcaaagttgttgtactcttcagaccaacaaattaacttgagggcaaattacatagctttccatgtacccttttttcctcaggtgctaatcaaaggctctgaaaatggatactgctttagtgatgtctgctttattcttaaaatgcttatttcttttgctagatgtaaagatttggtgttaactctattattaatctgttttcatttatccttcatagaggaggatcctttcatgatcttgaatacatttcattagatattgttgcattttaagaatgaaaatacaactgttttctgtcttagattaatcctgctgctatgagaaactgaaaatcaagaatgtgatgcactttttacattactatataccatacatataccataggttgctttgatacctttcctgtagcacagccactaacaagagtgaatgaattataaaattctttttgggagggaatcaatacaagtaactaattcttagctgatattgtcctatgaaggacaataacttaggaatataagaattctgttaatagtacactttttggccttaaatgtcttctactactgaaaatagtttaaatcttagctttgtttctattattccctctctctgcctcagaaagaggaattgggaagaatggcttaaaggacgtggtgtcattgatttgttgctgatcttttagaaaacatttgtctatgtaagctggggacttattttttgtttgtatatagaggggaaatagtgctgccctgaaccaatcagatttagtttaaatcaaatcaatcaaaactccagctgtttctcttgtctttttacttagcaaaggaaaactttagtgaatgctacttgacaagaagaaaagtcatttctcaagcacatacccaaacttgaaggtgattgaacccaaaataatgggtgggaaacaccaaatgaggtggaggaatgagaaagatgtgtgggccaaagctatctggttatattttgatgttgccaatatcgcaaagccaaaattttaatttgcttatttaatatatttgttggccagagatctatttttatatcaatgtgccttgcatgtatattaaaaaaaaaaaattggaaacgccatgtagtaatgcctgagatagtcgatggttcttaccacctcactaatttttatgcagtatgaaatgctcattctattgcccaactggtgctctctgtttaaagttacagatcttgcgaaactggaactattttataagctggggaagtgatttactttttttgttgtatcttttttgttcttagtctgttagtggctgtcctgtagtgggaaatagtaaaaggattcttcactcccttctcccctcagcaccttcttcaagtaaacatttcttgtgtgctttgaaaaaagtttcagcttgctgtctcttttagtgttttaaagaagtgttatacaaagcattgtttgcaaaatatagggagataatggagtccactttaatttggaattctgtgtgagctatgatccaagttatcagctctttccaactttaaaaattttgttaaaagcaccttgcttagaaaattttaaatatttatgtctgcaacaattgtctcaaaataataaactgtgcaattcttgtcattaaaaaaaaaaaagatctgaattttccctaatgtgacttgttagtttctctctgtatttcctgccagtgtaaatgtgaaagctttgcttgcattacgttttagaaatgcattttgcacactcgaattttgccgaagctccgtgaaaaggttagatctaagtagatgaataaagctatgcacatgttttgaaagtttaatttgtgtgtcattaccaaaagtgaccgatttgtccttactactttgctgttgttagctttaccatctttggaaacttggctcaaagttacatagttctgggctagctcatcagtggaactaggagagaggaaaactggcacctattttaataaagttcaatttaaacgagagcttgacttgtatctattaaagagcttttcttgaaacagggcagttttatcagctttacaaatcattggatgctcttccttagtaatattttggtttatttgatcaaatagaaatggaaagtaattcaaactgaaagacccttttttgtcatatggaacttggtgacgattttttgtcttaaagctggtttaaaggtaggataggcttttacctttattgctttagcataaatttggtttactgaattgactggcttgagattagaattattcagttgtttgtaagatcaaagcactggttgttttaaagataacgtgtatcttttaaaaaattgcccaagctgattagaacaagtttaggagttgggtacatttggttcaagtgctgcaatctgtatgtactaaatagctttactttgtgtatgtgtacttataatgtgtagatgtactactacccaggttttgtcaaatcatcttttttaaagtttttttttttttaattggttcaggacctttgtaggagaggctaatatgtttaagtagaagatattactgatagcattttccccatgctcctacataaaaaataaatatttccattttatagctttttcaatatacagaagagggttacttcttcatcaagtatattgttgcctttgaggacacagcaaaacccttctatatgtatcttcattgatagtggcagttaaaaactaagttatccagttaagacttaaaaggtgacccatattaattgcatggccttaaaaggcagaaatgcaggagtgtagcaagcatcattttagatggctatggttcctcttccgcatctgtcagtagttcacttatgttcagtcttagaacctactggaggagtgaagtaatttctctgtctcgtgcagaggcactaaggagctgagttacctcttaatctgggggaatggataataagtggagtacagttatgttaaaggatgttccccccgctcaaaaaaaagtttcaatgtttgttttgcccagtcaaaaatataggtcttttctacatataagaacagtcaccagaaattttcccttttgctaaatgcttaggtatttgctatagctgtttctgatgtcatggattctgaggaagtgtcatttacgtgatgatcttcctttattgatgtcttcatcatgttcagtgttttaaaaatataaattacaaacactctacaaccatacccagatttacttattttatcagaaaaaaaacttgagaaatttgtagatcaaattgagagacaataagtgtacattgttgaataaaaaattttaaagtttaaaaaaaaaa

SEQ ID NO: 430331 - DNA, 3463 bp, Homo sapiens
agaatcttgatagcaacattcgttaaggcgcgcgggcaccagactatggtcatagtcgcaacgatggctctattagctcgcttctcacgaggtagcatccatagggtctacttggacatagatgccttgcgtagttctcaccgaatgataatagaattgcccgcgtgggacaatcggtagcagttctgaacgcaatcactggtatgagagtttcgggagtgtcataacatgtgagtcttattcatactaggtgaagatcactagaagactggagactgcgcattatacataatataccgtgcccggtctattattaatctgttttcatttatccttcatagaggaggatcctttcatgatcttgaatacatttcattagatattgttgcattttaagaatgaaaatacaactgttttctgtcttagattaatcctgctgctatgagaaactgaaaatcaagaatgtgatgcactttttacattactatataccatacatataccataggttgctttgatacctttcctgtagcacagccactaacaagagtgaatgaattataaaattctttttgggagggaatcaatacaagtaactaattcttagctgatattgtcctatgaaggacaataacttaggaatataagaattctgttaatagtacactttttggccttaaatgtcttctactactgaaaatagtttaaatcttagctttgtttctattattccctctctctgcctcagaaagaggaattgggaagaatggcttaaaggacgtggtgtcattgatttgttgctgatcttttagaaaacatttgtctatgtaagctggggacttattttttgtttgtatatagaggggaaatagtgctgccctgaaccaatcagatttagtttaaatcaaatcaatcaaaactccagctgtttctcttgtctttttacttagcaaaggaaaactttagtgaatgctacttgacaagaagaaaagtcatttctcaagcacatacccaaacttgaaggtgattgaacccaaaataatgggtgggaaacaccaaatgaggtggaggaatgagaaagatgtgtgggccaaagctatctggttatattttgatgttgccaatatcgcaaagccaaaattttaatttgcttatttaatatatttgttggccagagatctatttttatatcaatgtgccttgcatgtatattaaaaaaaaaaaattggaaacgccatgtagtaatgcctgagatagtcgatggttcttaccacctcactaatttttatgcagtatgaaatgctcattctattgcccaactggtgctctctgtttaaagttacagatcttgcgaaactggaactattttataagctggggaagtgatttactttttttgttgtatcttttttgttcttagtctgttagtggctgtcctgtagtgggaaatagtaaaaggattcttcactcccttctcccctcagcaccttcttcaagtaaacatttcttgtgtgctttgaaaaaagtttcagcttgctgtctcttttagtgttttaaagaagtgttatacaaagcattgtttgcaaaatatagggagataatggagtccactttaatttggaattctgtgtgagctatgatccaagttatcagctctttccaactttaaaaattttgttaaaagcaccttgcttagaaaattttaaatatttatgtctgcaacaattgtctcaaaataataaactgtgcaattcttgtcattaaaaaaaaaaaagatctgaattttccctaatgtgacttgttagtttctctctgtatttcctgccagtgtaaatgtgaaagctttgcttgcattacgttttagaaatgcattttgcacactcgaattttgccgaagctccgtgaaaaggttagatctaagtagatgaataaagctatgcacatgttttgaaagtttaatttgtgtgtcattaccaaaagtgaccgatttgtccttactactttgctgttgttagctttaccatctttggaaacttggctcaaagttacatagttctgggctagctcatcagtggaactaggagagaggaaaactggcacctattttaataaagttcaatttaaacgagagcttgacttgtatctattaaagagcttttcttgaaacagggcagttttatcagctttacaaatcattggatgctcttccttagtaatattttggtttatttgatcaaatagaaatggaaagtaattcaaactgaaagacccttttttgtcatatggaacttggtgacgattttttgtcttaaagctggtttaaaggtaggataggcttttacctttattgctttagcataaatttggtttactgaattgactggcttgagattagaattattcagttgtttgtaagatcaaagcactggttgttttaaagataacgtgtatcttttaaaaaattgcccaagctgattagaacaagtttaggagttgggtacatttggttcaagtgctgcaatctgtatgtactaaatagctttactttgtgtatgtgtacttataatgtgtagatgtactactacccaggttttgtcaaatcatcttttttaaagtttttttttttttaattggttcaggacctttgtaggagaggctaatatgtttaagtagaagatattactgatagcattttccccatgctcctacataaaaaataaatatttccattttatagctttttcaatatacagaagagggttacttcttcatcaagtatattgttgcctttgaggacacagcaaaacccttctatatgtatcttcattgatagtggcagttaaaaactaagttatccagttaagacttaaaaggtgacccatattaattgcatggccttaaaaggcagaaatgcaggagtgtagcaagcatcattttagatggctatggttcctcttccgcatctgtcagtagttcacttatgttcagtcttagaacctactggaggagtgaagtaatttctctgtctcgtgcagaggcactaaggagctgagttacctcttaatctgggggaatggataataagtggagtacagttatgttaaaggatgttccccccgctcaaaaaaaagtttcaatgtttgttttgcccagtcaaaaatataggtcttttctacatataagaacagtcaccagaaattttcccttttgctaaatgcttaggtatttgctatagctgtttctgatgtcatggattctgaggaagtgtcatttacgtgatgatcttcctttattgatgtcttcatcatgttcagtgttttaaaaatataaattacaaacactctacaaccatacccagatttacttattttatcagaaaaaaaacttgagaaatttgtagatcaaattgagagacaataagtgtacattgttgaataaaaaattttaaagtttaaaaaaaaaa

SEQ ID NO: 430332 - DNA, 1459 bp, Homo sapiens
gctgtgccccatgggacacatagtggcggatggtatgataccttctaaattcacccttgatcagtggagacatcgagagcagaggaaaactggcacctattttaataaagttcaatttaaacgagagcttgacttgtatctattaaagagcttttcttgaaacagggcagttttatcagctttacaaatcattggatgctcttccttagtaatattttggtttatttgatcaaatagaaatggaaagtaattcaaactgaaagacccttttttgtcatatggaacttggtgacgattttttgtcttaaagctggtttaaaggtaggataggcttttacctttattgctttagcataaatttggtttactgaattgactggcttgagattagaattattcagttgtttgtaagatcaaagcactggttgttttaaagataacgtgtatcttttaaaaaattgcccaagctgattagaacaagtttaggagttgggtacatttggttcaagtgctgcaatctgtatgtactaaatagctttactttgtgtatgtgtacttataatgtgtagatgtactactacccaggttttgtcaaatcatcttttttaaagtttttttttttttaattggttcaggacctttgtaggagaggctaatatgtttaagtagaagatattactgatagcattttccccatgctcctacataaaaaataaatatttccattttatagctttttcaatatacagaagagggttacttcttcatcaagtatattgttgcctttgaggacacagcaaaacccttctatatgtatcttcattgatagtggcagttaaaaactaagttatccagttaagacttaaaaggtgacccatattaattgcatggccttaaaaggcagaaatgcaggagtgtagcaagcatcattttagatggctatggttcctcttccgcatctgtcagtagttcacttatgttcagtcttagaacctactggaggagtgaagtaatttctctgtctcgtgcagaggcactaaggagctgagttacctcttaatctgggggaatggataataagtggagtacagttatgttaaaggatgttccccccgctcaaaaaaaagtttcaatgtttgttttgcccagtcaaaaatataggtcttttctacatataagaacagtcaccagaaattttcccttttgctaaatgcttaggtatttgctatagctgtttctgatgtcatggattctgaggaagtgtcatttacgtgatgatcttcctttattgatgtcttcatcatgttcagtgttttaaaaatataaattacaaacactctacaaccatacccagatttacttattttatcagaaaaaaaacttgagaaatttgtagatcaaattgagagacaataagtgtacattgttgaataaaaaattttaaagtttaaaaaaaaaa

SEQ ID NO: 430333 - DNA, 3942 bp, Homo sapiens
agcgggagtcagccgcagtggctgagctgctgacaggaggcggcagcggagtaggaggcgaggcaagacctgcggctcggcccggccacagccgcggtagtgctaggcaagcccacggagtcacgccggcctcagccagtctgcgaacctctcgcccccgcccacccctgcatccgcccggcccctgcccgcccgagtggtccggggaggcctagtctgcaccacccgccgggctcctggggccgccgccccgcgcggtcctgtcggcgtccgcggccgcgcccggcccctggcccgctcgcccgccggcaccatgatggaggagatcgaccggttccaggtgcccaccgcgcactcggagatgcagccgctggacccagccgccgcctccatctctgacggagactgtgacgcccgggagggtgagtcagtagccatgaattacaaaccatccccgctccaagtgaagctggagaagcagcgggagctggcccggaagggctccctgaagaatggcagcatgggtagccctgtcaaccagcaacccaagaagaacaatgtcatggcccgaacaaggctggtcgtccccaataaaggctactcctcacttgaccagagccctgatgagaagccactggtagcccttgacacggacagcgatgatgactttgacatgtctagatactcctcctccggctactcctctgctgagcagatcaaccaagatttgaacatccagctgctgaaggacggctaccggttagatgagatccccgacgacgaggacctagacctcatcccccccaagtccgtgaaccccacgtgcatgtgctgccaggccacgtcctccaccgcctgccacattcagtagcgggcggggccactgcggtcgccggggcggggccgccaagggccgggtaggacgggcagaggccgaccccttcccagctcgtctgcctgcccccggccccgcgcccctacagccgccaacctcgtataacagtcattgcttcctcctatggtaggacgtgtacctctgtgtgttcatggagctggagaaaccaaaactgggtctctctccacccgggagctgaggaggggtgggggccgtttgttcagttacctgggggaacctcacccagcaccctgccccgcttcccagggctggccaagagagaagactggacggcagggaggtcaacattaacgagtggggggatcacaaagccaggggcttggccccaccccagcgaagccatgaactcccaagccccggcctcagcctaaccaggaaaggggctcggagggagaaaggcccagggcagtggggacgggtcccagcacctcggagcccccttcacacgccccctaccggcccatgtttctatttgcatttccccctcctcagatgggaagcctggcaaagctgcccaaccgggtagtgcccctcacccatcggatcactgccttcttcctcctcttgccccattcacccgcttccttgcactctgggagtggggcagggtaaggtgggccttacagacaggctgaggtttgggtggtgtgatctgtcctaattggcccctcaccaatgcatctatctgtctgccaccagcccaccccaccctgcccccaccctcacccacgcttctgctcattggtctcaatcccagcctggaagcagggagtaaggctggactccaatggcccattcccctcaccccagcccaagacgtgggaggctgcttcccagtaagaatccaggagcaagctttggtgaatccagtgggctgagtggctctatggatgtggttgtttggatgtggtagggagtgcttagcagaatgtgtgtgtatctctgaggctgtcagggggtgggtgggtgtgtgtctctgttggacctgtctctcctcagtctattcctgtcatagatgtgggtgtccctggtagggaagtgcctgtgtggtctgtttacagtgcagaaggcggctcagcagtgcaatgggctgacagccttggaccgggagtcagaagcctgggttctggttgtagctctggcccctccctgtgatcttcaacaagccacttgctttctctcgtcttcagtttcctcaactagaaaatgaacagcagctgaaattatgttgaagatccttttatacctgaaagagtttcttcatagaaatttctgtggtggggagggggcaatctctgtgtgtctcagtatacctaaaggttggggtggggcggagttgtgtgtctctgtagaaaggcgaaggggcagttcctatcaggactgtgtatgtctgagcacatgtggctctgtttgggattacgtgtttgtctgtgaatgtgtgtgtgtgttggagggttgtctattgtgtgtggctgtatagggtgtctgtagatcaagatgtgtatacagctgcttctgctattgctggtttgggggaggggactggaaagctgagactgaaaatcaagagggaagaggtgaggaaggcccacccctggggctgggcagtgtagacctgccaccgtgtgaagaaaaatgaaagcacagatagcctaagactgcacaggcctgtgcccacataccttatagcacaggcccaggtggatcatctcatgctaacaccccacatgtgctggtggatccactcccatggatccactcacatgctgcaggcatgcagtagactcacccacagcccactctctggacaccaatcctgggaggtgggagctggaatggggagcaatgagaggagggagtgagactgttggcttaggaagggtggtacctctccctgcatcatacccaggaacttccagctccaaaatattggggtacagctcaccaccccccactccgccaacccattcctacctcctctagtgcagggacccaagttagatgatgagaaaatgccaaacaaagggaggcaaggacagagaaggtacctgcaggacccacaaggcccatactggcccccatctgaacccacctctcccacccagatcaacatccccccaacccctgtgcccccatcatctggaccccagagccagccctcccactaccaccaccaccaccccggggctccttggctcacctttctagaacatgggtacctcctctttttgggggctcatttagactgctgcctttgctgctgacttgcagtgtgactcgggcccattgttcaatctctgtggccctgagacaccagggaaaatctccccccccacaggacatactagttccctggcaggcaagggcttccaactgaggcagtgcatgtgtggcagagagaggcaggaagctggcagtggcagcttctgtgtctagggaggggtgtggctccctccttccctgtctgggaggttggagggaagaatctaggccttagcttgccctcctgccacccttccccttgtagatactgccttaacactccctcctctctcagctgtggctgccacccagccaggtttctccgtgctcactaatttatttccaggaaggtgtgtggaagacatgagccgtgtataatattttttttaacattttcattgcagtattgaccatcatccttggttgtgtatcgtgtaacacaaataatgatattaaaagcatcaaacaaaaaaaaaaaaaaaaaaaaaaaaaaaaaaaaagagtaaaaaaaaggggggggggcgccaaaaaaaaacccccggagggggccaaaggtatgccgcacccaccttttgtgtaacagggcggcccaaaaagggagacgaaaaaaaaaagaagaggagggggcgggcgaaacacacaggcgagtggggacaggggtgcgggggactgtggaagaccctcgcgggggggcgccaggggccacacccaagaaataacgcccgcgcataaactgcggcgacgggggaccaggctatttccgg

SEQ ID NO: 430334 - DNA, 3891 bp, Homo sapiens
agcgggagtcagccgcagtggctgagctgctgacaggaggcggcagcggagtaggaggcgaggcaagacctgcggctcggcccggccacagccgcggtagtgctaggcaagcccacggagtcacgccggcctcagccagtctgcgaacctctcgcccccgcccacccctgcatccgcccggcccctgcccgcccgagtggtccggggaggcctagtctgcaccacccgccgggctcctggggccgccgccccgcgcggtcctgtcggcgtccgcggccgcgcccggcccctggcccgctcgcccgccggcaccatgatggaggagatcgaccggttccaggtgcccaccgcgcactcggagatgcagccgctggacccagccgccgcctccatctctgacggagactgtgacgcccgggaggagaagcagcgggagctggcccggaagggctccctgaagaatggcagcatgggtagccctgtcaaccagcaacccaagaagaacaatgtcatggcccgaacaaggctggtcgtccccaataaaggctactcctcacttgaccagagccctgatgagaagccactggtagcccttgacacggacagcgatgatgactttgacatgtctagatactcctcctccggctactcctctgctgagcagatcaaccaagatttgaacatccagctgctgaaggacggctaccggttagatgagatccccgacgacgaggacctagacctcatcccccccaagtccgtgaaccccacgtgcatgtgctgccaggccacgtcctccaccgcctgccacattcagtagcgggcggggccactgcggtcgccggggcggggccgccaagggccgggtaggacgggcagaggccgaccccttcccagctcgtctgcctgcccccggccccgcgcccctacagccgccaacctcgtataacagtcattgcttcctcctatggtaggacgtgtacctctgtgtgttcatggagctggagaaaccaaaactgggtctctctccacccgggagctgaggaggggtgggggccgtttgttcagttacctgggggaacctcacccagcaccctgccccgcttcccagggctggccaagagagaagactggacggcagggaggtcaacattaacgagtggggggatcacaaagccaggggcttggccccaccccagcgaagccatgaactcccaagccccggcctcagcctaaccaggaaaggggctcggagggagaaaggcccagggcagtggggacgggtcccagcacctcggagcccccttcacacgccccctaccggcccatgtttctatttgcatttccccctcctcagatgggaagcctggcaaagctgcccaaccgggtagtgcccctcacccatcggatcactgccttcttcctcctcttgccccattcacccgcttccttgcactctgggagtggggcagggtaaggtgggccttacagacaggctgaggtttgggtggtgtgatctgtcctaattggcccctcaccaatgcatctatctgtctgccaccagcccaccccaccctgcccccaccctcacccacgcttctgctcattggtctcaatcccagcctggaagcagggagtaaggctggactccaatggcccattcccctcaccccagcccaagacgtgggaggctgcttcccagtaagaatccaggagcaagctttggtgaatccagtgggctgagtggctctatggatgtggttgtttggatgtggtagggagtgcttagcagaatgtgtgtgtatctctgaggctgtcagggggtgggtgggtgtgtgtctctgttggacctgtctctcctcagtctattcctgtcatagatgtgggtgtccctggtagggaagtgcctgtgtggtctgtttacagtgcagaaggcggctcagcagtgcaatgggctgacagccttggaccgggagtcagaagcctgggttctggttgtagctctggcccctccctgtgatcttcaacaagccacttgctttctctcgtcttcagtttcctcaactagaaaatgaacagcagctgaaattatgttgaagatccttttatacctgaaagagtttcttcatagaaatttctgtggtggggagggggcaatctctgtgtgtctcagtatacctaaaggttggggtggggcggagttgtgtgtctctgtagaaaggcgaaggggcagttcctatcaggactgtgtatgtctgagcacatgtggctctgtttgggattacgtgtttgtctgtgaatgtgtgtgtgtgttggagggttgtctattgtgtgtggctgtatagggtgtctgtagatcaagatgtgtatacagctgcttctgctattgctggtttgggggaggggactggaaagctgagactgaaaatcaagagggaagaggtgaggaaggcccacccctggggctgggcagtgtagacctgccaccgtgtgaagaaaaatgaaagcacagatagcctaagactgcacaggcctgtgcccacataccttatagcacaggcccaggtggatcatctcatgctaacaccccacatgtgctggtggatccactcccatggatccactcacatgctgcaggcatgcagtagactcacccacagcccactctctggacaccaatcctgggaggtgggagctggaatggggagcaatgagaggagggagtgagactgttggcttaggaagggtggtacctctccctgcatcatacccaggaacttccagctccaaaatattggggtacagctcaccaccccccactccgccaacccattcctacctcctctagtgcagggacccaagttagatgatgagaaaatgccaaacaaagggaggcaaggacagagaaggtacctgcaggacccacaaggcccatactggcccccatctgaacccacctctcccacccagatcaacatccccccaacccctgtgcccccatcatctggaccccagagccagccctcccactaccaccaccaccaccccggggctccttggctcacctttctagaacatgggtacctcctctttttgggggctcatttagactgctgcctttgctgctgacttgcagtgtgactcgggcccattgttcaatctctgtggccctgagacaccagggaaaatctccccccccacaggacatactagttccctggcaggcaagggcttccaactgaggcagtgcatgtgtggcagagagaggcaggaagctggcagtggcagcttctgtgtctagggaggggtgtggctccctccttccctgtctgggaggttggagggaagaatctaggccttagcttgccctcctgccacccttccccttgtagatactgccttaacactccctcctctctcagctgtggctgccacccagccaggtttctccgtgctcactaatttatttccaggaaggtgtgtggaagacatgagccgtgtataatattttttttaacattttcattgcagtattgaccatcatccttggttgtgtatcgtgtaacacaaataatgatattaaaagcatcaaacaaaaaaaaaaaaaaaaaaaaaaaaaaaaaaaaagagtaaaaaaaaggggggggggcgccaaaaaaaaacccccggagggggccaaaggtatgccgcacccaccttttgtgtaacagggcggcccaaaaagggagacgaaaaaaaaaagaagaggagggggcgggcgaaacacacaggcgagtggggacaggggtgcgggggactgtggaagaccctcgcgggggggcgccaggggccacacccaagaaataacgcccgcgcataaactgcggcgacgggggaccaggctatttccgg

SEQ ID NO: 430335 - DNA, 3707 bp, Homo sapiens
agcgggagtcagccgcagtggctgagctgctgacaggaggcggcagcggagtaggaggcgaggcaagacctgcggctcggcccggccacagccgcggtagtgctaggcaagcccacggagtcacgccggcctcagccagtctgcgaacctctcgcccccgcccacccctgcatccgcccggcccctgcccgcccgagtggtccggggaggcctagtctgcaccacccgccgggctcctggggccgccgccccgcgcggtcctgtcggcgtccgcggccgcgcccggcccctggcccgctcgcccgccggcaccatgatggaggagatcgaccggttccaggtgcccaccgcgcactcggagatgcagccgctggacccagccgccgcctccatctctgacggagactgtgacgcccgggagggtgagtcagtagccatgaattacaaaccatccccgctccaagtgaagctggagaagcagcgggagctggcccggaagggctccctgaagaatggcagcatgggtagccctgtcaaccagcaacccaagaagaacaatgtcatggcccgaacaaggctggtcgtccccaataaaggctactcctcacttgaccagagccctgatgagaagccactggtagcccttgacacggacagcgatgatgactttgacatgtctagatactcctcctccggctactcctctgctgagcagatcaaccaagatttgaacatccagctgctgaaggacggctaccggttagatgagatccccgacgacgaggacctagacctcatcccccccaagtccgtgaaccccacgtgcatgtgctgccaggccacgtcctccaccgcctgccacattcagtagcgggcggggccactgcggtcgccggggcggggccgccaagggccgggtaggacgggcagaggccgaccccttcccagctcgtctgcctgcccccggccccgcgcccctacagccgccaacctcgtataacagtcattgcttcctcctatggtaggacgtgtacctctgtgtgttcatggagctggagaaaccaaaactgggtctctctccacccgggagctgaggaggggtgggggccgtttgttcagttacctgggggaacctcacccagcaccctgccccgcttcccagggctggccaagagagaagactggacggcagggaggtcaacattaacgagtggggggatcacaaagccaggggcttggccccaccccagcgaagccatgaactcccaagccccggcctcagcctaaccaggaaaggggctcggagggagaaaggcccagggcagtggggacgggtcccagcacctcggagcccccttcacacgccccctaccggcccatgtttctatttgcatttccccctcctcagatgggaagcctggcaaagctgcccaaccgggtagtgcccctcacccatcggatcactgccttcttcctcctcttgccccattcacccgcttccttgcactctgggagtggggcagggtaaggtgggccttacagacaggctgaggtttgggtggtgtgatctgtcctaattggcccctcaccaatgcatctatctgtctgccaccagcccaccccaccctgcccccaccctcacccacgcttctgctcattggtctcaatcccagcctggaagcagggagtaaggctggactccaatggcccattcccctcaccccagcccaagacgtgggaggctgcttcccagtaagaatccaggagcaagctttggtgaatccagtgggctgagtggctctatggatgtggttgtttggatgtggtagggagtgcttagcagaatgtgtgtgtatctctgaggctgtcagggggtgggtgggtgtgtgtctctgttggacctgtctctcctcagtctattcctgtcatagatgtgggtgtccctggtagggaagtgcctgtgtggtctgtttacagtgcagaaggcggctcagcagtgcaatgggctgacagccttggaccgggagtcagaagcctgggttctggttgtagctctggcccctccctgtgatcttcaacaagccacttgctttctctcgtcttcagtttcctcaactagaaaatgaacagcagctgaaattatgttgaagatccttttatacctgaaagagtttcttcatagaaatttctgtggtggggagggggcaatctctgtgtgtctcagtatacctaaaggttggggtggggcggagttgtgtgtctctgtagaaaggcgaaggggcagttcctatcaggactgtgtatgtctgagcacatgtggctctgtttgggattacgtgtttgtctgtgaatgtgtgtgtgtgttggagggttgtctattgtgtgtggctgtatagggtgtctgtagatcaagatgtgtatacagctgcttctgctattgctggtttgggggaggggactggaaagctgagactgaaaatcaagagggaagaggtgaggaaggcccacccctggggctgggcagtgtagacctgccaccgtgtgaagaaaaatgaaagcacagatagcctaagactgcacaggcctgtgcccacataccttatagcacaggcccaggtggatcatctcatgctaacaccccacatgtgctggtggatccactcccatggatccactcacatgctgcaggcatgcagtagactcacccacagcccactctctggacaccaatcctgggaggtgggagctggaatggggagcaatgagaggagggagtgagactgttggcttaggaagggtggtacctctccctgcatcatacccaggaacttccagctccaaaatattggggtacagctcaccaccccccactccgccaacccattcctacctcctctagtgcagggacccaagttagatgatgagaaaatgccaaacaaagggaggcaaggacagagaaggtacctgcaggacccacaaggcccatactggcccccatctgaacccacctctcccacccagatcaacatccccccaacccctgtgcccccatcatctggaccccagagccagccctcccactaccaccaccaccaccccggggctccttggctcacctttctagaacatgggtacctcctctttttgggggctcatttagactgctgcctttgctgctgacttgcagtgtgactcgggcccattgttcaatctctgtggccctgagacaccagggaaaatctccccccccacaggacatactagttccctggcaggcaagggcttccaactgaggcagtgcatgtgtggcagagagaggcaggaagctggcagtggcagcttctgtgtctagggaggggtgtggctccctccttccctgtctgggaggttggagggaagaatctaggccttagcttgccctcctgccacccttccccttgtagatactgccttaacactccctcctctctcagctgtggctgccacccagccaggtttctccgtgctcactaatttatttccaggaaggtgtgtggaagacatgagccgtgtataatattttttttaacattttcattgcagtattgaccatcatccttggttgtgtatcgtgtaacacaaataatgatattaaaagcatcaaacaagcacacgaaacaacacaacaacacaccccagaggacatcctagcagaggttgcaaaaaag

SEQ ID NO: 430336 - DNA, 3671 bp, Homo sapiens
agcgggagtcagccgcagtggctgagctgctgacaggaggcggcagcggagtaggaggcgaggcaagacctgcggctcggcccggccacagccgcggtagtgctaggcaagcccacggagtcacgccggcctcagccagtctgcgaacctctcgcccccgcccacccctgcatccgcccggcccctgcccgcccgagtggtccggggaggcctagtctgcaccacccgccgggctcctggggccgccgccccgcgcggtcctgtcggcgtccgcggccgcgcccggcccctggcccgctcgcccgccggcaccatgatggaggagatcgaccggttccaggtgcccaccgcgcactcggagatgcagccgctggacccagccgccgcctccatctctgacggagactgtgacgcccgggagggtgagtcagtagccatgaattacaaaccatccccgctccaagtgaagctggagaagcagcgggagctggcccggaagggctccctgaagaatggcagcatgggtagccctgtcaaccagcaacccaagaagaacaatgtcatggcccgaacaaggctggtcgtccccaataaaggctactcctcacttgaccagagccctgatgagaagccactggtagcccttgacacggacagcgatgatgactttgacatgtctagatactcctcctccggctactcctctgctgagcagatcaaccaagatttgaacatccagctgctgaaggacggctaccggttagatgagatccccgacgacgaggacctagacctcatcccccccaagtccgtgaaccccacgtgcatgtgctgccaggccacgtcctccaccgcctgccacattcagtagcgggcggggccactgcggtcgccggggcggggccgccaagggccgggtaggacgggcagaggccgaccccttcccagctcgtctgcctgcccccggccccgcgcccctacagccgccaacctcgtataacagtcattgcttcctcctatggtaggacgtgtacctctgtgtgttcatggagctggagaaaccaaaactgggtctctctccacccgggagctgaggaggggtgggggccgtttgttcagttacctgggggaacctcacccagcaccctgccccgcttcccagggctggccaagagagaagactggacggcagggaggtcaacattaacgagtggggggatcacaaagccaggggcttggccccaccccagcgaagccatgaactcccaagccccggcctcagcctaaccaggaaaggggctcggagggagaaaggcccagggcagtggggacgggtcccagcacctcggagcccccttcacacgccccctaccggcccatgtttctatttgcatttccccctcctcagatgggaagcctggcaaagctgcccaaccgggtagtgcccctcacccatcggatcactgccttcttcctcctcttgccccattcacccgcttccttgcactctgggagtggggcagggtaaggtgggccttacagacaggctgaggtttgggtggtgtgatctgtcctaattggcccctcaccaatgcatctatctgtctgccaccagcccaccccaccctgcccccaccctcacccacgcttctgctcattggtctcaatcccagcctggaagcagggagtaaggctggactccaatggcccattcccctcaccccagcccaagacgtgggaggctgcttcccagtaagaatccaggagcaagctttggtgaatccagtgggctgagtggctctatggatgtggttgtttggatgtggtagggagtgcttagcagaatgtgtgtgtatctctgaggctgtcagggggtgggtgggtgtgtgtctctgttggacctgtctctcctcagtctattcctgtcatagatgtgggtgtccctggtagggaagtgcctgtgtggtctgtttacagtgcagaaggcggctcagcagtgcaatgggctgacagccttggaccgggagtcagaagcctgggttctggttgtagctctggcccctccctgtgatcttcaacaagccacttgctttctctcgtcttcagtttcctcaactagaaaatgaacagcagctgaaattatgttgaagatccttttatacctgaaagagtttcttcatagaaatttctgtggtggggagggggcaatctctgtgtgtctcagtatacctaaaggttggggtggggcggagttgtgtgtctctgtagaaaggcgaaggggcagttcctatcaggactgtgtatgtctgagcacatgtggctctgtttgggattacgtgtttgtctgtgaatgtgtgtgtgtgttggagggttgtctattgtgtgtggctgtatagggtgtctgtagatcaagatgtgtatacagctgcttctgctattgctggtttgggggaggggactggaaagctgagactgaaaatcaagagggaagaggtgaggaaggcccacccctggggctgggcagtgtagacctgccaccgtgtgaagaaaaatgaaagcacagatagcctaagactgcacaggcctgtgcccacataccttatagcacaggcccaggtggatcatctcatgctaacaccccacatgtgctggtggatccactcccatggatccactcacatgctgcaggcatgcagtagactcacccacagcccactctctggacaccaatcctgggaggtgggagctggaatggggagcaatgagaggagggagtgagactgttggcttaggaagggtggtacctctccctgcatcatacccaggaacttccagctccaaaatattggggtacagctcaccaccccccactccgccaacccattcctacctcctctagtgcagggacccaagttagatgatgagaaaatgccaaacaaagggaggcaaggacagagaaggtacctgcaggacccacaaggcccatactggcccccatctgaacccacctctcccacccagatcaacatccccccaacccctgtgcccccatcatctggaccccagagccagccctcccactaccaccaccaccaccccggggctccttggctcacctttctagaacatgggtacctcctctttttgggggctcatttagactgctgcctttgctgctgacttgcagtgtgactcgggcccattgttcaatctctgtggccctgagacaccagggaaaatctccccccccacaggacatactagttccctggcaggcaagggcttccaactgaggcagtgcatgtgtggcagagagaggcaggaagctggcagtggcagcttctgtgtctagggaggggtgtggctccctccttccctgtctgggaggttggagggaagaatctaggccttagcttgccctcctgccacccttccccttgtagatactgccttaacactccctcctctctcagctgtggctgccacccagccaggtttctccgtgctcactaatttatttccaggaaggtgtgtggaagacatgagccgtgtataatattttttttaacattttcattgcagtattgaccatcatccttggttgtgtatcgtgtaacacaaataatgatattaaaagcatcaaacaaaagacacccacagcacacaccctg

SEQ ID NO: 430337 - DNA, 2166 bp, Homo sapiens
  misc_feature (22)..(23): n is a, c, g, or t
  misc_feature (28)..(28): n is a, c, g, or t
aacttaggctaggtacgaggcnnggtgntgatgtggttgtttggatgtggtagggagtgcttagcagaatgtgtgtgtatctctgaggctgtcagggggtgggtgggtgtgtgtctctgttggacctgtctctcctcagtctattcctgtcatagatgtgggtgtccctggtagggaagtgcctgtgtggtctgtttacagtgcagaaggcggctcagcagtgcaatgggctgacagccttggaccgggagtcagaagcctgggttctggttgtagctctggcccctccctgtgatcttcaacaagccacttgctttctctcgtcttcagtttcctcaactagaaaatgaacagcagctgaaattatgttgaagatccttttatacctgaaagagtttcttcatagaaatttctgtggtggggagggggcaatctctgtgtgtctcagtatacctaaaggttggggtggggcggagttgtgtgtctctgtagaaaggcgaaggggcagttcctatcaggactgtgtatgtctgagcacatgtggctctgtttgggattacgtgtttgtctgtgaatgtgtgtgtgtgttggagggttgtctattgtgtgtggctgtatagggtgtctgtagatcaagatgtgtatacagctgcttctgctattgctggtttgggggaggggactggaaagctgagactgaaaatcaagagggaagaggtgaggaaggcccacccctggggctgggcagtgtagacctgccaccgtgtgaagaaaaatgaaagcacagatagcctaagactgcacaggcctgtgcccacataccttatagcacaggcccaggtggatcatctcatgctaacaccccacatgtgctggtggatccactcccatggatccactcacatgctgcaggcatgcagtagactcacccacagcccactctctggacaccaatcctgggaggtgggagctggaatggggagcaatgagaggagggagtgagactgttggcttaggaagggtggtacctctccctgcatcatacccaggaacttccagctccaaaatattggggtacagctcaccaccccccactccgccaacccattcctacctcctctagtgcagggacccaagttagatgatgagaaaatgccaaacaaagggaggcaaggacagagaaggtacctgcaggacccacaaggcccatactggcccccatctgaacccacctctcccacccagatcaacatccccccaacccctgtgcccccatcatctggaccccagagccagccctcccactaccaccaccaccaccccggggctccttggctcacctttctagaacatgggtacctcctctttttgggggctcatttagactgctgcctttgctgctgacttgcagtgtgactcgggcccattgttcaatctctgtggccctgagacaccagggaaaatctccccccccacaggacatactagttccctggcaggcaagggcttccaactgaggcagtgcatgtgtggcagagagaggcaggaagctggcagtggcagcttctgtgtctagggaggggtgtggctccctccttccctgtctgggaggttggagggaagaatctaggccttagcttgccctcctgccacccttccccttgtagatactgccttaacactccctcctctctcagctgtggctgccacccagccaggtttctccgtgctcactaatttatttccaggaaggtgtgtggaagacatgagccgtgtataatattttttttaacattttcattgcagtattgaccatcatccttggttgtgtatcgtgtaacacaaataatgatattaaaagcatcaaacaaaaaaaaaaaaaaaaaaaaaaaaaaaaaaaaagagtaaaaaaaaggggggggggcgccaaaaaaaaacccccggagggggccaaaggtatgccgcacccaccttttgtgtaacagggcggcccaaaaagggagacgaaaaaaaaaagaagaggagggggcgggcgaaacacacaggcgagtggggacaggggtgcgggggactgtggaagaccctcgcgggggggcgccaggggccacacccaagaaataacgcccgcgcataaactgcggcgacgggggaccaggctatttccgg

SEQ ID NO: 430338 - DNA, 3696 bp, Homo sapiens
agcgggagtcagccgcagtggctgagctgctgacaggaggcggcagcggagtaggaggcgaggcaagacctgcggctcggcccggccacagccgcggtagtgctaggcaagcccacggagtcacgccggcctcagccagtctgcgaacctctcgcccccgcccacccctgcatccgcccggcccctgcccgcccgagtggtccggggaggcctagtctgcaccacccgccgggctcctggggccgccgccccgcgcggtcctgtcggcgtccgcggccgcgcccggcccctggcccgctcgcccgccggcaccatgatggaggagatcgaccggttccaggtgcccaccgcgcactcggagatgcagccgctggacccagccgccgcctccatctctgacggagactgtgacgcccgggagggtgagtcagtagccatgaattacaaaccatccccgctccaagtgaagctggagaagcagcgggagctggcccggaagggctccctgaagaatggcagcatgggtagccctgtcaaccagcaacccaagaagaacaatgtcatggcccgaacaaggctggtcgtccccaataaaggctactcctcacttgaccagagccctgatgagaagccactggtagcccttgacacggacagcgatgatgactttgacatgtctagatactcctcctccggctactcctctgctgagcagatcaaccaagatttgaacatccagctgctgaaggacggctaccggttagatgagatccccgacgacgaggacctagacctcatcccccccaagtccgtgaaccccacgtgcatgtgctgccaggccacgtcctccaccgcctgccacattcagtagcgggcggggccactgcggtcgccggggcggggccgccaagggccgggtaggacgggcagaggccgaccccttcccagctcgtctgcctgcccccggccccgcgcccctacagccgccaacctcgtataacagtcattgcttcctcctatggtaggacgtgtacctctgtgtgttcatggagctggagaaaccaaaactgggtctctctccacccgggagctgaggaggggtgggggccgtttgttcagttacctgggggaacctcacccagcaccctgccccgcttcccagggctggccaagagagaagactggacggcagggaggtcaacattaacgagtggggggatcacaaagccaggggcttggccccaccccagcgaagccatgaactcccaagccccggcctcagcctaaccaggaaaggggctcggagggagaaaggcccagggcagtggggacgggtcccagcacctcggagcccccttcacacgccccctaccggcccatgtttctatttgcatttccccctcctcagatgggaagcctggcaaagctgcccaaccgggtagtgcccctcacccatcggatcactgccttcttcctcctcttgccccattcacccgcttccttgcactctgggagtggggcagggtaaggtgggccttacagacaggctgaggtttgggtggtgtgatctgtcctaattggcccctcaccaatgcatctatctgtctgccaccagcccaccccaccctgcccccaccctcacccacgcttctgctcattggtctcaatcccagcctggaagcagggagtaaggctggactccaatggcccattcccctcaccccagcccaagacgtgggaggctgcttcccagtaagaatccaggagcaagctttggtgaatccagtgggctgagtggctctatggatgtggttgtttggatgtggtagggagtgcttagcagaatgtgtgtgtatctctgaggctgtcagggggtgggtgggtgtgtgtctctgttggacctgtctctcctcagtctattcctgtcatagatgtgggtgtccctggtagggaagtgcctgtgtggtctgtttacagtgcagaaggcggctcagcagtgcaatgggctgacagccttggaccgggagtcagaagcctgggttctggttgtagctctggcccctccctgtgatcttcaacaagccacttgctttctctcgtcttcagtttcctcaactagaaaatgaacagcagctgaaattatgttgaagatccttttatacctgaaagagtttcttcatagaaatttctgtggtggggagggggcaatctctgtgtgtctcagtatacctaaaggttggggtggggcggagttgtgtgtctctgtagaaaggcgaaggggcagttcctatcaggactgtgtatgtctgagcacatgtggctctgtttgggattacgtgtttgtctgtgaatgtgtgtgtgtgttggagggttgtctattgtgtgtggctgtatagggtgtctgtagatcaagatgtgtatacagctgcttctgctattgctggtttgggggaggggactggaaagctgagactgaaaatcaagagggaagaggtgggagctggaatggggagcaatgagaggagggagtgagactgttggcttaggaagggtggtacctctccctgcatcatacccaggaacttccagctccaaaatattggggtacagctcaccaccccccactccgccaacccattcctacctcctctagtgcagggacccaagttagatgatgagaaaatgccaaacaaagggaggcaaggacagagaaggtacctgcaggacccacaaggcccatactggcccccatctgaacccacctctcccacccagatcaacatccccccaacccctgtgcccccatcatctggaccccagagccagccctcccactaccaccaccaccaccccggggctccttggctcacctttctagaacatgggtacctcctctttttgggggctcatttagactgctgcctttgctgctgacttgcagtgtgactcgggcccattgttcaatctctgtggccctgagacaccagggaaaatctccccccccacaggacatactagttccctggcaggcaagggcttccaactgaggcagtgcatgtgtggcagagagaggcaggaagctggcagtggcagcttctgtgtctagggaggggtgtggctccctccttccctgtctgggaggttggagggaagaatctaggccttagcttgccctcctgccacccttccccttgtagatactgccttaacactccctcctctctcagctgtggctgccacccagccaggtttctccgtgctcactaatttatttccaggaaggtgtgtggaagacatgagccgtgtataatattttttttaacattttcattgcagtattgaccatcatccttggttgtgtatcgtgtaacacaaataatgatattaaaagcatcaaacaaaaaaaaaaaaaaaaaaaaaaaaaaaaaaaaagagtaaaaaaaaggggggggggcgccaaaaaaaaacccccggagggggccaaaggtatgccgcacccaccttttgtgtaacagggcggcccaaaaagggagacgaaaaaaaaaagaagaggagggggcgggcgaaacacacaggcgagtggggacaggggtgcgggggactgtggaagaccctcgcgggggggcgccaggggccacacccaagaaataacgcccgcgcataaactgcggcgacgggggaccaggctatttccgg

SEQ ID NO: 430339 - DNA, 1064 bp, Homo sapiens
gcgttgcggcggccccaggagcccggcgggtggtgcagactaggcctccccggaccactcgggcgggcaggggccgggcggatgcaggggtgggcgggggcgagaggttcgcagactggctgaggccggcgtgactccgtgggcttgcctagcactaccgcggctgtggccgggccgagccgcaggtcttgcctcgcctcctactccgctgccgccaccccggggctccttggctcacctttctagaacatgggtacctcctctttttgggggctcatttagactgctgcctttgctgctgacttgcagtgtgactcgggcccattgttcaatctctgtggccctgagacaccagggaaaatctccccccccacaggacatactagttccctggcaggcaagggcttccaactgaggcagtgcatgtgtggcagagagaggcaggaagctggcagtggcagcttctgtgtctagggaggggtgtggctccctccttccctgtctgggaggttggagggaagaatctaggccttagcttgccctcctgccacccttccccttgtagatactgccttaacactccctcctctctcagctgtggctgccacccagccaggtttctccgtgctcactaatttatttccaggaaggtgtgtggaagacatgagccgtgtataatattttttttaacattttcattgcagtattgaccatcatccttggttgtgtatcgtgtaacacaaataatgatattaaaagcatcaaacaaaaaaaaaaaaaaaaaaaaaaaaaaaaaaaaagagtaaaaaaaaggggggggggcgccaaaaaaaaacccccggagggggccaaaggtatgccgcacccaccttttgtgtaacagggcggcccaaaaagggagacgaaaaaaaaaagaagaggagggggcgggcgaaacacacaggcgagtggggacaggggtgcgggggactgtggaagaccctcgcgggggggcgccaggggccacacccaagaaataacgcccgcgcataaactgcggcgacgggggaccaggctatttccgg

SEQ ID NO: 430340 - DNA, 937 bp, Homo sapiens
ccgctctccacccacccccgctctccacccacccccatcaacactatacaggcttcagaatggagactataccaggccgctctccaaacaccccggggctccttggctcacctttctagaacatgggtacctcctctttttgggggctcatttagactgctgcctttgctgctgacttgcagtgtgactcgggcccattgttcaatctctgtggccctgagacaccagggaaaatctccccccccacaggacatactagttccctggcaggcaagggcttccaactgaggcagtgcatgtgtggcagagagaggcaggaagctggcagtggcagcttctgtgtctagggaggggtgtggctccctccttccctgtctgggaggttggagggaagaatctaggccttagcttgccctcctgccacccttccccttgtagatactgccttaacactccctcctctctcagctgtggctgccacccagccaggtttctccgtgctcactaatttatttccaggaaggtgtgtggaagacatgagccgtgtataatattttttttaacattttcattgcagtattgaccatcatccttggttgtgtatcgtgtaacacaaataatgatattaaaagcatcaaacaaaaaaaaaaaaaaaaaaaaaaaaaaaaaaaaagagtaaaaaaaaggggggggggcgccaaaaaaaaacccccggagggggccaaaggtatgccgcacccaccttttgtgtaacagggcggcccaaaaagggagacgaaaaaaaaaagaagaggagggggcgggcgaaacacacaggcgagtggggacaggggtgcgggggactgtggaagaccctcgcgggggggcgccaggggccacacccaagaaataacgcccgcgcataaactgcggcgacgggggaccaggctatttccgg

SEQ ID NO: 430341 - DNA, 1277 bp, Homo sapiens
cccttactttgtagccccatcctgcacctcccacaccataaccttcagtggcttcttcttccttctgcgttaatcccaaactcctctgtctggcattcaagtccttcatgttctgagtttgtaaccagagagggtcttcggccccttagcacaggaccagacttataattagtgacatggatatttgttgaataagtggctgaataaatgaattttacttctctaacctgacctctctcttcacccctctatccagagccacacttatgctcacttttaaatgcatttttgcacacactatccctccttcctagaatgtccacctctctccaggtcatggtgtcacctaaaggaagccctctctgactgcgccatccttctgtgattgtctctcccccgccagcctttccctggcatcaagtacacactaactaccctaacatgggagttgtggttcctgaaaaacagggggcagcctcctctttttgccccccactgtctgcctcaggttgtgcagggccaggtactatctccaccaagcagcaggggcctggagttgggatccctgcctcagtccttctaggagcaagtggtttcacagtggaggcccagcccaggctgccctgagtagtaagacagggtggcctcaggggcaggacacagcttccttcccatgttctcctgcagagaagcagcgggagctggcccggaagggctccctgaagaatggcagcatgggtagccctgtcaaccagcaacccaagaagaacaatgtcatggcccgaacaaggctggtcgtccccaataaaggctactcctcacttgaccagagccctgatgagaagccactggtagcccttgacacggacaggtgtgtatgggggcttgggggtagctgggcagcccaaaggaacctgtatagcacaagtgggctgtacaggccacacctgctatattgtcagaattgggatattcttcagccagaatctctccaagggtgaattctccagggatgggaatttttttacaccagggactgggggttgaagagaggtggcagagagaggaaaggggggcctgcgctgtctgctgtcatcctgggacaactgatccaatggttgtccctaattggcctgtgatgttgtctctggacagcagaatatgatgcttaatgccccatcccctcaggaaggagccctactccctggaaaacacctggctagacttggactttgggaatatcctacaagtcagggtgatttgagtctacaaaaaaa

SEQ ID NO: 430342 - DNA, 1063 bp, Homo sapiens
agcgggagtcagccgcagtggctgagctgctgacaggaggcggcagcggagtaggaggcgaggcaagacctgcggctcggcccggccacagccgcggtagtgctaggcaagcccacggagtcacgccggcctcagccagtctgcgaacctctcgcccccgcccacccctgcatccgcccggcccctgcccgcccgagtggtccggggaggcctagtctgcaccacccgccgggctcctggggccgccgccccgcgcggtcctgtcggcgtccgcggccgcgcccggcccctggcccgctcgcccgccggcaccatgatggaggagatcgaccggttccaggtgcccaccgcgcactcggagatgcagccgctggacccagccgccgcctccatctctgacggagactgtgacgcccgggagggtgagtcagtagccatgaattacaaaccatccccgctccaagtgaagctggagaagcagcgggagctggcccggaagggctccctgaagaatggcagcatgggtagccctgtcaaccagcaacccaagaagaacaatgtcatggcccgaacaaggctggtcgtccccaataaaggctactcctcacttgaccagagccctgatgagaagccactggtagcccttgacacggacaggtgtgtatgggggcttgggggtagctgggcagcccaaaggaacctgtatagcacaagtgggctgtacaggccacacctgctatattgtcagaattgggatattcttcagccagaatctctccaagggtgaattctccagggatgggaatttttttacaccagggactgggggttgaagagaggtggcagagagaggaaaggggggcctgcgctgtctgctgtcatcctgggacaactgatccaatggttgtccctaattggcctgtgatgttgtctctggacagcagaatatgatgcttaatgccccatcccctcaggaaggagccctactccctggaaaacacctggctagacttggactttgggaatatcctacaagtcagggtgatttgagtctacaaaaaaa

SEQ ID NO: 430343 - DNA, 1137 bp, Homo sapiens
cccttactttgtagccccatcctgcacctcccacaccataaccttcagtggcttcttcttccttctgcgttaatcccaaactcctctgtctggcattcaagtccttcatgttctgagtttgtaaccagagagggtcttcggccccttagcacaggaccagacttataattagtgacatggatatttgttgaataagtggctgaataaatgaattttacttctctaacctgacctctctcttcacccctctatccagagccacacttatgctcacttttaaatgcatttttgcacacactatccctccttcctagaatgtccacctctctccaggtcatggtgtcacctaaaggaagccctctctgactgcgccatccttctgtgattgtctctcccccgccagcctttccctggcatcaagtacacactaactaccctaacatgggagttgtggttcctgaaaaacagggggcagcctcctctttttgccccccactgtctgcctcaggttgtgcagggccaggtactatctccaccaagcagcaggggcctggagttgggatccctgcctcagtccttctaggagcaagtggtttcacagtggaggcccagcccaggctgccctgagtagtaagacagggtggcctcaggggcaggacacagcttccttcccatgttctcctgcagagaagcagcgggagctggcccggaagggctccctgaagaatggcagcatgggtagccctgtcaaccagcaacccaagaagaacaatgtcatggcccgaacaaggctggtcgtccccaataaaggctactcctcacttgaccagagccctgatgagaagccactggtagcccttgacacggacaggtgtgtatgggggcttgggggtagctgggcagcccaaaggaacctgtatagcacaagtgggctgtacaggccacacctgctatattgtcagaattgggatattcttcagccagaatctctccaagggtgaattctccagggatgggaatttttttacaccagggactgggggttgaagagaggtgccgatgaatagcgaattcaacacaccacaatactatgaacggccatgcaccaccacccacggaggtgccgatgaatagcga

SEQ ID NO: 430344 - DNA, 523 bp, Homo sapiens
gcggccgcgcccggcccctggcccgctcgcccgccggcaccatgatggaggagatcgaccggttccaggtgcccaccgcgcactcggagatgcagccgctggtgagggggcgggcggcgggcaggccaaggccggagggggcgtcgcttgagggggagggagggaatcaggccggggggatcgtgcggaggggcgccatcggatggggcaaagagatccctgaaaacgtattgccgggggacggggacttgcaggacaagaaaaccgtgggagaatatgctggatgagagcaaagggacctgtaagggcggagggcaccgtcggtggaagcagggcaccgtcggatggaacggagggggcacaaaggtgcacaccgctagtggaggcccatagcagggactggcgagggaactgccatggggcaccgccggcggcaggcccaggggtctgggatgggaggtggggaggcgtttagtcctagaggcctgtgatgcttagggcgggggagccgtcaggctaagag

SEQ ID NO: 430345 - DNA, 788 bp, Homo sapiens
  misc_feature (581)..(582): n is a, c, g, or t
  misc_feature (590)..(590): n is a, c, g, or t
  misc_feature (602)..(602): n is a, c, g, or t
  misc_feature (611)..(611): n is a, c, g, or t
  misc_feature (617)..(617): n is a, c, g, or t
  misc_feature (629)..(629): n is a, c, g, or t
  misc_feature (632)..(632): n is a, c, g, or t
  misc_feature (634)..(634): n is a, c, g, or t
  misc_feature (639)..(639): n is a, c, g, or t
  misc_feature (645)..(645): n is a, c, g, or t
  misc_feature (654)..(654): n is a, c, g, or t
agcgggagtcagccgcagtggctgagctgctgacaggaggcggcagcggagtaggaggcgaggcaagacctgcggctcggcccggccacagccgcggtagtgctaggcaagcccacggagtcacgccggcctcagccagtctgcgaacctctcgcccccgcccacccctgcatccgcccggcccctgcccgcccgagtggtccggggaggcctagtctgcaccacccgccgggctcctggggccgccgccccgcgcggtcctgtcggcgtccgcggccgcgcccggcccctggcccgctcgcccgccggcaccatgatggaggagatcgaccggttccaggacccagccgccgcctccatctctgacggagactgtgacgcccgggaggagaagcagcgggagctggcccggaagggctccctgaagaatggcagcatgggtagccctgtcaaccagcaacccaagaagaacaatgtcatggcccgaacaaggctggtcgtccccaataaaggctactcctcacttgaccagagccctgatgagaagccactggtagcccttgacacggacagcgatgatnnactttganatgtctagatantcctcctcnggatantcctctgctgancanantcaancaaganttgaacatncagactgctagagggacggctaccgggttacgatcaagaatccccgagaacgaggaccatagacttataccgccaagtcagaaacccacggccattgtgccaggaagatcaccacgcatgaaatcaataagacg

SEQ ID NO: 430346 - DNA, 4156 bp, Homo sapiens
cccttactttgtagccccatcctgcacctcccacaccataaccttcagtggcttcttcttccttctgcgttaatcccaaactcctctgtctggcattcaagtccttcatgttctgagtttgtaaccagagagggtcttcggccccttagcacaggaccagacttataattagtgacatggatatttgttgaataagtggctgaataaatgaattttacttctctaacctgacctctctcttcacccctctatccagagccacacttatgctcacttttaaatgcatttttgcacacactatccctccttcctagaatgtccacctctctccaggtcatggtgtcacctaaaggaagccctctctgactgcgccatccttctgtgattgtctctcccccgccagcctttccctggcatcaagtacacactaactaccctaacatgggagttgtggttcctgaaaaacagggggcagcctcctctttttgccccccactgtctgcctcaggttgtgcagggccaggtactatctccaccaagcagcaggggcctggagttgggatccctgcctcagtccttctaggagcaagtggtttcacagtggaggcccagcccaggctgccctgagtagtaagacagggtggcctcaggggcaggacacagcttccttcccatgttctcctgcagagaagcagcgggagctggcccggaagggctccctgaagaatggcagcatgggtagccctgtcaaccagcaacccaagaagaacaatgtcatggcccgaacaaggctggtcgtccccaataaaggctactcctcacttgaccagagccctgatgagaagccactggtagcccttgacacggacagcgatgatgactttgacatgtctagatactcctcctccggctactcctctgctgagcagatcaaccaagatttgaacatccagctgctgaaggacggctaccggttagatgagatccccgacgacgaggacctagacctcatcccccccaagtccgtgaaccccacgtgcatgtgctgccaggccacgtcctccaccgcctgccacattcagtagcgggcggggccactgcggtcgccggggcggggccgccaagggccgggtaggacgggcagaggccgaccccttcccagctcgtctgcctgcccccggccccgcgcccctacagccgccaacctcgtataacagtcattgcttcctcctatggtaggacgtgtacctctgtgtgttcatggagctggagaaaccaaaactgggtctctctccacccgggagctgaggaggggtgggggccgtttgttcagttacctgggggaacctcacccagcaccctgccccgcttcccagggctggccaagagagaagactggacggcagggaggtcaacattaacgagtggggggatcacaaagccaggggcttggccccaccccagcgaagccatgaactcccaagccccggcctcagcctaaccaggaaaggggctcggagggagaaaggcccagggcagtggggacgggtcccagcacctcggagcccccttcacacgccccctaccggcccatgtttctatttgcatttccccctcctcagatgggaagcctggcaaagctgcccaaccgggtagtgcccctcacccatcggatcactgccttcttcctcctcttgccccattcacccgcttccttgcactctgggagtggggcagggtaaggtgggccttacagacaggctgaggtttgggtggtgtgatctgtcctaattggcccctcaccaatgcatctatctgtctgccaccagcccaccccaccctgcccccaccctcacccacgcttctgctcattggtctcaatcccagcctggaagcagggagtaaggctggactccaatggcccattcccctcaccccagcccaagacgtgggaggctgcttcccagtaagaatccaggagcaagctttggtgaatccagtgggctgagtggctctatggatgtggttgtttggatgtggtagggagtgcttagcagaatgtgtgtgtatctctgaggctgtcagggggtgggtgggtgtgtgtctctgttggacctgtctctcctcagtctattcctgtcatagatgtgggtgtccctggtagggaagtgcctgtgtggtctgtttacagtgcagaaggcggctcagcagtgcaatgggctgacagccttggaccgggagtcagaagcctgggttctggttgtagctctggcccctccctgtgatcttcaacaagccacttgctttctctcgtcttcagtttcctcaactagaaaatgaacagcagctgaaattatgttgaagatccttttatacctgaaagagtttcttcatagaaatttctgtggtggggagggggcaatctctgtgtgtctcagtatacctaaaggttggggtggggcggagttgtgtgtctctgtagaaaggcgaaggggcagttcctatcaggactgtgtatgtctgagcacatgtggctctgtttgggattacgtgtttgtctgtgaatgtgtgtgtgtgttggagggttgtctattgtgtgtggctgtatagggtgtctgtagatcaagatgtgtatacagctgcttctgctattgctggtttgggggaggggactggaaagctgagactgaaaatcaagagggaagaggtgaggaaggcccacccctggggctgggcagtgtagacctgccaccgtgtgaagaaaaatgaaagcacagatagcctaagactgcacaggcctgtgcccacataccttatagcacaggcccaggtggatcatctcatgctaacaccccacatgtgctggtggatccactcccatggatccactcacatgctgcaggcatgcagtagactcacccacagcccactctctggacaccaatcctgggaggtgggagctggaatggggagcaatgagaggagggagtgagactgttggcttaggaagggtggtacctctccctgcatcatacccaggaacttccagctccaaaatattggggtacagctcaccaccccccactccgccaacccattcctacctcctctagtgcagggacccaagttagatgatgagaaaatgccaaacaaagggaggcaaggacagagaaggtacctgcaggacccacaaggcccatactggcccccatctgaacccacctctcccacccagatcaacatccccccaacccctgtgcccccatcatctggaccccagagccagccctcccactaccaccaccaccaccccggggctccttggctcacctttctagaacatgggtacctcctctttttgggggctcatttagactgctgcctttgctgctgacttgcagtgtgactcgggcccattgttcaatctctgtggccctgagacaccagggaaaatctccccccccacaggacatactagttccctggcaggcaagggcttccaactgaggcagtgcatgtgtggcagagagaggcaggaagctggcagtggcagcttctgtgtctagggaggggtgtggctccctccttccctgtctgggaggttggagggaagaatctaggccttagcttgccctcctgccacccttccccttgtagatactgccttaacactccctcctctctcagctgtggctgccacccagccaggtttctccgtgctcactaatttatttccaggaaggtgtgtggaagacatgagccgtgtataatattttttttaacattttcattgcagtattgaccatcatccttggttgtgtatcgtgtaacacaaataatgatattaaaagcatcaaacaaaaaaaaaaaaaaaaaaaaaaaaaaaaaaaaagagtaaaaaaaaggggggggggcgccaaaaaaaaacccccggagggggccaaaggtatgccgcacccaccttttgtgtaacagggcggcccaaaaagggagacgaaaaaaaaaagaagaggagggggcgggcgaaacacacaggcgagtggggacaggggtgcgggggactgtggaagaccctcgcgggggggcgccaggggccacacccaagaaataacgcccgcgcataaactgcggcgacgggggaccaggctatttccgg

SEQ ID NO: 430347 - DNA, 3909 bp, Homo sapiens
agcgggagtcagccgcagtggctgagctgctgacaggaggcggcagcggagtaggaggcgaggcaagacctgcggctcggcccggccacagccgcggtagtgctaggcaagcccacggagtcacgccggcctcagccagtctgcgaacctctcgcccccgcccacccctgcatccgcccggcccctgcccgcccgagtggtccggggaggcctagtctgcaccacccgccgggctcctggggccgccgccccgcgcggtcctgtcggcgtccgcggccgcgcccggcccctggcccgctcgcccgccggcaccatgatggaggagatcgaccggttccaggacccagccgccgcctccatctctgacggagactgtgacgcccgggagggtgagtcagtagccatgaattacaaaccatccccgctccaagtgaagctggagaagcagcgggagctggcccggaagggctccctgaagaatggcagcatgggtagccctgtcaaccagcaacccaagaagaacaatgtcatggcccgaacaaggctggtcgtccccaataaaggctactcctcacttgaccagagccctgatgagaagccactggtagcccttgacacggacagcgatgatgactttgacatgtctagatactcctcctccggctactcctctgctgagcagatcaaccaagatttgaacatccagctgctgaaggacggctaccggttagatgagatccccgacgacgaggacctagacctcatcccccccaagtccgtgaaccccacgtgcatgtgctgccaggccacgtcctccaccgcctgccacattcagtagcgggcggggccactgcggtcgccggggcggggccgccaagggccgggtaggacgggcagaggccgaccccttcccagctcgtctgcctgcccccggccccgcgcccctacagccgccaacctcgtataacagtcattgcttcctcctatggtaggacgtgtacctctgtgtgttcatggagctggagaaaccaaaactgggtctctctccacccgggagctgaggaggggtgggggccgtttgttcagttacctgggggaacctcacccagcaccctgccccgcttcccagggctggccaagagagaagactggacggcagggaggtcaacattaacgagtggggggatcacaaagccaggggcttggccccaccccagcgaagccatgaactcccaagccccggcctcagcctaaccaggaaaggggctcggagggagaaaggcccagggcagtggggacgggtcccagcacctcggagcccccttcacacgccccctaccggcccatgtttctatttgcatttccccctcctcagatgggaagcctggcaaagctgcccaaccgggtagtgcccctcacccatcggatcactgccttcttcctcctcttgccccattcacccgcttccttgcactctgggagtggggcagggtaaggtgggccttacagacaggctgaggtttgggtggtgtgatctgtcctaattggcccctcaccaatgcatctatctgtctgccaccagcccaccccaccctgcccccaccctcacccacgcttctgctcattggtctcaatcccagcctggaagcagggagtaaggctggactccaatggcccattcccctcaccccagcccaagacgtgggaggctgcttcccagtaagaatccaggagcaagctttggtgaatccagtgggctgagtggctctatggatgtggttgtttggatgtggtagggagtgcttagcagaatgtgtgtgtatctctgaggctgtcagggggtgggtgggtgtgtgtctctgttggacctgtctctcctcagtctattcctgtcatagatgtgggtgtccctggtagggaagtgcctgtgtggtctgtttacagtgcagaaggcggctcagcagtgcaatgggctgacagccttggaccgggagtcagaagcctgggttctggttgtagctctggcccctccctgtgatcttcaacaagccacttgctttctctcgtcttcagtttcctcaactagaaaatgaacagcagctgaaattatgttgaagatccttttatacctgaaagagtttcttcatagaaatttctgtggtggggagggggcaatctctgtgtgtctcagtatacctaaaggttggggtggggcggagttgtgtgtctctgtagaaaggcgaaggggcagttcctatcaggactgtgtatgtctgagcacatgtggctctgtttgggattacgtgtttgtctgtgaatgtgtgtgtgtgttggagggttgtctattgtgtgtggctgtatagggtgtctgtagatcaagatgtgtatacagctgcttctgctattgctggtttgggggaggggactggaaagctgagactgaaaatcaagagggaagaggtgaggaaggcccacccctggggctgggcagtgtagacctgccaccgtgtgaagaaaaatgaaagcacagatagcctaagactgcacaggcctgtgcccacataccttatagcacaggcccaggtggatcatctcatgctaacaccccacatgtgctggtggatccactcccatggatccactcacatgctgcaggcatgcagtagactcacccacagcccactctctggacaccaatcctgggaggtgggagctggaatggggagcaatgagaggagggagtgagactgttggcttaggaagggtggtacctctccctgcatcatacccaggaacttccagctccaaaatattggggtacagctcaccaccccccactccgccaacccattcctacctcctctagtgcagggacccaagttagatgatgagaaaatgccaaacaaagggaggcaaggacagagaaggtacctgcaggacccacaaggcccatactggcccccatctgaacccacctctcccacccagatcaacatccccccaacccctgtgcccccatcatctggaccccagagccagccctcccactaccaccaccaccaccccggggctccttggctcacctttctagaacatgggtacctcctctttttgggggctcatttagactgctgcctttgctgctgacttgcagtgtgactcgggcccattgttcaatctctgtggccctgagacaccagggaaaatctccccccccacaggacatactagttccctggcaggcaagggcttccaactgaggcagtgcatgtgtggcagagagaggcaggaagctggcagtggcagcttctgtgtctagggaggggtgtggctccctccttccctgtctgggaggttggagggaagaatctaggccttagcttgccctcctgccacccttccccttgtagatactgccttaacactccctcctctctcagctgtggctgccacccagccaggtttctccgtgctcactaatttatttccaggaaggtgtgtggaagacatgagccgtgtataatattttttttaacattttcattgcagtattgaccatcatccttggttgtgtatcgtgtaacacaaataatgatattaaaagcatcaaacaaaaaaaaaaaaaaaaaaaaaaaaaaaaaaaaagagtaaaaaaaaggggggggggcgccaaaaaaaaacccccggagggggccaaaggtatgccgcacccaccttttgtgtaacagggcggcccaaaaagggagacgaaaaaaaaaagaagaggagggggcgggcgaaacacacaggcgagtggggacaggggtgcgggggactgtggaagaccctcgcgggggggcgccaggggccacacccaagaaataacgcccgcgcataaactgcggcgacgggggaccaggctatttccgg

SEQ ID NO: 430348 - DNA, 3890 bp, Homo sapiens
agcgggagtcagccgcagtggctgagctgctgacaggaggcggcagcggagtaggaggcgaggcaagacctgcggctcggcccggccacagccgcggtagtgctaggcaagcccacggagtcacgccggcctcagccagtctgcgaacctctcgcccccgcccacccctgcatccgcccggcccctgcccgcccgagtggtccggggaggcctagtctgcaccacccgccgggctcctggggccgccgccccgcgcggtcctgtcggcgtccgcggccgcgcccggcccctggcccgctcgcccgccggcaccatgatggaggagatcgaccggttccaggtgcccaccgcgcactcggagatgcagccgctggacccagccgccgcctccatctctgacggagactgtgacgcccgggagggtgagtcagtagccatgaattacaaaccatccccgctccaagtgaagctggagaagcagcgggagctggcccggaagggctccctgaagaatggcagcatgggtagccctgtcaaccagcaacccaagaagaacaatgtcatggcccgaacaaggctggtcgtccccaataaaggctactcctcacttgaccagagccctgatgagaagccactggtagcccttgacacggacagcgatgatgactttgacatgtctagatactcctcctccggctactcctctgctgagcagatcaaccaagatttgaacatccagctgctgaaggacggctaccggttagatgagatccccgacgacgaggacctagacctcatcccccccaagtccgtgaaccccacgtgcatgtgctgccaggccacgtcctccaccgcctgccacattcagtagcgggcggggccactgcggtcgccggggcggggccgccaagggccgggtaggacgggcagaggccgaccccttcccagctcgtctgcctgcccccggccccgcgcccctacagccgccaacctcgtataacagtcattgcttcctcctatggtaggacgtgtacctctgtgtgttcatggagctggagaaaccaaaactgggtctctctccacccgggagctgaggaggggtgggggccgtttgttcagttacctgggggaacctcacccagcaccctgccccgcttcccagggctggccaagagagaagactggacggcagggaggtcaacattaacgagtggggggatcacaaagccaggggcttggccccaccccagcgaagccatgaactcccaagccccggcctcagcctaaccaggaaaggggctcggagggagaaaggcccagggcagtggggacgggtcccagcacctcggagcccccttcacacgccccctaccggcccatgtttctatttgcatttccccctcctcagatgggaagcctggcaaagctgcccaaccgggtagtgcccctcacccatcggatcactgccttcttcctcctcttgccccattcacccgcttccttgcactctgggagtggggcagggtaaggtgggccttacagacaggctgaggtttgggtggtgtgatctgtcctaattggcccctcaccaatgcatctatctgtctgccaccagcccaccccaccctgcccccaccctcacccacgcttctgctcattggtctcaatcccagcctggaagcagggagtaaggctggactccaatggcccattcccctcaccccagcccaagacgtgggaggctgcttcccagtaagaatccaggagcaagctttggtgaatccagtgggctgagtggctctatggatgtggttgtttggatgtggtagggagtgcttagcagaatgtgtgtgtatctctgaggctgtcagggggtgggtgggtgtgtgtctctgttggacctgtctctcctcagtctattcctgtcatagatgtgggtgtccctggtagggaagtgcctgtgtggtctgtttacagtgcagaaggcggctcagcagtgcaatgggctgacagccttggaccgggagtcagaagcctgggttctggttgtagctctggcccctccctgtgatcttcaacaagccacttgctttctctcgtcttcagtttcctcaactagaaaatgaacagcagctgaaattatgttgaagatccttttatacctgaaagagtttcttcatagaaatttctgtggtggggagggggcaatctctgtgtgtctcagtatacctaaaggttggggtggggcggagttgtgtgtctctgtagaaaggcgaaggggcagttcctatcaggactgtgtatgtctgagcacatgtggctctgtttgggattacgtgtttgtctgtgaatgtgtgtgtgtgttggagggttgtctattgtgtgtggctgtatagggtgtctgtagatcaagatgtgtatacagctgcttctgctattgctggtttgggggaggggactggaaagctgagactgaaaatcaagagggaagaggtgaggaaggcccacccctggggctgggcagtgtagacctgccaccgtgtgaagaaaaatgaaagcacagatagcctaagactgcacaggcctgtgcccacataccttatagcacaggcccaggtggatcatctcatgctaacaccccacatgtgctggtggatccactcccatggatccactcacatgctgcaggcatgcagtagactcacccacagcccactctctggacaccaatcctgggaggtgggagctggaatggggagcaatgagaggagggagtgagactgttggcttaggaagggtggtacctctccctgcatcatacccaggaacttccagctccaaaatattggggtacagctcaccaccccccactccgccaacccattcctacctcctctagtgcagggacccaagttagatgatgagaaaatgccaaacaaagggaggcaaggacagagaaggtacctgcaggacccacaaggcccatactggcccccatctgaacccacctctcccacccagatcaacatccccccaacccctgtgcccccatcatctggaccccagagccagccctcccactaccaccaccaccaccccggggctccttggctcacctttctagaacatgggtacctcctctttttgggggctcatttagactgctgcctttgctgctgacttgcagtgtgactcgggcccattgttcaatctctgtggccaggcaagggcttccaactgaggcagtgcatgtgtggcagagagaggcaggaagctggcagtggcagcttctgtgtctagggaggggtgtggctccctccttccctgtctgggaggttggagggaagaatctaggccttagcttgccctcctgccacccttccccttgtagatactgccttaacactccctcctctctcagctgtggctgccacccagccaggtttctccgtgctcactaatttatttccaggaaggtgtgtggaagacatgagccgtgtataatattttttttaacattttcattgcagtattgaccatcatccttggttgtgtatcgtgtaacacaaataatgatattaaaagcatcaaacaaaaaaaaaaaaaaaaaaaaaaaaaaaaaaaaagagtaaaaaaaaggggggggggcgccaaaaaaaaacccccggagggggccaaaggtatgccgcacccaccttttgtgtaacagggcggcccaaaaagggagacgaaaaaaaaaagaagaggagggggcgggcgaaacacacaggcgagtggggacaggggtgcgggggactgtggaagaccctcgcgggggggcgccaggggccacacccaagaaataacgcccgcgcataaactgcggcgacgggggaccaggctatttccgg

SEQ ID NO: 430349 - DNA, 2032 bp, Homo sapiens
agcgggagtcagccgcagtggctgagctgctgacaggaggcggcagcggagtaggaggcgaggcaagacctgcggctcggcccggccacagccgcggtagtgctaggcaagcccacggagtcacgccggcctcagccagtctgcgaacctctcgcccccgcccacccctgcatccgcccggcccctgcccgcccgagtggtccggggaggcctagtctgcaccacccgccgggctcctggggccgccgccccgcgcggtcctgtcggcgtccgcggccgcgcccggcccctggcccgctcgcccgccggcaccatgatggaggagatcgaccggttccaggtgcccaccgcgcactcggagatgcagccgctggacccagccgccgcctccatctctgacggagactgtgacgcccgggagggtgagtcagtagccatgaattacaaaccatccccgctccaagtgaagctggtgtggctgtatagggtgtctgtagatcaagatgtgtatacagctgcttctgctattgctggtttgggggaggggactggaaagctgagactgaaaatcaagagggaagaggtgaggaaggcccacccctggggctgggcagtgtagacctgccaccgtgtgaagaaaaatgaaagcacagatagcctaagactgcacaggcctgtgcccacataccttatagcacaggcccaggtggatcatctcatgctaacaccccacatgtgctggtggatccactcccatggatccactcacatgctgcaggcatgcagtagactcacccacagcccactctctggacaccaatcctgggaggtgggagctggaatggggagcaatgagaggagggagtgagactgttggcttaggaagggtggtacctctccctgcatcatacccaggaacttccagctccaaaatattggggtacagctcaccaccccccactccgccaacccattcctacctcctctagtgcagggacccaagttagatgatgagaaaatgccaaacaaagggaggcaaggacagagaaggtacctgcaggacccacaaggcccatactggcccccatctgaacccacctctcccacccagatcaacatccccccaacccctgtgcccccatcatctggaccccagagccagccctcccactaccaccaccaccaccccggggctccttggctcacctttctagaacatgggtacctcctctttttgggggctcatttagactgctgcctttgctgctgacttgcagtgtgactcgggcccattgttcaatctctgtggccctgagacaccagggaaaatctccccccccacaggacatactagttccctggcaggcaagggcttccaactgaggcagtgcatgtgtggcagagagaggcaggaagctggcagtggcagcttctgtgtctagggaggggtgtggctccctccttccctgtctgggaggttggagggaagaatctaggccttagcttgccctcctgccacccttccccttgtagatactgccttaacactccctcctctctcagctgtggctgccacccagccaggtttctccgtgctcactaatttatttccaggaaggtgtgtggaagacatgagccgtgtataatattttttttaacattttcattgcagtattgaccatcatccttggttgtgtatcgtgtaacacaaataatgatattaaaagcatcaaacaaaaaaaaaaaaaaaaaaaaaaaaaaaaaaaaagagtaaaaaaaaggggggggggcgccaaaaaaaaacccccggagggggccaaaggtatgccgcacccaccttttgtgtaacagggcggcccaaaaagggagacgaaaaaaaaaagaagaggagggggcgggcgaaacacacaggcgagtggggacaggggtgcgggggactgtggaagaccctcgcgggggggcgccaggggccacacccaagaaataacgcccgcgcataaactgcggcgacgggggaccaggctatttccgg

SEQ ID NO: 430350 - DNA, 4421 bp, Homo sapiens
  misc_feature (3977)..(3977): n is a, c, g, or t
  misc_feature (3979)..(3979): n is a, c, g, or t
  misc_feature (3982)..(3982): n is a, c, g, or t
  misc_feature (3984)..(3985): n is a, c, g, or t
cgccggccctagtctgcctgttttcgactcgcgctccggctgctgtcacttggctctctggctggagcttgaggacgcaaggagggtttgtcactggcagactcgagactgtaggcactgccatggcccctgtgctcagtaaggactcggcggacatcgagagtatcctggctttaaatcctcgaacacaaactcatgcaactctgtgttccacttcggccaagaaattagacaagaaacattggaaaagaaatcctgataagaactgctttaattgtgagaagctggagaataattttgatgacatcaagcacacgactcttggtgagcgaggagctctccgagaagcaatgagatgcctgaaatgtgcagatgccccgtgtcagaagagctgtccaactaatcttgatattaaatcattcatcacaagtattgcaaacaagaactattatggagctgctaagatgatattttctgacaacccacttggtctgacttgtggaatggtatgtccaacctctgatctttgtgtaggtggatgcaatttatatgccactgaagagggacccattaatattggtggattgcagcaatttgctactgaggtattcaaagcaatgagtatcccacagatcagaaatccttcgctgcctcccccagaaaaaatgtctgaagcctattctgcaaagattgctctttttggtgctgggcctgcaagtataagttgtgcttcctttttggctcgattggggtactctgacatcactatatttgaaaaacaagaatatgttggtggtttaagtacttctgaaattcctcagttccggctgccgtatgatgtagtgaattttgagattgagctaatgaaggaccttggtgtaaagataatttgcggtaaaagcctttcagtgaatgaaatgactcttagcactttgaaagaaaaaggctacaaagctgctttcattggaataggtttgccagaacccaataaagatgccatcttccaaggcctgacgcaggaccaggggttttatacatccaaagactttttgccacttgtagccaaaggcagtaaagcaggaatgtgcgcctgtcactctccattgccatcgatacggggagtcgtgattgtacttggagctggagacactgcctttgactgtgcaacatctgctctacgttgtggagctcgccgtgtgttcatcgtcttcagaaaaggctttgttaatataagagctgtccctatggaacttgctaaggaagaaaagtgtgaatttctgccattcctgtccccacggaaggttatagtaaaaggtgggagaattgttgctatgcagtttgttcggacagagcaagatgaaactggaaaatggaatgaagatgaagatcagatggtccatctgaaagccgatgtggtcatcagtgcctttggttcagttctgagtgatcctaaagtaaaagaagccttgagccctataaaatttaacagatggggtctcccagaagtagatccagaaactatgcaaactagtgaagcatgggtatttgcaggtggtgatgtcgttggtttggctaacactacagtggaatcggtgaatgatggaaagcaagcttcttggtacattcacaaatacgtacagtcacaatatggagcttccgtttctgccaagcctgaactacccctcttttacactcctattgatctggtggacattagtgtagaaatggccggattgaagtttataaatccttttggtcttgctagcgcaactccagccaccagcacatcaatgattcgaagagcttttgaagctggatggggttttgccctcaccaaaactttctctcttgataaggacattgtgacaaatgtttcccccagaatcatccggggaaccacctctggccccatgtatggccctggacaaagctcctttctgaatattgagctcatcagtgagaaaacggctgcatattggtgtcaaagtgtcactgaactaaaggctgactttccagacaacattgtgattgctagcattatgtgcagttacaataaaaatgactggacggaacttgccaagaagtctgaggattctggagcagatgccctggagttaaatttatcatgtccacatggcatgggagaaagaggaatgggcctggcctgtgggcaggatccagagctggtgcggaacatctgccgctgggttaggcaagctgttcagattcctttttttgccaagctgaccccaaatgtcactgatattgtgagcatcgcaagagctgcaaaggaaggtggtgccaatggcgttacagccaccaacactgtctcaggtctgatgggattaaaatctgatggcacaccttggccagcagtggggattgcaaagcgaactacatatggaggagtgtctgggacagcaatcagacctattgctttgagagctgtgacctccattgctcgtgctctgcctggatttcccattttggctactggtggaattgactctgctgaaagtggtcttcagtttctccatagtggtgcttccgtcctccaggtatgcagtgccattcagaatcaggatttcactgtgatcgaagactactgcactggcctcaaagccctgctttatctgaaaagcattgaagaactacaagactgggatggacagagtccagctactgtgagtcaccagaaagggaaaccagttccacgtatagctgaactcatggacaagaaactgccaagttttggaccttatctggaacagcgcaagaaaatcatagcagaaaacaagattagactgaaagaacaaaatgtagctttttcaccacttaagagaaactgttttatccccaaaaggcctattcctaccatcaaggatgtaataggaaaagcactgcagtaccttggaacatttggtgaattgagcaacgtagagcaagttgtggctatgattgatgaagaaatgtgtatcaactgtggtaaatgctacatgacctgtaatgattctggctaccaggctatacagtttgatccagaaacccacctgcccaccataaccgacacttgtacaggctgtactctgtgtctcagtgtttgccctattgtcgactgcatcaaaatggtttccaggacaacaccttatgaaccaaagagaggcgtacccttatctgtgaatccggtgtgttaaggtgatttgtgaaacagttgctgtgaactttcatgtcacctacatatgctgatctcttaaaatcatgatccttgtgttcagctctttccaaattaaaacaaatatacattttctaaataaaaatatgtaatttcaaaatacatttgtaagtgtaaaaaatgtctcatgtcaatgaccattcaattagtggcataaaatagaataattcttttctgaggatagtagttaaataactgtgtggcagttaattggatgttcactgccagttgtcttatgtgaaaaattaactttttgtgtggcaattagtgtgacagtttccaaattgccctatgctgtgctccatatttgatttctaattgtaagtgaaattaagcattttgaaacaaagtactctttaacatacaagaaaatgtatccaaggaaacattttatcaataaaaattacctttaattttaatgctgtttctaagaaaatgtagttagctccataaagtacaaatgaagaaagtcaaaaattatttgctatggcaggataagaaagcctaaaattgagtttgtggactttattaagtaaaatccccttcgctgaaattgcttatttttggtgttggatagaggatagggagaatatttactaactaaataccattcactactcatgcgtgagatgggtgtacaaactcatcctcttttaatggcatttctctttaaactatgttcctaaccaaatgagatgataggatagatcctggttaccactcttttactgtgcacatatgggcncngantnntttaatagtcaccttcatgattatagcaactaatgtttgaacaaagctcaaagtatgcaatgcttcattattcaagaatgaaaaatataatgttgataatatatattaagtgtgccaaatcagtttgactactctctgttttagtgtttatgtttaaaagaaatatattttttgttattattagataatatttttgtatttctctattttcataatcagtaaatagtgtcatataaactcatttatctcctcttcatggcatcttcaatatgaatctataagtagtaaatcagaaagtaacaatctatggcttatttctatgacaaattcaagagctagaaaaataaaatgtttcattatgcacttttagaaatgcatatttgccacaaaacctgtattactgaataatatcaaataaaatatcataaagcatttt

SEQ ID NO: 430351 - DNA, 1055 bp, Homo sapiens
cgccggccctagtctgcctgttttcgactcgcgctccggctgctgtcacttggctctctggctggagcttgaggacgcaaggagggtttgtcactggcagactcgagactgtaggcactgccatggcccctgtgctcagtaaggactcggcggacatcgagagtatcctggctttaaatcctcgaacacaaactcatgcaactctgtgttccacttcggccaagaaattagacaagaaacattggaaaagaaatcctgataagaactgctttaattgtgagaagctggagaataattttgatgacatcaagcacacgactcttggtgagcgaggagctctccgagaagcaatgagatgcctgaaatgtgcagatgccccgtgtcagaagagctgtccaactaatcttgatattaaatcattcatcacaagtattgcaaacaagaactattatggagctgctaagatgatattttctgacaacccacttggtctgacttgtggaatggtatgtccaacctctgatctttgtgtaggtggatgcaatttatatgccactgaagagggacccattaatattggtggattgcagcaatttgctactgagactttgatcctggctttctctttaatgaatcatttgtaaagactttgattcttcagacactcttgggctctctgacgtctcctatttggagtcaacaagcaggttaattcccatgtatcatttaaatgatcagcttatatgaagggtatagtaagattttataatctttggagactagttggctagaaggtcaaattaagtgcccgtcaacctagatttttagttaatgacttactgatctggttttgtcagcataaacacaatgtgttctttcattttgggacccttcccataatattcctcaagcttaagtctcactttgctcttagtaataaatcagggttattcccttcctgctttctgacaggttaattctaaagaagagctcctgggaataagaaaatagaaacaattcgaggttgtggattgttgcaataaattctgggattt

SEQ ID NO: 430352 - DNA, 612 bp, Homo sapiens
  misc_feature (523)..(523): n is a, c, g, or t
  misc_feature (593)..(593): n is a, c, g, or t
cgccggccctagtctgcctgttttcgactcgcgctccggctgctgtcacttggctctctggctggagcttgaggacgcaaggagggtttgtcactggcagactcgagactgtaggcactgccatggcccctgtgctcagtaaggactcggcggacatcgagagtatcctggctttaaatcctcgaacacaaactcatgcaactctgtgttccacttcggccaagaaattagacaagaaacattggaaaagaaatcctgataagaactgctttaaatctgcagggacctgtgcctgggcttagggcctctggagcactaccgtcacctgtcatagcagttccaggaccagcttgacacagagcaccatggccaacaacacgttctctgtgactcccgaggccactgcttgagctatctcaggtccgccagaagcctgcctaccactatgaactttcgagaacacacgtatacaattcttctctgaaccgaacaagtgcctggcaatgaggacagacctcagtgnaggtttggaaaggggaagccaacagtttgaacacagctttcccaccttcctttaaatcctgacactccgngactttatttgaatacctg

SEQ ID NO: 430353 - DNA, 1479 bp, Homo sapiens
  misc_feature (1441)..(1441): n is a, c, g, or t
cgccggccctagtctgcctgttttcgactcgcgctccggctgctgtcacttggctctctggctggagcttgaggacgcaaggagggtttgtcactggcagactcgagactgtaggcactgccatggcccctgtgctcagtaaggactcggcggacatcgagagtatcctggctttaaatcctcgaacacaaactcatgcaactctgtgttccacttcggccaagaaattagacaagaaacattggaaaagaaatcctgataagaactgctttaattgtgagaagctggagaataattttgatgacatcaagcacacgactcttggtgagcgaggagctctccgagaagcaatgagatgcctgaaatgtgcagatgccccgtgtcagaagagctgtccaactaatcttgatattaaatcattcatcacaagtattgcaaacaagaactattatggagctgctaagatgatattttctgacaacccacttggtctgacttgtggaatggtatgtccaacctctgatctttgtgtaggtggatgcaatttatatgccactgaagagggacccattaatattggtggattgcagcaatttgctactgaggtattcaaagcaatgagtatcccacagatcagaaatccttcgctgcctcccccagaaaaaatgtctgaagcctattctgcaaagattgctctttttggtgctgggcctgcaagtataagttgtgcttcctttttggctcgattggggtactctgacatcactatatttgaaaaacaagaatatgttggtggtttaagtacttctgaaattcctcagttccggctgccgtatgatgtagtgaattttgagattgagctaatgaaggaccttggtgtaaagataatttgcggtaaaagcctttcagtgaatgaaatgactcttagcactttgaaagaaaaaggctacaaagctgctttcattggaataggtttgccagaacccaataaagatgccatcttccaaggcctgacgcaggaccaggggttttatacatccaaagactttttgccacttgtagccaaaggcagtaaagcaggaatgtgcgcctgtcactctccattgccatcgatacggggagtcgtgattgtacttggagctggagacactgcctttgactgtgcaacatctgctctacgttgtggagctcgccgtgtgttcatcgtcttcagaaaaggctttgttaatataagagctgtccctcttttatggttctttcttgctgtcagaagtcacaaaggagttgaacttccctttggccactgcctggcaataattgaaagtgggaagagatctgtatgctctacttcattcatttttaggtgaacattagaagcccctcttcatttaaaaatattcacctccgcttttattcaaactttgctgcccgaaaggggcgntgtttttccacagtctcatagccgggaggtgcttaatt

SEQ ID NO: 430354 - DNA, 1388 bp, Homo sapiens
cgccggccctagtctgcctgttttcgactcgcgctccggctgctgtcacttggctctctggctggagcttgaggacgcaaggagggtttgtcactggcagactcgagactgtaggcactgccatggcccctgtgctcagtaaggactcggcggacatcgagagtatcctggctttaaatcctcgaacacaaactcatgcaactctgtgttccacttcggccaagaaattagacaagaaacattggaaaagaaatcctgataagaactgctttaattgtgagaagctggagaataattttgatgacatcaagcacacgactcttggtgagcgaggagctctccgagaagcaatgagatgcctgaaatgtgcagatgccccgtgtcagaagagctgtccaactaatcttgatattaaatcattcatcacaagtattgcaaacaagaactattatggagctgctaagatgatattttctgacaacccacttggtctgacttgtggaatggtatgtccaacctctgatctttgtgtaggtggatgcaatttatatgccactgaagagggacccattaatattggtggattgcagcaatttgctactgaggtattcaaagcaatgagtatcccacagatcagaaatccttcgctgcctcccccagaaaaaatgtctgaagcctattctgcaaagattgctctttttggtgctgggcctgcaagtataagttgtgcttcctttttggctcgattggggtactctgacatcactatatttgaaaaacaagaatatgttggtggtttaagtacttctgaaattcctcagttccggctgccgtatgatgtagtgaattttgagattgagctaatgaaggaccttggtgtaaagataatttgcggtaaaagcctttcagtgaatgaaatgactcttagcactttgaaagaaaaaggctacaaagctgctttcattggaataggtttgccagaacccaataaagatgccatcttccaaggcctgacgcaggaccaggggttttatacatccaaagactttttgccacttgtagccaaaggcagtaaagcaggaatgtgcgcctgtcactctccattgccatcgatacggggagtcgtgattgtacttggagctggagacactgcctttgactgtgcaacatctgctctacgttgtggagctcgccgtgtgttcatcgtcttcagaaaaggctttgttaatataagagctgtccctagttcagcatgactggggaggcctcaggaaacttaacgatcatggaggaaagcaaggcaccttcttcacaaggtggcaggaaggagaagtgtagattacacctactctggtggtttagtgaatataagtaagtaaattgccgta

SEQ ID NO: 430355 - DNA, 1058 bp, Homo sapiens
  misc_feature (1020)..(1020): n is a, c, g, or t
tgaaagggagaaagatttatttgaactatttcaagaaaatagttctcagaaattcttcagttacataaaggacacttattcagcacgttaatattcaaagttaacaaaatatataacagaggtatgtgttagaaattatataaggtaatacataaaaaagtattataatgaaatattgcaaaccgttaacacagatcataaggatcacttttttcttctagcaaaaggaaaattatgctgagttaaagatagatagcacaattttgatgaagagagttttaattgattgattccagtctgttatgacctaaacttctcaaaatgtgttgtaggaatcctagaagaaaaaagaaactaaagatactgactatgaaattacatatatgagcatatttttaaaatgggaataaaactgtctttcaatgaagcagaataatttgatagtgacacttcatcctggaaaactgcaagatgcaattttacactgctttgagtacaagtatcttttgagctgtcatgcagaaatggtttctctacttgaaaatggggttttcctttcatcattcaggaatgtgcgcctgtcactctccattgccatcgatacggggagtcgtgattgtacttggagctggagacactgcctttgactgtgcaacatctgctctacgttgtggagctcgccgtgtgttcatcgtcttcagaaaaggctttgttaatataagagctgtccctagttcagcatgactggggaggcctcaggaaacttaacgatcatggaggaaagcaaggcaccttcttcacaaggtggcaggaaggagaagtgcttttatggttctttcttgctgtcagaagtcacaaaggagttgaacttccctttggccactgcctggcaataattgaaagtgggaagagatctgtatgctctacttcattcatttttaggtgaacattagaagcccctcttcatttaaaaatattcacctccgcttttattcaaactttgctgcccgaaaggggcgntgtttttccacagtctcatagccgggaggtgcttaatt

SEQ ID NO: 430356 - DNA, 679 bp, Homo sapiens
cgccggccctagtctgcctgttttcgactcgcgctccggctgctgtcacttggctctctggctggagcttgaggacgcaaggagggtttgtcactggcagactcgagactgtaggcactgccatggcccctgtgctcagtaaggactcggcggacatcgagagtatcctggctttaaatcctcgaacacaaactcatgcaactctgtgttccacttcggccaagaaattagacaagaaacattggaaaagaaatcctgataagaactgctttaattgtgagaagctggagaataattttgatgacatcaagcacacgactcttggtgagcgaggagctctccgagaagcaatgagatgcctgaaatgtgcagatgccccgtgtcagaagagctgtccaactaatcttgatattaaatcattcatcacaagtattgcaaacaagaactattatggagctgctaagatgatattttctgacaacccacttggtctgacttgtggaatggtatgtccaacctctgatctttgtgtaggtggatgcaatttatatgccactgaagagggacccattaatattggtggattgcagcaatttgctactgaggtatgtatgatatacacgtgacatccccccactaccatcaccatgcacaaatatcttaaaataactttaatcct

SEQ ID NO: 430357 - DNA, 702 bp, Homo sapiens
cgccggccctagtctgcctgttttcgactcgcgctccggctgctgtcacttggctctctggctggagcttgaggacgcaaggagggtttgtcactggcagactcgagactgtaggcactgccatggcccctgtgctcagtaaggactcggcggacatcgagagtatcctggctttaaatcctcgaacacaaactcatgcaactctgtgttccacttcggccaagaaattagacaagaaacattggaaaagaaatcctgataagaactgctttaattgtgagaagctggagaataattttgatgacatcaagcacacgactcttggtgagcgaggagctctccgagaagcaatgagatgcctgaaatgtgcagatgccccgtgtcagaagagctgtccaactaatcttgatattaaatcattcatcacaagtattgcaaacaagatggagtcttgctctgttgccagactggagtgcagtggcacaatctcggctcactgaaacctcctcctcccgggttcaagccattctcctgcctcagcctcctgagtagctgagactacaggcgtgtgccaccatgcccggctaattttttgtattttagtaaagacgaggtttcaccgtgttagctaggatggtctccatctcctgacctcatgatccacctgcctcggcctcccaaagtgctgggattacagctccc

SEQ ID NO: 430358 - DNA, 4367 bp, Homo sapiens
  misc_feature (3923)..(3923): n is a, c, g, or t
  misc_feature (3925)..(3925): n is a, c, g, or t
  misc_feature (3928)..(3928): n is a, c, g, or t
  misc_feature (3930)..(3931): n is a, c, g, or t
cgccggccctagtctgcctgttttcgactcgcgctccggctgctgtcacttggctctctggctggagcttgaggacgcaaggagggtttgtcactggcagactcgagactgtaggcactgccatggcccctgtgctcagtaaggactcggcggacatcgagagtatcctggctttaaatcctcgaacacaaactcatgcaactctgtgttccacttcggccaagaaattagacaagaaacattgggatgacatcaagcacacgactcttggtgagcgaggagctctccgagaagcaatgagatgcctgaaatgtgcagatgccccgtgtcagaagagctgtccaactaatcttgatattaaatcattcatcacaagtattgcaaacaagaactattatggagctgctaagatgatattttctgacaacccacttggtctgacttgtggaatggtatgtccaacctctgatctttgtgtaggtggatgcaatttatatgccactgaagagggacccattaatattggtggattgcagcaatttgctactgaggtattcaaagcaatgagtatcccacagatcagaaatccttcgctgcctcccccagaaaaaatgtctgaagcctattctgcaaagattgctctttttggtgctgggcctgcaagtataagttgtgcttcctttttggctcgattggggtactctgacatcactatatttgaaaaacaagaatatgttggtggtttaagtacttctgaaattcctcagttccggctgccgtatgatgtagtgaattttgagattgagctaatgaaggaccttggtgtaaagataatttgcggtaaaagcctttcagtgaatgaaatgactcttagcactttgaaagaaaaaggctacaaagctgctttcattggaataggtttgccagaacccaataaagatgccatcttccaaggcctgacgcaggaccaggggttttatacatccaaagactttttgccacttgtagccaaaggcagtaaagcaggaatgtgcgcctgtcactctccattgccatcgatacggggagtcgtgattgtacttggagctggagacactgcctttgactgtgcaacatctgctctacgttgtggagctcgccgtgtgttcatcgtcttcagaaaaggctttgttaatataagagctgtccctatggaacttgctaaggaagaaaagtgtgaatttctgccattcctgtccccacggaaggttatagtaaaaggtgggagaattgttgctatgcagtttgttcggacagagcaagatgaaactggaaaatggaatgaagatgaagatcagatggtccatctgaaagccgatgtggtcatcagtgcctttggttcagttctgagtgatcctaaagtaaaagaagccttgagccctataaaatttaacagatggggtctcccagaagtagatccagaaactatgcaaactagtgaagcatgggtatttgcaggtggtgatgtcgttggtttggctaacactacagtggaatcggtgaatgatggaaagcaagcttcttggtacattcacaaatacgtacagtcacaatatggagcttccgtttctgccaagcctgaactacccctcttttacactcctattgatctggtggacattagtgtagaaatggccggattgaagtttataaatccttttggtcttgctagcgcaactccagccaccagcacatcaatgattcgaagagcttttgaagctggatggggttttgccctcaccaaaactttctctcttgataaggacattgtgacaaatgtttcccccagaatcatccggggaaccacctctggccccatgtatggccctggacaaagctcctttctgaatattgagctcatcagtgagaaaacggctgcatattggtgtcaaagtgtcactgaactaaaggctgactttccagacaacattgtgattgctagcattatgtgcagttacaataaaaatgactggacggaacttgccaagaagtctgaggattctggagcagatgccctggagttaaatttatcatgtccacatggcatgggagaaagaggaatgggcctggcctgtgggcaggatccagagctggtgcggaacatctgccgctgggttaggcaagctgttcagattcctttttttgccaagctgaccccaaatgtcactgatattgtgagcatcgcaagagctgcaaaggaaggtggtgccaatggcgttacagccaccaacactgtctcaggtctgatgggattaaaatctgatggcacaccttggccagcagtggggattgcaaagcgaactacatatggaggagtgtctgggacagcaatcagacctattgctttgagagctgtgacctccattgctcgtgctctgcctggatttcccattttggctactggtggaattgactctgctgaaagtggtcttcagtttctccatagtggtgcttccgtcctccaggtatgcagtgccattcagaatcaggatttcactgtgatcgaagactactgcactggcctcaaagccctgctttatctgaaaagcattgaagaactacaagactgggatggacagagtccagctactgtgagtcaccagaaagggaaaccagttccacgtatagctgaactcatggacaagaaactgccaagttttggaccttatctggaacagcgcaagaaaatcatagcagaaaacaagattagactgaaagaacaaaatgtagctttttcaccacttaagagaaactgttttatccccaaaaggcctattcctaccatcaaggatgtaataggaaaagcactgcagtaccttggaacatttggtgaattgagcaacgtagagcaagttgtggctatgattgatgaagaaatgtgtatcaactgtggtaaatgctacatgacctgtaatgattctggctaccaggctatacagtttgatccagaaacccacctgcccaccataaccgacacttgtacaggctgtactctgtgtctcagtgtttgccctattgtcgactgcatcaaaatggtttccaggacaacaccttatgaaccaaagagaggcgtacccttatctgtgaatccggtgtgttaaggtgatttgtgaaacagttgctgtgaactttcatgtcacctacatatgctgatctcttaaaatcatgatccttgtgttcagctctttccaaattaaaacaaatatacattttctaaataaaaatatgtaatttcaaaatacatttgtaagtgtaaaaaatgtctcatgtcaatgaccattcaattagtggcataaaatagaataattcttttctgaggatagtagttaaataactgtgtggcagttaattggatgttcactgccagttgtcttatgtgaaaaattaactttttgtgtggcaattagtgtgacagtttccaaattgccctatgctgtgctccatatttgatttctaattgtaagtgaaattaagcattttgaaacaaagtactctttaacatacaagaaaatgtatccaaggaaacattttatcaataaaaattacctttaattttaatgctgtttctaagaaaatgtagttagctccataaagtacaaatgaagaaagtcaaaaattatttgctatggcaggataagaaagcctaaaattgagtttgtggactttattaagtaaaatccccttcgctgaaattgcttatttttggtgttggatagaggatagggagaatatttactaactaaataccattcactactcatgcgtgagatgggtgtacaaactcatcctcttttaatggcatttctctttaaactatgttcctaaccaaatgagatgataggatagatcctggttaccactcttttactgtgcacatatgggcncngantnntttaatagtcaccttcatgattatagcaactaatgtttgaacaaagctcaaagtatgcaatgcttcattattcaagaatgaaaaatataatgttgataatatatattaagtgtgccaaatcagtttgactactctctgttttagtgtttatgtttaaaagaaatatattttttgttattattagataatatttttgtatttctctattttcataatcagtaaatagtgtcatataaactcatttatctcctcttcatggcatcttcaatatgaatctataagtagtaaatcagaaagtaacaatctatggcttatttctatgacaaattcaagagctagaaaaataaaatgtttcattatgcacttttagaaatgcatatttgccacaaaacctgtattactgaataatatcaaataaaatatcataaagcatttt

SEQ ID NO: 430359 - DNA, 2847 bp, Homo sapiens
gtccaatatttgatatacctggaaggctttatccagtcagagagaaattctgcaatttgattggtccacgagacagagaaaatactgcgtatattcaagcgattgtgaaagtcaccatggatatccatttgaatgaaatggctggagacatcttggtttttctgactggccagtttgaaatagaaaaaagttgtgagttactttttcagatggcagagtctgttgattatgattatgatgttcaagataccaccctcgatggcttgttaatattgccgtgttatggatcaatgacaacagatcaacagaggaggatatttttgccaccaccacctggaattagaaaatgtgtcatatccaccaatatttctgcaacgtctttgacaatagatggaatcagatatgtggtagatggtggcttcgtgaagcagttaaatcacaaccccagattagggttggacatcctggaggtggttccaatttcaaagagcgaggcattacagcgaagtggccgagctggcaggacttcttcaggaaaatgctttcggatctatagtaaagatttttggaaccagtgtatgcctgaccatgtgatccctgaaattaagagaactagtttgacatctgtagttctgaccttaaagtgccttgccatacacgatgtcataaggtttccctatttggatccacctaatgagagacttattttagaagctcttaaacaactttaccagtgtgatgctattgacaggagtggccatgtcaccagattgggtttgtctatggtggagtttcctttgcctccacatctgacatgtgcagtaataaaagctgcttccctggattgtgaagatctactacttccaatagcagcaatgttgtctgtggaaaacgtcttcattagacctgttgatccagagtaccagaaggaagcagaacagagacatcgagaattggcagctaaagctggaggatttaatgactttgcaactttagctgtcatctttgaacaatgcaaatcaagtggagctccagcttcatggtgccaaaaacactggattcattggaggtgcttattttctgcatttcgtgtggaagctcaacttcgagaactaatcaggaagcttaaacagcaaagtgatttcccaaaagagacctttgaaggccctaaacatgaagtactacgaagatgtctttgtgcgggctatttcaaaaatgtagctcgaagatctgttgggagaacgttttgcacaatggatggtcgtggaagcccagttcacattcatccttcctcagcacttcatgaacaggaaaccaaacttgaatggatcatttttcatgaggtattggttaccaccaaagtctacgcaagaattgtatgcccaatccgttatgaatgggtaagagacttgttacccaagttgcatgaatttaatgcacatgatttgagcagtgtggcccgacgtgaagtgagagaagatgcaagaaggagatggacaaataaggaaaatgtaaagcagctaaaggatggaatatcgaaagacgtcttaaagaaaatgcaaagaagaaatgatgacaaatccatatctgatgcacgggctcgtttccttgagagaaagcagcagaggacccaggaccacagtgacacacgaaaggaaacaggctaaggtggtgaaccctccaattcaggaagtgggaaaaggagccaggaaatgtgcttctactttgccagttatttcagacagcactaccaagaggaggtggtcagcacttgttattggcctatgaactaaaagcaaatcaaagctcataaatcaaagctcatcagttcccataaatgcagttgtcaaagaaaagatttggttgccatagtcataagcaatgatacatgaaaccaatgaaagacagtacatgtaataatattttcctcagtacaattttgctggccttaactggtatcaaacgctgtcattgagatgttttcaaagaacattgagttgtatttaatcagcgtgtactccatttgcattgaagcattaaaaattatttttcttaaaatctctttaaggccttcttgttgctgttagaatagtgctatatatcaggtatgtgaccatttatttcagaaggctgaacataagaggtttctactcagcaatacttagatgtctaactgtttaattgctacagagctttatagatatttagagaaaagacttaatcaattagtaaataaaattgcctatggcaggattctttcttgaattaatattaatccttaaattgatttttctgggattatacaaattcctttttatataaaagtatattgtttaaaacagtagctatagccattaaccaaaggacagatgatatatatatatatgatatatatatatatataagttcttttttagctgtacctacgtacttatatcagcaccatgtatgtaggtgtgatagtactttcaaacagcgcctccacctggcctactctgttatttccacctgtttgggtagggccatttaacttccattatgccaaacttgggatgggattttcgaagcagacaacactatttcatcgtgtttcaaattggaaccttgaggctagttagtatcacactcaggccacactcagcacttgcccactcttgtttactgccttgtattctagttatttgtgtatttgtctccctcactagattatacgctccttgtgggcagggactgtgtcttttttcatctttgtatctttcatgcacctagcatagtgctttgcacatagtagtcactcagtgtttgttaaataaagctattagtgtcattaaaattcaaaagacagta

SEQ ID NO: 430360 - DNA, 3108 bp, Homo sapiens
gtccaatatttgatatacctggaaggctttatccagtcagagagaaattctgcaatttgattggtccacgagacagagaaaatactgcgtatattcaagcgattgtgaaagtcaccatggatatccatttgaatgaaatggctggagacatcttggtttttctgactggccagtttgaaatagaaaaaagttgtgagttactttttcagatggcagagtctgttgattatgattatgatgttcaagataccaccctcgatggcttgttaatattgccgtgttatggatcaatgacaacagatcaacagaggaggatatttttgccaccaccacctggaattagaaaatgtgtcatatccaccaatatttctgcaacgtctttgacaatagatggaatcagatatgtggtagatggtggcttcgtgaagcagttaaatcacaaccccagattagggttggacatcctggaggtggttccaatttcaaagagcgaggcattacagcgaagtggccgagctggcaggacttcttcaggaaaatgctttcggatctatagtaaagatttttggaaccagtgtatgcctgaccatgtgatccctgaaattaagagaactagtttgacatctgtagttctgaccttaaagtgccttgccatacacgatgtcataaggtttccctatttggatccacctaatgagagacttattttagaagctcttaaacaactttaccagtgtgatgctattgacaggagtggccatgtcaccagattgggtttgtctatggtggagtttcctttgcctccacatctgacatgtgcagtaataaaagctgcttccctggattgtgaagatctactacttccaatagcagcaatgttgtctgtggaaaacgtcttcattagacctgttgatccagagtaccagaaggaagcagaacagagacatcgagaattggcagctaaagctggaggatttaatgactttgcaactttagctgtcatctttgaacaatgcaaatcaagtggagctccagcttcatggtgccaaaaacactggattcattggaggtgcttattttctgcatttcgtgtggaagctcaacttcgagaactaatcaggaagcttaaacagcaaagtgatttcccaaaagagacctttgaaggccctaaacatgaagtactacgaagatgtctttgtgcgggctatttcaaaaatgtagctcgaagatctgttgggagaacgttttgcacaatggatggtcgtggaagcccagttcacattcatccttcctcagcagtaagtacttcatttttaataaagggaagaaatttgtaaagttgtagaaataagtaatatacaaatgtcttctacttttcactttggagttaaatttacatatatctatattacatagatctataagggtattggttggcctgtgcctcctgtttgaagaagataggaattaattgagaaggatttggactatttggttggtttaatgtggaatagggcaggttattgagttaccatcattaaaagaaatgttttgtatagcttcatgaacaggaaaccaaacttgaatggatcatttttcatgaggtattggttaccaccaaagtctacgcaagaattgtatgcccaatccgttatgaatgggtaagagacttgttacccaagttgcatgaatttaatgcacatgatttgagcagtgtggcccgacgtgaagtgagagaagatgcaagaaggagatggacaaataaggaaaatgtaaagcagctaaaggatggaatatcgaaagacgtcttaaagaaaatgcaaagaagaaatgatgacaaatccatatctgatgcacgggctcgtttccttgagagaaagcagcagaggacccaggaccacagtgacacacgaaaggaaacaggctaaggtggtgaaccctccaattcaggaagtgggaaaaggagccaggaaatgtgcttctactttgccagttatttcagacagcactaccaagaggaggtggtcagcacttgttattggcctatgaactaaaagcaaatcaaagctcataaatcaaagctcatcagttcccataaatgcagttgtcaaagaaaagatttggttgccatagtcataagcaatgatacatgaaaccaatgaaagacagtacatgtaataatattttcctcagtacaattttgctggccttaactggtatcaaacgctgtcattgagatgttttcaaagaacattgagttgtatttaatcagcgtgtactccatttgcattgaagcattaaaaattatttttcttaaaatctctttaaggccttcttgttgctgttagaatagtgctatatatcaggtatgtgaccatttatttcagaaggctgaacataagaggtttctactcagcaatacttagatgtctaactgtttaattgctacagagctttatagatatttagagaaaagacttaatcaattagtaaataaaattgcctatggcaggattctttcttgaattaatattaatccttaaattgatttttctgggattatacaaattcctttttatataaaagtatattgtttaaaacagtagctatagccattaaccaaaggacagatgatatatatatatatgatatatatatatatataagttcttttttagctgtacctacgtacttatatcagcaccatgtatgtaggtgtgatagtactttcaaacagcgcctccacctggcctactctgttatttccacctgtttgggtagggccatttaacttccattatgccaaacttgggatgggattttcgaagcagacaacactatttcatcgtgtttcaaattggaaccttgaggctagttagtatcacactcaggccacactcagcacttgcccactcttgtttactgccttgtattctagttatttgtgtatttgtctccctcactagattatacgctccttgtgggcagggactgtgtcttttttcatctttgtatctttcatgcacctagcatagtgctttgcacatagtagtcactcagtgtttgttaaataaagctattagtgtcattaaaattcaaaagacagta

SEQ ID NO: 430361 - DNA, 995 bp, Homo sapiens
  misc_feature (6)..(6): n is a, c, g, or t
  misc_feature (11)..(11): n is a, c, g, or t
tagaanatggntcccgggctgcagattcggcagagcatgaaaccaatgaaagacagtacatgtaataatattttcctcagtacaattttgctggccttaactggtatcaaacgctgtcattgagatgttttcaaagaacattgagttgtatttaatcagcgtgtactccatttgcattgaagcattaaaaattatttttcttaaaatctctttaaggccttcttgttgctgttagaatagtgctatatatcaggtatgtgaccatttatttcagaaggctgaacataagaggtttctactcagcaatacttagatgtctaactgtttaattgctacagagctttatagatatttagagaaaagacttaatcaattagtaaataaaattgcctatggcaggattctttcttgaattaatattaatccttaaattgatttttctgggattatacaaattcctttttatataaaagtatattgtttaaaacagtagctatagccattaaccaaaggacagatgatatatatatatatgatatatatatatatataagttcttttttagctgtacctacgtacttatatcagcaccatgtatgtaggtgtgatagtactttcaaacagcgcctccacctggcctactctgttatttccacctgtttgggtagggccatttaacttccattatgccaaacttgggatgggattttcgaagcagacaacactatttcatcgtgtttcaaattggaaccttgaggctagttagtatcacactcaggccacactcagcacttgcccactcttgtttactgccttgtattctagttatttgtgtatttgtctccctcactagattatacgctccttgtgggcagggactgtgtcttttttcatctttgtatctttcatgcacctagcatagtgctttgcacatagtagtcactcagtgtttgttaaataaagctattagtgtcattaaaattcaaaagacagta

SEQ ID NO: 430362 - DNA, 2055 bp, Homo sapiens
gtccaatatttgatatacctggaaggctttatccagtcagagagaaattctgcaatttgattggtccacgagacagagaaaatactgcgtatattcaagcgattgtgaaagtcaccatggatatccatttgaatgaaatggctggagacatcttggtttttctgactggccagtttgaaatagaaaaaagttgtgagttactttttcagatggcagagtctgttgattatgattatgatgttcaagataccaccctcgatggcttgttaatattgccgtgttatggatcaatgacaacagatcaacagaggaggatatttttgccaccaccacctggaattagaaaatgtgtcatatccaccaatatttctgcaacgtctttgacaatagatggaatcagatatgtggtagatggtggcttcgtgaagcagttaaatcacaaccccagattagggttggacatcctggaggtggttccaatttcaaagagcgaggcattacagcgaagtggccgagctggcaggacttcttcaggaaaatgctttcggatctatagtaaagatttttggaaccagtgtatgcctgaccatgtgatccctgaaattaagagaactagtttgacatctgtagttctgaccttaaagtgccttgccatacacgatgtcataaggtttccctatttggatccacctaatgagagacttattttagaagctcttaaacaactttaccagtgtgatgctattgacaggagtggccatgtcaccagattgggtttgtctatggtggagtttcctttgcctccacatctgacatgtgcagtaataaaagctgcttccctggattgtgaagatctactacttccaatagcagcaatgttgtctgtggaaaacgtcttcattagacctgttgatccagagtaccagaaggaagcagaacagagacatcgagaattggcagctaaagctggaggatttaatgactttgcaactttagctgtcatctttgaacaatgcaaatcaagtggagctccagcttcatggtgccaaaaacactggattcattggaggtgcttattttctgcatttcgtgtggaagctcaacttcgagaactaatcaggaagcttaaacagcaaagtgatttcccaaaagagacctttgaaggccctaaacatgaagtactacgaagatgtctttgtgcgggctatttcaaaaatgtagctcgaagatctgttgggagaacgttttgcacaatggatggtcgtggaagcccagttcacattcatccttcctcagcacttcatgaacaggaaaccaaacttgaatggatcatttttcatgaggtattggttaccaccaaagtctacgcaagaattgtatgcccaatccgttatgaatgggtaagagacttgttacccaagttgcatgaatttaatgcacatgatttgagcagtgtggcccgacgtgaagtgagagaagatgcaagaaggagatggacaaataaggaaaatgtaaagcagctaaaggatggaatatcgaaagacgtcttaaagaaaatgcaaagaagaaatgatgacaaatccatatctgatgcacgggctcgtttccttgagagaaagcagcagaggacccaggaccacagtgacacacgaaaggaaacaggctaaggtggtgaaccctccaattcaggaagtgggaaaaggagccaggaaatgtgcttctactttgccagttatttcagacagcactaccaagaggaggtggtcagcacttgttattggcctatgaactaaaagcaaatcaaagctcataaatcaaagctcatcagttcccataaatgcagttgtcaaagaaaagatttggttgccatagtcataagcaatgatacatgaaaccaatgaaagacagtacatgtaataatattttcctcagtacaattttgctggccttaactggtatcaaacgctgtcattgagatgttttcaaagaacattgagttgtatttaatcagcgtgtactccatttgcattgaagcattaaaaattatttttctta

SEQ ID NO: 430363 - DNA, 2625 bp, Homo sapiens
gtccaatatttgatatacctggaaggctttatccagtcagagagaaattctgcaatttgattggtccacgagacagagaaaatactgcgtatattcaagcgattgtgaaagtcaccatggatatccatttgaatgaaatggctggagacatcttggtttttctgactggccagtttgaaatagaaaaaagttgtgagttactttttcagatggcagagtctgttgattatgattatgatgttcaagataccaccctcgatggcttgttaatattgccgtgttatggatcaatgacaacagatcaacagaggaggatatttttgccaccaccacctggaattagaaaatgtgtcatatccaccaatatttctgcaacgtctttgacaatagatggaatcagatatgtggtagatggtggcttcgtgaagcagttaaatcacaaccccagattagggttggacatcctggaggtggttccaatttcaaagagcgaggcattacagcgaagtggccgagctggcaggacttcttcaggaaaatgctttcggatctatagtaaagatttttggaaccagtgtatgcctgaccatgtgatccctgaaattaagagaactagtttgacatctgtagttctgaccttaaagtgccttgccatacacgatgtcataaggtttccctatttggatccacctaatgagagacttattttagaagctcttaaacaactttaccagtgtgatgctattgacaggagtggccatgtcaccagattgggtttgtctatggtggagtttcctttgcctccacatctgacatgtgcagtaataaaagctgcttccctggattgtgaagatctactacttccaatagcagcaatgttgtctgtggaaaacgtcttcattagacctgttgatccagagtaccagaaggaagcagaacagagacatcgagaattggcagctaaagctggaggatttaatgactttgcaactttagctgtcatctttgaacaatgcaaatcaagtggagctccagcttcatggtgccaaaaacactggattcattggaggtgcttattttctgcatttcgtgtggaagctcaacttcgagaactaatcaggaagcttaaacagcaaagtgatttcccaaaagagacctttgaaggccctaaacatgaagtactacgaagatgtctttgtgcgggctatttcaaaaatgtagctcgaagatctgttgggagaacgttttgcacaatggatggtcgtggaagcccagttcacattcatccttcctcagcacttcatgaacaggaaaccaaacttgaatggatcatttttcatgaggtattggttaccaccaaagtctacgcaagaattgtatgcccaatccgttatgaatgggtaagagacttgttacccaagttgcatgaatttaatgcacatgatttgagcagtgtggcccgacgtgaagtgagagaagatgcaagaaggagatggacaaataaggaaaatgtaaagcagctaaagggtgagtaaatcatttgttctactcttaaccactatgccatactgcttcccagtagtacttcactatttttgtttataaaaatgttgtgacccacctgggcaatgtggtgagatcccatctctagcaaaataaaaataaaaattagccaggcatgttggtgtgcacctgtagtcccagtgacttgggaggctgatgcaggaggatcgcttgaacccaggagtttgaggctgcagtgaactgtgatttcaccagtgcactccagcctgggggtgacagagtgagacactatctctaaaaaaaaaaaagtgatgatttatgcatttattaactcagaatcccctttgtttccaaggggctttttctttctttctttctttttctttcttctttgagacggagttttgctcttattgcccaggctggagtgtaatggtgtgattttggctcactgcagcctctgcctcccggttcaagctattctcctgcctcagcctcctgagtagctggattacaggcatgcaccaccacgcctggctaagtttgtatatccaaggggctttttctatgaaataattaggaccctggttgggaggcataaatagttgtggtactgaaataggacagaaagtttttcagctcacatacacagaaaacttcttagtaaagctttttgaggctgaatgatgaagcatattgtattttctttatttgacatcactgcaaaatggaatggtgaagagttttgccgaataaatcatagaaaaatctttagaaatgttagccactagggaggccaggcatggtggctcacgcctgtaatcccagcactttgggagaccaaggcgggcggatcacgaggtcaggagatcgagaccatcctggctaacacggtgaaaccccgtctctactaaatatacaaaaaactagctgggtgtggtggcgggcgcctgtagtcccagctactcgggaggctgaggcaggagaatggcgtgaacccaggaggcagagcttgcagtgagccgagattgcgccactgcactccagcctgggcgacagagtgagactccgtctcaaaaaaaaaaaaaaaaagaaaagaaa

SEQ ID NO: 430364 - DNA, 1636 bp, Homo sapiens
gtccaatatttgatatacctggaaggctttatccagtcagagagaaattctgcaatttgattggtccacgagacagagaaaatactgcgtatattcaagcgattgtgaaagtcaccatggatatccatttgaatgaaatggctggagacatcttggtttttctgactggccagtttgaaatagaaaaaagttgtgagttactttttcagatggcagagtctgttgattatgattatgatgttcaagataccaccctcgatggcttgttaatattgccgtgttatggatcaatgacaacagatcaacagaggaggatatttttgccaccaccacctggaattagaaaatgtgtcatatccaccaatatttctgcaacgtctttgacaatagatggaatcagatatgtggtagatggtggcttcgtgaagcagttaaatcacaaccccagattagggttggacatcctggaggtggttccaatttcaaagagcgaggcattacagcgaagtggccgagctggcaggacttcttcaggaaaatgctttcggatctatagtaaagatttttggaaccagtgtatgcctgaccatgtgatccctgaaattaagagaactagtttgacatctgtagttctgaccttaaagtgccttgccatacacgatgtcataaggtttccctatttggatccacctaatgagagacttattttagaagctcttaaacaactttaccagtgtgatgctattgacaggagtggccatgtcaccagattgggtttgtctatggtggagtttcctttgcctccacatctgacatgtgcagtaataaaagctgcttccctggattgtgaagatctactacttccaatagcagcaatgttgtctgtggaaaacgtcttcattagacctgttgatccagagtaccagaaggaagcagaacagagacatcgagaattggcagctaaagctggaggatttaatgactttgcaactttagctgtcatctttgaacaatgcaaatcaagtggagctccagcttcatggtgccaaaaacactggattcattggaggtgcttattttctgcatttcgtgtggaagctcaacttcgagaactaatcaggaagcttaaacagcaaagtgatttcccaaaagagacctttgaaggccctaaacatgaagtactacgaagatgtctttgtgcgggctatttcaaaaatgtagctcgaagatctgttgggagaacgttttgcacaatggatggtcgtggaagcccagttcacattcatccttcctcagcacttcatgaacaggaaaccaaacttgaatggatcatttttcatgaggtattggttaccaccaaagtctacgcaagaattgtatgcccaatccgttatgaatgggtaagagacttgttacccaagttgcatgaatttaatgcacatgatttgagcagtgtggcccgacgtgaagtgagagaagatgcaagaaggagatggacaaataaggttactattaagcagtttaaggatagaatatcgcgagtacatcattaagtttagctgcagaagatatgatgacttatcgatgagctaatgtacggacacgcttccttgagaggactctgcggaggaccgag

SEQ ID NO: 430365 - DNA, 519 bp, Homo sapiens
gggatgggattttcgaagcagacaacactatttcatcgtgtttcaaattggaaccttgaggctagttagtatcacactcaggccacactcagcacttgcccactcttgtttactgccttgtattctagttatttgtgtatttgtctccctcactagattatacgctccttgtgggcagggactgtgtcttttttcatctttgtatctttcatgcacctagcatagtgctttgcacatagtagtcactcagtgtttgttaaataaagctattagtgtcattaaaattcaaaagacagtataatgtgtgtttttagatattttgtgtaaaaattaagaatctaaattttttatcggtaactcttctagttatttcctttggaatctagttttatgttcaataatagaaacttgaaatctttatcaaaaatcacaaggacccaaattcatgtatttgtccctaaagtaaggtgagtgatgatggtttctctaaacctttccagtgttttaatttgttaattt

SEQ ID NO: 430366 - DNA, 2202 bp, Homo sapiens
cttcatatctcatttaaacacacaggtttccctatttggatccacctaatgagagacttattttagaagctcttaaacaactttaccagtgtgatgctattgacaggagtggccatgtcaccagattgggtttgtctatggtggagtttcctttgcctccacatctgacatgtgcagtaataaaagctgcttccctggattgtgaagatctactacttccaatagcagcaatgttgtctgtggaaaacgtcttcattagacctgttgatccagagtaccagaaggaagcagaacagagacatcgagaattggcagctaaagctggaggatttaatgactttgcaactttagctgtcatctttgaacaatgcaaatcaagtggagctccagcttcatggtgccaaaaacactggattcattggaggtgcttattttctgcatttcgtgtggaagctcaacttcgagaactaatcaggaagcttaaacagcaaagtgatttcccaaaagagacctttgaaggccctaaacatgaagtactacgaagatgtctttgtgcgggctatttcaaaaatgtagctcgaagatctgttgggagaacgttttgcacaatggatggtcgtggaagcccagttcacattcatccttcctcagcacttcatgaacaggaaaccaaacttgaatggatcatttttcatgaggtattggttaccaccaaagtctacgcaagaattgtatgcccaatccgttatgaatgggtaagagacttgttacccaagttgcatgaatttaatgcacatgatttgagcagtgtggcccgacgtgaagtgagagaagatgcaagaaggagatggacaaataaggaaaatgtaaagcagctaaaggatggaatatcgaaagacgtcttaaagaaaatgcaaagaagaaatgatgacaaatccatatctgatgcacgggctcgtttccttgagagaaagcagcagaggacccaggaccacagtgacacacgaaaggaaacaggctaaggtggtgaaccctccaattcaggaagtgggaaaaggagccaggaaatgtgcttctactttgccagttatttcagacagcactaccaagaggaggtggtcagcacttgttattggcctatgaactaaaagcaaatcaaagctcataaatcaaagctcatcagttcccataaatgcagttgtcaaagaaaagatttggttgccatagtcataagcaatgatacatgaaaccaatgaaagacagtacatgtaataatattttcctcagtacaattttgctggccttaactggtatcaaacgctgtcattgagatgttttcaaagaacattgagttgtatttaatcagcgtgtactccatttgcattgaagcattaaaaattatttttcttaaaatctctttaaggccttcttgttgctgttagaatagtgctatatatcaggtatgtgaccatttatttcagaaggctgaacataagaggtttctactcagcaatacttagatgtctaactgtttaattgctacagagctttatagatatttagagaaaagacttaatcaattagtaaataaaattgcctatggcaggattctttcttgaattaatattaatccttaaattgatttttctgggattatacaaattcctttttatataaaagtatattgtttaaaacagtagctatagccattaaccaaaggacagatgatatatatatatatgatatatatatatatataagttcttttttagctgtacctacgtacttatatcagcaccatgtatgtaggtgtgatagtactttcaaacagcgcctccacctggcctactctgttatttccacctgtttgggtagggccatttaacttccattatgccaaacttgggatgggattttcgaagcagacaacactatttcatcgtgtttcaaattggaaccttgaggctagttagtatcacactcaggccacactcagcacttgcccactcttgtttactgccttgtattctagttatttgtgtatttgtctccctcactagattatacgctccttgtgggcagggactgtgtcttttttcatctttgtatctttcatgcacctagcatagtgctttgcacatagtagtcactcagtgtttgttaaataaagctattagtgtcattaaaattcaaaagacagta

SEQ ID NO: 430367 - DNA, 3054 bp, Homo sapiens
gtccaatatttgatatacctggaaggctttatccagtcagagagaaattctgcaatttgattggtccacgagacagagaaaatactgcgtatattcaagcgattgtgaaagtcaccatggatatccatttgaatgaaatggctggagacatcttggtttttctgactggccagtttgaaatagaaaaaagttgtgagttactttttcagatggcagagtctgttgattatgattatgatgttcaagataccaccctcgatggcttgttaatattgccgtgttatggatcaatgacaacagatcaacagaggaggatatttttgccaccaccacctggaattagaaaatgtgtcatatccaccaatatttctgcaacgtctttgacaatagatggaatcagatatgtggtagatggtggcttcgtgaagcagttaaatcacaaccccagattagggttggacatcctggaggtggttccaatttcaaagagcgaggcattacagcgaagtggccgagctggcaggacttcttcaggaaaatgctttcggatctatagtaaagatttttggaaccagtgtatgcctgaccatgtgatccctgaaattaagagaactagtttgacatctgtagttctgaccttaaagtgccttgccatacacgatgtcataaggtttccctatttggatccacctaatgagagacttattttagaagctcttaaacaactttaccagtgtgatgctattgacaggagtggccatgtcaccagattgggtttgtctatggtggagtttcctttgcctccacatctgacatgtgcagtaataaaagctgcttccctggattgtgaagatctactacttccaatagcagcaatgttgtctgtggaaaacgtcttcattagacctgttgatccagagtaccagaaggaagcagaacagagacatcgagaattggcagctaaagctggaggatttaatgactttgcaactttagctgtcatctttgaacaatgcaaatcaagtggagctccagcttcatggtgccaaaaacactggattcattggaggtgcttattttctgcatttcgtgtggaagctcaacttcgagaactaatcaggaagcttaaacagcaaagtgatttcccaaaagagacctttgaaggccctaaacatgaagtactacgaagatgtctttgtgcgggctatttcaaaaatgtagctcgaagatctgttgggagaacgttttgcacaatggatggtcgtggaagcccagttcacattcatccttcctcagcagtaagtacttcatttttaataaagggaagaaatttgtaaagttgtagaaataagtaatatacaaatgtcttctacttttcactttggagttaaatttacatatatctatattacatagatctataagggtattggttggcctgtgcctcctgtttgaagaagataggaattaattgagaaggatttggactatttggttggtttaatgtggaatagggcaggttattgagttaccatcatttttttcatgaggtattggttaccaccaaagtctacgcaagaattgtatgcccaatccgttatgaatgggtaagagacttgttacccaagttgcatgaatttaatgcacatgatttgagcagtgtggcccgacgtgaagtgagagaagatgcaagaaggagatggacaaataaggaaaatgtaaagcagctaaaggatggaatatcgaaagacgtcttaaagaaaatgcaaagaagaaatgatgacaaatccatatctgatgcacgggctcgtttccttgagagaaagcagcagaggacccaggaccacagtgacacacgaaaggaaacaggctaaggtggtgaaccctccaattcaggaagtgggaaaaggagccaggaaatgtgcttctactttgccagttatttcagacagcactaccaagaggaggtggtcagcacttgttattggcctatgaactaaaagcaaatcaaagctcataaatcaaagctcatcagttcccataaatgcagttgtcaaagaaaagatttggttgccatagtcataagcaatgatacatgaaaccaatgaaagacagtacatgtaataatattttcctcagtacaattttgctggccttaactggtatcaaacgctgtcattgagatgttttcaaagaacattgagttgtatttaatcagcgtgtactccatttgcattgaagcattaaaaattatttttcttaaaatctctttaaggccttcttgttgctgttagaatagtgctatatatcaggtatgtgaccatttatttcagaaggctgaacataagaggtttctactcagcaatacttagatgtctaactgtttaattgctacagagctttatagatatttagagaaaagacttaatcaattagtaaataaaattgcctatggcaggattctttcttgaattaatattaatccttaaattgatttttctgggattatacaaattcctttttatataaaagtatattgtttaaaacagtagctatagccattaaccaaaggacagatgatatatatatatatgatatatatatatatataagttcttttttagctgtacctacgtacttatatcagcaccatgtatgtaggtgtgatagtactttcaaacagcgcctccacctggcctactctgttatttccacctgtttgggtagggccatttaacttccattatgccaaacttgggatgggattttcgaagcagacaacactatttcatcgtgtttcaaattggaaccttgaggctagttagtatcacactcaggccacactcagcacttgcccactcttgtttactgccttgtattctagttatttgtgtatttgtctccctcactagattatacgctccttgtgggcagggactgtgtcttttttcatctttgtatctttcatgcacctagcatagtgctttgcacatagtagtcactcagtgtttgttaaataaagctattagtgtcattaaaattcaaaagacagta

SEQ ID NO: 430368 - DNA, 2050 bp, Homo sapiens
gtccaatatttgatatacctggaaggctttatccagtcagagagaaattctgcaatttgattggtccacgagacagagaaaatactgcgtatattcaagcgattgtgaaagtcaccatggatatccatttgaatgaaatggctggagacatcttggtttttctgactggccagtttgaaatagaaaaaagttgtgagttactttttcagatggcagagtctgttgattatgattatgatgttcaagataccaccctcgatggcttgttaatattgccgtgttatggatcaatgacaacagatcaacagaggaggatatttttgccaccaccacctggaattagaaaatgtgtcatatccaccaatatttctgcaacgtctttgacaatagatggaatcagatatgtggtagatggtggcttcgtgaagcagttaaatcacaaccccagattagggttggacatcctggaggtggttccaatttcaaagagcgaggcattacagcgaagtggccgagctggcaggacttcttcaggaaaatgctttcggatctatagtaaagatttttggaaccagtgtatgcctgaccatgtgatccctgaaattaagagaactagtttgacatctgtagttctgaccttaaagtgccttgccatacacgatgtcataaggtttccctatttggatccacctaatgagagacttattttagaagctcttaaacaactttaccagtgtgatgctattgacaggagtggccatgtcaccagattgggtttgtctatggtggagtttcctttgcctccacatctgacatgtgcagtaataaaagctgcttccctggattgtgaagatctactacttccaatagcagcaatgttgtctgtggaaaacgtcttcattagacctgttgatccagagtaccagaaggaagcagaacagagacatcgagaattggcagctaaagctggaggatttaatgactttgcaactttagctgtcatctttgaacaatgcaaatcaagtggagctccagcttcatggtgccaaaaacactggattcattggaggtgcttattttctgcatttcgtgtggaagctcaacttcgagaactaatcaggaagcttaaacagcaaagtgatttcccaaaagagacctttgaaggccctaaacatgaagtactacgaagatgtctttgtgcgggctatttcaaaaatgtagctcgaagatctgttgggagaacgttttgcacaatggatggtcgtggaagcccagttcacattcatccttcctcagcacttcatgaacaggaaaccaaacttgaatggatcatttttcatgaggtattggttaccaccaaagtctacgcaagaattgtatgcccaatccgttatgaatgggtaagagacttgttacccaagttgcatgaatttaatgcacatgatttgagcagtgtggcccgacgtgaagtgagagaagatgcaagaaggagatggacaaataaggaaaatgtaaagcagctaaaggatggaatatcgaaagacgtcttaaagaaaatgcaaagaagaaatgatgacaaatccatatctgatgcacgggctcgtttccttgagagaaagcagcagaggacccaggaccacagtgacacacgaaaggaaacaggctaaggcggaggttgtggtgggccgagatcacaccattgcagtctggcctgggcgacaagagcaagactccgtctcaaaaaaaaaaaattgttcttgctttgtaaatgctgctttcttttcttcattttggagcggggagccttgccgatagtcagtgacttgtacatttgtttactggcatttgataggctgctccttatcttgcatgaaaaaataaagacctagccagtctaatcctgctgggattcatatcagtggccccagggggttgagatgcttcaaagctactgtttaaatggcaaaaccaagtatcttacttggataatactaaagtatgtcctttatggctttattggaatctgaattgtaaacatttggtacagtgg

SEQ ID NO: 430369 - DNA, 1700 bp, Homo sapiens
agcggcgcgcgaggcccccgccgtcgccgacgcccgagcgccggagccccggccccgccccgcgagcgccgggacttgttggccgcggagactgcgaccctcttctctcagtctgccttactaccatgccgctctacgagggcctggggagcggcggggagaagacggcggtcgtgatcgacctgggagaggcctttaccaagtgtggatttgctggagaaactggtccaagatgtataattcctagtgtgataaaaagagctgggatgcctaagcctgtcagagttgttcagtataatatcaatacagaagaattatattcctacctaaaggaattcatccacatactatatttcaggcatctattggtgaatcccagagaccgccgagttgtgattatcgaatcggtattatgtccttctcacttcagagagacactcactcgtgttcttttcaaatattttgaggttccatctgtcttgcttgctccaagtcatctaatggctcttctgacgcttggaattaattctgccatggtcctagattgtggatatagggaaagcctggtgttacccatatatgaaggaatcccagttctaaattgttggggagcactacccctaggaggaaaagctcttcacaaagagttggaaactcaactattggaacaatgtactgttgacacaagtgttgctaaagaacagagccttccctcagtgatgggttcagttccggaaggtgtcttagaggacattaaagcgcgtacttgctttgtaagtgatctgaagcgaggactaaaaatccaagcagcaaaatttaatattgatgggaataatgagcgtccctccccacccccaaatgttgactatccattagatggagagaagattttacatatccttggatcaatcagagattcagttgtggaaattctttttgaacaagataatgaagagcaatcagttgccactttaatattggattcccttatacagtgtccgatagacaccaggaagcaactagcagagaatttggtagtcataggtggcacttctatgttgccaggatttctccacagattgcttgcagaaataaggtatttggtagaaaaaccaaaatataaaaaagcacttggcactaagacatttcgaattcatactccacctgcaaaagctaattgtgtggcctggttgggaggggctatttttggagcattacaagatatacttgggagccgttctgtttcaaaggaatattataatcagacgggccgtatacctgattggtgttctctcaataacccacctttggaaatgatgtttgatgtcgggaaaactcaaccacctctgatgaagagagcattttccactgagaaatagaagtttgattaaaaatcaaccttgcttcatatcaaatatttaaccaattataagcaaattgtacaaagtatgtaggatgttttgttatagaggactatagtggaagtgaaagcattctgtgtttactctttgcattaatatataattcttttgactttgtttctcttgtgtagtggtaaaatggtagctggtgcttattgagatttgctgtatttatatcaataaagtatagtaaagcaaaaaaacaacaccacctgcccacacaggacccacaaccaccaacaggggccgctcgaaaaaccacgggcgcacaaaaccacc

SEQ ID NO: 430370 - DNA, 1790 bp, Homo sapiens
gctaggtcggctttaaaatcgatgcagagtaattgcagtacatgggtagttggatgacattaacatgagaaatgtgctgtagtcgtcatccttggaacaaacacgtccaattacagtgaaattctgtgccccttacccggctaatttgaacacagctcaccgccaaggcctcctccagcatggccagccctgggcagagatcgtcacgaatggatttgacgggaatggggctggggactgtcatgttgaagcccggtggagatgtgggacagggacctcgtttgttccagagcctgttccaaccctccctggcttttgtggcatgttttctatgccgtttgctgcaaggatgcgttgggcatggagtaacattcccgagaccgtcctgcagtactgcacgtgtgcgtgtctgtgctttggtttgtctgtgtgtctaccttgttttagagtaaaaaagtgaatctgaggccagatcatcagtctgcacctgcctctcctcagtataatatcaatacagaagaattatattcctacctaaaggaattcatccacatactatatttcaggcatctattggtgaatcccagagaccgccgagttgtgattatcgaatcggtattatgtccttctcacttcagagagacactcactcgtgttcttttcaaatattttgaggttccatctgtcttgcttgctccaagtcatctaatggctcttctgacgcttggaattaattctgccatggtcctagattgtggatatagggaaagcctggtgttacccatatatgaaggaatcccagttctaaattgttggggagcactacccctaggaggaaaagctcttcacaaagagttggaaactcaactattggaacaatgtactgttgacacaagtgttgctaaagaacagagccttccctcagtgatggcgcgtacttgctttgtaagtgatctgaagcgaggactaaaaatccaagcagcaaaatttaatattgatgggaataatgagcgtccctccccacccccaaatgttgactatccattagatggagagaagattttacatatccttggatcaatcagagattcagttgtggaaattctttttgaacaagataatgaagagcaatcagttgccactttaatattggattcccttatacagtgtccgatagacaccaggaagcaactagcagagaatttggtagtcataggtggcacttctatgttgccaggatttctccacagattgcttgcagaaataaggtatttggtagaaaaaccaaaatataaaaaagcacttggcactaagacatttcgaattcatactccacctgcaaaagctaattgtgtggcctggttgggaggggctatttttggagcattacaagatatacttgggagccgttctgtttcaaaggaatattataatcagacgggccgtatacctgattggtgttctctcaataacccacctttggaaatgatgtttgatgtcgggaaaactcaaccacctctgatgaagagagcattttccactgagaaatagaagtttgattaaaaatcaaccttgcttcatatcaaatatttaaccaattataagcaaattgtacaaagtatgtaggatgttttgttatagaggactatagtggaagtgaaagcattctgtgtttactctttgcattaatatataattcttttgactttgtttctcttgtgtagtggtaaaatggtagctggtgcttattgagatttgctgtatttatatcaataaagtatagtaaagca

SEQ ID NO: 430371 - DNA, 384 bp, Homo sapiens
ctcctcctcctccgcattctctcctctgatgaaaccacactcatcaaaagtggttgtgacagaatgctcagatttgaatgatgatatttcttccctaaaacaaaattaaatttttctgttagactttttgagaaaattatagtagttgtatttttaaaattttttctaaattgaaaaatagaaatgtgaaggcaatttaatagactgtttttaattattaaagttttataattctaaatgaaatatttgttttaggttcagttccggaaggtgtcttagaggacattaaaggtaaactaagttctcatttttgtccctttcatccttaagtgttactttggagggcatatgcttctaaacatttacacagatagaaaatatatt

SEQ ID NO: 430372 - DNA, 1536 bp, Homo sapiens
agcggcgcgcgaggcccccgccgtcgccgacgcccgagcgccggagccccggccccgccccgcgagcgccgggacttgttggccgcggagactgcgaccctcttctctcagtctgccttactaccatgccgctctacgagggcctggggagcggcggggagaagacggcggtcgtgatcgacctgggagaggcctttaccaagtgtggatttgctggagaaactggtccaagatgtataattcctagtgtgataaaaagagctgggatgcctaagcctgtcagagttgttcagtataatatcaatacagaagaattatattcctacctaaaggaattcatccacatactatatttcaggcatctattggtgaatcccagagaccgccgagttgtgattatcgaatcggtattatgtccttctcacttcagagagacactcactcgtgttcttttcaaatattttgaggttccatctgtcttgcttgctccaagtcatctaatggctcttctgacgcttggaattaattctgccatggtcctagattgtggatatagggaaagcctggtgttacccatatatgaaggaatcccagttctaaattgttggggagcactacccctaggaggaaaagctcttcacaaagagttggaaactcaactattggaacaatgtactgttgacacaagtgttgctaaagaacagagccttccctcagtgatgggttcagttccggaaggtgtcttagaggacattaaagcgcgtacttgctttgtaagtgatctgaagcgaggactaaaaatccaagcagcaaaatttaatattgatgggaataatgagcgtccctccccacccccaaatgttgactatccattagatggagagaagattttacatatccttggatcaatcagtgtccgatagacaccaggaagcaactagcagagaatttggtagtcataggtggcacttctatgttgccaggatttctccacagattgcttgcagaaataaggtatttggtagaaaaaccaaaatataaaaaagcacttggcactaagacatttcgaattcatactccacctgcaaaagctaattgtgtggcctggttgggaggggctatttttggagcattacaagatatacttgggagccgttctgtttcaaaggaatattataatcagacgggccgtatacctgattggtgttctctcaataacccacctttggaaatgatgtttgatgtcgggaaaactcaaccacctctgatgaagagagcattttccactgagaaatagaagtttgattaaaaatcaaccttgcttcatatcaaatatttaaccaattataagcaaattgtacaaagtatgtaggatgttttgttatagaggactatagtggaagtgaaagcattctgtgtttactctttgcattaatatataattcttttgactttgtttctcttgtgtagtggtaaaatggtagctggtgcttattgagatttgctgtatttatatcaataaagtatagtaaagca

SEQ ID NO: 430373 - DNA, 1671 bp, Homo sapiens
ctccccttttcttcaaccagcgcccttgcaaataacagctcttattatttcctccctgggcgatgcgaatccgaggatcggggtctgactcccagagaggcccagaaagcttctgttgaattgccctcgtcgccgccccttgtcatcaccccaaacccaacaaaccctttgggatcatctgtgtaggggatgacaaccgtgacctagaccccgcttaccctgggctcctcagttgaggaaggcagccaaccgaatgtgtggatttgctggagaaactggtccaagatgtataattcctagtgtgataaaaagagctgggatgcctaagcctgtcagagttgttcagtataatatcaatacagaagaattatattcctacctaaaggaattcatccacatactatatttcaggcatctattggtgaatcccagagaccgccgagttgtgattatcgaatcggtattatgtccttctcacttcagagagacactcactcgtgttcttttcaaatattttgaggttccatctgtcttgcttgctccaagtcatctaatggctcttctgacgcttggaattaattctgccatggtcctagattgtggatatagggaaagcctggtgttacccatatatgaaggaatcccagttctaaattgttggggagcactacccctaggaggaaaagctcttcacaaagagttggaaactcaactattggaacaatgtactgttgacacaagtgttgctaaagaacagagccttccctcagtgatgggttcagttccggaaggtgtcttagaggacattaaagcgcgtacttgctttgtaagtgatctgaagcgaggactaaaaatccaagcagcaaaatttaatattgatgggaataatgagcgtccctccccacccccaaatgttgactatccattagatggagagaagattttacatatccttggatcaatcagagattcagttgtggaaattctttttgaacaagataatgaagagcaatcagttgccactttaatattggattcccttatacagtgtccgatagacaccaggaagcaactagcagagaatttggtagtcataggtggcacttctatgttgccaggatttctccacagattgcttgcagaaataaggtatttggtagaaaaaccaaaatataaaaaagcacttggcactaagacatttcgaattcatactccacctgcaaaagctaattgtgtggcctggttgggaggggctatttttggagcattacaagatatacttgggagccgttctgtttcaaaggaatattataatcagacgggccgtatacctgattggtgttctctcaataacccacctttggaaatgatgtttgatgtcgggaaaactcaaccacctctgatgaagagagcattttccactgagaaatagaagtttgattaaaaatcaaccttgcttcatatcaaatatttaaccaattataagcaaattgtacaaagtatgtaggatgttttgttatagaggactatagtggaagtgaaagcattctgtgtttactctttgcattaatatataattcttttgactttgtttctcttgtgtagtggtaaaatggtagctggtgcttattgagatttgctgtatttatatcaataaagtatagtaaagca

SEQ ID NO: 430374 - DNA, 1826 bp, Homo sapiens
gctaggtcggctttaaaatcgatgcagagtaattgcagtacatgggtagttggatgacattaacatgagaaatgtgctgtagtcgtcatccttggaacaaacacgtccaattacagtgaaattctgtgccccttacccggctaatttgaacacagctcaccgccaaggcctcctccagcatggccagccctgggcagagatcgtcacgaatggatttgacgggaatggggctggggactgtcatgttgaagcccggtggagatgtgggacagggacctcgtttgttccagagcctgttccaaccctccctggcttttgtggcatgttttctatgccgtttgctgcaaggatgcgttgggcatggagtaacattcccgagaccgtcctgcagtactgcacgtgtgcgtgtctgtgctttggtttgtctgtgtgtctaccttgttttagagtaaaaaagtgaatctgaggccagatcatcagtctgcacctgcctctcctcagtataatatcaatacagaagaattatattcctacctaaaggaattcatccacatactatatttcaggcatctattggtgaatcccagagaccgccgagttgtgattatcgaatcggtattatgtccttctcacttcagagagacactcactcgtgttcttttcaaatattttgaggttccatctgtcttgcttgctccaagtcatctaatggctcttctgacgcttggaattaattctgccatggtcctagattgtggatatagggaaagcctggtgttacccatatatgaaggaatcccagttctaaattgttggggagcactacccctaggaggaaaagctcttcacaaagagttggaaactcaactattggaacaatgtactgttgacacaagtgttgctaaagaacagagccttccctcagtgatgggttcagttccggaaggtgtcttagaggacattaaagcgcgtacttgctttgtaagtgatctgaagcgaggactaaaaatccaagcagcaaaatttaatattgatgggaataatgagcgtccctccccacccccaaatgttgactatccattagatggagagaagattttacatatccttggatcaatcagagattcagttgtggaaattctttttgaacaagataatgaagagcaatcagttgccactttaatattggattcccttatacagtgtccgatagacaccaggaagcaactagcagagaatttggtagtcataggtggcacttctatgttgccaggatttctccacagattgcttgcagaaataaggtatttggtagaaaaaccaaaatataaaaaagcacttggcactaagacatttcgaattcatactccacctgcaaaagctaattgtgtggcctggttgggaggggctatttttggagcattacaagatatacttgggagccgttctgtttcaaaggaatattataatcagacgggccgtatacctgattggtgttctctcaataacccacctttggaaatgatgtttgatgtcgggaaaactcaaccacctctgatgaagagagcattttccactgagaaatagaagtttgattaaaaatcaaccttgcttcatatcaaatatttaaccaattataagcaaattgtacaaagtatgtaggatgttttgttatagaggactatagtggaagtgaaagcattctgtgtttactctttgcattaatatataattcttttgactttgtttctcttgtgtagtggtaaaatggtagctggtgcttattgagatttgctgtatttatatcaataaagtatagtaaagca

SEQ ID NO: 430375 - DNA, 1396 bp, Homo sapiens
atatgatgtctaatgtgaatctaagagcggccctgcctccaaatctgtcgcgtataggtacaggtatatcattcgttcacacctgcaatcatattgttatctaaaaatgaaatgcattgaggatgctatcttgcaggcatctattggtgaatcccagagaccgccgagttgtgattatcgaatcggtattatgtccttctcacttcagagagacactcactcgtgttcttttcaaatattttgaggttccatctgtcttgcttgctccaagtcatctaatggctcttctgacgcttggaattaattctgccatggtcctagattgtggatatagggaaagcctggtgttacccatatatgaaggaatcccagttctaaattgttggggagcactacccctaggaggaaaagctcttcacaaagagttggaaactcaactattggaacaatgtactgttgacacaagtgttgctaaagaacagagccttccctcagtgatgggttcagttccggaaggtgtcttagaggacattaaagcgcgtacttgctttgtaagtgatctgaagcgaggactaaaaatccaagcagcaaaatttaatattgatgggaataatgagcgtccctccccacccccaaatgttgactatccattagatggagagaagattttacatatccttggatcaatcagagattcagttgtggaaattctttttgaacaagataatgaagagcaatcagttgccactttaatattggattcccttatacagtgtccgatagacaccaggaagcaactagcagagaatttggtagtcataggtggcacttctatgttgccaggatttctccacagattgcttgcagaaataaggtatttggtagaaaaaccaaaatataaaaaagcacttggcactaagacatttcgaattcatactccacctgcaaaagctaattgtgtggcctggttgggaggggctatttttggagcattacaagatatacttgggagccgttctgtttcaaaggaatattataatcagacgggccgtatacctgattggtgttctctcaataacccacctttggaaatgatgtttgatgtcgggaaaactcaaccacctctgatgaagagagcattttccactgagaaatagaagtttgattaaaaatcaaccttgcttcatatcaaatatttaaccaattataagcaaattgtacaaagtatgtaggatgttttgttatagaggactatagtggaagtgaaagcattctgtgtttactctttgcattaatatataattcttttgactttgtttctcttgtgtagtggtaaaatggtagctggtgcttattgagatttgctgtatttatatcaataaagtatagtaaagca

SEQ ID NO: 430376 - DNA, 1196 bp, Homo sapiens
gtccgcatatagtaaatgcgttaactaggctttaaatgacgcaattctccctgcgtcatggatttcaaggtcttttaatcacctccggtttaatctctttttaaaagatcgccttcaaattattttaatcacctacaacttttaaactaaactttaagctgtttaagtcaccttcattttaatctaaaagcactacccctaggaggaaaagctcttcacaaagagttggaaactcaactattggaacaatgtactgttgacacaagtgttgctaaagaacagagccttccctcagtgatgggttcagttccggaaggtgtcttagaggacattaaagcgcgtacttgctttgtaagtgatctgaagcgaggactaaaaatccaagcagcaaaatttaatattgatgggaataatgagcgtccctccccacccccaaatgttgactatccattagatggagagaagattttacatatccttggatcaatcagagattcagttgtggaaattctttttgaacaagataatgaagagcaatcagttgccactttaatattggattcccttatacagtgtccgatagacaccaggaagcaactagcagagaatttggtagtcataggtggcacttctatgttgccaggatttctccacagattgcttgcagaaataaggtatttggtagaaaaaccaaaatataaaaaagcacttggcactaagacatttcgaattcatactccacctgcaaaagctaattgtgtggcctggttgggaggggctatttttggagcattacaagatatacttgggagccgttctgtttcaaaggaatattataatcagacgggccgtatacctgattggtgttctctcaataacccacctttggaaatgatgtttgatgtcgggaaaactcaaccacctctgatgaagagagcattttccactgagaaatagaagtttgattaaaaatcaaccttgcttcatatcaaatatttaaccaattataagcaaattgtacaaagtatgtaggatgttttgttatagaggactatagtggaagtgaaagcattctgtgtttactctttgcattaatatataattcttttgactttgtttctcttgtgtagtggtaaaatggtagctggtgcttattgagatttgctgtatttatatcaataaagtatagtaaagca

SEQ ID NO: 430377 - DNA, 1342 bp, Homo sapiens
agcggcgcgcgaggcccccgccgtcgccgacgcccgagcgccggagccccggccccgccccgcgagcgccgggacttgttggccgcggagactgcgaccctcttctctcagtctgccttactaccatgccgctctacgagggcctggggagcggcggggagaagacggcggtcgtgatcgacctgggagaggcctttaccaagtgtggatttgctggagaaactggtccaagatgtataattcctagtgtgataaaaagagctgggatgcctaagcctgtcagagttgttcagtataatatcaatacagaagaattatattcctacctaaaggaattcatccacatactatatttcaggcatctattggtgaatcccagagaccgccgagttgtgattatcgaatcggtattatgtccttctcacttcagagagacactcactcgtgttcttttcaaatattttgaggttccatctgtcttgcttgctccaagtcatctaatggctcttctgacgcttggaattaattctgccatggtcctagattgtggatatagggaaagcctggtgttacccatatatgaaggaatcccagttctaaattgttggggagcactacccctaggaggaaaagctcttcacaaagagttggaaactcaactattggaacaatgtactgttgacacaagtgttgctaaagaacagagccttccctcagtgatgggttcagttccggaaggtgtcttagaggacattaaagcgcgtacttgctttgtaagtgatctgaagcgaggactaaaaatccaagcagcaaaatttaatattgatgggaataatgagcgtccctccccacccccaaatgttgactatccattagatggagagaagattttacatatccttggatcaatcagagattcagttgtggaaattctttttgaacaagataatgaagagcaatcagttgccactttaatattggattcccttatacagtgtccgatagacaccaggaagcaactagcagagaatttggaaatgatgtttgatgtcgggaaaactcaaccacctctgatgaagagagcattttccactgagaaatagaagtttgattaaaaatcaaccttgcttcatatcaaatatttaaccaattataagcaaattgtacaaagtatgtaggatgttttgttatagaggactatagtggaagtgaaagcattctgtgtttactctttgcattaatatataattcttttgactttgtttctcttgtgtagtggtaaaatggtagctggtgcttattgagatttgctgtatttatatcaataaagtatagtaaagca

SEQ ID NO: 430378 - DNA, 1070 bp, Homo sapiens
agtttataaaatccaaaggaatagatgatgagcatgttcacttgaatagaattgttttaactggggtgtaggtacactctgttcaattataataactagccataataaggtctccttttcttccttaaagcgcgtacttgctttgtaagtgatctgaagcgaggactaaaaatccaagcagcaaaatttaatattgatgggaataatgaggtaagtttaaaaaaaaaaaaggcatctttttgcaaaggttacaacatgtgtggacttatgtttatgatatttatatttcagcgtccctccccacccccaaatgttgactatccattagatggagagaagattttacatatccttggatcaatcagagattcagttgtggaaattctttttgaacaagataatgaagagcaatcagttgccactttaatattggattcccttatacagtgtccgatagacaccaggaagcaactagcagagaatttggtagtcataggtggcacttctatgttgccaggatttctccacagattgcttgcagaaataaggtatttggtagaaaaaccaaaatataaaaaagcacttggcactaagacatttcgaattcatactccacctgcaaaagctaattgtgtggcctggttgggaggggctatttttggagcattacaagatatacttgggagccgttctgtttcaaaggaatattataatcagacgggccgtatacctgattggtgttctctcaataacccacctttggaaatgatgtttgatgtcgggaaaactcaaccacctctgatgaagagagcattttccactgagaaatagaagtttgattaaaaatcaaccttgcttcatatcaaatatttaaccaattataagcaaattgtacaaagtatgtaggatgttttgttatagaggactatagtggaagtgaaagcattctgtgtttactctttgcattaatatataattcttttgactttgtttctcttgtgtagtggtaaaatggtagctggtgcttattgagatttgctgtatttatatcaataaagtatagtaaagca

SEQ ID NO: 430379 - DNA, 915 bp, Homo sapiens
agcggcgcgcgaggcccccgccgtcgccgacgcccgagcgccggagccccggccccgccccgcgagcgccgggacttgttggccgcggagactgcgaccctcttctctcagtctgccttactaccatgccgctctacgagggcctggggagcggcggggagaagacggcggtcgtgatcgacctgggagaggcctttaccaagtgtggatttgctggagaaactggtccaagatgtataattcctagtgtgataaaaagagctgggatgcctaagcctgtcagagttgttcagtataatatcaatacagaagaattatattcctacctaaaggaattcatccacatactatatttcaggcatctattggtgaatcccagagaccgccgagttgtgattatcgaatcggtattatgtccttctcacttcagagagacactcactcgtgttcttttcaaatattttgaggttccatctgtcttgcttgctccaagtcatctaatggctcttctgacgcttggaattaattctgccatggtcctagattgtggatatagggaaagcctggtgttacccatatatgaaggaatcccagttctaaattgttggggagcactacccctaggaggaaaagctcttcacaaagagttggaaactcaactattggaacaatgtactgttgacacaagtgttgctaaagaacagagccttccctcagtgatgggttcagttccggaaggtgtcttagaggacattaaagcgcgtacttgctttgtaagtgatctgaagcgaggactaaaaatccaagcagcaaaatttaatattgatgggaataatgagcgtccctccccacccacaactgaatctctgattgatccaaggatatgtaaaatcttctctccatctaatgtcgacg

SEQ ID NO: 430380 - DNA, 788 bp, Homo sapiens
cggtatccgaagctaggactaataaaccacggcttgaacttttagattgatgggaataatgagcgtccctccccacccccaaatgttgactatccattagatggagagaagattttacatatccttggatcaatcagagattcagttgtggaaattctttttgaacaagataatgaagagcaatcagttgccactttaatattggattcccttatacagtgtccgatagacaccaggaagcaactagcagagaatttggtagtcataggtggcacttctatgttgccaggatttctccacagattgcttgcagaaataaggtatttggtagaaaaaccaaaatataaaaaagcacttggcactaagacatttcgaattcatactccacctgctatacttgggagccgttctgtttcaaaggaatattataatcagacgggccgtatacctgattggtgttctctcaataacccacctttggaaatgatgtttgatgtcgggaaaactcaaccacctctgatgaagagagcattttccactgagaaatagaagtttgattaaaaatcaaccttgcttcatatcaaatatttaaccaattataagcaaattgtacaaagtatgtaggatgttttgttatagaggactatagtggaagtgaaagcattctgtgtttactctttgcattaatatataattcttttgactttgtttctcttgtgtagtggtaaaatggtagctggtgcttattgagatttgctgtatttatatcaataaagtatagtaaagca

SEQ ID NO: 430381 - DNA, 716 bp, Homo sapiens
gggtggcagagccccaggcactgcctgggtcctcatcgccgactcgctgggcagctccgggcctccccttttcttcaaccagcgcccttgcaaataacagctcttattatttcctccctgggcgatgcgaatccgaggatcggggtctgactcccagagaggcccagaaagcttctgttgaattgccctcgtcgccgccccttgtcatcaccccaaacccaacaaaccctttgggatcatctgtgtaggggatgacaaccgtgacctagaccccgcttaccctgggctcctcagttgaggaaggcagccaaccgaatgtaaatgctcgatgacgaatttcatcataaaatattgaacggagtttattttggtgctgaaaatggaaagatgtttaagacagggctatcgctgctcaagaattagggagactgggcacattaagaggtgaaaccctatagataagattctggaaatcctttgttggctcccctaaactcgaaggttagatttgacatgttttaaacaaaccaacttgtaaacaatagagaggaggttctcaacctttcggatggcatagatctctttaatggctggatgaaaaccacaaatgcacaaatcttaaggtacttatacacagtttcagggaattggcagacaatcaatgtggtcctgggaccctagattaagagtccttgtgatgggctcaacagagaggg

SEQ ID NO: 430382 - DNA, 1618 bp, Homo sapiens
agcggcgcgcgaggcccccgccgtcgccgacgcccgagcgccggagccccggccccgccccgcgagcgccgggacttgttggccgcggagactgcgaccctcttctctcagtctgccttactaccatgccgctctacgagggcctggggagcggcggggagaagacggcggtcgtgatcgacctgggagaggcctttaccaagtgtggatttgctggagaaactggtccaagatgtataattcctagtgtgataaaaagagctgggatgcctaagcctgtcagagttgttcagtataatatcaatacagaagaattatattcctacctaaaggaattcatccacatactatatttcaggcatctattggtgaatcccagagaccgccgagttgtgattatcgaatcggtattatgtccttctcacttcagagagacactcactcgtgttcttttcaaatattttgaggttccatctgtcttgcttgctccaagtcatctaatggctcttctgacgcttggaattaattctgccatggtcctagattgtggatatagggaaagcctggtgttacccatatatgaaggaatcccagttctaaattgttggggagcactacccctaggaggaaaagctcttcacaaagagttggaaactcaactattggaacaatgtactgttgacacaagtgttgctaaagaacagagccttccctcagtgatgggttcagttccggaaggtgtcttagaggacattaaagcgcgtacttgctttgtaagtgatctgaagcgaggactaaaaatccaagcagcaaaatttaatattgatgggaataatgagcgtccctccccacccccaaatgttgactatccattagatggagagaagattttacatatccttggatcaatcagagattcagttgtggaaattctttttgaacaagataatgaagagcaatcagttgccactttaatattggattcccttatacagtgtccgatagacaccaggaagcaactagcagagaatttggtagtcataggtggcacttctatgttgccaggatttctccacagattgcttgcagaaataaggtatttggtagaaaaaccaaaatataaaaaagcacttggcactaagacatttcgaattcatactccacctgcaaaagctaattgtgtggcctggttgggaggggctatttttggagcattacaagatatacttgggagccgttctgtttcaaaggaatattataatcagacgggccgtatacctgattggtgttctctcaataacccacctttggaaatgatgtttgatgtcgggaaaactcaaccacctctgatgaagagagcattttccactgagaaatagaagtttgattaaaaatcaaccttgcttcatatcaaatatttaaccaattataagcaaattgtacaaagtatgtaggatgttttgttatagaggactatagtggaagtgaaagcattctgtgtttactctttgcattaatatataattcttttgactttgtttctcttgtgtagtggtaaaatggtagctggtgcttattgagatttgctgtatttatatcaataaagtatagtaaagca

SEQ ID NO: 430383 - DNA, 839 bp, Homo sapiens
tggtggtggtggggtgtgagataatcagcgtgggggggttgcgtgccgaggcgccgcgtacttgctttgtaagtgatctgaagcgaggactaaaaatccaagcagcaaaatttaatattgatgggaataatgagagattcagttgtggaaattctttttgaacaagataatgaagagcaatcagttgccactttaatattggattcccttatacagtgtccgatagacaccaggaagcaactagcagagaatttggtagtcataggtggcacttctatgttgccaggatttctccacagattgcttgcagaaataaggtatttggtagaaaaaccaaaatataaaaaagcacttggcactaagacatttcgaattcatactccacctgcaaaagctaattgtgtggcctggttgggaggggctatttttggagcattacaagatatacttgggagccgttctgtttcaaaggaatattataatcagacgggccgtatacctgattggtgttctctcaataacccacctttggaaatgatgtttgatgtcgggaaaactcaaccacctctgatgaagagagcattttccactgagaaatagaagtttgattaaaaatcaaccttgcttcatatcaaatatttaaccaattataagcaaattgtacaaagtatgtaggatgttttgttatagaggactatagtggaagtgaaagcattctgtgtttactctttgcattaatatataattcttttgactttgtttctcttgtgtagtggtaaaatggtagctggtgcttattgagatttgctgtatttatatcaataaagtatagtaaagca

SEQ ID NO: 430384 - DNA, 1503 bp, Homo sapiens
ttcttattggctccccaaatacacaacaaggaggtcctgccgtggaagatgaagaactggagctgctatgtagaacaggagtcatttgtgtggatttgctggagaaactggtccaagatgtataattcctagtgtgataaaaagagctgggatgcctaagcctgtcagagttgttcagtataatatcaatacagaagaattatattcctacctaaaggaattcatccacatactatatttcaggcatctattggtgaatcccagagaccgccgagttgtgattatcgaatcggtattatgtccttctcacttcagagagacactcactcgtgttcttttcaaatattttgaggttccatctgtcttgcttgctccaagtcatctaatggctcttctgacgcttggaattaattctgccatggtcctagattgtggatatagggaaagcctggtgttacccatatatgaaggaatcccagttctaaattgttggggagcactacccctaggaggaaaagctcttcacaaagagttggaaactcaactattggaacaatgtactgttgacacaagtgttgctaaagaacagagccttccctcagtgatgggttcagttccggaaggtgtcttagaggacattaaagcgcgtacttgctttgtaagtgatctgaagcgaggactaaaaatccaagcagcaaaatttaatattgatgggaataatgagcgtccctccccacccccaaatgttgactatccattagatggagagaagattttacatatccttggatcaatcagagattcagttgtggaaattctttttgaacaagataatgaagagcaatcagttgccactttaatattggattcccttatacagtgtccgatagacaccaggaagcaactagcagagaatttggtagtcataggtggcacttctatgttgccaggatttctccacagattgcttgcagaaataaggtatttggtagaaaaaccaaaatataaaaaagcacttggcactaagacatttcgaattcatactccacctgcaaaagctaattgtgtggcctggttgggaggggctatttttggagcattacaagatatacttgggagccgttctgtttcaaaggaatattataatcagacgggccgtatacctgattggtgttctctcaataacccacctttggaaatgatgtttgatgtcgggaaaactcaaccacctctgatgaagagagcattttccactgagaaatagaagtttgattaaaaatcaaccttgcttcatatcaaatatttaaccaattataagcaaattgtacaaagtatgtaggatgttttgttatagaggactatagtggaagtgaaagcattctgtgtttactctttgcattaatatataattcttttgactttgtttctcttgtgtagtggtaaaatggtagctggtgcttattgagatttgctgtatttatatcaataaagtatagtaaagca

SEQ ID NO: 430385 - DNA, 1564 bp, Homo sapiens
agcggcgcgcgaggcccccgccgtcgccgacgcccgagcgccggagccccggccccgccccgcgagcgccgggacttgttggccgcggagactgcgaccctcttctctcagtctgccttactaccatgccgctctacgagggcctggggagcggcggggagaagacggcggtcgtgatcgacctgggagaggcctttaccaagtgtggatttgctggagaaactggtccaagatgtataattcctagtgtgatagaagaattatattcctacctaaaggaattcatccacatactatatttcaggcatctattggtgaatcccagagaccgccgagttgtgattatcgaatcggtattatgtccttctcacttcagagagacactcactcgtgttcttttcaaatattttgaggttccatctgtcttgcttgctccaagtcatctaatggctcttctgacgcttggaattaattctgccatggtcctagattgtggatatagggaaagcctggtgttacccatatatgaaggaatcccagttctaaattgttggggagcactacccctaggaggaaaagctcttcacaaagagttggaaactcaactattggaacaatgtactgttgacacaagtgttgctaaagaacagagccttccctcagtgatgggttcagttccggaaggtgtcttagaggacattaaagcgcgtacttgctttgtaagtgatctgaagcgaggactaaaaatccaagcagcaaaatttaatattgatgggaataatgagcgtccctccccacccccaaatgttgactatccattagatggagagaagattttacatatccttggatcaatcagagattcagttgtggaaattctttttgaacaagataatgaagagcaatcagttgccactttaatattggattcccttatacagtgtccgatagacaccaggaagcaactagcagagaatttggtagtcataggtggcacttctatgttgccaggatttctccacagattgcttgcagaaataaggtatttggtagaaaaaccaaaatataaaaaagcacttggcactaagacatttcgaattcatactccacctgcaaaagctaattgtgtggcctggttgggaggggctatttttggagcattacaagatatacttgggagccgttctgtttcaaaggaatattataatcagacgggccgtatacctgattggtgttctctcaataacccacctttggaaatgatgtttgatgtcgggaaaactcaaccacctctgatgaagagagcattttccactgagaaatagaagtttgattaaaaatcaaccttgcttcatatcaaatatttaaccaattataagcaaattgtacaaagtatgtaggatgttttgttatagaggactatagtggaagtgaaagcattctgtgtttactctttgcattaatatataattcttttgactttgtttctcttgtgtagtggtaaaatggtagctggtgcttattgagatttgctgtatttatatcaataaagtatagtaaagca

SEQ ID NO: 430386 - DNA, 1573 bp, Homo sapiens
agcggcgcgcgaggcccccgccgtcgccgacgcccgagcgccggagccccggccccgccccgcgagcgccgggacttgttggccgcggagactgcgaccctcttctctcagtctgccttactaccatgccgctctacgagggcctggggagcggcggggagaagacggcggtcgtgatcgacctgggagaggcctttaccaagtgtggatttgctggagaaactggtccaagatgtataattcctagtgtgataaaaagagctgggatgcctaagcctgtcagagttgttcagtataatatcaatacagaagaattatattcctacctaaaggaattcatccacatactatatttcaggcatctattggtgaatcccagagaccgccgagttgtgattatcgaatcggtattatgtccttctcacttcagagagacactcactcgtgttcttttcaaatattttgaggttccatctgtcttgcttgctccaagtcatctaatggctcttctgacgcttggaattaattctgccatggtcctagattgtggatatagggaaagcctggtgttacccatatatgaaggaatcccagttctaaattgttggggagcactacccctaggaggaaaagctcttcacaatgttgctaaagaacagagccttccctcagtgatgggttcagttccggaaggtgtcttagaggacattaaagcgcgtacttgctttgtaagtgatctgaagcgaggactaaaaatccaagcagcaaaatttaatattgatgggaataatgagcgtccctccccacccccaaatgttgactatccattagatggagagaagattttacatatccttggatcaatcagagattcagttgtggaaattctttttgaacaagataatgaagagcaatcagttgccactttaatattggattcccttatacagtgtccgatagacaccaggaagcaactagcagagaatttggtagtcataggtggcacttctatgttgccaggatttctccacagattgcttgcagaaataaggtatttggtagaaaaaccaaaatataaaaaagcacttggcactaagacatttcgaattcatactccacctgcaaaagctaattgtgtggcctggttgggaggggctatttttggagcattacaagatatacttgggagccgttctgtttcaaaggaatattataatcagacgggccgtatacctgattggtgttctctcaataacccacctttggaaatgatgtttgatgtcgggaaaactcaaccacctctgatgaagagagcattttccactgagaaatagaagtttgattaaaaatcaaccttgcttcatatcaaatatttaaccaattataagcaaattgtacaaagtatgtaggatgttttgttatagaggactatagtggaagtgaaagcattctgtgtttactctttgcattaatatataattcttttgactttgtttctcttgtgtagtggtaaaatggtagctggtgcttattgagatttgctgtatttatatcaataaagtatagtaaagca

SEQ ID NO: 430387 - DNA, 1369 bp, Homo sapiens
agcggcgcgcgaggcccccgccgtcgccgacgcccgagcgccggagccccggccccgccccgcgagcgccgggacttgttggccgcggagactgcgaccctcttctctcagtctgccttactaccatgccgctctacgagggcctggggagcggcggggagaagacggcggtcgtgatcgacctgggagaggcctttaccaacctgtcagagttgttcagtataatatcaatacagaagaattatattcctacctaaaggaattcatccacatactatatttcaggcatctattggtgaatcccagagaccgccgagttgtgattatcgaatcggtattatgtccttctcacttcagagagacactcactcgtgttcttttcaaatattttgagagagttggaaactcaactattggaacaatgtactgttgacacaagtgttgctaaagaacagagccttccctcagtgatgggttcagttccggaaggtgtcttagaggacattaaagcgcgtacttgctttgtaagtgatctgaagcgaggactaaaaatccaagcagcaaaatttaatattgatgggaataatgagcgtccctccccacccccaaatgttgactatccattagatggagagaagattttacatatccttggatcaatcagagattcagttgtggaaattctttttgaacaagataatgaagagcaatcagttgccactttaatattggattcccttatacagtgtccgatagacaccaggaagcaactagcagagaatttggtagtcataggtggcacttctatgttgccaggatttctccacagattgcttgcagaaataaggtatttggtagaaaaaccaaaatataaaaaagcacttggcactaagacatttcgaattcatactccacctgcaaaagctaattgtgtggcctggttgggaggggctatttttggagcattacaagatatacttgggagccgttctgtttcaaaggaatattataatcagacgggccgtatacctgattggtgttctctcaataacccacctttggaaatgatgtttgatgtcgggaaaactcaaccacctctgatgaagagagcattttccactgagaaatagaagtttgattaaaaatcaaccttgcttcatatcaaatatttaaccaattataagcaaattgtacaaagtatgtaggatgttttgttatagaggactatagtggaagtgaaagcattctgtgtttactctttgcattaatatataattcttttgactttgtttctcttgtgtagtggtaaaatggtagctggtgcttattgagatttgctgtatttatatcaataaagtatagtaaagca

SEQ ID NO: 430388 - DNA, 1231 bp, Homo sapiens
ctcctcctcctccgcattctctcctctgatgaaaccacactcatcaaaagtggttgtgacagaatgctcagatttgaatgatgatatttcttccctaaaacaaaattaaatttttctgttagactttttgagaaaattatagtagttgtatttttaaaattttttctaaattgaaaaatagaaatgtgaaggcaatttaatagactgtttttaattattaaagttttataattctaaatgaaatatttgttttaggttcagttccggaaggtgtcttagaggacattaaagcgcgtacttgctttgtaagtgatctgaagcgaggactaaaaatccaagcagcaaaatttaatattgatgggaataatgaggtaagtttaaaaaaaaaaaaggcatctttttgcaaaggttacaacatgtgtggacttatgtttatgatatttatatttcagcgtccctccccacccccaaatgttgactatccattagatggagagaagattttacatatccttggatcaatcagagattcagttgtggaaattctttttgaacaagataatgaagagcaatcagttgccactttaatattggattcccttatacagtgtccgatagacaccaggaagcaactagcagagaatttggtagtcataggtggcacttctatgttgccaggatttctccacagattgcttgcagaaataaggtatttggtagaaaaaccaaaatataaaaaagcacttggcactaagacatttcgaattcatactccacctgcaaaagctaattgtgtggcctggttgggaggggctatttttggagcattacaagatatacttgggagccgttctgtttcaaaggaatattataatcagacgggccgtatacctgattggtgttctctcaataacccacctttggaaatgatgtttgatgtcgggaaaactcaaccacctctgatgaagagagcattttccactgagaaatagaagtttgattaaaaatcaaccttgcttcatatcaaatatttaaccaattataagcaaattgtacaaagtatgtaggatgttttgttatagaggactatagtggaagtgaaagcattctgtgtttactctttgcattaatatataattcttttgactttgtttctcttgtgtagtggtaaaatggtagctggtgcttattgagatttgctgtatttatatcaataaagtatagtaaagca

SEQ ID NO: 430389 - DNA, 714 bp, Homo sapiens
agcggcgcgcgaggcccccgccgtcgccgacgcccgagcgccggagccccggccccgccccgcgagcgccgggacttgttggccgcggagactgcgaccctcttctctcagtctgccttactaccatgccgctctacgagggcctggggagcggcggggagaagacggcggtcgtgatcgacctgggagaggcctttaccaagtgtggatttgctggagaaactggtccaagatgtataattcctagtgtgataaaaagagctgggatgcctaagcctgtcagagttgttcagtataatatcaatacagaagaattatattcctacctaaaggaattcatccacatactatatttcaggcatctattggtgaatcccagagaccgccgagttgtgattatcgaatcggtattatgtccttctcacttcagagagacactcactcgtgttcttttcaaatattttgagagagttggaaactcaactattggaacaatgtactgttgacacaagtgttgctaaagaacagagccttccctcagtgatgggttcagttccggaaggtgtcttagaggacattaaagcgcgtacttgctttgtaagtgatctgaagcgaggactaaaaatccaagcagcaaaatttaatattgatgggaataatgagcgtccctccccacccccgagggtaaggctcccgggggtcctctaggcagcc

SEQ ID NO: 430390 - DNA, 2096 bp, Homo sapiens
gcccggagagccgcatctattggcagctttgttattgatcagaaactgctcgccgccgacttggcttccagtctggctgcgggcaacccttgagttttcgcctctgtcctgtcccccgaactgacaggtgctcccagcaacttgctggggacttctcgccgctcccccgcgtccccaccccctcattcctccctcgccttcacccccacccccaccacttcgccacagctcaggatttgtttaaaccttgggaaactggttcaggtccaggttttgctttgatccttttcaaaaactggagacacagaagagggctctaggaaaaagttttggatgggattatgtggaaactaccctgcgattctctgctgccagagcaggctcggcgcttccaccccagtgcagccttcccctggcggtggtgaaagagactcgggagtcgctgcttccaaagtgcccgccgtgagtgagctctcaccccagtcagccaaatgagcctcttcgggcttctcctgctgacatctgccctggccggccagagacaggggactcaggcggaatccaacctgagtagtaaattccagttttccagcaacaaggaacagaacggagtacaagatcctcagcatgagagaattattactgtgtctactaatggaagtattcacagcccaaggtttcctcatacttatccaagaaatacggtcttggtatggagattagtagcagtagaggaaaatgtatggatacaacttacgtttgatgaaagatttgggcttgaagacccagaagatgacatatgcaagtatgattttgtagaagttgaggaacccagtgatggaactatattagggcgctggtgtggttctggtactgtaccaggaaaacagatttctaaaggaaatcaaattaggataagatttgtatctgatgaatattttccttctgaaccagggttctgcatccactacaacattgtcatgccacaattcacagaagctgtgagtccttcagtgctacccccttcagctttgccactggacctgcttaataatgctataactgcctttagtaccttggaagaccttattcgatatcttgaaccagagagatggcagttggacttagaagatctatataggccaacttggcaacttcttggcaaggcttttgtttttggaagaaaatccagagtggtggatctgaaccttctaacagaggaggtaagattatacagctgcacacctcgtaacttctcagtgtccataagggaagaactaaagagaaccgataccattttctggccaggttgtctcctggttaaacgctgtggtgggaactgtgcctgttgtctccacaattgcaatgaatgtcaatgtgtcccaagcaaagttactaaaaaataccacgaggtccttcagttgagaccaaagaccggtgtcaggggattgcacaaatcactcaccgacgtggccctggagcaccatgaggagtgtgactgtgtgtgcagagggagcacaggaggatagccgcatcaccaccagcagctcttgcccagagctgtgcagtgcagtggctgattctattagagaacgtatgcgttatctccatccttaatctcagttgtttgcttcaaggacctttcatcttcaggatttacagtgcattctgaaagaggagacatcaaacagaattaggagttgtgcaacagctcttttgagaggaggcctaaaggacaggagaaaaggtcttcaatcgtggaaagaaaattaaatgttgtattaaatagatcaccagctagtttcagagttaccatgtacgtattccactagctgggttctgtatttcagttctttcgatacggcttagggtaatgtcagtacaggaaaaaaactgtgcaagtgagcacctgattccgttgccttgcttaactctaaagctccatgtcctgggcctaaaatcgtataaaatctggatttttttttttttttggctcatattcacatatgtaaaccagaacatttctatgtactacaaacctggtttttaaaaaggaactatgttgctatgaattaaacttgtgtcgtgctgatagg

SEQ ID NO: 430391 - DNA, 2599 bp, Homo sapiens
agctggtacggtcccgaggtgctatggatgcctcttcgggcttctcctgctgacatctgccctggccggccagagacaggggactcaggcggaatccaacctgagtagtaaattccagttttccagcaacaaggaacagaacggtaggaactatatccaagcatctggactggcatagaaaagaggagaaagaacatttaaaaggagtacaagatcctcagcatgagagaattattactgtgtctactaatggaagtattcacagcccaaggtttcctcatacttatccaagaaatacggtcttggtatggagattagtagcagtagaggaaaatgtatggatacaacttacgtttgatgaaagatttgggcttgaagacccagaagatgacatatgcaagtatgattttgtagaagttgaggaacccagtgatggaactatattagggcgctggtgtggttctggtactgtaccaggaaaacagatttctaaaggaaatcaaattaggataagatttgtatctgatgaatattttccttctgaaccagggttctgcatccactacaacattgtcatgccacaattcacagaagctgtgagtccttcagtgctacccccttcagctttgccactggacctgcttaataatgctataactgcctttagtaccttggaagaccttattcgatatcttgaaccagagagatggcagttggacttagaagatctatataggccaacttggcaacttcttggcaaggcttttgtttttggaagaaaatccagagtggtggatctgaaccttctaacagaggaggtaagattatacagctgcacacctcgtaacttctcagtgtccataagggaagaactaaagagaaccgataccattttctggccaggttgtctcctggttaaacgctgtggtgggaactgtgcctgttgtctccacaattgcaatgaatgtcaatgtgtcccaagcaaagttactaaaaaataccacgaggtccttcagttgagaccaaagaccggtgtcaggggattgcacaaatcactcaccgacgtggccctggagcaccatgaggagtgtgactgtgtgtgcagagggagcacaggaggatagccgcatcaccaccagcagctcttgcccagagctgtgcagtgcagtggctgattctattagagaacgtatgcgttatctccatccttaatctcagttgtttgcttcaaggacctttcatcttcaggatttacagtgcattctgaaagaggagacatcaaacagaattaggagttgtgcaacagctcttttgagaggaggcctaaaggacaggagaaaaggtcttcaatcgtggaaagaaaattaaatgttgtattaaatagatcaccagctagtttcagagttaccatgtacgtattccactagctgggttctgtatttcagttctttcgatacggcttagggtaatgtcagtacaggaaaaaaactgtgcaagtgagcacctgattccgttgccttgcttaactctaaagctccatgtcctgggcctaaaatcgtataaaatctggatttttttttttttttggctcatattcacatatgtaaaccagaacatttctatgtactacaaacctggtttttaaaaaggaactatgttgctatgaattaaacttgtgtcgtgctgataggacagactggatttttcatatttcttattaaaatttctgccatttagaagaagagaactacattcatggtttggaagagataaacctgaaaagaagagtggccttatcttcactttatcgataagtcagtttatttgtttcattgtgtacatttttatattctccttttgacattataactgttggcttttctaatcttgttaaatatatctatttttaccaaaggtatttaatattcttttttatgacaacttagatcaactatttttagcttggtaaatttttctaaacacaattgttatagccagaggaacaaagatgatataaaatattgttgctctgacaaaaatacatgtatttcattctcgtatggtgctagagttagattaatctgcattttaaaaaactgaattggaatagaattggtaagttgcaaagactttttgaaaataattaaattatcatatcttccattcctgttattggagatgaaaataaaaagcaacttatgaaagtagacattcagatccagccattactaacctattccttttttggggaaatctgagcctagctcagaaaaacataaagcaccttgaaaaagacttggcagcttcctgataaagcgtgctgtgctgtgcagtaggaacacatcctatttattgtgatgttgtggttttattatcttaaactctgttccatacacttgtataaatacatggatatttttatgtacagaagtatgtctcttaaccagttcacttattgtactctggcaatttaaaagaaaatcagtaaaatattttgcttgtaaaatgcttaatatcgtgcctaggttatgtggtgactatttgaatcaaaaatgtattgaatcatcaaataaaagaatgtggctattttggggagaaa

SEQ ID NO: 430392 - DNA, 2061 bp, Homo sapiens
ggattatgcagcatagaacaaaaggagagaaaaatgattaaagcaattcacagaagctgtgagtccttcagtgctacccccttcagctttgccactggacctgcttaataatgctataactgcctttagtaccttggaagaccttattcgatatcttgaaccagagagatggcagttggacttagaagatctatataggccaacttggcaacttcttggcaaggcttttgtttttggaagaaaatccagagtggtggatctgaaccttctaacagaggaggtaagattatacagctgcacacctcgtaacttctcagtgtccataagggaagaactaaagagaaccgataccattttctggccaggttgtctcctggttaaacgctgtggtgggaactgtgcctgttgtctccacaattgcaatgaatgtcaatgtgtcccaagcaaagttactaaaaaataccacgaggtccttcagttgagaccaaagaccggtgtcaggggattgcacaaatcactcaccgacgtggccctggagcaccatgaggagtgtgactgtgtgtgcagagggagcacaggaggatagccgcatcaccaccagcagctcttgcccagagctgtgcagtgcagtggctgattctattagagaacgtatgcgttatctccatccttaatctcagttgtttgcttcaaggacctttcatcttcaggatttacagtgcattctgaaagaggagacatcaaacagaattaggagttgtgcaacagctcttttgagaggaggcctaaaggacaggagaaaaggtcttcaatcgtggaaagaaaattaaatgttgtattaaatagatcaccagctagtttcagagttaccatgtacgtattccactagctgggttctgtatttcagttctttcgatacggcttagggtaatgtcagtacaggaaaaaaactgtgcaagtgagcacctgattccgttgccttgcttaactctaaagctccatgtcctgggcctaaaatcgtataaaatctggatttttttttttttttggctcatattcacatatgtaaaccagaacatttctatgtactacaaacctggtttttaaaaaggaactatgttgctatgaattaaacttgtgtcgtgctgataggacagactggatttttcatatttcttattaaaatttctgccatttagaagaagagaactacattcatggtttggaagagataaacctgaaaagaagagtggccttatcttcactttatcgataagtcagtttatttgtttcattgtgtacatttttatattctccttttgacattataactgttggcttttctaatcttgttaaatatatctatttttaccaaaggtatttaatattcttttttatgacaacttagatcaactatttttagcttggtaaatttttctaaacacaattgttatagccagaggaacaaagatgatataaaatattgttgctctgacaaaaatacatgtatttcattctcgtatggtgctagagttagattaatctgcattttaaaaaactgaattggaatagaattggtaagttgcaaagactttttgaaaataattaaattatcatatcttccattcctgttattggagatgaaaataaaaagcaacttatgaaagtagacattcagatccagccattactaacctattccttttttggggaaatctgagcctagctcagaaaaacataaagcaccttgaaaaagacttggcagcttcctgataaagcgtgctgtgctgtgcagtaggaacacatcctatttattgtgatgttgtggttttattatcttaaactctgttccatacacttgtataaatacatggatatttttatgtacagaagtatgtctcttaaccagttcacttattgtactctggcaatttaaaagaaaatcagtaaaatattttgcttgtaaaatgcttaatatcgtgcctaggttatgtggtgactatttgaatcaaaaatgtattgaatcatcaaataaaagaatgtggctattttggggagaaa

SEQ ID NO: 430393 - DNA, 1975 bp, Homo sapiens
attcttgcccatctcatctgtgtgaaaaagtatccttttttccaattcacagaagctgtgagtccttcagtgctacccccttcagctttgccactggacctgcttaataatgctataactgcctttagtaccttggaagaccttattcgatatcttgaaccagagagatggcagttggacttagaagatctatataggccaacttggcaacttcttggcaaggcttttgtttttggaagaaaatccagagtggtggatctgaaccttctaacagaggaggttgtctcctggttaaacgctgtggtgggaactgtgcctgttgtctccacaattgcaatgaatgtcaatgtgtcccaagcaaagttactaaaaaataccacgaggtccttcagttgagaccaaagaccggtgtcaggggattgcacaaatcactcaccgacgtggccctggagcaccatgaggagtgtgactgtgtgtgcagagggagcacaggaggatagccgcatcaccaccagcagctcttgcccagagctgtgcagtgcagtggctgattctattagagaacgtatgcgttatctccatccttaatctcagttgtttgcttcaaggacctttcatcttcaggatttacagtgcattctgaaagaggagacatcaaacagaattaggagttgtgcaacagctcttttgagaggaggcctaaaggacaggagaaaaggtcttcaatcgtggaaagaaaattaaatgttgtattaaatagatcaccagctagtttcagagttaccatgtacgtattccactagctgggttctgtatttcagttctttcgatacggcttagggtaatgtcagtacaggaaaaaaactgtgcaagtgagcacctgattccgttgccttgcttaactctaaagctccatgtcctgggcctaaaatcgtataaaatctggatttttttttttttttggctcatattcacatatgtaaaccagaacatttctatgtactacaaacctggtttttaaaaaggaactatgttgctatgaattaaacttgtgtcgtgctgataggacagactggatttttcatatttcttattaaaatttctgccatttagaagaagagaactacattcatggtttggaagagataaacctgaaaagaagagtggccttatcttcactttatcgataagtcagtttatttgtttcattgtgtacatttttatattctccttttgacattataactgttggcttttctaatcttgttaaatatatctatttttaccaaaggtatttaatattcttttttatgacaacttagatcaactatttttagcttggtaaatttttctaaacacaattgttatagccagaggaacaaagatgatataaaatattgttgctctgacaaaaatacatgtatttcattctcgtatggtgctagagttagattaatctgcattttaaaaaactgaattggaatagaattggtaagttgcaaagactttttgaaaataattaaattatcatatcttccattcctgttattggagatgaaaataaaaagcaacttatgaaagtagacattcagatccagccattactaacctattccttttttggggaaatctgagcctagctcagaaaaacataaagcaccttgaaaaagacttggcagcttcctgataaagcgtgctgtgctgtgcagtaggaacacatcctatttattgtgatgttgtggttttattatcttaaactctgttccatacacttgtataaatacatggatatttttatgtacagaagtatgtctcttaaccagttcacttattgtactctggcaatttaaaagaaaatcagtaaaatattttgcttgtaaaatgcttaatatcgtgcctaggttatgtggtgactatttgaatcaaaaatgtattgaatcatcaaataaaagaatgtggctattttggggagaaa

SEQ ID NO: 430394 - DNA, 1757 bp, Homo sapiens
ttttttttggtgggagagtgttttcataatgcgtgctctaggaaaaattaaaatatgtgtctttcttgggccccaagattcttttctaaaacgttacttgtttataaaagccagtcatagacattcgttgatttttaaaagtggcttactcttattccctttcaggtccttcagttgagaccaaagaccggtgtcaggggattgcacaaatcactcaccgacgtggccctggagcaccatgaggagtgtgactgtgtgtgcagagggagcacaggaggatagccgcatcaccaccagcagctcttgcccagagctgtgcagtgcagtggctgattctattagagaacgtatgcgttatctccatccttaatctcagttgtttgcttcaaggacctttcatcttcaggatttacagtgcattctgaaagaggagacatcaaacagaattaggagttgtgcaacagctcttttgagaggaggcctaaaggacaggagaaaaggtcttcaatcgtggaaagaaaattaaatgttgtattaaatagatcaccagctagtttcagagttaccatgtacgtattccactagctgggttctgtatttcagttctttcgatacggcttagggtaatgtcagtacaggaaaaaaactgtgcaagtgagcacctgattccgttgccttgcttaactctaaagctccatgtcctgggcctaaaatcgtataaaatctggatttttttttttttttggctcatattcacatatgtaaaccagaacatttctatgtactacaaacctggtttttaaaaaggaactatgttgctatgaattaaacttgtgtcgtgctgataggacagactggatttttcatatttcttattaaaatttctgccatttagaagaagagaactacattcatggtttggaagagataaacctgaaaagaagagtggccttatcttcactttatcgataagtcagtttatttgtttcattgtgtacatttttatattctccttttgacattataactgttggcttttctaatcttgttaaatatatctatttttaccaaaggtatttaatattcttttttatgacaacttagatcaactatttttagcttggtaaatttttctaaacacaattgttatagccagaggaacaaagatgatataaaatattgttgctctgacaaaaatacatgtatttcattctcgtatggtgctagagttagattaatctgcattttaaaaaactgaattggaatagaattggtaagttgcaaagactttttgaaaataattaaattatcatatcttccattcctgttattggagatgaaaataaaaagcaacttatgaaagtagacattcagatccagccattactaacctattccttttttggggaaatctgagcctagctcagaaaaacataaagcaccttgaaaaagacttggcagcttcctgataaagcgtgctgtgctgtgcagtaggaacacatcctatttattgtgatgttgtggttttattatcttaaactctgttccatacacttgtataaatacatggatatttttatgtacagaagtatgtctcttaaccagttcacttattgtactctggcaatttaaaagaaaatcagtaaaatattttgcttgtaaaatgcttaatatcgtgcctaggttatgtggtgactatttgaatcaaaaatgtattgaatcatcaaataaaagaatgtggctattttggggagaaa

SEQ ID NO: 430395 - DNA, 1222 bp, Homo sapiens
gcccggagagccgcatctattggcagctttgttattgatcagaaactgctcgccgccgacttggcttccagtctggctgcgggcaacccttgagttttcgcctctgtcctgtcccccgaactgacaggtgctcccagcaacttgctggggacttctcgccgctcccccgcgtccccaccccctcattcctccctcgccttcacccccacccccaccacttcgccacagctcaggatttgtttaaaccttgggaaactggttcaggtccaggttttgctttgatccttttcaaaaactggagacacagaagagggctctaggaaaaagttttggatgggattatgtggaaactaccctgcgattctctgctgccagagcaggctcggcgcttccaccccagtgcagccttcccctggcggtggtgaaagagactcgggagtcgctgcttccaaagtgcccgccgtgagtgagctctcaccccagtcagccaaatgagcctcttcgggcttctcctgctgacatctgccctggccggccagagacaggggactcaggcggaatccaacctgagtagtaaattccagttttccagcaacaaggaacagaacggtaggaactatatccaagcatctggactggcatagaaaagaggagaaagaacatttaaaaggagtacaagatcctcagcatgagagaattattactgtgtctactaatggaagtattcacagcccaaggtttcctcatacttatccaagaaatacggtcttggtatggagattagtagcagtagaggaaaatgtatggatacaacttacgtttgatgaaagatttgggcttgaagacccagaagatgacatatgcaagtatgattttgtagaagttgaggaacccagtgatggaactatattagggcgctggtgtggttctggtactgtaccaggaaaacagatttctaaaggaaatcaaattaggataagatttgtatctgatgaatattttccttctgaaccagggttctgcatccactacaacattgtcatgccagtaagtaccactttcagatccccttatttaattggatcagctttttgtttctttttatttttctcctcttacacatgagaatcagaaaaaaaatcagaaaacaaacctagctgggatttcatttttatgtaaataaaaactcttacatgccaagccagcaattcattaggcaaat

SEQ ID NO: 430396 - DNA, 483 bp, Homo sapiens
aagacccagaagatgacatatgcaagtaagtgatcatacttgaaatcccaacaatgtaacaactgttaaaagtctttcaaattgcttaattttgatgatctgattttaaatgacatcttttgttttatttttctgatgatctaagaaatttccagccttattgaagctatgttttatttgaagtcttcatttaaaatcggaagacacattgtgcatacaaagtcattgttttctacctacttctaaaattatttaatataatttatggtaaaaaagcatacatggaataaaaccatttaaaataaggattagagaatacaaagctgtataaaggactgtagttgtgctagaaaaccaaagttgcggttactgctaaaaatcttatatttgaccttcctcatagccaaatcaataaaataaatgataagctactgaaagaaaaagttctatccacaggtacatattacctggatacatacccat

SEQ ID NO: 430397 - DNA, 3004 bp, Homo sapiens
gcccggagagccgcatctattggcagctttgttattgatcagaaactgctcgccgccgacttggcttccagtctggctgcgggcaacccttgagttttcgcctctgtcctgtcccccgaactgacaggtgctcccagcaacttgctggggacttctcgccgctcccccgcgtccccaccccctcattcctccctcgccttcacccccacccccaccacttcgccacagctcaggatttgtttaaaccttgggaaactggttcaggtccaggttttgctttgatccttttcaaaaactggagacacagaagagggctctaggaaaaagttttggatgggattatgtggaaactaccctgcgattctctgctgccagagcaggctcggcgcttccaccccagtgcagccttcccctggcggtggtgaaagagactcgggagtcgctgcttccaaagtgcccgccgtgagtgagctctcaccccagtcagccaaatgagcctcttcgggcttctcctgctgacatctgccctggccggccagagacaggggactcaggcggaatccaacctgagtagtaaattccagttttccagcaacaaggaacagaacggagtacaagatcctcagcatgagagaattattactgtgtctactaatggaagtattcacagcccaaggtttcctcatacttatccaagaaatacggtcttggtatggagattagtagcagtagaggaaaatgtatggatacaacttacgtttgatgaaagatttgggcttgaagacccagaagatgacatatgcaagtatgattttgtagaagttgaggaacccagtgatggaactatattagggcgctggtgtggttctggtactgtaccaggaaaacagatttctaaaggaaatcaaattaggataagatttgtatctgatgaatattttccttctgaaccagggttctgcatccactacaacattgtcatgccacaattcacagaagctgtgagtccttcagtgctacccccttcagctttgccactggacctgcttaataatgctataactgcctttagtaccttggaagaccttattcgatatcttgaaccagagagatggcagttggacttagaagatctatataggccaacttggcaacttcttggcaaggcttttgtttttggaagaaaatccagagtggtggatctgaaccttctaacagaggaggtaagattatacagctgcacacctcgtaacttctcagtgtccataagggaagaactaaagagaaccgataccattttctggccaggttgtctcctggttaaacgctgtggtgggaactgtgcctgttgtctccacaattgcaatgaatgtcaatgtgtcccaagcaaagttactaaaaaataccacgaggtccttcagttgagaccaaagaccggtgtcaggggattgcacaaatcactcaccgacgtggccctggagcaccatgaggagtgtgactgtgtgtgcagagggagcacaggaggatagccgcatcaccaccagcagctcttgcccagagctgtgcagtgcagtggctgattctattagagaacgtatgcgttatctccatccttaatctcagttgtttgcttcaaggacctttcatcttcaggatttacagtgcattctgaaagaggagacatcaaacagaattaggagttgtgcaacagctcttttgagaggaggcctaaaggacaggagaaaaggtcttcaatcgtggaaagaaaattaaatgttgtattaaatagatcaccagctagtttcagagttaccatgtacgtattccactagctgggttctgtatttcagttctttcgatacggcttagggtaatgtcagtacaggaaaaaaactgtgcaagtgagcacctgattccgttgccttgcttaactctaaagctccatgtcctgggcctaaaatcgtataaaatctggatttttttttttttttggctcatattcacatatgtaaaccagaacatttctatgtactacaaacctggtttttaaaaaggaactatgttgctatgaattaaacttgtgtcgtgctgataggacagactggatttttcatatttcttattaaaatttctgccatttagaagaagagaactacattcatggtttggaagagataaacctgaaaagaagagtggccttatcttcactttatcgataagtcagtttatttgtttcattgtgtacatttttatattctccttttgacattataactgttggcttttctaatcttgttaaatatatctatttttaccaaaggtatttaatattcttttttatgacaacttagatcaactatttttagcttggtaaatttttctaaacacaattgttatagccagaggaacaaagatgatataaaatattgttgctctgacaaaaatacatgtatttcattctcgtatggtgctagagttagattaatctgcattttaaaaaactgaattggaatagaattggtaagttgcaaagactttttgaaaataattaaattatcatatcttccattcctgttattggagatgaaaataaaaagcaacttatgaaagtagacattcagatccagccattactaacctattccttttttggggaaatctgagcctagctcagaaaaacataaagcaccttgaaaaagacttggcagcttcctgataaagcgtgctgtgctgtgcagtaggaacacatcctatttattgtgatgttgtggttttattatcttaaactctgttccatacacttgtataaatacatggatatttttatgtacagaagtatgtctcttaaccagttcacttattgtactctggcaatttaaaagaaaatcagtaaaatattttgcttgtaaaatgcttaatatcgtgcctaggttatgtggtgactatttgaatcaaaaatgtattgaatcatcaaataaaagaatgtggctattttggggagaaa

SEQ ID NO: 430398 - DNA, 3065 bp, Homo sapiens
gcccggagagccgcatctattggcagctttgttattgatcagaaactgctcgccgccgacttggcttccagtctggctgcgggcaacccttgagttttcgcctctgtcctgtcccccgaactgacaggtgctcccagcaacttgctggggacttctcgccgctcccccgcgtccccaccccctcattcctccctcgccttcacccccacccccaccacttcgccacagctcaggatttgtttaaaccttgggaaactggttcaggtccaggttttgctttgatccttttcaaaaactggagacacagaagagggctctaggaaaaagttttggatgggattatgtggaaactaccctgcgattctctgctgccagagcaggctcggcgcttccaccccagtgcagccttcccctggcggtggtgaaagagactcgggagtcgctgcttccaaagtgcccgccgtgagtgagctctcaccccagtcagccaaatgagcctcttcgggcttctcctgctgacatctgccctggccggccagagacaggggactcaggcggaatccaacctgagtagtaaattccagttttccagcaacaaggaacagaacggtaggaactatatccaagcatctggactggcatagaaaagaggagaaagaacatttaaaaggagtacaagatcctcagcatgagagaattattactgtgtctactaatggaagtattcacagcccaaggtttcctcatacttatccaagaaatacggtcttggtatggagattagtagcagtagaggaaaatgtatggatacaacttacgtttgatgaaagatttgggcttgaagacccagaagatgacatatgcaagtatgattttgtagaagttgaggaacccagtgatggaactatattagggcgctggtgtggttctggtactgtaccaggaaaacagatttctaaaggaaatcaaattaggataagatttgtatctgatgaatattttccttctgaaccagggttctgcatccactacaacattgtcatgccacaattcacagaagctgtgagtccttcagtgctacccccttcagctttgccactggacctgcttaataatgctataactgcctttagtaccttggaagaccttattcgatatcttgaaccagagagatggcagttggacttagaagatctatataggccaacttggcaacttcttggcaaggcttttgtttttggaagaaaatccagagtggtggatctgaaccttctaacagaggaggtaagattatacagctgcacacctcgtaacttctcagtgtccataagggaagaactaaagagaaccgataccattttctggccaggttgtctcctggttaaacgctgtggtgggaactgtgcctgttgtctccacaattgcaatgaatgtcaatgtgtcccaagcaaagttactaaaaaataccacgaggtccttcagttgagaccaaagaccggtgtcaggggattgcacaaatcactcaccgacgtggccctggagcaccatgaggagtgtgactgtgtgtgcagagggagcacaggaggatagccgcatcaccaccagcagctcttgcccagagctgtgcagtgcagtggctgattctattagagaacgtatgcgttatctccatccttaatctcagttgtttgcttcaaggacctttcatcttcaggatttacagtgcattctgaaagaggagacatcaaacagaattaggagttgtgcaacagctcttttgagaggaggcctaaaggacaggagaaaaggtcttcaatcgtggaaagaaaattaaatgttgtattaaatagatcaccagctagtttcagagttaccatgtacgtattccactagctgggttctgtatttcagttctttcgatacggcttagggtaatgtcagtacaggaaaaaaactgtgcaagtgagcacctgattccgttgccttgcttaactctaaagctccatgtcctgggcctaaaatcgtataaaatctggatttttttttttttttggctcatattcacatatgtaaaccagaacatttctatgtactacaaacctggtttttaaaaaggaactatgttgctatgaattaaacttgtgtcgtgctgataggacagactggatttttcatatttcttattaaaatttctgccatttagaagaagagaactacattcatggtttggaagagataaacctgaaaagaagagtggccttatcttcactttatcgataagtcagtttatttgtttcattgtgtacatttttatattctccttttgacattataactgttggcttttctaatcttgttaaatatatctatttttaccaaaggtatttaatattcttttttatgacaacttagatcaactatttttagcttggtaaatttttctaaacacaattgttatagccagaggaacaaagatgatataaaatattgttgctctgacaaaaatacatgtatttcattctcgtatggtgctagagttagattaatctgcattttaaaaaactgaattggaatagaattggtaagttgcaaagactttttgaaaataattaaattatcatatcttccattcctgttattggagatgaaaataaaaagcaacttatgaaagtagacattcagatccagccattactaacctattccttttttggggaaatctgagcctagctcagaaaaacataaagcaccttgaaaaagacttggcagcttcctgataaagcgtgctgtgctgtgcagtaggaacacatcctatttattgtgatgttgtggttttattatcttaaactctgttccatacacttgtataaatacatggatatttttatgtacagaagtatgtctcttaaccagttcacttattgtactctggcaatttaaaagaaaatcagtaaaatattttgcttgtaaaatgcttaatatcgtgcctaggttatgtggtgactatttgaatcaaaaatgtattgaatcatcaaataaaagaatgtggctattttggggagaaa

SEQ ID NO: 430399 - DNA, 1658 bp, Homo sapiens
gcccggagagccgcatctattggcagctttgttattgatcagaaactgctcgccgccgacttggcttccagtctggctgcgggcaacccttgagttttcgcctctgtcctgtcccccgaactgacaggtgctcccagcaacttgctggggacttctcgccgctcccccgcgtccccaccccctcattcctccctcgccttcacccccacccccaccacttcgccacagctcaggatttgtttaaaccttgggaaactggttcaggtccaggttttgctttgatccttttcaaaaactggagacacagaagagggctctaggaaaaagttttggatgggattatgtggaaactaccctgcgattctctgctgccagagcaggctcggcgcttccaccccagtgcagccttcccctggcggtggtgaaagagactcgggagtcgctgcttccaaagtgcccgccgtgagtgagctctcaccccagtcagccaaatgagcctcttcgggcttctcctgctgacatctgccctggccggccagagacaggggactcaggcggaatccaacctgagtagtaaattccagttttccagcaacaaggaacagaacggtaggaactatatccaagcatctggactggcatagaaaagaggagaaagaacatttaaaaggagtacaagatcctcagcatgagagaattattactgtgtctactaatggaagtattcacagcccaaggtttcctcatacttatccaagaaatacggtcttggtatggagattagtagcagtagaggaaaatgtatggatacaacttacgtttgatgaaagatttgggcttgaagacccagaagatgacatatgcaagtatgattttgtagaagttgaggaacccagtgatggaactatattagggcgctggtgtggttctggtactgtaccaggaaaacagatttctaaaggaaatcaaattaggataagatttgtatctgatgaatattttccttctgaaccagggttctgcatccactacaacattgtcatgccacaattcacagaagctgtgagtccttcagtgctacccccttcagctttgccactggacctgcttaataatgctataactgcctttagtaccttggaagaccttattcgatatcttgaaccagagagatggcagttggacttagaagatctatataggccaacttggcaacttcttggcaaggcttttgtttttggaagaaaatccagaggagataattatgaaaaggaaaaaaatctgaagaccaacttttacaaatatttggcagagggaaacttctttaatattattatagttaagctattcaaaaagtatcctttggtacattatctttctttcttcttttcctttttctctttatttgccttccccccccaaaagtactatacaatgtttcaagaatgtatgacatatgacttaacttaatgaagcttatatgcgtttgaagccttagcagtaggcagcataaatttcaaaatgaaatgccaaatttaaaatccttagttatatttttagaaaactgtggactgcataaatgctttacttttttttctttcactttcttcctctagttcagggttttcattcataccttgctactgctacaaaaaaat

SEQ ID NO: 430400 - DNA, 1474 bp, Homo sapiens
ccagaggctgagcccgggcgagcccgccgtgcgcacagctctgcccgccgcccctggagcggatccccagccgtccctgggcgttctcccgggttctagcaaagccccccggggtgcccatcagtttccttgggtgactacagcgtgtgttttttctttcctctttcccctgcctgtgtgcccttctccaggatggcagaggcggaattgcacaaggaaaggctgcaagccatagcagaaaaaagaaagaggcagactgaaatagaaggcaagcgacaacagcttgacgagcagatacttctgctgcagcattccaagtccaaagtgcttcgggagaaatggctgctgcagggcatacccgctggaactgccgaagaggaggaagccaggaggcggcagtctgaagaggatgagttcagagtcaagcaacttgaagataacattcagaggctggagcaagaaatacaaacgctagaaagtgaagagtcccagatatctgccaaagagcaaatcatcctagagaaactgaaggaaacagaaaaatccttcaaggactttcagaagggtttctccagtacggatggagatgcagtaaattacatttcctcccagcttcccgacctgccaatcctctgttcacgaacagcagaaccatcacctgggcaggacgggaccagcagagcggctgctgtgtacgccatggaaattaatgtggagaaagacaaacaaacaggagagaccaagattctctctacatctaccattggcccagagggggtccatcagaaaggagtcaaagtctatgatgatggtaccaaagtagtgtatgaggtgcgctcaggaggcaccgtagtagaaaatggagtgcacaaattaagcacaaaggatgtagaagagcttattcagaaggctggacaatcaagcttaggaggagggcacgtgtctgaaaggactgtgattgcagatgggagcctcagccatcccaaggaacacatgctctgcaaagaagctaagttagaaatggtacataagtctaggaaagaccattcttccgggaacccagggcagcaggcccaagcccccagcgctgcagggccggaggcaaacttggatcagcccgtcaccatgatttttatgggctaccaaaatatcgaggatgaagaggagacgaaaaaggtgctaggctatgatgaaaccatcaaggctgaattggtcctcattgatgaagatgatgagaagtcattgagggagaagacagtgacggacgtgtccactattgacgggaacgcggctgagcttgtgtccgggaggccggtctcagacaccacagagccctcatccccagaagggaaggaagagagcctagctacagagccagccccaggtacccaaaagaaaaagcgctgtcaatgctgtgttgtcatgtgaccacttctttcttctcctttcttctgggcagcctgtactctccacc

SEQ ID NO: 430401 - DNA, 447 bp, Homo sapiens
gagaatttctcccactcttcgagcctacagcagacatgttaggagaatgctgctgcttgcaacacacccagagacggtggggcaggtgacactgcgtgtgtgcccggtgtctctggaagtgtctatacagatgtgtgctgctgctgctgctgctttctgccttaaaatttctggagccaacacccacccactcttacagcctctgtctctttattttcaaggaaaaaagaaagaggcagactgaaatagaaggcaagcgacaacagcttgacgagcagatacttctgctgcagcattccaagtccaaagtgcttcgggagaaatggctgctgcagggcatacccgctggaactgccgaagaggaggaagccaggaggcggcagtctgaagaggatgagttcagagtcaagcaacttgaagataacattcagaggtaggtggcttcca

SEQ ID NO: 430402 - DNA, 7470 bp, Homo sapiens
ccagaggctgagcccgggcgagcccgccgtgcgcacagctctgcccgccgcccctggagcggatccccagccgtccctgggcgttctcccgggttctagcaaagccccccggggtgcccatcagtttccttgggtgactacagcgtgtgttttttctttcctctttcccctgcctgtgtgcccttctccaggatggcagaggcggaattgcacaaggaaaggctgcaagccatagcagaaaaaagaaagaggcagactgaaatagaaggcaagcgacaacagcttgacgagcagatacttctgctgcagcattccaagtccaaagtgcttcgggagaaatggctgctgcagggcatacccgctggaactgccgaagaggaggaagccaggaggcggcagtctgaagaggatgagttcagagtcaagcaacttgaagataacattcagaggctggagcaagaaatacaaacgctagaaagtgaagagtcccagatatctgccaaagagcaaatcatcctagagaaactgaaggaaacagaaaaatccttcaaggactttcagaagggtttctccagtacggatggagatgcagtaaattacatttcctcccagcttcccgacctgccaatcctctgttcacgaacagcagaaccatcacctgggcaggacgggaccagcagagcggctggagtcgggtgggagaatgtgctgctaaaggaaggtgagtcagcctcgaacgccacagaaacatccggcccagacatgactatcaagaagcctccccagctttctgaggatgatatctggctaaaaagcgagggagacaactatagtgccaccctcctggagcctgctgccagctctctttccccagatcacaaaaacatggaaattgaggtgtctgttgcagaatgtaaaagtgttcctggaatcacctctaccccacatcccatggaccatccctccgctttctattcacccccgcataatggcctccttactgatcaccacgaatccctggataatgatgttgccagagagatccgctatctagatgaggtgctagaggccaactgctgtgattctgctgtggatggaacgtacaatggaacatcctccccagagcctggtgcagtggttctggtgggcggcctaagcccccctgtccacgaggcgacccagccagaacccactgaaagaacagctagccggcaggcacctcctcacatcgagctcagtaatagcagccctgaccccatggcagaggcagaaagaacaaatggccattcccccagccagcctagagatgcgctgggggacagcctgcaggtgcctgtcagccccagctccacaaccagctcacggtgttcttcccgagatggagagttcactctcaccacactgaaaaaggaggccaagtttgagctgcgtgccttccatgaggacaagaagccctccaagctctttgaggatgacgagcatgagaaagaacaatactgcattagaaaagtgaggccttcagaggagatgctggagctggaaaaggagaggagagagctcatccgcagccaggccgtcaagaagaatcctggcattgcagcaaaatggtggaatcccccgcaggaaaaaaccatcgaggagcagctggacgaggaacatctggagtcgcacaaaaagtacaaggagcgcaaagagagaagggcacagcaggaacagttgctgctgcagaagcagttacagcagcagcagcagcagcccccatcgcagctctgcacagcccctgcctcttctcatgaacgcgcaagcatgattgacaaagcaaaggaggacattgtcacagagcagatagatttctctgctgctcgcaaacaatttcagctgatggagaattccaggcaagcggtggccaagggccagagtacacccaggctgttctccatcaagcctttctacaggcctctggggtcagtcaactcagacaagccactgactaatccgagaccaccttctgtcgggggacctccagaagacagtggtgcctcagccgccaagggacagaaatcccccggtgccctggagaccccatcggcagcaggaagccagggcaacacagcctctcaggggaaggaagggccctacagcgagccttctaaacgtgggcccttatctaaactgtgggctgaggatggagaatttacgagcgcccgggctgtcctcactgtggtcaaggatgatgaccatgggattttggatcagttctcaagatctgtcaatgtctccttgacccaagaggagcttgactctggtctggacgaattgtcggtgaggtctcaggataccacagtcctggagaccctatccaatgatttcagcatggacaacatcagtgacagcggggcatccaatgagacaaccaatgccctccaggaaaattcactggctgatttttctctgccccagacaccacaaactgacaacccctcagagggccgaggagaaggcgtctccaagtcatttagtgatcatggtttctattccccttcctccacgctgggggactctccgttggttgatgaccccttggagtatcaggctggcctcctggtgcagaatgccattcaacaagccatagccgagcaggtggataaagctgtgtccaaaaccagcagggatggagcagagcaacagggacctgaagcgactgtagaggaagctgaagctgcggctttcggctcagaaaagcctcagagcatgtttgagccacctcaggtgtcttctcctgttcaagagaaaagggatgtattaccaaagattctgcctgctgaagacagggcgctcagggaaagggggcccccccagccactgccagctgtgcagcccagtggcccgattaacatggaggagaccaggcccgaaggaagctatttcagcaagtactcggaggcagctgagctgagaagcacagcctccctcctggccactcaagaatctgacgtgatggttgggcctttcaagctgaggtccaggaaacagcggactttgtccatgattgaggaagagatccgagcagctcaggaaagggaagaggagctgaagaggcagagacaagtcttgcagagtacgcagagccccaggacaaagaatgccccatcactgccctccagaacatgctacaaaactgctccagggaaaatagagaaagtcaaacctcctccatcccccaccactgaaggccccagcttgcagcctgacttagcccctgaagaggctgccggaacccagcggcccaagaatctgatgcagaccctcatggaagactatgagacacacaaatctaaaaggcgcgagagaatggatgatagtagttacacttctaagttactgtcttgcaaggtgacttccgaggtcctcgaggccacacgggttaatcgaagaaagagcgcactggctttgcgctgggaagcagggatctatgccaaccaggaggaagaagacaacgaataaacttccttcaacccaggaagcgtctttggtgcttgggagaccaagaaaccaagaaattaacaactgaaagcattttaatggactatttattaaagtgcaaacaaactcagcaatccttatgtagaccagaagctgcaatatacaatgatgaaaatgaaacgaaaaggaagtccccccatcagactctggacacccaggaatcaaaagagaaaggacttttttggtgactcaatcccagtgtctggtttggggccaatctacaatggatccaaaaggacaaaacatgttacaagcaaatcaacatagttgctgcaggcggaactgagaccagcctctctgggcgatgaaggacaatggtggtagggccacttagagagcagtagggcccaggctggtgcagcctacatggcacaggatatttccctgcaccagtttcccacctgtcacttgcagcatcagagggtgttgcattaactccattttctccagcagccataaaatgaatggcgtttctctccatatttgcccagaagaggcagttatgattccacttctcctacatttaattatttttaattgagaacaactcatgatcacaattcataaaatccatattttaagacaatagttcttcatgtcacaaacacaatctattctacatgaggaggctgagaaaggggaagagaaaaacaaaccaaatggatgatgttagctttaggatcgtgtctgcttataatattcactgatctgcagtttatgagaacacattttcacagttatgtttcttcataggaaaactatatttagtgggcaacaactatttttatgatgggatgggggagtatatacacgtatagaatctgtacgcgttgaacaacttggttcaagatggtgggggcatttttagagcggcaataattgaaaaaaaaggcgaactctgccttggagaggtagatgataagaaataaaaaggtgtttataactattttgtattataaagtgggccttagagataggaagaagaatgatggattccttttggatcaatcagaaaggaaacacgaaagaaaagtcaggaaggtagagagagaaaaagggagggaaggagaaagaatgggaataaaataaggaggtaagagatactatttttgctgagcaaccagtgtgtttcaggatgatacaaagaaaaatatagaatagaaataagtgcaggcttggaatcagctacaaatcctaaagatggggtgtgtgtggatgtgtgtgtgtgtgtgtgtacaccattgtgtgtttgtaaaatgtgtatgttcatgagtaagggtgtgtgtgtgtgtgtattaaaattccagagtgaccgtggcacttgggtgtacaggtaattcctccagagctgtttgctggcttcaggagtggagtgagaatttcttttttatgaaaagggatataaaggcaccgagctgatgcagtatttgtaatattaagttgacctaacaaggtatttgcatgagtcacaattacaaagttttgagcggttttgtaatttgacatttaggaaagtctcctatttattctcatactttacattcatgcttagtatactatagaggatgccagctttaatctttctgtcatttaaagcaatatgataagggtattcaataattgggtgccctaaatttctggatgagaaaattttcaattctggccatgagaaagaaaaaaaaataaacagccttctttttttttcctttgttttaaaactgtggttttttaaaaaagcaataattaactcagacctcactaaaaatcatttttgtttttatattgttatgtcataagctctattatgttattctaacaagtagcaatttcacaaaatttgtatgtagatgttaacgcacatttcctttgcttcttttattagactagtgttgactttggggggggacatttattcacaaatgagaagtaggcacaaagtaaaaaatggaaccatctactaacaaggatcctttaaaactgccaagggagctctaacttgaagccacatcctacagatggcagcccaaatagcacatgggcaattggcaccatctttatatggttgagtctcctgaatattttgaatgaattctcaacaaaatgtgctagccactggggacgcaaaacaagtaagatccctgttgcaagaaattcattttatagtgagggaggttggcatggagactaaaatttcaggaaggaggatcgtctttacctgaggatttctagccagaggtcccagatgcctgggctgagaacccagcgataagggggcgttcccaaagcagacacagggataagaacagaggaggcagcagcattgcacagccccaggcacagtggcagttaggatggctggagagtaggatagttctatgggttgcccaaaaaatgtgatgcgcttcatgttttctctgactcatggatctggtagagaccatagacatgatatagactaacttccccatttttcacaagaggaaaccatccttatgacttaccttaaagttttttgttctgttttgaaggaaaccatgtgcttcatgaaacctacagttgacaagagaatgtacagctaagagaaaagcttaagaggccacactattcgcggaatggctttagaggcagatgaagtggtctttgaccacagttgattgaaccagagcacttattgcttaaagaataacagagttctagagctgggggttcttgggccatgctccgtgtgtggataaggaaagaaatactgtttctgggactctcccacagtcacaaagctgttttcactgtggcccctacatctcttaacttttgctattactcctatgctgccttccggattactgctgtctatcttcttgctccactcactgaagatcctattataatcccatgaaaatgtaaattacagtttacttgggagagccagattttctctgtgctcttgagttttttattcattcaagaaaccttgggccaccgctttgtacatagcaccgtgctaggctctgggatcccaaatggacccttttaactttctgaagatgggaccgtcccctggaggaaagtcattcctgcctaatccatcgagagaaagaggcttacgaaaaactttgcctctgatgctcagccccacccccaaatagcacacaagcttgttaaccccacctcttacaaaatgtttagattctgtaggtgttaaaagcctttctggaagtattgcattctgccgtgtttataggtgttcactttcctccagagctgattaactactgacatgacttggctttctcatccagaaattatggaaacagggtctgtcagtggcaggaggccgtgctgtgttttacttggatgacacaatgcagtttacttgcctcttcatacccatgcatgctgctcaccctagacaatgacatataagccgtatatagatcaatgtccacatatatatacacacacacatatatatatataaagtgtaacaaggaacactaaaacagtgttgattcttgtctctgaagacaaataattaaaccttttttttcccaactaaagaatggatttaattaaactatgtattgaaaaaaaagtagcctaagtgttagagatggtgaatatattccattttagttaaagaacaaatttcctgaattttaagcattcagtgagctgccaattttgattttgtgttgctctttacccaaattattttttctttgtttttctttttttgggggaggaggggaaaaaagcagcaatactgtgtttggaaattatactctgtatctggttttcctgtgtatgttaaccacttaaatgttattatcctgctttggttttagagtgattgtgaggcattcaatgcaagtatacagttattttctcattaaaatccaatgtgtgttgagtttttataaaaaaaag

SEQ ID NO: 430403 - DNA, 6965 bp, Homo sapiens
ggaggggaagcgaggaggcggggaaggggcgggccccaggagcaggcgggcggggctccccgccctccagcgcgcccggaggctaccactccctgcagatgcgctggccccagcccggggctgccgctcgccttcccccggagtctcctggacccccggagtctcctggacccccggagcgggaggcagcggcgcgcggcgctggactggagcagaaccccaggactgcgcccccgggagcgggcgcccagagaagcctccccagctttctgaggatgatatctggctaaaaagcgagggagacaactatagtgccaccctcctggagcctgctgccagctctctttccccagatcacaaaaacatggaaattgaggtgtctgttgcagaatgtaaaagtgttcctggaatcacctctaccccacatcccatggaccatccctccgctttctattcacccccgcataatggcctccttactgatcaccacgaatccctggataatgatgttgccagagagatccgctatctagatgaggtgctagaggccaactgctgtgattctgctgtggatggaacgtacaatggaacatcctccccagagcctggtgcagtggttctggtgggcggcctaagcccccctgtccacgaggcgacccagccagaacccactgaaagaacagctagccggcaggcacctcctcacatcgagctcagtaatagcagccctgaccccatggcagaggcagaaagaacaaatggccattcccccagccagcctagagatgcgctgggggacagcctgcaggtgcctgtcagccccagctccacaaccagctcacggtgttcttcccgagatggagagttcactctcaccacactgaaaaaggaggccaagtttgagctgcgtgccttccatgaggacaagaagccctccaagctctttgaggatgacgagcatgagaaagaacaatactgcattagaaaagtgaggccttcagaggagatgctggagctggaaaaggagaggagagagctcatccgcagccaggccgtcaagaagaatcctggcattgcagcaaaatggtggaatcccccgcaggaaaaaaccatcgaggagcagctggacgaggaacatctggagtcgcacaaaaagtacaaggagcgcaaagagagaagggcacagcaggaacagttgctgctgcagaagcagttacagcagcagcagcagcagcccccatcgcagctctgcacagcccctgcctcttctcatgaacgcgcaagcatgattgacaaagcaaaggaggacattgtcacagagcagatagatttctctgctgctcgcaaacaatttcagctgatggagaattccaggcaagcggtggccaagggccagagtacacccaggctgttctccatcaagcctttctacaggcctctggggtcagtcaactcagacaagccactgactaatccgagaccaccttctgtcgggggacctccagaagacagtggtgcctcagccgccaagggacagaaatcccccggtgccctggagaccccatcggcagcaggaagccagggcaacacagcctctcaggggaaggaagggccctacagcgagccttctaaacgtgggcccttatctaaactgtgggctgaggatggagaatttacgagcgcccgggctgtcctcactgtggtcaaggatgatgaccatgggattttggatcagttctcaagatctgtcaatgtctccttgacccaagaggagcttgactctggtctggacgaattgtcggtgaggtctcaggataccacagtcctggagaccctatccaatgatttcagcatggacaacatcagtgacagcggggcatccaatgagacaaccaatgccctccaggaaaattcactggctgatttttctctgccccagacaccacaaactgacaacccctcagagggccgaggagaaggcgtctccaagtcatttagtgatcatggtttctattccccttcctccacgctgggggactctccgttggttgatgaccccttggagtatcaggctggcctcctggtgcagaatgccattcaacaagccatagccgagcaggtggataaagctgtgtccaaaaccagcagggatggagcagagcaacagggacctgaagcgactgtagaggaagctgaagctgcggctttcggctcagaaaagcctcagagcatgtttgagccacctcaggtgtcttctcctgttcaagagaaaagggatgtattaccaaagattctgcctgctgaagacagggcgctcagggaaagggggcccccccagccactgccagctgtgcagcccagtggcccgattaacatggaggagaccaggcccgaaggaagctatttcagcaagtactcggaggcagctgagctgagaagcacagcctccctcctggccactcaagaatctgacgtgatggttgggcctttcaagctgaggtccaggaaacagcggactttgtccatgattgaggaagagatccgagcagctcaggaaagggaagaggagctgaagaggcagagacaagtcttgcagagtacgcagagccccaggacaaagaatgccccatcactgccctccagaacatgctacaaaactgctccagggaaaatagagaaagtcaaacctcctccatcccccaccactgaaggccccagcttgcagcctgacttagcccctgaagaggctgccggaacccagcggcccaagaatctgatgcagaccctcatggaagactatgagacacacaaatctaaaaggcgcgagagaatggatgatagtagtgtcctcgaggccacacgggttaatcgaagaaagagcgcactggctttgcgctgggaagcagggatctatgccaaccaggaggaagaagacaacgaataaacttccttcaacccaggaagcgtctttggtgcttgggagaccaagaaaccaagaaattaacaactgaaagcattttaatggactatttattaaagtgcaaacaaactcagcaatccttatgtagaccagaagctgcaatatacaatgatgaaaatgaaacgaaaaggaagtccccccatcagactctggacacccaggaatcaaaagagaaaggacttttttggtgactcaatcccagtgtctggtttggggccaatctacaatggatccaaaaggacaaaacatgttacaagcaaatcaacatagttgctgcaggcggaactgagaccagcctctctgggcgatgaaggacaatggtggtagggccacttagagagcagtagggcccaggctggtgcagcctacatggcacaggatatttccctgcaccagtttcccacctgtcacttgcagcatcagagggtgttgcattaactccattttctccagcagccataaaatgaatggcgtttctctccatatttgcccagaagaggcagttatgattccacttctcctacatttaattatttttaattgagaacaactcatgatcacaattcataaaatccatattttaagacaatagttcttcatgtcacaaacacaatctattctacatgaggaggctgagaaaggggaagagaaaaacaaaccaaatggatgatgttagctttaggatcgtgtctgcttataatattcactgatctgcagtttatgagaacacattttcacagttatgtttcttcataggaaaactatatttagtgggcaacaactatttttatgatgggatgggggagtatatacacgtatagaatctgtacgcgttgaacaacttggttcaagatggtgggggcatttttagagcggcaataattgaaaaaaaaggcgaactctgccttggagaggtagatgataagaaataaaaaggtgtttataactattttgtattataaagtgggccttagagataggaagaagaatgatggattccttttggatcaatcagaaaggaaacacgaaagaaaagtcaggaaggtagagagagaaaaagggagggaaggagaaagaatgggaataaaataaggaggtaagagatactatttttgctgagcaaccagtgtgtttcaggatgatacaaagaaaaatatagaatagaaataagtgcaggcttggaatcagctacaaatcctaaagatggggtgtgtgtggatgtgtgtgtgtgtgtgtgtacaccattgtgtgtttgtaaaatgtgtatgttcatgagtaagggtgtgtgtgtgtgtgtattaaaattccagagtgaccgtggcacttgggtgtacaggtaattcctccagagctgtttgctggcttcaggagtggagtgagaatttcttttttatgaaaagggatataaaggcaccgagctgatgcagtatttgtaatattaagttgacctaacaaggtatttgcatgagtcacaattacaaagttttgagcggttttgtaatttgacatttaggaaagtctcctatttattctcatactttacattcatgcttagtatactatagaggatgccagctttaatctttctgtcatttaaagcaatatgataagggtattcaataattgggtgccctaaatttctggatgagaaaattttcaattctggccatgagaaagaaaaaaaaataaacagccttctttttttttcctttgttttaaaactgtggttttttaaaaaagcaataattaactcagacctcactaaaaatcatttttgtttttatattgttatgtcataagctctattatgttattctaacaagtagcaatttcacaaaatttgtatgtagatgttaacgcacatttcctttgcttcttttattagactagtgttgactttggggggggacatttattcacaaatgagaagtaggcacaaagtaaaaaatggaaccatctactaacaaggatcctttaaaactgccaagggagctctaacttgaagccacatcctacagatggcagcccaaatagcacatgggcaattggcaccatctttatatggttgagtctcctgaatattttgaatgaattctcaacaaaatgtgctagccactggggacgcaaaacaagtaagatccctgttgcaagaaattcattttatagtgagggaggttggcatggagactaaaattctcaggaaaatgagatccgtgttagattagaagtcctgatgtgaaatgggaggactcaggaaggaggatcgtctttacctgaggatttctagccagaggtcccagatgcctgggctgagaacccagcgataagggggcgttcccaaagcagacacagggataagaacagaggaggcagcagcattgcacagccccaggcacagtggcagttaggatggctggagagtaggatagttctatgggttgcccaaaaaatgtgatgcgcttcatgttttctctgactcatggatctggtagagaccatagacatgatatagactaacttccccatttttcacaagaggaaaccatccttatgacttaccttaaagttttttgttctgttttgaaggaaaccatgtgcttcatgaaacctacagttgacaagagaatgtacagctaagagaaaagcttaagaggccacactattcgcggaatggctttagaggcagatgaagtggtctttgaccacagttgattgaaccagagcacttattgcttaaagaataacagagttctagagctgggggttcttgggccatgctccgtgtgtggataaggaaagaaatactgtttctgggactctcccacagtcacaaagctgttttcactgtggcccctacatctcttaacttttgctattactcctatgctgccttccggattactgctgtctatcttcttgctccactcactgaagatcctattataatcccatgaaaatgtaaattacagtttacttgggagagccagattttctctgtgctcttgagttttttattcattcaagaaaccttgggccaccgctttgtacatagcaccgtgctaggctctgggatcccaaatggacccttttaactttctgaagatgggaccgtcccctggaggaaagtcattcctgcctaatccatcgagagaaagaggcttacgaaaaactttgcctctgatgctcagccccacccccaaatagcacacaagcttgttaaccccacctcttacaaaatgtttagattctgtaggtgttaaaagcctttctggaagtattgcattctgccgtgtttataggtgttcactttcctccagagctgattaactactgacatgacttggctttctcatccagaaattatggaaacagggtctgtcagtggcaggaggccgtgctgtgttttacttggatgacacaatgcagtttacttgcctcttcatacccatgcatgctgctcaccctagacaatgacatataagccgtatatagatcaatgtccacatatatatacacacacacatatatatatataaagtgtaacaaggaacactaaaacagtgttgattcttgtctctgaagacaaataattaaaccttttttttcccaactaaagaatggatttaattaaactatgtattgaaaaaaaagtagcctaagtgttagagatggtgaatatattccattttagttaaagaacaaatttcctgaattttaagcattcagtgagctgccaattttgattttgtgttgctctttacccaaattattttttctttgtttttctttttttgggggaggaggggaaaaaagcagcaatactgtgtttggaaattatactctgtatctggttttcctgtgtatgttaaccacttaaatgttattatcctgctttggttttagagtgattgtgaggcattcaatgcaagtatacagttattttctcattaaaatccaatgtgtgttgagtttttataaaaaaaag

SEQ ID NO: 430404 - DNA, 6790 bp, Homo sapiens
agccagggtgcacgcaggaatctgtctggaaaaaggcagttctcactgaggaggtttgaggcgcgcgctctgggcaggaagcctccccagctttctgaggatgatatctggctaaaaagcgagggagacaactatagtgccaccctcctggagcctgctgccagctctctttccccagatcacaaaaacatggaaattgaggtgtctgttgcagaatgtaaaagtgttcctggaatcacctctaccccacatcccatggaccatccctccgctttctattcacccccgcataatggcctccttactgatcaccacgaatccctggataatgatgttgccagagagatccgctatctagatgaggtgctagaggccaactgctgtgattctgctgtggatggaacgtacaatggaacatcctccccagagcctggtgcagtggttctggtgggcggcctaagcccccctgtccacgaggcgacccagccagaacccactgaaagaacagctagccggcaggcacctcctcacatcgagctcagtaatagcagccctgaccccatggcagaggcagaaagaacaaatggccattcccccagccagcctagagatgcgctgggggacagcctgcaggtgcctgtcagccccagctccacaaccagctcacggtgttcttcccgagatggagagttcactctcaccacactgaaaaaggaggccaagtttgagctgcgtgccttccatgaggacaagaagccctccaagctctttgaggatgacgagcatgagaaagaacaatactgcattagaaaagtgaggccttcagaggagatgctggagctggaaaaggagaggagagagctcatccgcagccaggccgtcaagaagaatcctggcattgcagcaaaatggtggaatcccccgcaggaaaaaaccatcgaggagcagctggacgaggaacatctggagtcgcacaaaaagtacaaggagcgcaaagagagaagggcacagcaggaacagttgctgctgcagaagcagttacagcagcagcagcagcagcccccatcgcagctctgcacagcccctgcctcttctcatgaacgcgcaagcatgattgacaaagcaaaggaggacattgtcacagagcagatagatttctctgctgctcgcaaacaatttcagctgatggagaattccaggcaagcggtggccaagggccagagtacacccaggctgttctccatcaagcctttctacaggcctctggggtcagtcaactcagacaagccactgactaatccgagaccaccttctgtcgggggacctccagaagacagtggtgcctcagccgccaagggacagaaatcccccggtgccctggagaccccatcggcagcaggaagccagggcaacacagcctctcaggggaaggaagggccctacagcgagccttctaaacgtgggcccttatctaaactgtgggctgaggatggagaatttacgagcgcccgggctgtcctcactgtggtcaaggatgatgaccatgggattttggatcagttctcaagatctgtcaatgtctccttgacccaagaggagcttgactctggtctggacgaattgtcggtgaggtctcaggataccacagtcctggagaccctatccaatgatttcagcatggacaacatcagtgacagcggggcatccaatgagacaaccaatgccctccaggaaaattcactggctgatttttctctgccccagacaccacaaactgacaacccctcagagggccgaggagaaggcgtctccaagtcatttagtgatcatggtttctattccccttcctccacgctgggggactctccgttggttgatgaccccttggagtatcaggctggcctcctggtgcagaatgccattcaacaagccatagccgagcaggtggataaagctgtgtccaaaaccagcagggatggagcagagcaacagggacctgaagcgactgtagaggaagctgaagctgcggctttcggctcagaaaagcctcagagcatgtttgagccacctcaggtgtcttctcctgttcaagagaaaagggatgtattaccaaagattctgcctgctgaagacagggcgctcagggaaagggggcccccccagccactgccagctgtgcagcccagtggcccgattaacatggaggagaccaggcccgaaggaagctatttcagcaagtactcggaggcagctgagctgagaagcacagcctccctcctggccactcaagaatctgacgtgatggttgggcctttcaagctgaggtccaggaaacagcggactttgtccatgattgaggaagagatccgagcagctcaggaaagggaagaggagctgaagaggcagagacaagtcttgcagagtacgcagagccccaggacaaagaatgccccatcactgccctccagaacatgctacaaaactgctccagggaaaatagagaaagtcaaacctcctccatcccccaccactgaaggccccagcttgcagcctgacttagcccctgaagaggctgccggaacccagcggcccaagaatctgatgcagaccctcatggaagactatgagacacacaaatctaaaaggcgcgagagaatggatgatagtagtgtcctcgaggccacacgggttaatcgaagaaagagcgcactggctttgcgctgggaagcagggatctatgccaaccaggaggaagaagacaacgaataaacttccttcaacccaggaagcgtctttggtgcttgggagaccaagaaaccaagaaattaacaactgaaagcattttaatggactatttattaaagtgcaaacaaactcagcaatccttatgtagaccagaagctgcaatatacaatgatgaaaatgaaacgaaaaggaagtccccccatcagactctggacacccaggaatcaaaagagaaaggacttttttggtgactcaatcccagtgtctggtttggggccaatctacaatggatccaaaaggacaaaacatgttacaagcaaatcaacatagttgctgcaggcggaactgagaccagcctctctgggcgatgaaggacaatggtggtagggccacttagagagcagtagggcccaggctggtgcagcctacatggcacaggatatttccctgcaccagtttcccacctgtcacttgcagcatcagagggtgttgcattaactccattttctccagcagccataaaatgaatggcgtttctctccatatttgcccagaagaggcagttatgattccacttctcctacatttaattatttttaattgagaacaactcatgatcacaattcataaaatccatattttaagacaatagttcttcatgtcacaaacacaatctattctacatgaggaggctgagaaaggggaagagaaaaacaaaccaaatggatgatgttagctttaggatcgtgtctgcttataatattcactgatctgcagtttatgagaacacattttcacagttatgtttcttcataggaaaactatatttagtgggcaacaactatttttatgatgggatgggggagtatatacacgtatagaatctgtacgcgttgaacaacttggttcaagatggtgggggcatttttagagcggcaataattgaaaaaaaaggcgaactctgccttggagaggtagatgataagaaataaaaaggtgtttataactattttgtattataaagtgggccttagagataggaagaagaatgatggattccttttggatcaatcagaaaggaaacacgaaagaaaagtcaggaaggtagagagagaaaaagggagggaaggagaaagaatgggaataaaataaggaggtaagagatactatttttgctgagcaaccagtgtgtttcaggatgatacaaagaaaaatatagaatagaaataagtgcaggcttggaatcagctacaaatcctaaagatggggtgtgtgtggatgtgtgtgtgtgtgtgtgtacaccattgtgtgtttgtaaaatgtgtatgttcatgagtaagggtgtgtgtgtgtgtgtattaaaattccagagtgaccgtggcacttgggtgtacaggtaattcctccagagctgtttgctggcttcaggagtggagtgagaatttcttttttatgaaaagggatataaaggcaccgagctgatgcagtatttgtaatattaagttgacctaacaaggtatttgcatgagtcacaattacaaagttttgagcggttttgtaatttgacatttaggaaagtctcctatttattctcatactttacattcatgcttagtatactatagaggatgccagctttaatctttctgtcatttaaagcaatatgataagggtattcaataattgggtgccctaaatttctggatgagaaaattttcaattctggccatgagaaagaaaaaaaaataaacagccttctttttttttcctttgttttaaaactgtggttttttaaaaaagcaataattaactcagacctcactaaaaatcatttttgtttttatattgttatgtcataagctctattatgttattctaacaagtagcaatttcacaaaatttgtatgtagatgttaacgcacatttcctttgcttcttttattagactagtgttgactttggggggggacatttattcacaaatgagaagtaggcacaaagtaaaaaatggaaccatctactaacaaggatcctttaaaactgccaagggagctctaacttgaagccacatcctacagatggcagcccaaatagcacatgggcaattggcaccatctttatatggttgagtctcctgaatattttgaatgaattctcaacaaaatgtgctagccactggggacgcaaaacaagtaagatccctgttgcaagaaattcattttatagtgagggaggttggcatggagactaaaattctcaggaaaatgagatccgtgttagattagaagtcctgatgtgaaatgggaggactcaggaaggaggatcgtctttacctgaggatttctagccagaggtcccagatgcctgggctgagaacccagcgataagggggcgttcccaaagcagacacagggataagaacagaggaggcagcagcattgcacagccccaggcacagtggcagttaggatggctggagagtaggatagttctatgggttgcccaaaaaatgtgatgcgcttcatgttttctctgactcatggatctggtagagaccatagacatgatatagactaacttccccatttttcacaagaggaaaccatccttatgacttaccttaaagttttttgttctgttttgaaggaaaccatgtgcttcatgaaacctacagttgacaagagaatgtacagctaagagaaaagcttaagaggccacactattcgcggaatggctttagaggcagatgaagtggtctttgaccacagttgattgaaccagagcacttattgcttaaagaataacagagttctagagctgggggttcttgggccatgctccgtgtgtggataaggaaagaaatactgtttctgggactctcccacagtcacaaagctgttttcactgtggcccctacatctcttaacttttgctattactcctatgctgccttccggattactgctgtctatcttcttgctccactcactgaagatcctattataatcccatgaaaatgtaaattacagtttacttgggagagccagattttctctgtgctcttgagttttttattcattcaagaaaccttgggccaccgctttgtacatagcaccgtgctaggctctgggatcccaaatggacccttttaactttctgaagatgggaccgtcccctggaggaaagtcattcctgcctaatccatcgagagaaagaggcttacgaaaaactttgcctctgatgctcagccccacccccaaatagcacacaagcttgttaaccccacctcttacaaaatgtttagattctgtaggtgttaaaagcctttctggaagtattgcattctgccgtgtttataggtgttcactttcctccagagctgattaactactgacatgacttggctttctcatccagaaattatggaaacagggtctgtcagtggcaggaggccgtgctgtgttttacttggatgacacaatgcagtttacttgcctcttcatacccatgcatgctgctcaccctagacaatgacatataagccgtatatagatcaatgtccacatatatatacacacacacatatatatatataaagtgtaacaaggaacactaaaacagtgttgattcttgtctctgaagacaaataattaaaccttttttttcccaactaaagaatggatttaattaaactatgtattgaaaaaaaagtagcctaagtgttagagatggtgaatatattccattttagttaaagaacaaatttcctgaattttaagcattcagtgagctgccaattttgattttgtgttgctctttacccaaattattttttctttgtttttctttttttgggggaggaggggaaaaaagcagcaatactgtgtttggaaattatactctgtatctggttttcctgtgtatgttaaccacttaaatgttattatcctgctttggttttagagtgattgtgaggcattcaatgcaagtatacagttattttctcattaaaatccaatgtgtgttgagtttttataaaaaaaag

SEQ ID NO: 430405 - DNA, 6796 bp, Homo sapiens
catactgggccgggttttagttgtaatcgtggtgcctggccgacaactcacatgaggaggtttgaggcgcgcgctctgggcaggaagcctccccagctttctgaggatgatatctggctaaaaagcgagggagacaactatagtgccaccctcctggagcctgctgccagctctctttccccagatcacaaaaacatggaaattgaggtgtctgttgcagaatgtaaaagtgttcctggaatcacctctaccccacatcccatggaccatccctccgctttctattcacccccgcataatggcctccttactgatcaccacgaatccctggataatgatgttgccagagagatccgctatctagatgaggtgctagaggccaactgctgtgattctgctgtggatggaacgtacaatggaacatcctccccagagcctggtgcagtggttctggtgggcggcctaagcccccctgtccacgaggcgacccagccagaacccactgaaagaacagctagccggcaggcacctcctcacatcgagctcagtaatagcagccctgaccccatggcagaggcagaaagaacaaatggccattcccccagccagcctagagatgcgctgggggacagcctgcaggtgcctgtcagccccagctccacaaccagctcacggtgttcttcccgagatggagagttcactctcaccacactgaaaaaggaggccaagtttgagctgcgtgccttccatgaggacaagaagccctccaagctctttgaggatgacgagcatgagaaagaacaatactgcattagaaaagtgaggccttcagaggagatgctggagctggaaaaggagaggagagagctcatccgcagccaggccgtcaagaagaatcctggcattgcagcaaaatggtggaatcccccgcaggaaaaaaccatcgaggagcagctggacgaggaacatctggagtcgcacaaaaagtacaaggagcgcaaagagagaagggcacagcaggaacagttgctgctgcagaagcagttacagcagcagcagcagcagcccccatcgcagctctgcacagcccctgcctcttctcatgaacgcgcaagcatgattgacaaagcaaaggaggacattgtcacagagcagatagatttctctgctgctcgcaaacaatttcagctgatggagaattccaggcaagcggtggccaagggccagagtacacccaggctgttctccatcaagcctttctacaggcctctggggtcagtcaactcagacaagccactgactaatccgagaccaccttctgtcgggggacctccagaagacagtggtgcctcagccgccaagggacagaaatcccccggtgccctggagaccccatcggcagcaggaagccagggcaacacagcctctcaggggaaggaagggccctacagcgagccttctaaacgtgggcccttatctaaactgtgggctgaggatggagaatttacgagcgcccgggctgtcctcactgtggtcaaggatgatgaccatgggattttggatcagttctcaagatctgtcaatgtctccttgacccaagaggagcttgactctggtctggacgaattgtcggtgaggtctcaggataccacagtcctggagaccctatccaatgatttcagcatggacaacatcagtgacagcggggcatccaatgagacaaccaatgccctccaggaaaattcactggctgatttttctctgccccagacaccacaaactgacaacccctcagagggccgaggagaaggcgtctccaagtcatttagtgatcatggtttctattccccttcctccacgctgggggactctccgttggttgatgaccccttggagtatcaggctggcctcctggtgcagaatgccattcaacaagccatagccgagcaggtggataaagctgtgtccaaaaccagcagggatggagcagagcaacagggacctgaagcgactgtagaggaagctgaagctgcggctttcggctcagaaaagcctcagagcatgtttgagccacctcaggtgtcttctcctgttcaagagaaaagggatgtattaccaaagattctgcctgctgaagacagggcgctcagggaaagggggcccccccagccactgccagctgtgcagcccagtggcccgattaacatggaggagaccaggcccgaaggaagctatttcagcaagtactcggaggcagctgagctgagaagcacagcctccctcctggccactcaagaatctgacgtgatggttgggcctttcaagctgaggtccaggaaacagcggactttgtccatgattgaggaagagatccgagcagctcaggaaagggaagaggagctgaagaggcagagacaagtcttgcagagtacgcagagccccaggacaaagaatgccccatcactgccctccagaacatgctacaaaactgctccagggaaaatagagaaagtcaaacctcctccatcccccaccactgaaggccccagcttgcagcctgacttagcccctgaagaggctgccggaacccagcggcccaagaatctgatgcagaccctcatggaagactatgagacacacaaatctaaaaggcgcgagagaatggatgatagtagtgtcctcgaggccacacgggttaatcgaagaaagagcgcactggctttgcgctgggaagcagggatctatgccaaccaggaggaagaagacaacgaataaacttccttcaacccaggaagcgtctttggtgcttgggagaccaagaaaccaagaaattaacaactgaaagcattttaatggactatttattaaagtgcaaacaaactcagcaatccttatgtagaccagaagctgcaatatacaatgatgaaaatgaaacgaaaaggaagtccccccatcagactctggacacccaggaatcaaaagagaaaggacttttttggtgactcaatcccagtgtctggtttggggccaatctacaatggatccaaaaggacaaaacatgttacaagcaaatcaacatagttgctgcaggcggaactgagaccagcctctctgggcgatgaaggacaatggtggtagggccacttagagagcagtagggcccaggctggtgcagcctacatggcacaggatatttccctgcaccagtttcccacctgtcacttgcagcatcagagggtgttgcattaactccattttctccagcagccataaaatgaatggcgtttctctccatatttgcccagaagaggcagttatgattccacttctcctacatttaattatttttaattgagaacaactcatgatcacaattcataaaatccatattttaagacaatagttcttcatgtcacaaacacaatctattctacatgaggaggctgagaaaggggaagagaaaaacaaaccaaatggatgatgttagctttaggatcgtgtctgcttataatattcactgatctgcagtttatgagaacacattttcacagttatgtttcttcataggaaaactatatttagtgggcaacaactatttttatgatgggatgggggagtatatacacgtatagaatctgtacgcgttgaacaacttggttcaagatggtgggggcatttttagagcggcaataattgaaaaaaaaggcgaactctgccttggagaggtagatgataagaaataaaaaggtgtttataactattttgtattataaagtgggccttagagataggaagaagaatgatggattccttttggatcaatcagaaaggaaacacgaaagaaaagtcaggaaggtagagagagaaaaagggagggaaggagaaagaatgggaataaaataaggaggtaagagatactatttttgctgagcaaccagtgtgtttcaggatgatacaaagaaaaatatagaatagaaataagtgcaggcttggaatcagctacaaatcctaaagatggggtgtgtgtggatgtgtgtgtgtgtgtgtgtacaccattgtgtgtttgtaaaatgtgtatgttcatgagtaagggtgtgtgtgtgtgtgtattaaaattccagagtgaccgtggcacttgggtgtacaggtaattcctccagagctgtttgctggcttcaggagtggagtgagaatttcttttttatgaaaagggatataaaggcaccgagctgatgcagtatttgtaatattaagttgacctaacaaggtatttgcatgagtcacaattacaaagttttgagcggttttgtaatttgacatttaggaaagtctcctatttattctcatactttacattcatgcttagtatactatagaggatgccagctttaatctttctgtcatttaaagcaatatgataagggtattcaataattgggtgccctaaatttctggatgagaaaattttcaattctggccatgagaaagaaaaaaaaataaacagccttctttttttttcctttgttttaaaactgtggttttttaaaaaagcaataattaactcagacctcactaaaaatcatttttgtttttatattgttatgtcataagctctattatgttattctaacaagtagcaatttcacaaaatttgtatgtagatgttaacgcacatttcctttgcttcttttattagactagtgttgactttggggggggacatttattcacaaatgagaagtaggcacaaagtaaaaaatggaaccatctactaacaaggatcctttaaaactgccaagggagctctaacttgaagccacatcctacagatggcagcccaaatagcacatgggcaattggcaccatctttatatggttgagtctcctgaatattttgaatgaattctcaacaaaatgtgctagccactggggacgcaaaacaagtaagatccctgttgcaagaaattcattttatagtgagggaggttggcatggagactaaaattctcaggaaaatgagatccgtgttagattagaagtcctgatgtgaaatgggaggactcaggaaggaggatcgtctttacctgaggatttctagccagaggtcccagatgcctgggctgagaacccagcgataagggggcgttcccaaagcagacacagggataagaacagaggaggcagcagcattgcacagccccaggcacagtggcagttaggatggctggagagtaggatagttctatgggttgcccaaaaaatgtgatgcgcttcatgttttctctgactcatggatctggtagagaccatagacatgatatagactaacttccccatttttcacaagaggaaaccatccttatgacttaccttaaagttttttgttctgttttgaaggaaaccatgtgcttcatgaaacctacagttgacaagagaatgtacagctaagagaaaagcttaagaggccacactattcgcggaatggctttagaggcagatgaagtggtctttgaccacagttgattgaaccagagcacttattgcttaaagaataacagagttctagagctgggggttcttgggccatgctccgtgtgtggataaggaaagaaatactgtttctgggactctcccacagtcacaaagctgttttcactgtggcccctacatctcttaacttttgctattactcctatgctgccttccggattactgctgtctatcttcttgctccactcactgaagatcctattataatcccatgaaaatgtaaattacagtttacttgggagagccagattttctctgtgctcttgagttttttattcattcaagaaaccttgggccaccgctttgtacatagcaccgtgctaggctctgggatcccaaatggacccttttaactttctgaagatgggaccgtcccctggaggaaagtcattcctgcctaatccatcgagagaaagaggcttacgaaaaactttgcctctgatgctcagccccacccccaaatagcacacaagcttgttaaccccacctcttacaaaatgtttagattctgtaggtgttaaaagcctttctggaagtattgcattctgccgtgtttataggtgttcactttcctccagagctgattaactactgacatgacttggctttctcatccagaaattatggaaacagggtctgtcagtggcaggaggccgtgctgtgttttacttggatgacacaatgcagtttacttgcctcttcatacccatgcatgctgctcaccctagacaatgacatataagccgtatatagatcaatgtccacatatatatacacacacacatatatatatataaagtgtaacaaggaacactaaaacagtgttgattcttgtctctgaagacaaataattaaaccttttttttcccaactaaagaatggatttaattaaactatgtattgaaaaaaaagtagcctaagtgttagagatggtgaatatattccattttagttaaagaacaaatttcctgaattttaagcattcagtgagctgccaattttgattttgtgttgctctttacccaaattattttttctttgtttttctttttttgggggaggaggggaaaaaagcagcaatactgtgtttggaaattatactctgtatctggttttcctgtgtatgttaaccacttaaatgttattatcctgctttggttttagagtgattgtgaggcattcaatgcaagtatacagttattttctcattaaaatccaatgtgtgttgagtttttataaaaaaaag

SEQ ID NO: 430406 - DNA, 5090 bp, Homo sapiens
  misc_feature (9)..(9): n is a, c, g, or t
agctcggtncccatccttcctctctcacgaggaaaattcactggctgatttttctctgccccagacaccacaaactgacaacccctcagagggccgaggagaaggcgtctccaagtcatttagtgatcatggtttctattccccttcctccacgctgggggactctccgttggttgatgaccccttggagtatcaggctggcctcctggtgcagaatgccattcaacaagccatagccgagcaggtggataaagctgtgtccaaaaccagcagggatggagcagagcaacagggacctgaagcgactgtagaggaagctgaagctgcggctttcggctcagaaaagcctcagagcatgtttgagccacctcaggtgtcttctcctgttcaagagaaaagggatgtattaccaaagattctgcctgctgaagacagggcgctcagggaaagggggcccccccagccactgccagctgtgcagcccagtggcccgattaacatggaggagaccaggcccgaaggaagctatttcagcaagtactcggaggcagctgagctgagaagcacagcctccctcctggccactcaagaatctgacgtgatggttgggcctttcaagctgaggtccaggaaacagcggactttgtccatgattgaggaagagatccgagcagctcaggaaagggaagaggagctgaagaggcagagacaagtcttgcagagtacgcagagccccaggacaaagaatgccccatcactgccctccagaacatgctacaaaactgctccagggaaaatagagaaagtcaaacctcctccatcccccaccactgaaggccccagcttgcagcctgacttagcccctgaagaggctgccggaacccagcggcccaagaatctgatgcagaccctcatggaagactatgagacacacaaatctaaaaggcgcgagagaatggatgatagtagtgtcctcgaggccacacgggttaatcgaagaaagagcgcactggctttgcgctgggaagcagggatctatgccaaccaggaggaagaagacaacgaataaacttccttcaacccaggaagcgtctttggtgcttgggagaccaagaaaccaagaaattaacaactgaaagcattttaatggactatttattaaagtgcaaacaaactcagcaatccttatgtagaccagaagctgcaatatacaatgatgaaaatgaaacgaaaaggaagtccccccatcagactctggacacccaggaatcaaaagagaaaggacttttttggtgactcaatcccagtgtctggtttggggccaatctacaatggatccaaaaggacaaaacatgttacaagcaaatcaacatagttgctgcaggcggaactgagaccagcctctctgggcgatgaaggacaatggtggtagggccacttagagagcagtagggcccaggctggtgcagcctacatggcacaggatatttccctgcaccagtttcccacctgtcacttgcagcatcagagggtgttgcattaactccattttctccagcagccataaaatgaatggcgtttctctccatatttgcccagaagaggcagttatgattccacttctcctacatttaattatttttaattgagaacaactcatgatcacaattcataaaatccatattttaagacaatagttcttcatgtcacaaacacaatctattctacatgaggaggctgagaaaggggaagagaaaaacaaaccaaatggatgatgttagctttaggatcgtgtctgcttataatattcactgatctgcagtttatgagaacacattttcacagttatgtttcttcataggaaaactatatttagtgggcaacaactatttttatgatgggatgggggagtatatacacgtatagaatctgtacgcgttgaacaacttggttcaagatggtgggggcatttttagagcggcaataattgaaaaaaaaggcgaactctgccttggagaggtagatgataagaaataaaaaggtgtttataactattttgtattataaagtgggccttagagataggaagaagaatgatggattccttttggatcaatcagaaaggaaacacgaaagaaaagtcaggaaggtagagagagaaaaagggagggaaggagaaagaatgggaataaaataaggaggtaagagatactatttttgctgagcaaccagtgtgtttcaggatgatacaaagaaaaatatagaatagaaataagtgcaggcttggaatcagctacaaatcctaaagatggggtgtgtgtggatgtgtgtgtgtgtgtgtgtacaccattgtgtgtttgtaaaatgtgtatgttcatgagtaagggtgtgtgtgtgtgtgtattaaaattccagagtgaccgtggcacttgggtgtacaggtaattcctccagagctgtttgctggcttcaggagtggagtgagaatttcttttttatgaaaagggatataaaggcaccgagctgatgcagtatttgtaatattaagttgacctaacaaggtatttgcatgagtcacaattacaaagttttgagcggttttgtaatttgacatttaggaaagtctcctatttattctcatactttacattcatgcttagtatactatagaggatgccagctttaatctttctgtcatttaaagcaatatgataagggtattcaataattgggtgccctaaatttctggatgagaaaattttcaattctggccatgagaaagaaaaaaaaataaacagccttctttttttttcctttgttttaaaactgtggttttttaaaaaagcaataattaactcagacctcactaaaaatcatttttgtttttatattgttatgtcataagctctattatgttattctaacaagtagcaatttcacaaaatttgtatgtagatgttaacgcacatttcctttgcttcttttattagactagtgttgactttggggggggacatttattcacaaatgagaagtaggcacaaagtaaaaaatggaaccatctactaacaaggatcctttaaaactgccaagggagctctaacttgaagccacatcctacagatggcagcccaaatagcacatgggcaattggcaccatctttatatggttgagtctcctgaatattttgaatgaattctcaacaaaatgtgctagccactggggacgcaaaacaagtaagatccctgttgcaagaaattcattttatagtgagggaggttggcatggagactaaaattctcaggaaaatgagatccgtgttagattagaagtcctgatgtgaaatgggaggactcaggaaggaggatcgtctttacctgaggatttctagccagaggtcccagatgcctgggctgagaacccagcgataagggggcgttcccaaagcagacacagggataagaacagaggaggcagcagcattgcacagccccaggcacagtggcagttaggatggctggagagtaggatagttctatgggttgcccaaaaaatgtgatgcgcttcatgttttctctgactcatggatctggtagagaccatagacatgatatagactaacttccccatttttcacaagaggaaaccatccttatgacttaccttaaagttttttgttctgttttgaaggaaaccatgtgcttcatgaaacctacagttgacaagagaatgtacagctaagagaaaagcttaagaggccacactattcgcggaatggctttagaggcagatgaagtggtctttgaccacagttgattgaaccagagcacttattgcttaaagaataacagagttctagagctgggggttcttgggccatgctccgtgtgtggataaggaaagaaatactgtttctgggactctcccacagtcacaaagctgttttcactgtggcccctacatctcttaacttttgctattactcctatgctgccttccggattactgctgtctatcttcttgctccactcactgaagatcctattataatcccatgaaaatgtaaattacagtttacttgggagagccagattttctctgtgctcttgagttttttattcattcaagaaaccttgggccaccgctttgtacatagcaccgtgctaggctctgggatcccaaatggacccttttaactttctgaagatgggaccgtcccctggaggaaagtcattcctgcctaatccatcgagagaaagaggcttacgaaaaactttgcctctgatgctcagccccacccccaaatagcacacaagcttgttaaccccacctcttacaaaatgtttagattctgtaggtgttaaaagcctttctggaagtattgcattctgccgtgtttataggtgttcactttcctccagagctgattaactactgacatgacttggctttctcatccagaaattatggaaacagggtctgtcagtggcaggaggccgtgctgtgttttacttggatgacacaatgcagtttacttgcctcttcatacccatgcatgctgctcaccctagacaatgacatataagccgtatatagatcaatgtccacatatatatacacacacacatatatatatataaagtgtaacaaggaacactaaaacagtgttgattcttgtctctgaagacaaataattaaaccttttttttcccaactaaagaatggatttaattaaactatgtattgaaaaaaaagtagcctaagtgttagagatggtgaatatattccattttagttaaagaacaaatttcctgaattttaagcattcagtgagctgccaattttgattttgtgttgctctttacccaaattattttttctttgtttttctttttttgggggaggaggggaaaaaagcagcaatactgtgtttggaaattatactctgtatctggttttcctgtgtatgttaaccacttaaatgttattatcctgctttggttttagagtgattgtgaggcattcaatgcaagtatacagttattttctcattaaaatccaatgtgtgttgagtttttataaaaaaaag

SEQ ID NO: 430407 - DNA, 8003 bp, Homo sapiens
ccagaggctgagcccgggcgagcccgccgtgcgcacagctctgcccgccgcccctggagcggatccccagccgtccctgggcgttctcccgggttctagcaaagccccccggggtgcccatcagtttccttgggtgactacagcgtgtgttttttctttcctctttcccctgcctgtgtgcccttctccaggatggcagaggcggaattgcacaaggaaaggctgcaagccatagcagaaaaaagaaagaggcagactgaaatagaaggcaagcgacaacagcttgacgagcagatacttctgctgcagcattccaagtccaaagtgcttcgggagaaatggctgctgcagggcatacccgctggaactgccgaagaggaggaagccaggaggcggcagtctgaagaggatgagttcagagtcaagcaacttgaagataacattcagaggctggagcaagaaatacaaacgctagaaagtgaagagtcccagatatctgccaaagagcaaatcatcctagagaaactgaaggaaacagaaaaatccttcaaggactttcagaagggtttctccagtacggatggagatgcagtaaattacatttcctcccagcttcccgacctgccaatcctctgttcacgaacagcagaaccatcacctgggcaggacgggaccagcagagcggctgctgtgtacgccatggaaattaatgtggagaaagacaaacaaacaggagagaccaagattctctctacatctaccattggcccagagggggtccatcagaaaggagtcaaagtctatgatgatggtaccaaagtagtgtatgaggtgcgctcaggaggcaccgtagtagaaaatggagtgcacaaattaagcacaaaggatgtagaagagcttattcagaaggctggacaatcaagcttaggaggagggcacgtgtctgaaaggactgtgattgcagatgggagcctcagccatcccaaggaacacatgctctgcaaagaagctaagttagaaatggtacataagtctaggaaagaccattcttccgggaacccagggcagcaggcccaagcccccagcgctgcagggccggaggcaaacttggatcagcccgtcaccatgatttttatgggctaccaaaatatcgaggatgaagaggagacgaaaaaggtgctaggctatgatgaaaccatcaaggctgaattggtcctcattgatgaagatgatgagaagtcattgagggagaagacagtgacggacgtgtccactattgacgggaacgcggctgagcttgtgtccgggaggccggtctcagacaccacagagccctcatccccagaagggaaggaagagagcctagctacagagccagccccaggagtcgggtgggagaatgtgctgctaaaggaaggtgagtcagcctcgaacgccacagaaacatccggcccagacatgactatcaagaagcctccccagctttctgaggatgatatctggctaaaaagcgagggagacaactatagtgccaccctcctggagcctgctgccagctctctttccccagatcacaaaaacatggaaattgaggtgtctgttgcagaatgtaaaagtgttcctggaatcacctctaccccacatcccatggaccatccctccgctttctattcacccccgcataatggcctccttactgatcaccacgaatccctggataatgatgttgccagagagatccgctatctagatgaggtgctagaggccaactgctgtgattctgctgtggatggaacgtacaatggaacatcctccccagagcctggtgcagtggttctggtgggcggcctaagcccccctgtccacgaggcgacccagccagaacccactgaaagaacagctagccggcaggcacctcctcacatcgagctcagtaatagcagccctgaccccatggcagaggcagaaagaacaaatggccattcccccagccagcctagagatgcgctgggggacagcctgcaggtgcctgtcagccccagctccacaaccagctcacggtgttcttcccgagatggagagttcactctcaccacactgaaaaaggaggccaagtttgagctgcgtgccttccatgaggacaagaagccctccaagctctttgaggatgacgagcatgagaaagaacaatactgcattagaaaagtgaggccttcagaggagatgctggagctggaaaaggagaggagagagctcatccgcagccaggccgtcaagaagaatcctggcattgcagcaaaatggtggaatcccccgcaggaaaaaaccatcgaggagcagctggacgaggaacatctggagtcgcacaaaaagtacaaggagcgcaaagagagaagggcacagcaggaacagttgctgctgcagaagcagttacagcagcagcagcagcagcccccatcgcagctctgcacagcccctgcctcttctcatgaacgcgcaagcatgattgacaaagcaaaggaggacattgtcacagagcagatagatttctctgctgctcgcaaacaatttcagctgatggagaattccaggcaagcggtggccaagggccagagtacacccaggctgttctccatcaagcctttctacaggcctctggggtcagtcaactcagacaagccactgactaatccgagaccaccttctgtcgggggacctccagaagacagtggtgcctcagccgccaagggacagaaatcccccggtgccctggagaccccatcggcagcaggaagccagggcaacacagcctctcaggggaaggaagggccctacagcgagccttctaaacgtgggcccttatctaaactgtgggctgaggatggagaatttacgagcgcccgggctgtcctcactgtggtcaaggatgatgaccatgggattttggatcagttctcaagatctgtcaatgtctccttgacccaagaggagcttgactctggtctggacgaattgtcggtgaggtctcaggataccacagtcctggagaccctatccaatgatttcagcatggacaacatcagtgacagcggggcatccaatgagacaaccaatgccctccaggaaaattcactggctgatttttctctgccccagacaccacaaactgacaacccctcagagggccgaggagaaggcgtctccaagtcatttagtgatcatggtttctattccccttcctccacgctgggggactctccgttggttgatgaccccttggagtatcaggctggcctcctggtgcagaatgccattcaacaagccatagccgagcaggtggataaagctgtgtccaaaaccagcagggatggagcagagcaacagggacctgaagcgactgtagaggaagctgaagctgcggctttcggctcagaaaagcctcagagcatgtttgagccacctcaggtgtcttctcctgttcaagagaaaagggatgtattaccaaagattctgcctgctgaagacagggcgctcagggaaagggggcccccccagccactgccagctgtgcagcccagtggcccgattaacatggaggagaccaggcccgaaggaagctatttcagcaagtactcggaggcagctgagctgagaagcacagcctccctcctggccactcaagaatctgacgtgatggttgggcctttcaagctgaggtccaggaaacagcggactttgtccatgattgaggaagagatccgagcagctcaggaaagggaagaggagctgaagaggcagagacaagtcttgcagagtacgcagagccccaggacaaagaatgccccatcactgccctccagaacatgctacaaaactgctccaggtcctcgaggccacacgggttaatcgaagaaagagcgcactggctttgcgctgggaagcagggatctatgccaaccaggaggaagaagacaacgaataaacttccttcaacccaggaagcgtctttggtgcttgggagaccaagaaaccaagaaattaacaactgaaagcattttaatggactatttattaaagtgcaaacaaactcagcaatccttatgtagaccagaagctgcaatatacaatgatgaaaatgaaacgaaaaggaagtccccccatcagactctggacacccaggaatcaaaagagaaaggacttttttggtgactcaatcccagtgtctggtttggggccaatctacaatggatccaaaaggacaaaacatgttacaagcaaatcaacatagttgctgcaggcggaactgagaccagcctctctgggcgatgaaggacaatggtggtagggccacttagagagcagtagggcccaggctggtgcagcctacatggcacaggatatttccctgcaccagtttcccacctgtcacttgcagcatcagagggtgttgcattaactccattttctccagcagccataaaatgaatggcgtttctctccatatttgcccagaagaggcagttatgattccacttctcctacatttaattatttttaattgagaacaactcatgatcacaattcataaaatccatattttaagacaatagttcttcatgtcacaaacacaatctattctacatgaggaggctgagaaaggggaagagaaaaacaaaccaaatggatgatgttagctttaggatcgtgtctgcttataatattcactgatctgcagtttatgagaacacattttcacagttatgtttcttcataggaaaactatatttagtgggcaacaactatttttatgatgggatgggggagtatatacacgtatagaatctgtacgcgttgaacaacttggttcaagatggtgggggcatttttagagcggcaataattgaaaaaaaaggcgaactctgccttggagaggtagatgataagaaataaaaaggtgtttataactattttgtattataaagtgggccttagagataggaagaagaatgatggattccttttggatcaatcagaaaggaaacacgaaagaaaagtcaggaaggtagagagagaaaaagggagggaaggagaaagaatgggaataaaataaggaggtaagagatactatttttgctgagcaaccagtgtgtttcaggatgatacaaagaaaaatatagaatagaaataagtgcaggcttggaatcagctacaaatcctaaagatggggtgtgtgtggatgtgtgtgtgtgtgtgtgtacaccattgtgtgtttgtaaaatgtgtatgttcatgagtaagggtgtgtgtgtgtgtgtattaaaattccagagtgaccgtggcacttgggtgtacaggtaattcctccagagctgtttgctggcttcaggagtggagtgagaatttcttttttatgaaaagggatataaaggcaccgagctgatgcagtatttgtaatattaagttgacctaacaaggtatttgcatgagtcacaattacaaagttttgagcggttttgtaatttgacatttaggaaagtctcctatttattctcatactttacattcatgcttagtatactatagaggatgccagctttaatctttctgtcatttaaagcaatatgataagggtattcaataattgggtgccctaaatttctggatgagaaaattttcaattctggccatgagaaagaaaaaaaaataaacagccttctttttttttcctttgttttaaaactgtggttttttaaaaaagcaataattaactcagacctcactaaaaatcatttttgtttttatattgttatgtcataagctctattatgttattctaacaagtagcaatttcacaaaatttgtatgtagatgttaacgcacatttcctttgcttcttttattagactagtgttgactttggggggggacatttattcacaaatgagaagtaggcacaaagtaaaaaatggaaccatctactaacaaggatcctttaaaactgccaagggagctctaacttgaagccacatcctacagatggcagcccaaatagcacatgggcaattggcaccatctttatatggttgagtctcctgaatattttgaatgaattctcaacaaaatgtgctagccactggggacgcaaaacaagtaagatccctgttgcaagaaattcattttatagtgagggaggttggcatggagactaaaattctcaggaaaatgagatccgtgttagattagaagtcctgatgtgaaatgggaggactcaggaaggaggatcgtctttacctgaggatttctagccagaggtcccagatgcctgggctgagaacccagcgataagggggcgttcccaaagcagacacagggataagaacagaggaggcagcagcattgcacagccccaggcacagtggcagttaggatggctggagagtaggatagttctatgggttgcccaaaaaatgtgatgcgcttcatgttttctctgactcatggatctggtagagaccatagacatgatatagactaacttccccatttttcacaagaggaaaccatccttatgacttaccttaaagttttttgttctgttttgaaggaaaccatgtgcttcatgaaacctacagttgacaagagaatgtacagctaagagaaaagcttaagaggccacactattcgcggaatggctttagaggcagatgaagtggtctttgaccacagttgattgaaccagagcacttattgcttaaagaataacagagttctagagctgggggttcttgggccatgctccgtgtgtggataaggaaagaaatactgtttctgggactctcccacagtcacaaagctgttttcactgtggcccctacatctcttaacttttgctattactcctatgctgccttccggattactgctgtctatcttcttgctccactcactgaagatcctattataatcccatgaaaatgtaaattacagtttacttgggagagccagattttctctgtgctcttgagttttttattcattcaagaaaccttgggccaccgctttgtacatagcaccgtgctaggctctgggatcccaaatggacccttttaactttctgaagatgggaccgtcccctggaggaaagtcattcctgcctaatccatcgagagaaagaggcttacgaaaaactttgcctctgatgctcagccccacccccaaatagcacacaagcttgttaaccccacctcttacaaaatgtttagattctgtaggtgttaaaagcctttctggaagtattgcattctgccgtgtttataggtgttcactttcctccagagctgattaactactgacatgacttggctttctcatccagaaattatggaaacagggtctgtcagtggcaggaggccgtgctgtgttttacttggatgacacaatgcagtttacttgcctcttcatacccatgcatgctgctcaccctagacaatgacatataagccgtatatagatcaatgtccacatatatatacacacacacatatatatatataaagtgtaacaaggaacactaaaacagtgttgattcttgtctctgaagacaaataattaaaccttttttttcccaactaaagaatggatttaattaaactatgtattgaaaaaaaagtagcctaagtgttagagatggtgaatatattccattttagttaaagaacaaatttcctgaattttaagcattcagtgagctgccaattttgattttgtgttgctctttacccaaattattttttctttgtttttctttttttgggggaggaggggaaaaaagcagcaatactgtgtttggaaattatactctgtatctggttttcctgtgtatgttaaccacttaaatgttattatcctgctttggttttagagtgattgtgaggcattcaatgcaagtatacagttattttctcattaaaatccaatgtgtgttgagtttttataaaaaaaag

SEQ ID NO: 430408 - DNA, 4369 bp, Homo sapiens
caaccttatcccaatgctgtgtgaagaaaggaggtcattgaaggaggccctggcttaggcatgtcctctgggaaaatagagaaagtcaaacctcctccatcccccaccactgaaggccccagcttgcagcctgacttagcccctgaagaggctgccggaacccagcggcccaagaatctgatgcagaccctcatggaagactatgagacacacaaatctaaaaggcgcgagagaatggatgatagtagtgtcctcgaggccacacgggttaatcgaagaaagagcgcactggctttgcgctgggaagcagggatctatgccaaccaggaggaagaagacaacgaataaacttccttcaacccaggaagcgtctttggtgcttgggagaccaagaaaccaagaaattaacaactgaaagcattttaatggactatttattaaagtgcaaacaaactcagcaatccttatgtagaccagaagctgcaatatacaatgatgaaaatgaaacgaaaaggaagtccccccatcagactctggacacccaggaatcaaaagagaaaggacttttttggtgactcaatcccagtgtctggtttggggccaatctacaatggatccaaaaggacaaaacatgttacaagcaaatcaacatagttgctgcaggcggaactgagaccagcctctctgggcgatgaaggacaatggtggtagggccacttagagagcagtagggcccaggctggtgcagcctacatggcacaggatatttccctgcaccagtttcccacctgtcacttgcagcatcagagggtgttgcattaactccattttctccagcagccataaaatgaatggcgtttctctccatatttgcccagaagaggcagttatgattccacttctcctacatttaattatttttaattgagaacaactcatgatcacaattcataaaatccatattttaagacaatagttcttcatgtcacaaacacaatctattctacatgaggaggctgagaaaggggaagagaaaaacaaaccaaatggatgatgttagctttaggatcgtgtctgcttataatattcactgatctgcagtttatgagaacacattttcacagttatgtttcttcataggaaaactatatttagtgggcaacaactatttttatgatgggatgggggagtatatacacgtatagaatctgtacgcgttgaacaacttggttcaagatggtgggggcatttttagagcggcaataattgaaaaaaaaggcgaactctgccttggagaggtagatgataagaaataaaaaggtgtttataactattttgtattataaagtgggccttagagataggaagaagaatgatggattccttttggatcaatcagaaaggaaacacgaaagaaaagtcaggaaggtagagagagaaaaagggagggaaggagaaagaatgggaataaaataaggaggtaagagatactatttttgctgagcaaccagtgtgtttcaggatgatacaaagaaaaatatagaatagaaataagtgcaggcttggaatcagctacaaatcctaaagatggggtgtgtgtggatgtgtgtgtgtgtgtgtgtacaccattgtgtgtttgtaaaatgtgtatgttcatgagtaagggtgtgtgtgtgtgtgtattaaaattccagagtgaccgtggcacttgggtgtacaggtaattcctccagagctgtttgctggcttcaggagtggagtgagaatttcttttttatgaaaagggatataaaggcaccgagctgatgcagtatttgtaatattaagttgacctaacaaggtatttgcatgagtcacaattacaaagttttgagcggttttgtaatttgacatttaggaaagtctcctatttattctcatactttacattcatgcttagtatactatagaggatgccagctttaatctttctgtcatttaaagcaatatgataagggtattcaataattgggtgccctaaatttctggatgagaaaattttcaattctggccatgagaaagaaaaaaaaataaacagccttctttttttttcctttgttttaaaactgtggttttttaaaaaagcaataattaactcagacctcactaaaaatcatttttgtttttatattgttatgtcataagctctattatgttattctaacaagtagcaatttcacaaaatttgtatgtagatgttaacgcacatttcctttgcttcttttattagactagtgttgactttggggggggacatttattcacaaatgagaagtaggcacaaagtaaaaaatggaaccatctactaacaaggatcctttaaaactgccaagggagctctaacttgaagccacatcctacagatggcagcccaaatagcacatgggcaattggcaccatctttatatggttgagtctcctgaatattttgaatgaattctcaacaaaatgtgctagccactggggacgcaaaacaagtaagatccctgttgcaagaaattcattttatagtgagggaggttggcatggagactaaaattctcaggaaaatgagatccgtgttagattagaagtcctgatgtgaaatgggaggactcaggaaggaggatcgtctttacctgaggatttctagccagaggtcccagatgcctgggctgagaacccagcgataagggggcgttcccaaagcagacacagggataagaacagaggaggcagcagcattgcacagccccaggcacagtggcagttaggatggctggagagtaggatagttctatgggttgcccaaaaaatgtgatgcgcttcatgttttctctgactcatggatctggtagagaccatagacatgatatagactaacttccccatttttcacaagaggaaaccatccttatgacttaccttaaagttttttgttctgttttgaaggaaaccatgtgcttcatgaaacctacagttgacaagagaatgtacagctaagagaaaagcttaagaggccacactattcgcggaatggctttagaggcagatgaagtggtctttgaccacagttgattgaaccagagcacttattgcttaaagaataacagagttctagagctgggggttcttgggccatgctccgtgtgtggataaggaaagaaatactgtttctgggactctcccacagtcacaaagctgttttcactgtggcccctacatctcttaacttttgctattactcctatgctgccttccggattactgctgtctatcttcttgctccactcactgaagatcctattataatcccatgaaaatgtaaattacagtttacttgggagagccagattttctctgtgctcttgagttttttattcattcaagaaaccttgggccaccgctttgtacatagcaccgtgctaggctctgggatcccaaatggacccttttaactttctgaagatgggaccgtcccctggaggaaagtcattcctgcctaatccatcgagagaaagaggcttacgaaaaactttgcctctgatgctcagccccacccccaaatagcacacaagcttgttaaccccacctcttacaaaatgtttagattctgtaggtgttaaaagcctttctggaagtattgcattctgccgtgtttataggtgttcactttcctccagagctgattaactactgacatgacttggctttctcatccagaaattatggaaacagggtctgtcagtggcaggaggccgtgctgtgttttacttggatgacacaatgcagtttacttgcctcttcatacccatgcatgctgctcaccctagacaatgacatataagccgtatatagatcaatgtccacatatatatacacacacacatatatatatataaagtgtaacaaggaacactaaaacagtgttgattcttgtctctgaagacaaataattaaaccttttttttcccaactaaagaatggatttaattaaactatgtattgaaaaaaaagtagcctaagtgttagagatggtgaatatattccattttagttaaagaacaaatttcctgaattttaagcattcagtgagctgccaattttgattttgtgttgctctttacccaaattattttttctttgtttttctttttttgggggaggaggggaaaaaagcagcaatactgtgtttggaaattatactctgtatctggttttcctgtgtatgttaaccacttaaatgttattatcctgctttggttttagagtgattgtgaggcattcaatgcaagtatacagttattttctcattaaaatccaatgtgtgttgagtttttataaaaaaaag

SEQ ID NO: 430409 - DNA, 3848 bp, Homo sapiens
ggaagccccattcttgaggctagacgtctgccttctgaagacataacctctctttctggttccagatccactttatttcttactaggattagtgggactgggtcaaatctcttcactctgacaatttgatctctcattggcttgatatcctgaaaagactgttgattaaccaggctataaaccaggatgaaaccttggccgtttttgatgtagagatctctcatggaggcaaactgcttcagttcctgcggtgtccagaatttccagcacggagggggaagagtccacttcgatctctttgcggtagaaatcttcaatggtgggcacacattatggagctccataatgtgtgcccagaagaggcagttatgattccacttctcctacatttaattatttttaattgagaacaactcatgatcacaattcataaaatccatattttaagacaatagttcttcatgtcacaaacacaatctattctacatgaggaggctgagaaaggggaagagaaaaacaaaccaaatggatgatgttagctttaggatcgtgtctgcttataatattcactgatctgcagtttatgagaacacattttcacagttatgtttcttcataggaaaactatatttagtgggcaacaactatttttatgatgggatgggggagtatatacacgtatagaatctgtacgcgttgaacaacttggttcaagatggtgggggcatttttagagcggcaataattgaaaaaaaaggcgaactctgccttggagaggtagatgataagaaataaaaaggtgtttataactattttgtattataaagtgggccttagagataggaagaagaatgatggattccttttggatcaatcagaaaggaaacacgaaagaaaagtcaggaaggtagagagagaaaaagggagggaaggagaaagaatgggaataaaataaggaggtaagagatactatttttgctgagcaaccagtgtgtttcaggatgatacaaagaaaaatatagaatagaaataagtgcaggcttggaatcagctacaaatcctaaagatggggtgtgtgtggatgtgtgtgtgtgtgtgtgtacaccattgtgtgtttgtaaaatgtgtatgttcatgagtaagggtgtgtgtgtgtgtgtattaaaattccagagtgaccgtggcacttgggtgtacaggtaattcctccagagctgtttgctggcttcaggagtggagtgagaatttcttttttatgaaaagggatataaaggcaccgagctgatgcagtatttgtaatattaagttgacctaacaaggtatttgcatgagtcacaattacaaagttttgagcggttttgtaatttgacatttaggaaagtctcctatttattctcatactttacattcatgcttagtatactatagaggatgccagctttaatctttctgtcatttaaagcaatatgataagggtattcaataattgggtgccctaaatttctggatgagaaaattttcaattctggccatgagaaagaaaaaaaaataaacagccttctttttttttcctttgttttaaaactgtggttttttaaaaaagcaataattaactcagacctcactaaaaatcatttttgtttttatattgttatgtcataagctctattatgttattctaacaagtagcaatttcacaaaatttgtatgtagatgttaacgcacatttcctttgcttcttttattagactagtgttgactttggggggggacatttattcacaaatgagaagtaggcacaaagtaaaaaatggaaccatctactaacaaggatcctttaaaactgccaagggagctctaacttgaagccacatcctacagatggcagcccaaatagcacatgggcaattggcaccatctttatatggttgagtctcctgaatattttgaatgaattctcaacaaaatgtgctagccactggggacgcaaaacaagtaagatccctgttgcaagaaattcattttatagtgagggaggttggcatggagactaaaattctcaggaaaatgagatccgtgttagattagaagtcctgatgtgaaatgggaggactcaggaaggaggatcgtctttacctgaggatttctagccagaggtcccagatgcctgggctgagaacccagcgataagggggcgttcccaaagcagacacagggataagaacagaggaggcagcagcattgcacagccccaggcacagtggcagttaggatggctggagagtaggatagttctatgggttgcccaaaaaatgtgatgcgcttcatgttttctctgactcatggatctggtagagaccatagacatgatatagactaacttccccatttttcacaagaggaaaccatccttatgacttaccttaaagttttttgttctgttttgaaggaaaccatgtgcttcatgaaacctacagttgacaagagaatgtacagctaagagaaaagcttaagaggccacactattcgcggaatggctttagaggcagatgaagtggtctttgaccacagttgattgaaccagagcacttattgcttaaagaataacagagttctagagctgggggttcttgggccatgctccgtgtgtggataaggaaagaaatactgtttctgggactctcccacagtcacaaagctgttttcactgtggcccctacatctcttaacttttgctattactcctatgctgccttccggattactgctgtctatcttcttgctccactcactgaagatcctattataatcccatgaaaatgtaaattacagtttacttgggagagccagattttctctgtgctcttgagttttttattcattcaagaaaccttgggccaccgctttgtacatagcaccgtgctaggctctgggatcccaaatggacccttttaactttctgaagatgggaccgtcccctggaggaaagtcattcctgcctaatccatcgagagaaagaggcttacgaaaaactttgcctctgatgctcagccccacccccaaatagcacacaagcttgttaaccccacctcttacaaaatgtttagattctgtaggtgttaaaagcctttctggaagtattgcattctgccgtgtttataggtgttcactttcctccagagctgattaactactgacatgacttggctttctcatccagaaattatggaaacagggtctgtcagtggcaggaggccgtgctgtgttttacttggatgacacaatgcagtttacttgcctcttcatacccatgcatgctgctcaccctagacaatgacatataagccgtatatagatcaatgtccacatatatatacacacacacatatatatatataaagtgtaacaaggaacactaaaacagtgttgattcttgtctctgaagacaaataattaaaccttttttttcccaactaaagaatggatttaattaaactatgtattgaaaaaaaagtagcctaagtgttagagatggtgaatatattccattttagttaaagaacaaatttcctgaattttaagcattcagtgagctgccaattttgattttgtgttgctctttacccaaattattttttctttgtttttctttttttgggggaggaggggaaaaaagcagcaatactgtgtttggaaattatactctgtatctggttttcctgtgtatgttaaccacttaaatgttattatcctgctttggttttagagtgattgtgaggcattcaatgcaagtatacagttattttctcattaaaatccaatgtgtgttgagtttttataaaaaaaag

SEQ ID NO: 430410 - DNA, 1643 bp, Homo sapiens
tctagagtagagcgaggccccacacaggcgggccgcacacacagcccggatcgcagtggcagttaggatggctggagagtaggatagttctatgggttgcccaaaaaatgtgatgcgcttcatgttttctctgactcatggatctggtagagaccatagacatgatatagactaacttccccatttttcacaagaggaaaccatccttatgacttaccttaaagttttttgttctgttttgaaggaaaccatgtgcttcatgaaacctacagttgacaagagaatgtacagctaagagaaaagcttaagaggccacactattcgcggaatggctttagaggcagatgaagtggtctttgaccacagttgattgaaccagagcacttattgcttaaagaataacagagttctagagctgggggttcttgggccatgctccgtgtgtggataaggaaagaaatactgtttctgggactctcccacagtcacaaagctgttttcactgtggcccctacatctcttaacttttgctattactcctatgctgccttccggattactgctgtctatcttcttgctccactcactgaagatcctattataatcccatgaaaatgtaaattacagtttacttgggagagccagattttctctgtgctcttgagttttttattcattcaagaaaccttgggccaccgctttgtacatagcaccgtgctaggctctgggatcccaaatggacccttttaactttctgaagatgggaccgtcccctggaggaaagtcattcctgcctaatccatcgagagaaagaggcttacgaaaaactttgcctctgatgctcagccccacccccaaatagcacacaagcttgttaaccccacctcttacaaaatgtttagattctgtaggtgttaaaagcctttctggaagtattgcattctgccgtgtttataggtgttcactttcctccagagctgattaactactgacatgacttggctttctcatccagaaattatggaaacagggtctgtcagtggcaggaggccgtgctgtgttttacttggatgacacaatgcagtttacttgcctcttcatacccatgcatgctgctcaccctagacaatgacatataagccgtatatagatcaatgtccacatatatatacacacacacatatatatatataaagtgtaacaaggaacactaaaacagtgttgattcttgtctctgaagacaaataattaaaccttttttttcccaactaaagaatggatttaattaaactatgtattgaaaaaaaagtagcctaagtgttagagatggtgaatatattccattttagttaaagaacaaatttcctgaattttaagcattcagtgagctgccaattttgattttgtgttgctctttacccaaattattttttctttgtttttctttttttgggggaggaggggaaaaaagcagcaatactgtgtttggaaattatactctgtatctggttttcctgtgtatgttaaccacttaaatgttattatcctgctttggttttagagtgattgtgaggcattcaatgcaagtatacagttattttctcattaaaatccaatgtgtgttgagtttttataaaaaaaag

SEQ ID NO: 430411 - DNA, 1542 bp, Homo sapiens
tctagaggatcccggtcactttctacactctgactcatggatctggtagagaccatagacatgatatagactaacttccccatttttcacaagaggaaaccatccttatgacttaccttaaagttttttgttctgttttgaaggaaaccatgtgcttcatgaaacctacagttgacaagagaatgtacagctaagagaaaagcttaagaggccacactattcgcggaatggctttagaggcagatgaagtggtctttgaccacagttgattgaaccagagcacttattgcttaaagaataacagagttctagagctgggggttcttgggccatgctccgtgtgtggataaggaaagaaatactgtttctgggactctcccacagtcacaaagctgttttcactgtggcccctacatctcttaacttttgctattactcctatgctgccttccggattactgctgtctatcttcttgctccactcactgaagatcctattataatcccatgaaaatgtaaattacagtttacttgggagagccagattttctctgtgctcttgagttttttattcattcaagaaaccttgggccaccgctttgtacatagcaccgtgctaggctctgggatcccaaatggacccttttaactttctgaagatgggaccgtcccctggaggaaagtcattcctgcctaatccatcgagagaaagaggcttacgaaaaactttgcctctgatgctcagccccacccccaaatagcacacaagcttgttaaccccacctcttacaaaatgtttagattctgtaggtgttaaaagcctttctggaagtattgcattctgccgtgtttataggtgttcactttcctccagagctgattaactactgacatgacttggctttctcatccagaaattatggaaacagggtctgtcagtggcaggaggccgtgctgtgttttacttggatgacacaatgcagtttacttgcctcttcatacccatgcatgctgctcaccctagacaatgacatataagccgtatatagatcaatgtccacatatatatacacacacacatatatatatataaagtgtaacaaggaacactaaaacagtgttgattcttgtctctgaagacaaataattaaaccttttttttcccaactaaagaatggatttaattaaactatgtattgaaaaaaaagtagcctaagtgttagagatggtgaatatattccattttagttaaagaacaaatttcctgaattttaagcattcagtgagctgccaattttgattttgtgttgctctttacccaaattattttttctttgtttttctttttttgggggaggaggggaaaaaagcagcaatactgtgtttggaaattatactctgtatctggttttcctgtgtatgttaaccacttaaatgttattatcctgctttggttttagagtgattgtgaggcattcaatgcaagtatacagttattttctcattaaaatccaatgtgtgttgagtttttataaaaaaaag

SEQ ID NO: 430412 - DNA, 813 bp, Homo sapiens
  misc_feature (11)..(11): n is a, c, g, or t
tagaggattcnccggcagaataccccaaatagcacacaagcttgttaaccccacctcttacaaaatgtttagattctgtaggtgttaaaagcctttctggaagtattgcattctgccgtgtttataggtgttcactttcctccagagctgattaactactgacatgacttggctttctcatccagaaattatggaaacagggtctgtcagtggcaggaggccgtgctgtgttttacttggatgacacaatgcagtttacttgcctcttcatacccatgcatgctgctcaccctagacaatgacatataagccgtatatagatcaatgtccacatatatatacacacacacatatatatatataaagtgtaacaaggaacactaaaacagtgttgattcttgtctctgaagacaaataattaaaccttttttttcccaactaaagaatggatttaattaaactatgtattgaaaaaaaagtagcctaagtgttagagatggtgaatatattccattttagttaaagaacaaatttcctgaattttaagcattcagtgagctgccaattttgattttgtgttgctctttacccaaattattttttctttgtttttctttttttgggggaggaggggaaaaaagcagcaatactgtgtttggaaattatactctgtatctggttttcctgtgtatgttaaccacttaaatgttattatcctgctttggttttagagtgattgtgaggcattcaatgcaagtatacagttattttctcattaaaatccaatgtgtgttgagtttttataaaaaaaag

SEQ ID NO: 430413 - DNA, 556 bp, Homo sapiens
caagcaggatgttcccttgtactgagaggaaacgaaattgaaaatgcaagtctgagctcatttctttctggtgacttgtgggtcgcttcagatgtttgcaaccttatcccaatgctgtgtgaagaaaggaggtcattgaaggaggccctggcttaggcatgtcctctggtgagtgattttgttcggttcagtttggtttttaaatacgagtgggtgaaggctttttcttttattttgagaaatgtggaaacaaaggctctttgatttaagacctcagacttcatgcatagagagagtaataatcacccaaatcataatatctgaccaaaattttcaggacttttggaatccccattcctggctttttaaaagttagacctgaaatccagaaggaagatttggacagtcagggatgacaatagctgtattctgagtgcatgcagccttttctcgggttctttgggtgggaggaattgcagattcttttctctgcctcctgtcagcacggctcgccacagatgcccaagggaaatccatccggcctggaaaatccaga

SEQ ID NO: 430414 - DNA, 7525 bp, Homo sapiens
ccagaggctgagcccgggcgagcccgccgtgcgcacagctctgcccgccgcccctggagcggatccccagccgtccctgggcgttctcccgggttctagcaaagccccccggggtgcccatcagtttccttgggtgactacagcgtgtgttttttctttcctctttcccctgcctgtgtgcccttctccaggatggcagaggcggaattgcacaaggaaaggctgcaagccatagcagaaaaaagaaagaggcagactgaaatagaaggcaagcgacaacagcttgacgagcagatacttctgctgcagcattccaagtccaaagtgcttcgggagaaatggctgctgcagggcatacccgctggaactgccgaagaggaggaagccaggaggcggcagtctgaagaggatgagttcagagtcaagcaacttgaagataacattcagaggctggagcaagaaatacaaacgctagaaagtgaagagtcccagatatctgccaaagagcaaatcatcctagagaaactgaaggaaacagaaaaatccttcaaggactttcagaagggtttctccagtacggatggagatgcagtaaattacatttcctcccagcttcccgacctgccaatcctctgttcacgaacagcagaaccatcacctgggcaggacgggaccagcagagcggctggagtcgggtgggagaatgtgctgctaaaggaaggtgagtcagcctcgaacgccacagaaacatccggcccagacatgactatcaagaagcctccccagctttctgaggatgatatctggctaaaaagcgagggagacaactatagtgccaccctcctggagcctgctgccagctctctttccccagatcacaaaaacatggaaattgaggtgtctgttgcagaatgtaaaagtgttcctggaatcacctctaccccacatcccatggaccatccctccgctttctattcacccccgcataatggcctccttactgatcaccacgaatccctggataatgatgttgccagagagatccgctatctagatgaggtgctagaggccaactgctgtgattctgctgtggatggaacgtacaatggaacatcctccccagagcctggtgcagtggttctggtgggcggcctaagcccccctgtccacgaggcgacccagccagaacccactgaaagaacagctagccggcaggcacctcctcacatcgagctcagtaatagcagccctgaccccatggcagaggcagaaagaacaaatggccattcccccagccagcctagagatgcgctgggggacagcctgcaggtgcctgtcagccccagctccacaaccagctcacggtgttcttcccgagatggagagttcactctcaccacactgaaaaaggaggccaagtttgagctgcgtgccttccatgaggacaagaagccctccaagctctttgaggatgacgagcatgagaaagaacaatactgcattagaaaagtgaggccttcagaggagatgctggagctggaaaaggagaggagagagctcatccgcagccaggccgtcaagaagaatcctggcattgcagcaaaatggtggaatcccccgcaggaaaaaaccatcgaggagcagctggacgaggaacatctggagtcgcacaaaaagtacaaggagcgcaaagagagaagggcacagcaggaacagttgctgctgcagaagcagttacagcagcagcagcagcagcccccatcgcagctctgcacagcccctgcctcttctcatgaacgcgcaagcatgattgacaaagcaaaggaggacattgtcacagagcagatagatttctctgctgctcgcaaacaatttcagctgatggagaattccaggcaagcggtggccaagggccagagtacacccaggctgttctccatcaagcctttctacaggcctctggggtcagtcaactcagacaagccactgactaatccgagaccaccttctgtcgggggacctccagaagacagtggtgcctcagccgccaagggacagaaatcccccggtgccctggagaccccatcggcagcaggaagccagggcaacacagcctctcaggggaaggaagggccctacagcgagccttctaaacgtgggcccttatctaaactgtgggctgaggatggagaatttacgagcgcccgggctgtcctcactgtggtcaaggatgatgaccatgggattttggatcagttctcaagatctgtcaatgtctccttgacccaagaggagcttgactctggtctggacgaattgtcggtgaggtctcaggataccacagtcctggagaccctatccaatgatttcagcatggacaacatcagtgacagcggggcatccaatgagacaaccaatgccctccaggaaaattcactggctgatttttctctgccccagacaccacaaactgacaacccctcagagggccgaggagaaggcgtctccaagtcatttagtgatcatggtttctattccccttcctccacgctgggggactctccgttggttgatgaccccttggagtatcaggctggcctcctggtgcagaatgccattcaacaagccatagccgagcaggtggataaagctgtgtccaaaaccagcagggatggagcagagcaacagggacctgaagcgactgtagaggaagctgaagctgcggctttcggctcagaaaagcctcagagcatgtttgagccacctcaggtgtcttctcctgttcaagagaaaagggatgtattaccaaagattctgcctgctgaagacagggcgctcagggaaagggggcccccccagccactgccagctgtgcagcccagtggcccgattaacatggaggagaccaggcccgaaggaagctatttcagcaagtactcggaggcagctgagctgagaagcacagcctccctcctggccactcaagaatctgacgtgatggttgggcctttcaagctgaggtccaggaaacagcggactttgtccatgattgaggaagagatccgagcagctcaggaaagggaagaggagctgaagaggcagagacaagtcttgcagagtacgcagagccccaggacaaagaatgccccatcactgccctccagaacatgctacaaaactgctccagggaaaatagagaaagtcaaacctcctccatcccccaccactgaaggccccagcttgcagcctgacttagcccctgaagaggctgccggaacccagcggcccaagaatctgatgcagaccctcatggaagactatgagacacacaaatctaaaaggcgcgagagaatggatgatagtagttacacttctaagttactgtcttgcaaggtgacttccgaggtcctcgaggccacacgggttaatcgaagaaagagcgcactggctttgcgctgggaagcagggatctatgccaaccaggaggaagaagacaacgaataaacttccttcaacccaggaagcgtctttggtgcttgggagaccaagaaaccaagaaattaacaactgaaagcattttaatggactatttattaaagtgcaaacaaactcagcaatccttatgtagaccagaagctgcaatatacaatgatgaaaatgaaacgaaaaggaagtccccccatcagactctggacacccaggaatcaaaagagaaaggacttttttggtgactcaatcccagtgtctggtttggggccaatctacaatggatccaaaaggacaaaacatgttacaagcaaatcaacatagttgctgcaggcggaactgagaccagcctctctgggcgatgaaggacaatggtggtagggccacttagagagcagtagggcccaggctggtgcagcctacatggcacaggatatttccctgcaccagtttcccacctgtcacttgcagcatcagagggtgttgcattaactccattttctccagcagccataaaatgaatggcgtttctctccatatttgcccagaagaggcagttatgattccacttctcctacatttaattatttttaattgagaacaactcatgatcacaattcataaaatccatattttaagacaatagttcttcatgtcacaaacacaatctattctacatgaggaggctgagaaaggggaagagaaaaacaaaccaaatggatgatgttagctttaggatcgtgtctgcttataatattcactgatctgcagtttatgagaacacattttcacagttatgtttcttcataggaaaactatatttagtgggcaacaactatttttatgatgggatgggggagtatatacacgtatagaatctgtacgcgttgaacaacttggttcaagatggtgggggcatttttagagcggcaataattgaaaaaaaaggcgaactctgccttggagaggtagatgataagaaataaaaaggtgtttataactattttgtattataaagtgggccttagagataggaagaagaatgatggattccttttggatcaatcagaaaggaaacacgaaagaaaagtcaggaaggtagagagagaaaaagggagggaaggagaaagaatgggaataaaataaggaggtaagagatactatttttgctgagcaaccagtgtgtttcaggatgatacaaagaaaaatatagaatagaaataagtgcaggcttggaatcagctacaaatcctaaagatggggtgtgtgtggatgtgtgtgtgtgtgtgtgtacaccattgtgtgtttgtaaaatgtgtatgttcatgagtaagggtgtgtgtgtgtgtgtattaaaattccagagtgaccgtggcacttgggtgtacaggtaattcctccagagctgtttgctggcttcaggagtggagtgagaatttcttttttatgaaaagggatataaaggcaccgagctgatgcagtatttgtaatattaagttgacctaacaaggtatttgcatgagtcacaattacaaagttttgagcggttttgtaatttgacatttaggaaagtctcctatttattctcatactttacattcatgcttagtatactatagaggatgccagctttaatctttctgtcatttaaagcaatatgataagggtattcaataattgggtgccctaaatttctggatgagaaaattttcaattctggccatgagaaagaaaaaaaaataaacagccttctttttttttcctttgttttaaaactgtggttttttaaaaaagcaataattaactcagacctcactaaaaatcatttttgtttttatattgttatgtcataagctctattatgttattctaacaagtagcaatttcacaaaatttgtatgtagatgttaacgcacatttcctttgcttcttttattagactagtgttgactttggggggggacatttattcacaaatgagaagtaggcacaaagtaaaaaatggaaccatctactaacaaggatcctttaaaactgccaagggagctctaacttgaagccacatcctacagatggcagcccaaatagcacatgggcaattggcaccatctttatatggttgagtctcctgaatattttgaatgaattctcaacaaaatgtgctagccactggggacgcaaaacaagtaagatccctgttgcaagaaattcattttatagtgagggaggttggcatggagactaaaattctcaggaaaatgagatccgtgttagattagaagtcctgatgtgaaatgggaggactcaggaaggaggatcgtctttacctgaggatttctagccagaggtcccagatgcctgggctgagaacccagcgataagggggcgttcccaaagcagacacagggataagaacagaggaggcagcagcattgcacagccccaggcacagtggcagttaggatggctggagagtaggatagttctatgggttgcccaaaaaatgtgatgcgcttcatgttttctctgactcatggatctggtagagaccatagacatgatatagactaacttccccatttttcacaagaggaaaccatccttatgacttaccttaaagttttttgttctgttttgaaggaaaccatgtgcttcatgaaacctacagttgacaagagaatgtacagctaagagaaaagcttaagaggccacactattcgcggaatggctttagaggcagatgaagtggtctttgaccacagttgattgaaccagagcacttattgcttaaagaataacagagttctagagctgggggttcttgggccatgctccgtgtgtggataaggaaagaaatactgtttctgggactctcccacagtcacaaagctgttttcactgtggcccctacatctcttaacttttgctattactcctatgctgccttccggattactgctgtctatcttcttgctccactcactgaagatcctattataatcccatgaaaatgtaaattacagtttacttgggagagccagattttctctgtgctcttgagttttttattcattcaagaaaccttgggccaccgctttgtacatagcaccgtgctaggctctgggatcccaaatggacccttttaactttctgaagatgggaccgtcccctggaggaaagtcattcctgcctaatccatcgagagaaagaggcttacgaaaaactttgcctctgatgctcagccccacccccaaatagcacacaagcttgttaaccccacctcttacaaaatgtttagattctgtaggtgttaaaagcctttctggaagtattgcattctgccgtgtttataggtgttcactttcctccagagctgattaactactgacatgacttggctttctcatccagaaattatggaaacagggtctgtcagtggcaggaggccgtgctgtgttttacttggatgacacaatgcagtttacttgcctcttcatacccatgcatgctgctcaccctagacaatgacatataagccgtatatagatcaatgtccacatatatatacacacacacatatatatatataaagtgtaacaaggaacactaaaacagtgttgattcttgtctctgaagacaaataattaaaccttttttttcccaactaaagaatggatttaattaaactatgtattgaaaaaaaagtagcctaagtgttagagatggtgaatatattccattttagttaaagaacaaatttcctgaattttaagcattcagtgagctgccaattttgattttgtgttgctctttacccaaattattttttctttgtttttctttttttgggggaggaggggaaaaaagcagcaatactgtgtttggaaattatactctgtatctggttttcctgtgtatgttaaccacttaaatgttattatcctgctttggttttagagtgattgtgaggcattcaatgcaagtatacagttattttctcattaaaatccaatgtgtgttgagtttttataaaaaaaag

SEQ ID NO: 430415 - DNA, 8182 bp, Homo sapiens
ccagaggctgagcccgggcgagcccgccgtgcgcacagctctgcccgccgcccctggagcggatccccagccgtccctgggcgttctcccgggttctagcaaagccccccggggtgcccatcagtttccttgggtgactacagcgtgtgttttttctttcctctttcccctgcctgtgtgcccttctccaggatggcagaggcggaattgcacaaggaaaggctgcaagccatagcagaaaaaagaaagaggcagactgaaatagaaggcaagcgacaacagcttgacgagcagatacttctgctgcagcattccaagtccaaagtgcttcgggagaaatggctgctgcagggcatacccgctggaactgccgaagaggaggaagccaggaggcggcagtctgaagaggatgagttcagagtcaagcaacttgaagataacattcagaggctggagcaagaaatacaaacgctagaaagtgaagagtcccagatatctgccaaagagcaaatcatcctagagaaactgaaggaaacagaaaaatccttcaaggactttcagaagggtttctccagtacggatggagatgcagtaaattacatttcctcccagcttcccgacctgccaatcctctgttcacgaacagcagaaccatcacctgggcaggacgggaccagcagagcggctgctgtgtacgccatggaaattaatgtggagaaagacaaacaaacaggagagaccaagattctctctacatctaccattggcccagagggggtccatcagaaaggagtcaaagtctatgatgatggtaccaaagtagtgtatgaggtgcgctcaggaggcaccgtagtagaaaatggagtgcacaaattaagcacaaaggatgtagaagagcttattcagaaggctggacaatcaagcttaggaggagggcacgtgtctgaaaggactgtgattgcagatgggagcctcagccatcccaaggaacacatgctctgcaaagaagctaagttagaaatggtacataagtctaggaaagaccattcttccgggaacccagggcagcaggcccaagcccccagcgctgcagggccggaggcaaacttggatcagcccgtcaccatgatttttatgggctaccaaaatatcgaggatgaagaggagacgaaaaaggtgctaggctatgatgaaaccatcaaggctgaattggtcctcattgatgaagatgatgagaagtcattgagggagaagacagtgacggacgtgtccactattgacgggaacgcggctgagcttgtgtccgggaggccggtctcagacaccacagagccctcatccccagaagggaaggaagagagcctagctacagagccagccccaggagtcgggtgggagaatgtgctgctaaaggaaggtgagtcagcctcgaacgccacagaaacatccggcccagacatgactatcaagaagcctccccagctttctgaggatgatatctggctaaaaagcgagggagacaactatagtgccaccctcctggagcctgctgccagctctctttccccagatcacaaaaacatggaaattgaggtgtctgttgcagaatgtaaaagtgttcctggaatcacctctaccccacatcccatggaccatccctccgctttctattcacccccgcataatggcctccttactgatcaccacgaatccctggataatgatgttgccagagagatccgctatctagatgaggtgctagaggccaactgctgtgattctgctgtggatggaacgtacaatggaacatcctccccagagcctggtgcagtggttctggtgggcggcctaagcccccctgtccacgaggcgacccagccagaacccactgaaagaacagctagccggcaggcacctcctcacatcgagctcagtaatagcagccctgaccccatggcagaggcagaaagaacaaatggccattcccccagccagcctagagatgcgctgggggacagcctgcaggtgcctgtcagccccagctccacaaccagctcacggtgttcttcccgagatggagagttcactctcaccacactgaaaaaggaggccaagtttgagctgcgtgccttccatgaggacaagaagccctccaagctctttgaggatgacgagcatgagaaagaacaatactgcattagaaaagtgaggccttcagaggagatgctggagctggaaaaggagaggagagagctcatccgcagccaggccgtcaagaagaatcctggcattgcagcaaaatggtggaatcccccgcaggaaaaaaccatcgaggagcagctggacgaggaacatctggagtcgcacaaaaagtacaaggagcgcaaagagagaagggcacagcaggaacagttgctgctgcagaagcagttacagcagcagcagcagcagcccccatcgcagctctgcacagcccctgcctcttctcatgaacgcgcaagcatgattgacaaagcaaaggaggacattgtcacagagcagatagatttctctgctgctcgcaaacaatttcagctgatggagaattccaggcaagcggtggccaagggccagagtacacccaggctgttctccatcaagcctttctacaggcctctggggtcagtcaactcagacaagccactgactaatccgagaccaccttctgtcgggggacctccagaagacagtggtgcctcagccgccaagggacagaaatcccccggtgccctggagaccccatcggcagcaggaagccagggcaacacagcctctcaggggaaggaagggccctacagcgagccttctaaacgtgggcccttatctaaactgtgggctgaggatggagaatttacgagcgcccgggctgtcctcactgtggtcaaggatgatgaccatgggattttggatcagttctcaagatctgtcaatgtctccttgacccaagaggagcttgactctggtctggacgaattgtcggtgaggtctcaggataccacagtcctggagaccctatccaatgatttcagcatggacaacatcagtgacagcggggcatccaatgagacaaccaatgccctccaggaaaattcactggctgatttttctctgccccagacaccacaaactgacaacccctcagagggccgaggagaaggcgtctccaagtcatttagtgatcatggtttctattccccttcctccacgctgggggactctccgttggttgatgaccccttggagtatcaggctggcctcctggtgcagaatgccattcaacaagccatagccgagcaggtggataaagctgtgtccaaaaccagcagggatggagcagagcaacagggacctgaagcgactgtagaggaagctgaagctgcggctttcggctcagaaaagcctcagagcatgtttgagccacctcaggtgtcttctcctgttcaagagaaaagggatgtattaccaaagattctgcctgctgaagacagggcgctcagggaaagggggcccccccagccactgccagctgtgcagcccagtggcccgattaacatggaggagaccaggcccgaaggaagctatttcagcaagtactcggaggcagctgagctgagaagcacagcctccctcctggccactcaagaatctgacgtgatggttgggcctttcaagctgaggtccaggaaacagcggactttgtccatgattgaggaagagatccgagcagctcaggaaagggaagaggagctgaagaggcagagacaagtcttgcagagtacgcagagccccaggacaaagaatgccccatcactgccctccagaacatgctacaaaactgctccagggaaaatagagaaagtcaaacctcctccatcccccaccactgaaggccccagcttgcagcctgacttagcccctgaagaggctgccggaacccagcggcccaagaatctgatgcagaccctcatggaagactatgagacacacaaatctaaaaggcgcgagagaatggatgatagtagtgtcctcgaggccacacgggttaatcgaagaaagagcgcactggctttgcgctgggaagcagggatctatgccaaccaggaggaagaagacaacgaataaacttccttcaacccaggaagcgtctttggtgcttgggagaccaagaaaccaagaaattaacaactgaaagcattttaatggactatttattaaagtgcaaacaaactcagcaatccttatgtagaccagaagctgcaatatacaatgatgaaaatgaaacgaaaaggaagtccccccatcagactctggacacccaggaatcaaaagagaaaggacttttttggtgactcaatcccagtgtctggtttggggccaatctacaatggatccaaaaggacaaaacatgttacaagcaaatcaacatagttgctgcaggcggaactgagaccagcctctctgggcgatgaaggacaatggtggtagggccacttagagagcagtagggcccaggctggtgcagcctacatggcacaggatatttccctgcaccagtttcccacctgtcacttgcagcatcagagggtgttgcattaactccattttctccagcagccataaaatgaatggcgtttctctccatatttgcccagaagaggcagttatgattccacttctcctacatttaattatttttaattgagaacaactcatgatcacaattcataaaatccatattttaagacaatagttcttcatgtcacaaacacaatctattctacatgaggaggctgagaaaggggaagagaaaaacaaaccaaatggatgatgttagctttaggatcgtgtctgcttataatattcactgatctgcagtttatgagaacacattttcacagttatgtttcttcataggaaaactatatttagtgggcaacaactatttttatgatgggatgggggagtatatacacgtatagaatctgtacgcgttgaacaacttggttcaagatggtgggggcatttttagagcggcaataattgaaaaaaaaggcgaactctgccttggagaggtagatgataagaaataaaaaggtgtttataactattttgtattataaagtgggccttagagataggaagaagaatgatggattccttttggatcaatcagaaaggaaacacgaaagaaaagtcaggaaggtagagagagaaaaagggagggaaggagaaagaatgggaataaaataaggaggtaagagatactatttttgctgagcaaccagtgtgtttcaggatgatacaaagaaaaatatagaatagaaataagtgcaggcttggaatcagctacaaatcctaaagatggggtgtgtgtggatgtgtgtgtgtgtgtgtgtacaccattgtgtgtttgtaaaatgtgtatgttcatgagtaagggtgtgtgtgtgtgtgtattaaaattccagagtgaccgtggcacttgggtgtacaggtaattcctccagagctgtttgctggcttcaggagtggagtgagaatttcttttttatgaaaagggatataaaggcaccgagctgatgcagtatttgtaatattaagttgacctaacaaggtatttgcatgagtcacaattacaaagttttgagcggttttgtaatttgacatttaggaaagtctcctatttattctcatactttacattcatgcttagtatactatagaggatgccagctttaatctttctgtcatttaaagcaatatgataagggtattcaataattgggtgccctaaatttctggatgagaaaattttcaattctggccatgagaaagaaaaaaaaataaacagccttctttttttttcctttgttttaaaactgtggttttttaaaaaagcaataattaactcagacctcactaaaaatcatttttgtttttatattgttatgtcataagctctattatgttattctaacaagtagcaatttcacaaaatttgtatgtagatgttaacgcacatttcctttgcttcttttattagactagtgttgactttggggggggacatttattcacaaatgagaagtaggcacaaagtaaaaaatggaaccatctactaacaaggatcctttaaaactgccaagggagctctaacttgaagccacatcctacagatggcagcccaaatagcacatgggcaattggcaccatctttatatggttgagtctcctgaatattttgaatgaattctcaacaaaatgtgctagccactggggacgcaaaacaagtaagatccctgttgcaagaaattcattttatagtgagggaggttggcatggagactaaaattctcaggaaaatgagatccgtgttagattagaagtcctgatgtgaaatgggaggactcaggaaggaggatcgtctttacctgaggatttctagccagaggtcccagatgcctgggctgagaacccagcgataagggggcgttcccaaagcagacacagggataagaacagaggaggcagcagcattgcacagccccaggcacagtggcagttaggatggctggagagtaggatagttctatgggttgcccaaaaaatgtgatgcgcttcatgttttctctgactcatggatctggtagagaccatagacatgatatagactaacttccccatttttcacaagaggaaaccatccttatgacttaccttaaagttttttgttctgttttgaaggaaaccatgtgcttcatgaaacctacagttgacaagagaatgtacagctaagagaaaagcttaagaggccacactattcgcggaatggctttagaggcagatgaagtggtctttgaccacagttgattgaaccagagcacttattgcttaaagaataacagagttctagagctgggggttcttgggccatgctccgtgtgtggataaggaaagaaatactgtttctgggactctcccacagtcacaaagctgttttcactgtggcccctacatctcttaacttttgctattactcctatgctgccttccggattactgctgtctatcttcttgctccactcactgaagatcctattataatcccatgaaaatgtaaattacagtttacttgggagagccagattttctctgtgctcttgagttttttattcattcaagaaaccttgggccaccgctttgtacatagcaccgtgctaggctctgggatcccaaatggacccttttaactttctgaagatgggaccgtcccctggaggaaagtcattcctgcctaatccatcgagagaaagaggcttacgaaaaactttgcctctgatgctcagccccacccccaaatagcacacaagcttgttaaccccacctcttacaaaatgtttagattctgtaggtgttaaaagcctttctggaagtattgcattctgccgtgtttataggtgttcactttcctccagagctgattaactactgacatgacttggctttctcatccagaaattatggaaacagggtctgtcagtggcaggaggccgtgctgtgttttacttggatgacacaatgcagtttacttgcctcttcatacccatgcatgctgctcaccctagacaatgacatataagccgtatatagatcaatgtccacatatatatacacacacacatatatatatataaagtgtaacaaggaacactaaaacagtgttgattcttgtctctgaagacaaataattaaaccttttttttcccaactaaagaatggatttaattaaactatgtattgaaaaaaaagtagcctaagtgttagagatggtgaatatattccattttagttaaagaacaaatttcctgaattttaagcattcagtgagctgccaattttgattttgtgttgctctttacccaaattattttttctttgtttttctttttttgggggaggaggggaaaaaagcagcaatactgtgtttggaaattatactctgtatctggttttcctgtgtatgttaaccacttaaatgttattatcctgctttggttttagagtgattgtgaggcattcaatgcaagtatacagttattttctcattaaaatccaatgtgtgttgagtttttataaaaaaaag

SEQ ID NO: 430416 - DNA, 7976 bp, Homo sapiens
cgcggccagtgcactcggctccgggagaggcgagcagcgccggtgagccccgcagcagcgcacccggccgcggagccccgcgatggagatggcagaggcggaattgcacaaggaaaggctgcaagccatagcagaaaaaagaaagaggcagactgaaatagaaggcaagcgacaacagcttgacgagcagatacttctgctgcagcattccaagtccaaagtgcttcgggagaaatggctgctgcagggcatacccgctggaactgccgaagaggaggaagccaggaggcggcagtctgaagaggatgagttcagagtcaagcaacttgaagataacattcagaggctggagcaagaaatacaaacgctagaaagtgaagagtcccagatatctgccaaagagcaaatcatcctagagaaactgaaggaaacagaaaaatccttcaaggactttcagaagggtttctccagtacggatggagctgtgtacgccatggaaattaatgtggagaaagacaaacaaacaggagagaccaagattctctctacatctaccattggcccagagggggtccatcagaaaggagtcaaagtctatgatgatggtaccaaagtagtgtatgaggtgcgctcaggaggcaccgtagtagaaaatggagtgcacaaattaagcacaaaggatgtagaagagcttattcagaaggctggacaatcaagcttaggaggagggcacgtgtctgaaaggactgtgattgcagatgggagcctcagccatcccaaggaacacatgctctgcaaagaagctaagttagaaatggtacataagtctaggaaagaccattcttccgggaacccagggcagcaggcccaagcccccagcgctgcagggccggaggcaaacttggatcagcccgtcaccatgatttttatgggctaccaaaatatcgaggatgaagaggagacgaaaaaggtgctaggctatgatgaaaccatcaaggctgaattggtcctcattgatgaagatgatgagaagtcattgagggagaagacagtgacggacgtgtccactattgacgggaacgcggctgagcttgtgtccgggaggccggtctcagacaccacagagccctcatccccagaagggaaggaagagagcctagctacagagccagccccaggagtcgggtgggagaatgtgctgctaaaggaaggtgagtcagcctcgaacgccacagaaacatccggcccagacatgactatcaagaagcctccccagctttctgaggatgatatctggctaaaaagcgagggagacaactatagtgccaccctcctggagcctgctgccagctctctttccccagatcacaaaaacatggaaattgaggtgtctgttgcagaatgtaaaagtgttcctggaatcacctctaccccacatcccatggaccatccctccgctttctattcacccccgcataatggcctccttactgatcaccacgaatccctggataatgatgttgccagagagatccgctatctagatgaggtgctagaggccaactgctgtgattctgctgtggatggaacgtacaatggaacatcctccccagagcctggtgcagtggttctggtgggcggcctaagcccccctgtccacgaggcgacccagccagaacccactgaaagaacagctagccggcaggcacctcctcacatcgagctcagtaatagcagccctgaccccatggcagaggcagaaagaacaaatggccattcccccagccagcctagagatgcgctgggggacagcctgcaggtgcctgtcagccccagctccacaaccagctcacggtgttcttcccgagatggagagttcactctcaccacactgaaaaaggaggccaagtttgagctgcgtgccttccatgaggacaagaagccctccaagctctttgaggatgacgagcatgagaaagaacaatactgcattagaaaagtgaggccttcagaggagatgctggagctggaaaaggagaggagagagctcatccgcagccaggccgtcaagaagaatcctggcattgcagcaaaatggtggaatcccccgcaggaaaaaaccatcgaggagcagctggacgaggaacatctggagtcgcacaaaaagtacaaggagcgcaaagagagaagggcacagcaggaacagttgctgctgcagaagcagttacagcagcagcagcagcagcccccatcgcagctctgcacagcccctgcctcttctcatgaacgcgcaagcatgattgacaaagcaaaggaggacattgtcacagagcagatagatttctctgctgctcgcaaacaatttcagctgatggagaattccaggcaagcggtggccaagggccagagtacacccaggctgttctccatcaagcctttctacaggcctctggggtcagtcaactcagacaagccactgactaatccgagaccaccttctgtcgggggacctccagaagacagtggtgcctcagccgccaagggacagaaatcccccggtgccctggagaccccatcggcagcaggaagccagggcaacacagcctctcaggggaaggaagggccctacagcgagccttctaaacgtgggcccttatctaaactgtgggctgaggatggagaatttacgagcgcccgggctgtcctcactgtggtcaaggatgatgaccatgggattttggatcagttctcaagatctgtcaatgtctccttgacccaagaggagcttgactctggtctggacgaattgtcggtgaggtctcaggataccacagtcctggagaccctatccaatgatttcagcatggacaacatcagtgacagcggggcatccaatgagacaaccaatgccctccaggaaaattcactggctgatttttctctgccccagacaccacaaactgacaacccctcagagggccgaggagaaggcgtctccaagtcatttagtgatcatggtttctattccccttcctccacgctgggggactctccgttggttgatgaccccttggagtatcaggctggcctcctggtgcagaatgccattcaacaagccatagccgagcaggtggataaagctgtgtccaaaaccagcagggatggagcagagcaacagggacctgaagcgactgtagaggaagctgaagctgcggctttcggctcagaaaagcctcagagcatgtttgagccacctcaggtgtcttctcctgttcaagagaaaagggatgtattaccaaagattctgcctgctgaagacagggcgctcagggaaagggggcccccccagccactgccagctgtgcagcccagtggcccgattaacatggaggagaccaggcccgaaggaagctatttcagcaagtactcggaggcagctgagctgagaagcacagcctccctcctggccactcaagaatctgacgtgatggttgggcctttcaagctgaggtccaggaaacagcggactttgtccatgattgaggaagagatccgagcagctcaggaaagggaagaggagctgaagaggcagagacaagtcttgcagagtacgcagagccccaggacaaagaatgccccatcactgccctccagaacatgctacaaaactgctccagggaaaatagagaaagtcaaacctcctccatcccccaccactgaaggccccagcttgcagcctgacttagcccctgaagaggctgccggaacccagcggcccaagaatctgatgcagaccctcatggaagactatgagacacacaaatctaaaaggcgcgagagaatggatgatagtagtgtcctcgaggccacacgggttaatcgaagaaagagcgcactggctttgcgctgggaagcagggatctatgccaaccaggaggaagaagacaacgaataaacttccttcaacccaggaagcgtctttggtgcttgggagaccaagaaaccaagaaattaacaactgaaagcattttaatggactatttattaaagtgcaaacaaactcagcaatccttatgtagaccagaagctgcaatatacaatgatgaaaatgaaacgaaaaggaagtccccccatcagactctggacacccaggaatcaaaagagaaaggacttttttggtgactcaatcccagtgtctggtttggggccaatctacaatggatccaaaaggacaaaacatgttacaagcaaatcaacatagttgctgcaggcggaactgagaccagcctctctgggcgatgaaggacaatggtggtagggccacttagagagcagtagggcccaggctggtgcagcctacatggcacaggatatttccctgcaccagtttcccacctgtcacttgcagcatcagagggtgttgcattaactccattttctccagcagccataaaatgaatggcgtttctctccatatttgcccagaagaggcagttatgattccacttctcctacatttaattatttttaattgagaacaactcatgatcacaattcataaaatccatattttaagacaatagttcttcatgtcacaaacacaatctattctacatgaggaggctgagaaaggggaagagaaaaacaaaccaaatggatgatgttagctttaggatcgtgtctgcttataatattcactgatctgcagtttatgagaacacattttcacagttatgtttcttcataggaaaactatatttagtgggcaacaactatttttatgatgggatgggggagtatatacacgtatagaatctgtacgcgttgaacaacttggttcaagatggtgggggcatttttagagcggcaataattgaaaaaaaaggcgaactctgccttggagaggtagatgataagaaataaaaaggtgtttataactattttgtattataaagtgggccttagagataggaagaagaatgatggattccttttggatcaatcagaaaggaaacacgaaagaaaagtcaggaaggtagagagagaaaaagggagggaaggagaaagaatgggaataaaataaggaggtaagagatactatttttgctgagcaaccagtgtgtttcaggatgatacaaagaaaaatatagaatagaaataagtgcaggcttggaatcagctacaaatcctaaagatggggtgtgtgtggatgtgtgtgtgtgtgtgtgtacaccattgtgtgtttgtaaaatgtgtatgttcatgagtaagggtgtgtgtgtgtgtgtattaaaattccagagtgaccgtggcacttgggtgtacaggtaattcctccagagctgtttgctggcttcaggagtggagtgagaatttcttttttatgaaaagggatataaaggcaccgagctgatgcagtatttgtaatattaagttgacctaacaaggtatttgcatgagtcacaattacaaagttttgagcggttttgtaatttgacatttaggaaagtctcctatttattctcatactttacattcatgcttagtatactatagaggatgccagctttaatctttctgtcatttaaagcaatatgataagggtattcaataattgggtgccctaaatttctggatgagaaaattttcaattctggccatgagaaagaaaaaaaaataaacagccttctttttttttcctttgttttaaaactgtggttttttaaaaaagcaataattaactcagacctcactaaaaatcatttttgtttttatattgttatgtcataagctctattatgttattctaacaagtagcaatttcacaaaatttgtatgtagatgttaacgcacatttcctttgcttcttttattagactagtgttgactttggggggggacatttattcacaaatgagaagtaggcacaaagtaaaaaatggaaccatctactaacaaggatcctttaaaactgccaagggagctctaacttgaagccacatcctacagatggcagcccaaatagcacatgggcaattggcaccatctttatatggttgagtctcctgaatattttgaatgaattctcaacaaaatgtgctagccactggggacgcaaaacaagtaagatccctgttgcaagaaattcattttatagtgagggaggttggcatggagactaaaattctcaggaaaatgagatccgtgttagattagaagtcctgatgtgaaatgggaggactcaggaaggaggatcgtctttacctgaggatttctagccagaggtcccagatgcctgggctgagaacccagcgataagggggcgttcccaaagcagacacagggataagaacagaggaggcagcagcattgcacagccccaggcacagtggcagttaggatggctggagagtaggatagttctatgggttgcccaaaaaatgtgatgcgcttcatgttttctctgactcatggatctggtagagaccatagacatgatatagactaacttccccatttttcacaagaggaaaccatccttatgacttaccttaaagttttttgttctgttttgaaggaaaccatgtgcttcatgaaacctacagttgacaagagaatgtacagctaagagaaaagcttaagaggccacactattcgcggaatggctttagaggcagatgaagtggtctttgaccacagttgattgaaccagagcacttattgcttaaagaataacagagttctagagctgggggttcttgggccatgctccgtgtgtggataaggaaagaaatactgtttctgggactctcccacagtcacaaagctgttttcactgtggcccctacatctcttaacttttgctattactcctatgctgccttccggattactgctgtctatcttcttgctccactcactgaagatcctattataatcccatgaaaatgtaaattacagtttacttgggagagccagattttctctgtgctcttgagttttttattcattcaagaaaccttgggccaccgctttgtacatagcaccgtgctaggctctgggatcccaaatggacccttttaactttctgaagatgggaccgtcccctggaggaaagtcattcctgcctaatccatcgagagaaagaggcttacgaaaaactttgcctctgatgctcagccccacccccaaatagcacacaagcttgttaaccccacctcttacaaaatgtttagattctgtaggtgttaaaagcctttctggaagtattgcattctgccgtgtttataggtgttcactttcctccagagctgattaactactgacatgacttggctttctcatccagaaattatggaaacagggtctgtcagtggcaggaggccgtgctgtgttttacttggatgacacaatgcagtttacttgcctcttcatacccatgcatgctgctcaccctagacaatgacatataagccgtatatagatcaatgtccacatatatatacacacacacatatatatatataaagtgtaacaaggaacactaaaacagtgttgattcttgtctctgaagacaaataattaaaccttttttttcccaactaaagaatggatttaattaaactatgtattgaaaaaaaagtagcctaagtgttagagatggtgaatatattccattttagttaaagaacaaatttcctgaattttaagcattcagtgagctgccaattttgattttgtgttgctctttacccaaattattttttctttgtttttctttttttgggggaggaggggaaaaaagcagcaatactgtgtttggaaattatactctgtatctggttttcctgtgtatgttaaccacttaaatgttattatcctgctttggttttagagtgattgtgaggcattcaatgcaagtatacagttattttctcattaaaatccaatgtgtgttgagtttttataaaaaaaag

SEQ ID NO: 430417 - DNA, 7107 bp, Homo sapiens
cagactttcctgctgtcagtgccttcaggggagggtggaacggcccactcggagtcccagctccttctccttcctgtcgtcgttagcagggagggccagaggaggtgcagccagcctgcttagaaactttggtgcaccgcgctttcttcaattctttttgcccggcacagtttgcgccgttgaagagggctggaagtttatttccagctattgctgcagcacttccttctcctagtgctgttcgttcttcttatgggaactggtactcactccctccaagtctgtgagcgtcttgctggggatggcggatcaccttggagctctgaggacctcgcacggcccaggctgagagcatatagctctgcagggtcccaggatatgcttatggatccaagaagcctccccagctttctgaggatgatatctggctaaaaagcgagggagacaactatagtgccaccctcctggagcctgctgccagctctctttccccagatcacaaaaacatggaaattgaggtgtctgttgcagaatgtaaaagtgttcctggaatcacctctaccccacatcccatggaccatccctccgctttctattcacccccgcataatggcctccttactgatcaccacgaatccctggataatgatgttgccagagagatccgctatctagatgaggtgctagaggccaactgctgtgattctgctgtggatggaacgtacaatggaacatcctccccagagcctggtgcagtggttctggtgggcggcctaagcccccctgtccacgaggcgacccagccagaacccactgaaagaacagctagccggcaggcacctcctcacatcgagctcagtaatagcagccctgaccccatggcagaggcagaaagaacaaatggccattcccccagccagcctagagatgcgctgggggacagcctgcaggtgcctgtcagccccagctccacaaccagctcacggtgttcttcccgagatggagagttcactctcaccacactgaaaaaggaggccaagtttgagctgcgtgccttccatgaggacaagaagccctccaagctctttgaggatgacgagcatgagaaagaacaatactgcattagaaaagtgaggccttcagaggagatgctggagctggaaaaggagaggagagagctcatccgcagccaggccgtcaagaagaatcctggcattgcagcaaaatggtggaatcccccgcaggaaaaaaccatcgaggagcagctggacgaggaacatctggagtcgcacaaaaagtacaaggagcgcaaagagagaagggcacagcaggaacagttgctgctgcagaagcagttacagcagcagcagcagcagcccccatcgcagctctgcacagcccctgcctcttctcatgaacgcgcaagcatgattgacaaagcaaaggaggacattgtcacagagcagatagatttctctgctgctcgcaaacaatttcagctgatggagaattccaggcaagcggtggccaagggccagagtacacccaggctgttctccatcaagcctttctacaggcctctggggtcagtcaactcagacaagccactgactaatccgagaccaccttctgtcgggggacctccagaagacagtggtgcctcagccgccaagggacagaaatcccccggtgccctggagaccccatcggcagcaggaagccagggcaacacagcctctcaggggaaggaagggccctacagcgagccttctaaacgtgggcccttatctaaactgtgggctgaggatggagaatttacgagcgcccgggctgtcctcactgtggtcaaggatgatgaccatgggattttggatcagttctcaagatctgtcaatgtctccttgacccaagaggagcttgactctggtctggacgaattgtcggtgaggtctcaggataccacagtcctggagaccctatccaatgatttcagcatggacaacatcagtgacagcggggcatccaatgagacaaccaatgccctccaggaaaattcactggctgatttttctctgccccagacaccacaaactgacaacccctcagagggccgaggagaaggcgtctccaagtcatttagtgatcatggtttctattccccttcctccacgctgggggactctccgttggttgatgaccccttggagtatcaggctggcctcctggtgcagaatgccattcaacaagccatagccgagcaggtggataaagctgtgtccaaaaccagcagggatggagcagagcaacagggacctgaagcgactgtagaggaagctgaagctgcggctttcggctcagaaaagcctcagagcatgtttgagccacctcaggtgtcttctcctgttcaagagaaaagggatgtattaccaaagattctgcctgctgaagacagggcgctcagggaaagggggcccccccagccactgccagctgtgcagcccagtggcccgattaacatggaggagaccaggcccgaaggaagctatttcagcaagtactcggaggcagctgagctgagaagcacagcctccctcctggccactcaagaatctgacgtgatggttgggcctttcaagctgaggtccaggaaacagcggactttgtccatgattgaggaagagatccgagcagctcaggaaagggaagaggagctgaagaggcagagacaagtcttgcagagtacgcagagccccaggacaaagaatgccccatcactgccctccagaacatgctacaaaactgctccagggaaaatagagaaagtcaaacctcctccatcccccaccactgaaggccccagcttgcagcctgacttagcccctgaagaggctgccggaacccagcggcccaagaatctgatgcagaccctcatggaagactatgagacacacaaatctaaaaggcgcgagagaatggatgatagtagtgtcctcgaggccacacgggttaatcgaagaaagagcgcactggctttgcgctgggaagcagggatctatgccaaccaggaggaagaagacaacgaataaacttccttcaacccaggaagcgtctttggtgcttgggagaccaagaaaccaagaaattaacaactgaaagcattttaatggactatttattaaagtgcaaacaaactcagcaatccttatgtagaccagaagctgcaatatacaatgatgaaaatgaaacgaaaaggaagtccccccatcagactctggacacccaggaatcaaaagagaaaggacttttttggtgactcaatcccagtgtctggtttggggccaatctacaatggatccaaaaggacaaaacatgttacaagcaaatcaacatagttgctgcaggcggaactgagaccagcctctctgggcgatgaaggacaatggtggtagggccacttagagagcagtagggcccaggctggtgcagcctacatggcacaggatatttccctgcaccagtttcccacctgtcacttgcagcatcagagggtgttgcattaactccattttctccagcagccataaaatgaatggcgtttctctccatatttgcccagaagaggcagttatgattccacttctcctacatttaattatttttaattgagaacaactcatgatcacaattcataaaatccatattttaagacaatagttcttcatgtcacaaacacaatctattctacatgaggaggctgagaaaggggaagagaaaaacaaaccaaatggatgatgttagctttaggatcgtgtctgcttataatattcactgatctgcagtttatgagaacacattttcacagttatgtttcttcataggaaaactatatttagtgggcaacaactatttttatgatgggatgggggagtatatacacgtatagaatctgtacgcgttgaacaacttggttcaagatggtgggggcatttttagagcggcaataattgaaaaaaaaggcgaactctgccttggagaggtagatgataagaaataaaaaggtgtttataactattttgtattataaagtgggccttagagataggaagaagaatgatggattccttttggatcaatcagaaaggaaacacgaaagaaaagtcaggaaggtagagagagaaaaagggagggaaggagaaagaatgggaataaaataaggaggtaagagatactatttttgctgagcaaccagtgtgtttcaggatgatacaaagaaaaatatagaatagaaataagtgcaggcttggaatcagctacaaatcctaaagatggggtgtgtgtggatgtgtgtgtgtgtgtgtgtacaccattgtgtgtttgtaaaatgtgtatgttcatgagtaagggtgtgtgtgtgtgtgtattaaaattccagagtgaccgtggcacttgggtgtacaggtaattcctccagagctgtttgctggcttcaggagtggagtgagaatttcttttttatgaaaagggatataaaggcaccgagctgatgcagtatttgtaatattaagttgacctaacaaggtatttgcatgagtcacaattacaaagttttgagcggttttgtaatttgacatttaggaaagtctcctatttattctcatactttacattcatgcttagtatactatagaggatgccagctttaatctttctgtcatttaaagcaatatgataagggtattcaataattgggtgccctaaatttctggatgagaaaattttcaattctggccatgagaaagaaaaaaaaataaacagccttctttttttttcctttgttttaaaactgtggttttttaaaaaagcaataattaactcagacctcactaaaaatcatttttgtttttatattgttatgtcataagctctattatgttattctaacaagtagcaatttcacaaaatttgtatgtagatgttaacgcacatttcctttgcttcttttattagactagtgttgactttggggggggacatttattcacaaatgagaagtaggcacaaagtaaaaaatggaaccatctactaacaaggatcctttaaaactgccaagggagctctaacttgaagccacatcctacagatggcagcccaaatagcacatgggcaattggcaccatctttatatggttgagtctcctgaatattttgaatgaattctcaacaaaatgtgctagccactggggacgcaaaacaagtaagatccctgttgcaagaaattcattttatagtgagggaggttggcatggagactaaaattctcaggaaaatgagatccgtgttagattagaagtcctgatgtgaaatgggaggactcaggaaggaggatcgtctttacctgaggatttctagccagaggtcccagatgcctgggctgagaacccagcgataagggggcgttcccaaagcagacacagggataagaacagaggaggcagcagcattgcacagccccaggcacagtggcagttaggatggctggagagtaggatagttctatgggttgcccaaaaaatgtgatgcgcttcatgttttctctgactcatggatctggtagagaccatagacatgatatagactaacttccccatttttcacaagaggaaaccatccttatgacttaccttaaagttttttgttctgttttgaaggaaaccatgtgcttcatgaaacctacagttgacaagagaatgtacagctaagagaaaagcttaagaggccacactattcgcggaatggctttagaggcagatgaagtggtctttgaccacagttgattgaaccagagcacttattgcttaaagaataacagagttctagagctgggggttcttgggccatgctccgtgtgtggataaggaaagaaatactgtttctgggactctcccacagtcacaaagctgttttcactgtggcccctacatctcttaacttttgctattactcctatgctgccttccggattactgctgtctatcttcttgctccactcactgaagatcctattataatcccatgaaaatgtaaattacagtttacttgggagagccagattttctctgtgctcttgagttttttattcattcaagaaaccttgggccaccgctttgtacatagcaccgtgctaggctctgggatcccaaatggacccttttaactttctgaagatgggaccgtcccctggaggaaagtcattcctgcctaatccatcgagagaaagaggcttacgaaaaactttgcctctgatgctcagccccacccccaaatagcacacaagcttgttaaccccacctcttacaaaatgtttagattctgtaggtgttaaaagcctttctggaagtattgcattctgccgtgtttataggtgttcactttcctccagagctgattaactactgacatgacttggctttctcatccagaaattatggaaacagggtctgtcagtggcaggaggccgtgctgtgttttacttggatgacacaatgcagtttacttgcctcttcatacccatgcatgctgctcaccctagacaatgacatataagccgtatatagatcaatgtccacatatatatacacacacacatatatatatataaagtgtaacaaggaacactaaaacagtgttgattcttgtctctgaagacaaataattaaaccttttttttcccaactaaagaatggatttaattaaactatgtattgaaaaaaaagtagcctaagtgttagagatggtgaatatattccattttagttaaagaacaaatttcctgaattttaagcattcagtgagctgccaattttgattttgtgttgctctttacccaaattattttttctttgtttttctttttttgggggaggaggggaaaaaagcagcaatactgtgtttggaaattatactctgtatctggttttcctgtgtatgttaaccacttaaatgttattatcctgctttggttttagagtgattgtgaggcattcaatgcaagtatacagttattttctcattaaaatccaatgtgtgttgagtttttataaaaaaaag

SEQ ID NO: 430418 - DNA, 7418 bp, Homo sapiens
ccagaggctgagcccgggcgagcccgccgtgcgcacagctctgcccgccgcccctggagcggatccccagccgtccctgggcgttctcccgggttctagcaaagccccccggggtgcccatcagtttccttgggtgactacagcgtgtgttttttctttcctctttcccctgcctgtgtgcccttctccaggatggcagaggcggaattgcacaaggaaaggctgcaagccatagcagaaaaaagaaagaggcagactgaaatagaaggcaagcgacaacagcttgacgagcagatacttctgctgcagcattccaagtccaaagtgcttcgggagaaatggctgctgcagggcatacccgctggaactgccgaagaggaggaagccaggaggcggcagtctgaagaggatgagttcagagtcaagcaacttgaagataacattcagaggctggagcaagaaatacaaacgctagaaagtgaagagtcccagatatctgccaaagagcaaatcatcctagagaaactgaaggaaacagaaaaatccttcaaggactttcagaagggtttctccagtacggatggagatgcagtaaattacatttcctcccagcttcccgacctgccaatcctctgttcacgaacagcagaaccatcacctgggcaggacgggaccagcagagcggctggagtcgggtgggagaatgtgctgctaaaggaaggtgagtcagcctcgaacgccacagaaacatccggcccagacatgactatcaagaagcctccccagctttctgaggatgatatctggctaaaaagcgagggagacaactatagtgccaccctcctggagcctgctgccagctctctttccccagatcacaaaaacatggaaattgaggtgtctgttgcagaatgtaaaagtgttcctggaatcacctctaccccacatcccatggaccatccctccgctttctattcacccccgcataatggcctccttactgatcaccacgaatccctggataatgatgttgccagagagatccgctatctagatgaggtgctagaggccaactgctgtgattctgctgtggatggaacgtacaatggaacatcctccccagagcctggtgcagtggttctggtgggcggcctaagcccccctgtccacgaggcgacccagccagaacccactgaaagaacagctagccggcaggcacctcctcacatcgagctcagtaatagcagccctgaccccatggcagaggcagaaagaacaaatggccattcccccagccagcctagagatgcgctgggggacagcctgcaggtgcctgtcagccccagctccacaaccagctcacggtgttcttcccgagatggagagttcactctcaccacactgaaaaaggaggccaagtttgagctgcgtgccttccatgaggacaagaagccctccaagctctttgaggatgacgagcatgagaaagaacaatactgcattagaaaagtgaggccttcagaggagatgctggagctggaaaaggagaggagagagctcatccgcagccaggccgtcaagaagaatcctggcattgcagcaaaatggtggaatcccccgcaggaaaaaaccatcgaggagcagctggacgaggaacatctggagtcgcacaaaaagtacaaggagcgcaaagagagaagggcacagcaggaacagttgctgctgcagaagcagttacagcagcagcagcagcagcccccatcgcagctctgcacagcccctgcctcttctcatgaacgcgcaagcatgattgacaaagcaaaggaggacattgtcacagagcagatagatttctctgctgctcgcaaacaatttcagctgatggagaattccaggcaagcggtggccaagggccagagtacacccaggctgttctccatcaagcctttctacaggcctctggggtcagtcaactcagacaagccactgactaatccgagaccaccttctgtcgggggacctccagaagacagtggtgcctcagccgccaagggacagaaatcccccggtgccctggagaccccatcggcagcaggaagccagggcaacacagcctctcaggggaaggaagggccctacagcgagccttctaaacgtgggcccttatctaaactgtgggctgaggatggagaatttacgagcgcccgggctgtcctcactgtggtcaaggatgatgaccatgggattttggatcagttctcaagatctgtcaatgtctccttgacccaagaggagcttgactctggtctggacgaattgtcggtgaggtctcaggataccacagtcctggagaccctatccaatgatttcagcatggacaacatcagtgacagcggggcatccaatgagacaaccaatgccctccaggaaaattcactggctgatttttctctgccccagacaccacaaactgacaacccctcagagggccgaggagaaggcgtctccaagtcatttagtgatcatggtttctattccccttcctccacgctgggggactctccgttggttgatgaccccttggagtatcaggctggcctcctggtgcagaatgccattcaacaagccatagccgagcaggtggataaagctgtgtccaaaaccagcagggatggagcagagcaacagggacctgaagcgactgtagaggaagctgaagctgcggctttcggctcagaaaagcctcagagcatgtttgagccacctcaggtgtcttctcctgttcaagagaaaagggatgtattaccaaagattctgcctgctgaagacagggcgctcagggaaagggggcccccccagccactgccagctgtgcagcccagtggcccgattaacatggaggagaccaggcccgaaggaagctatttcagcaagtactcggaggcagctgagctgagaagcacagcctccctcctggccactcaagaatctgacgtgatggttgggcctttcaagctgaggtccaggaaacagcggactttgtccatgattgaggaagagatccgagcagctcaggaaagggaagaggagctgaagaggcagagacaagtcttgcagagtacgcagagccccaggacaaagaatgccccatcactgccctccagaacatgctacaaaactgctccagggaaaatagagaaagtcaaacctcctccatcccccaccactgaaggccccagcttgcagcctgacttagcccctgaagaggctgccggaacccagcggcccaagaatctgatgcagaccctcatggaagactatgagacacacaaatctaaaaggcgcgagagaatggatgatagtagttacacttctaagttactgtcttgcaaggtgacttccgaggtcctcgaggccacacgggttaatcgaagaaagagcgcactggctttgcgctgggaagcagggatctatgccaaccaggaggaagaagacaacgaataaacttccttcaacccaggaagcgtctttggtgcttgggagaccaagaaaccaagaaattaacaactgaaagcattttaatggactatttattaaagtgcaaacaaactcagcaatccttatgtagaccagaagctgcaatatacaatgatgaaaatgaaacgaaaaggaagtccccccatcagactctggacacccaggaatcaaaagagaaaggacttttttggtgactcaatcccagtgtctggtttggggccaatctacaatggatccaaaaggacaaaacatgttacaagcaaatcaacatagttgctgcaggcggaactgagaccagcctctctgggcgatgaaggacaatggtggtagggccacttagagagcagtagggcccaggctggtgcagcctacatggcacaggatatttccctgcaccagtttcccacctgtcacttgcagcatcagagggtgttgcattaactccattttctccagcagccataaaatgaatggcgtttctctccatatttgcccagaagaggcagttatgattccacttctcctacatttaattatttttaattgagaacaactcatgatcacaattcataaaatccatattttaagacaatagttcttcatgtcacaaacacaatctattctacatgaggaggctgagaaaggggaagagaaaaacaaaccaaatggatgatgttagctttaggatcgtgtctgcttataatattcactgatctgcagtttatgagaacacattttcacagttatgtttcttcataggaaaactatatttagtgggcaacaactatttttatgatgggatgggggagtatatacacgtatagaatctgtacgcgttgaacaacttggttcaagatggtgggggcatttttagagcggcaataattgaaaaaaaaggcgaactctgccttggagaggtagatgataagaaataaaaaggtgtttataactattttgtattataaagtgggccttagagataggaagaagaatgatggattccttttggatcaatcagaaaggaaacacgaaagaaaagtcaggaaggtagagagagaaaaagggagggaaggagaaagaatgggaataaaataaggaggtaagagatactatttttgctgagcaaccagtgtgtttcaggatgatacaaagaaaaatatagaatagaaataagtgcaggcttggaatcagctacaaatcctaaagatggggtgtgtgtggatgtgtgtgtgtgtgtgtgtacaccattgtgtgtttgtaaaatgtgtatgttcatgagtaagggtgtgtgtgtgtgtgtattaaaattccagagtgaccgtggcacttgggtgtacaggtaattcctccagagctgtttgctggcttcaggagtggagtgagaatttcttttttatgaaaagggatataaaggcaccgagctgatgcagtatttgtaatattaagttgacctaacaaggtatttgcatgagtcacaattacaaagttttgagcggttttgtaatttgacatttaggaaagtctcctatttattctcatactttacattcatgcttagtatactatagaggatgccagctttaatctttctgtcatttaaagcaatatgataagggtattcaataattgggtgccctaaatttctggatgagaaaattttcaattctggccatgagaaagaaaaaaaaataaacagccttctttttttttcctttgttttaaaactgtggttttttaaaaaagcaataattaactcagacctcactaaaaatcatttttgtttttatattgttatgtcataagctctattatgttattctaacaagtagcaatttcacaaaatttgtatgtagatgttaacgcacatttcctttgcttcttttattagactagtgttgactttggggggggacatttattcacaaatgagaagtaggcacaaagtaaaaaatggaaccatctactaacaaggatcctttaaaactgccaagggagctctaacttgaagccacatcctacagatggcagcccaaatagcacatgggcaattggcaccatctttatatggttgagtctcctgaatattttgaatgaattctcaacaaaatgtgctagccactggggacgcaaaacaagtaagatccctgttgcaagaaattcattttatagtgagggaggttggcatggagactaaaattctcaggaaaatgagatccgtgttagattagaagtcctgatgtgaaatgggaggactcaggaaggaggatcgtctttacctgaggatttctagccagaggtcccagatgcctgggctgagaacccagcgataagggggcgttcccaaagcagacacagggataagaacagaggaggcagcagcattgcacagccccaggcacagtggcagttaggatggctggagagtaggatagttctatgggttgcccaaaaaatgtgatgcgcttcatgttttctctgactcatggatctggtagagaccatagacatgatatagactaacttccccatttttcacaagaggaaaccatccttatgacttaccttaaagttttttgttctgttttgaaggaaaccatgtgcttcatgaaacctacagttgacaagagaatgtacagctaagagaaaagcttaagaggccacactattcgcggaatggctttagaggcagatgaagtggtctttgaccacagttgattgaaccagagcacttattgcttaaagaataacagagttctagagctgggggttcttgggccatgctccgtgtgtggataaggaaagaaatactgtttctgggactctcccacagtcacaaagctgttttcactgtggcccctacatctcttaacttttgctattactcctatgctgccttccggattactgctgtctatcttcttgctccactcactgaagatcctattataatcccatgaaaatgtaaattacagtttacttgggagagccagattttctctgtgctcttgagttttttattcattcaagaaaccttgggccaccgctttgtacatagcaccgtgctaggctctgggatcccaaatggacccttttaactttctgaagatgggaccgtcccctggaggaaagtcattcctgcctaatccatcgagagaaagaggcttacgaaaaactttgcctctgatgctcagccccacccccaaatagcacacaagcttgttaaccccacctcttacaaaatgtttagattctgtaggtgttaaaagcctttctggaagtattgcattctgccgtgtttataggtgttcactttcctccagagctgattaactactgacatgacttggctttctcatccagaaattatggaaacagggtctgtcagtggcaggaggccgtgctgtgttttacttggatgacacaatgcagtttacttgcctcttcatacccatgcatgctgctcaccctagacaatgacatataagccgtatatagatcaatgtccacatatatatacacacacacatatatatatataaagtgtaacaaggaacactaaaacagtgttgattcttgtctctgaagacaaataattaaaccttttttttcccaactaaagaatggatttaattaaactatgtattgaaaaaaaagtagcctaagtgttagagatggtgaatatattccattttagttaaagaacaaatttcctgaattttaagcattcagtagtgcattgatttgggtgtcttaccaatattttcttgtttctttgggggggggaaagcgcatctggttgcaattccggctgttcggttgtacctaagtttcgctggtaagaggaggcagagtacgcttcctaacaggggttttaaaaaagg

SEQ ID NO: 430419 - DNA, 4323 bp, Homo sapiens
gtaacatgctacaaaactgctccaggaaaatagagaaagtcaaacctcctccatcccccaccactgaaggccccagcttgcagcctgacttagcccctgaagaggctgccggaacccagcggcccaagaatctgatgcagaccctcatggaagactatgagacacacaaatctaaaaggcgcgagagaatggatgatagtagtgtcctcgaggccacacgggttaatcgaagaaagagcgcactggctttgcgctgggaagcagggatctatgccaaccaggaggaagaagacaacgaataaacttccttcaacccaggaagcgtctttggtgcttgggagaccaagaaaccaagaaattaacaactgaaagcattttaatggactatttattaaagtgcaaacaaactcagcaatccttatgtagaccagaagctgcaatatacaatgatgaaaatgaaacgaaaaggaagtccccccatcagactctggacacccaggaatcaaaagagaaaggacttttttggtgactcaatcccagtgtctggtttggggccaatctacaatggatccaaaaggacaaaacatgttacaagcaaatcaacatagttgctgcaggcggaactgagaccagcctctctgggcgatgaaggacaatggtggtagggccacttagagagcagtagggcccaggctggtgcagcctacatggcacaggatatttccctgcaccagtttcccacctgtcacttgcagcatcagagggtgttgcattaactccattttctccagcagccataaaatgaatggcgtttctctccatatttgcccagaagaggcagttatgattccacttctcctacatttaattatttttaattgagaacaactcatgatcacaattcataaaatccatattttaagacaatagttcttcatgtcacaaacacaatctattctacatgaggaggctgagaaaggggaagagaaaaacaaaccaaatggatgatgttagctttaggatcgtgtctgcttataatattcactgatctgcagtttatgagaacacattttcacagttatgtttcttcataggaaaactatatttagtgggcaacaactatttttatgatgggatgggggagtatatacacgtatagaatctgtacgcgttgaacaacttggttcaagatggtgggggcatttttagagcggcaataattgaaaaaaaaggcgaactctgccttggagaggtagatgataagaaataaaaaggtgtttataactattttgtattataaagtgggccttagagataggaagaagaatgatggattccttttggatcaatcagaaaggaaacacgaaagaaaagtcaggaaggtagagagagaaaaagggagggaaggagaaagaatgggaataaaataaggaggtaagagatactatttttgctgagcaaccagtgtgtttcaggatgatacaaagaaaaatatagaatagaaataagtgcaggcttggaatcagctacaaatcctaaagatggggtgtgtgtggatgtgtgtgtgtgtgtgtgtacaccattgtgtgtttgtaaaatgtgtatgttcatgagtaagggtgtgtgtgtgtgtgtattaaaattccagagtgaccgtggcacttgggtgtacaggtaattcctccagagctgtttgctggcttcaggagtggagtgagaatttcttttttatgaaaagggatataaaggcaccgagctgatgcagtatttgtaatattaagttgacctaacaaggtatttgcatgagtcacaattacaaagttttgagcggttttgtaatttgacatttaggaaagtctcctatttattctcatactttacattcatgcttagtatactatagaggatgccagctttaatctttctgtcatttaaagcaatatgataagggtattcaataattgggtgccctaaatttctggatgagaaaattttcaattctggccatgagaaagaaaaaaaaataaacagccttctttttttttcctttgttttaaaactgtggttttttaaaaaagcaataattaactcagacctcactaaaaatcatttttgtttttatattgttatgtcataagctctattatgttattctaacaagtagcaatttcacaaaatttgtatgtagatgttaacgcacatttcctttgcttcttttattagactagtgttgactttggggggggacatttattcacaaatgagaagtaggcacaaagtaaaaaatggaaccatctactaacaaggatcctttaaaactgccaagggagctctaacttgaagccacatcctacagatggcagcccaaatagcacatgggcaattggcaccatctttatatggttgagtctcctgaatattttgaatgaattctcaacaaaatgtgctagccactggggacgcaaaacaagtaagatccctgttgcaagaaattcattttatagtgagggaggttggcatggagactaaaattctcaggaaaatgagatccgtgttagattagaagtcctgatgtgaaatgggaggactcaggaaggaggatcgtctttacctgaggatttctagccagaggtcccagatgcctgggctgagaacccagcgataagggggcgttcccaaagcagacacagggataagaacagaggaggcagcagcattgcacagccccaggcacagtggcagttaggatggctggagagtaggatagttctatgggttgcccaaaaaatgtgatgcgcttcatgttttctctgactcatggatctggtagagaccatagacatgatatagactaacttccccatttttcacaagaggaaaccatccttatgacttaccttaaagttttttgttctgttttgaaggaaaccatgtgcttcatgaaacctacagttgacaagagaatgtacagctaagagaaaagcttaagaggccacactattcgcggaatggctttagaggcagatgaagtggtctttgaccacagttgattgaaccagagcacttattgcttaaagaataacagagttctagagctgggggttcttgggccatgctccgtgtgtggataaggaaagaaatactgtttctgggactctcccacagtcacaaagctgttttcactgtggcccctacatctcttaacttttgctattactcctatgctgccttccggattactgctgtctatcttcttgctccactcactgaagatcctattataatcccatgaaaatgtaaattacagtttacttgggagagccagattttctctgtgctcttgagttttttattcattcaagaaaccttgggccaccgctttgtacatagcaccgtgctaggctctgggatcccaaatggacccttttaactttctgaagatgggaccgtcccctggaggaaagtcattcctgcctaatccatcgagagaaagaggcttacgaaaaactttgcctctgatgctcagccccacccccaaatagcacacaagcttgttaaccccacctcttacaaaatgtttagattctgtaggtgttaaaagcctttctggaagtattgcattctgccgtgtttataggtgttcactttcctccagagctgattaactactgacatgacttggctttctcatccagaaattatggaaacagggtctgtcagtggcaggaggccgtgctgtgttttacttggatgacacaatgcagtttacttgcctcttcatacccatgcatgctgctcaccctagacaatgacatataagccgtatatagatcaatgtccacatatatatacacacacacatatatatatataaagtgtaacaaggaacactaaaacagtgttgattcttgtctctgaagacaaataattaaaccttttttttcccaactaaagaatggatttaattaaactatgtattgaaaaaaaagtagcctaagtgttagagatggtgaatatattccattttagttaaagaacaaatttcctgaattttaagcattcagtgagctgccaattttgattttgtgttgctctttacccaaattattttttctttgtttttctttttttgggggaggaggggaaaaaagcagcaatactgtgtttggaaattatactctgtatctggttttcctgtgtatgttaaccacttaaatgttattatcctgctttggttttagagtgattgtgaggcattcaatgcaagtatacagttattttctcattaaaatccaatgtgtgttgagtttttataaaaaaaag

SEQ ID NO: 430420 - DNA, 413 bp, Homo sapiens
tctggactatctcagccttttattttttctcagaagcacttttagtgtttctgcaagatctcacagtgtacacaggattcgttgccaaataaagcatcattatctcctcactaaatggcatgaagaatatataaattctggaaggacgcatgcctacagaaacaggaattagcagcaactcagaatacttcaacagtgatcctttgccttcaagactaagttaatagagaagatgtttgtaactctggcccaagcttggtctcccagtgtgctgaagctaactccttttagaagcaccactctcatatattaaaatacattgtttgtttgttgttaacttttctgggcttctggaatctaaacttttgcccaaaggctagaatgtgccattttataaaaatagttttcttctg

SEQ ID NO: 430421 - DNA, 5456 bp, Homo sapiens
agcccggaagcggaaactccttggggaaagggcaatcccccgagccggttcccaggccgggtggagaccaactctggggtctgttggtgggagagtggggagcccgtcttctgctgagtgctgccgccccttcccaggacagcggaggtggaacttcgtcgcgctgcaacccccggctcgggatcctggggcgtcctttggcagtcgattgcaccctgcactagagagaagtccaggaatgatatattcttgggctgtatttctctaccctggagttcatccagttcatcccagaaacactgacctgattactgtgacaaagtctgatggatagaccctttctgttgaccttgtggcgtttttctttcatgtggaagttggaagacaaggtgaaaggggccaaaagttacctgctttggtgaataggagtgctctacttggttctcagaacatgggccctcgtttaaagctgcagctgtgatcctcggctgtctgttggcattgacgggacctgatgttttacgttattggtggaatcacagtgtctgtggttgcattcttcttcacaattaagttcctctttgagcttgccgcacgtgtagtcagcttcctccagaatgaggaccgcgagcgccgaggggaccggactatttatgactacgtgcggggaaattacctggatccccggtcttgcaaagtctcctgggattggaaggacccctatgaggtgggccacagcatggccttccgagtgcatttattctataagaacgggcagcctttccctgcacatcggcctgtgggactaagagttcacatctctcatgtcgagctagcagtggaaattccagtgacccaggaagtccttcaggagcccaattccaacgtagtaaaagtggccttcactgtgcgcaaggctgggcgttatgaaatcacagtgaagcttggtggattaaatgtggcatatagtccctactacaaaatttttcaacctggaatggtggttccttctaagaccaaaattgtgtgccacttttctactcttgtattgacctgtgggcagccgcacacccttcaaatagtaccccgagatgagtatgataatcccaccaacaattccatgtccttgagagatgagcacaattacaccttgtccattcatgagctcggccctcaagaagaagagagtactggtgtctcatttgagaaatcagtaacatccaacaggcagactttccaggtgttcttgcgactcaccctgcattctcgaggctgcttccatgcttgcatttcataccaaaatcagccaatcaataatggtgaatttgacattattgtcctaagtgaggatgagaagaatatcgtcgaacgcaatgtgtccacttcaggcgtgagcatttactttgaggcttatctttataatgctaccaactgtagcagcactccatggcacctgccacccatgcacatgacctcttcccagcgccggccatccactgctgttgacgaggaagatgaagactcgccctctgagtgccacacccctgagaaggtgaagaaaccgaagaaggtgtactgctatgtgtcaccaaagcaattctcagtgaaggagttctacctgaagatcatcccctggcgcctttacaccttccgagtgtgtccaggaacaaaattttcataccttggtcctgaccctgtccataagctgctcacactggtggtggatgatggcattcaacctcctgtggagctcagctgtaaggagaggaacattctagcagccacttttatccgctccctgcataagaacataggaggctctgagacctttcaggacaaggtgaactttttccagcgagagcttcggcaggtacatatgaaaagaccacattccaaagtcaccctgaaggtcagcagacatgccttgttggaatcgtctctgaaagccactcggaatttctccatctcagattggagcaagaactttgaggttgttttccaggatgaagaagctctggactggggagggcctcgccgggaatggtttgagctaatctgcaaagcactatttgataccaccaatcagctcttcacccggttcagtgacaacaaccaagcattagtgcatcccaaccctaatcgccccgctcatctgcgcctgaaaatgtatgagtttgcgggacggctcgtgggcaagtgtctctatgagtcctctctaggaggagcctacaagcagttggtccgagctcgcttcacccgctctttcctggcccaaatcataggactgcgtatgcattacaagtactttgaaacagatgacccagaattctacaaatctaaagtttgttttatcctcaacaatgacatgagtgagatggagctggtctttgcagaagagaaatataataaatcaggtcaattggataaggttgtagaactcatgacaggtggagctcaaactccagtcaccaatgcgaataaaatcttctatttaaatttgctggcccaatatcggctggccagtcaagtgaaagaggaggtggaacatttcctaaaaggcctgaatgaattggtccctgagaaccttttggctatttttgatgagaatgagcttgagctgctgatgtgtgggactggagacatcagtgtgtctgacttcaaagcccatgcagtagttgttggtggctcatggcatttcagagaaaaggtcatgaggtggttttggactgtggtttccagtctgacccaggaggagttggctcggctacttcagttcacaacaggctcctctcagctaccacctggaggctttgccgccctctgtccctcatttcagattattgccgctccgacccatagcacgctgcctactgcacacacatgttttaaccagctgtgcctccctacatatgactcctatgaagaggtgcacaggatgctgcagctggccatcagcgagggttgcgagggctttggcatgctctgaccactctcctgtcatccagttggctcccatgctctctggagcttctgggcgcaagttacagacatcataaccactgatcctaacacacataaccatcagccagaagatgccgcatgctcccctgtgtctggaggattttgtcacctacaagccttgtctttacctcacctgctccctgcccatatctaccacaggccactttggcatggtatgtaagctgagctcttcattctgtcatgagaagaggaccatgctgctatcatttatttggtcctttgaagatctcagtagctgagggagatggcacacggggctcagccctgttgggaaactggtgtggagacccttaaatccacactgtgctccaaaactccctctgctgatactccttggagacaccctctttggccctcactacttgaccagactggtacttgagtccttctcatgggtggggtgattgcctcttctcatcaggagccaggagagagggggacagataggaggtggcccataggagcagtcccgctgcacaatggtaggcataggccatggcactggactgcctctaaggactgctaaaaagaatatttttttgtggtgtcagaactggaaaaagcactttcccttcgggcatttctggaaatgattattaatccacaaagaagaactctgtaagctttttcttgaattgtagccagtgagaaaagcagatagactgaagaatatgaaggatagctgagctgtagcctccagagtggggcatgcctaggcatatggctggcttggagactactgatgcttttccctgagtttgttattggcactgaagtatggccggcttgggccactgacttccccattatgtagtctgctaaaagctggggatcctttagcattctactgaagaaaattttgtagcaaaagattagaacagtaagaatagtatgccagcaatccctgattctctctctgcttggtgttctctggcagcactaagacaaaggaacagggactaggagtttacgtgcttatcacaggtccttggcgtcaggacactagggatgaacatggaggtgatatgttacacagtaaacacctgccaacccctgtactcccctttgctccatcagttatcaggaaggagaactaaggagggaggaagcttattaggttcactgttgaatgatgattgaagagtacctgctgctgtatcttggaagatgacaacatcctttttcattactgtttgattgaaaataatttcaagattcaaaatctcattgacttcccaaatttgtgtttttaagaaggctttgctgcaagctaccattcccaatggggcagtcaactctgagaatattacaagccatctttattgccaaaaccagcaagtacacagagtcctgaaacaaggcaggactttggcaatgccttggcctcctggaagcatgtctgagccctcctgttcgcagggatcatgaggaacaagccctcctgagctgctacagttcctgcctgacctcagtctttcgcagtcatcatttgtcctttcttggcacatgggtgctgacctcactcatccttggggtccgggatccagcatcagggtctctataccccaggatcctccatgccacatggtcactgctctcctcagggaccaggacaaggtgctgctgcttgcccaaatgttttcccatgggatatgtaccggaaggtttatcaccaccctgggaaacataatgctgccccttgggcccagaaaggggtttccagctgggggcacgtggactggttctgctgtttttggcagtcgcttttctgaattctcccctccggcagccttccagagactgatcctggagattgagttgattgtcttggctagacctgtcattttaagctctagtcatagcactttttcagagcatcttaggcaccattgcaacccaaccagggaagctgcatccctgtggtggtccttaggcaccagtctttgttaaacaaaaccctttggcactattgtggttttctattctctgtctgaactctattcaaaagtatctttgctctcttgggccttttcttttactgttttgttttttttttctaatcctgctttcatactagccagtgtggggaaaaggtacaatatgtcaaagagatgagagagtgttatttcttgggcaattttctattagtgtttcttattttggccagttcttttatttatgtccttgtgacccaggtacttggggggccagctacccttctggccttttagcgtctttgaaggagaccagacatgagtgaatacctaggagagtgtcagcatgtttctggaaaattggcagagaccaagccctgctgcagattcgtcaggccaggtgaaagggccaggcagttgcagctgatgatgtaaatattttgtacagtagataaataaatgtttaaaagaaaaaaaaaa

SEQ ID NO: 430422 - DNA, 555 bp, Homo sapiens
attaatccacaaagaagaactctgtaagctttttcttgaattgtagccagtgagaaaagcagatagactgaagaatatgaaggatagctgtgtctggaggattttgtcacctacaagccttgtctttacctcacctgctccctgcccatatctaccacaggccactttggcatggtatgtaagctgagctcttcattctgtcatgagaagaggaccatgctgctatcatttatttggtcctttgaagatctcagtagctgagggagatggcacacggggctcagccctgttgggaaactggtgtggagacccttaaatccacactgtgctccaaaactccctctgctgatactccttggagacaccctctttggccctcactacttgaccagaatgagtgaatacctaggagagtgtcagcatgtttctggaaaattggcagagaccaagccctgctgcagattcgtcaggccaggtgaaagggccaggcagttgcagctgatgatgtaaatattttgtacagtagataaataaatgtttaaaagaaaaaaaaaa

SEQ ID NO: 430423 - DNA, 244 bp, Homo sapiens
tcaaagacgctaaaaggccagaagggtagctggccccccaagtacctgggtcacaaggacataaataaaagaattggccaaaatgagtgaatacctaggagagtgtcagcatgtttctggaaaattggcagagaccaagccctgctgcagattcgtcaggccaggtgaaagggccaggcagttgcagctgatgatgtaaatattttgtacagtagataaataaatgtttaaaagaaaaaaaaaa

SEQ ID NO: 430424 - DNA, 254 bp, Homo sapiens
agcccggaagcggaaactccttggggaaagggcaatcccccgagccggttcccaggccgggtggagaccaactctggggtctgttggtgggagagtggggagcccgtcttctgctgagtgctgccgccccttcccaggacagcggaggtggaacttcgtcgcgctgcaacccccggctcggagatgggatctcactatgttacccagattggtcttgaactcctgggcgcaagccatcctcccacctcagcctc

SEQ ID NO: 430425 - DNA, 5380 bp, Homo sapiens
agcccggaagcggaaactccttggggaaagggcaatcccccgagccggttcccaggccgggtggagaccaactctggggtctgttggtgggagagtggggagcccgtcttctgctgagtgctgccgccccttcccaggacagcggaggtggaacttcgtcgcgctgcaacccccggctcgggatcctggggcgtcctttggcagtcgattgcaccctgcactagagagaagtccaggaatgatatattcttgggctgtatttctctaccctggagttcatccagttcatcccagaaacactgacctgattactgtgacaaagtctgatggatagaccctttctgttgaccttgtggcgtttttctttcatgtggaagttggaagacaaggtgaaaggggccaaaagttacctgctttggtgaataggagtgctctacttggttctcagaacatgggccctcgtttaaagctgcagctgtgatcctcggctgtctgttggcattgacgggacctgatgttttacgttattgttattctataagaacgggcagcctttccctgcacatcggcctgtgggactaagagttcacatctctcatgtcgagctagcagtggaaattccagtgacccaggaagtccttcaggagcccaattccaacgtagtaaaagtggccttcactgtgcgcaaggctgggcgttatgaaatcacagtgaagcttggtggattaaatgtggcatatagtccctactacaaaatttttcaacctggaatagggtctcactatgttgcccagggtggtctcgaactcctggactcaagtaatcttcctgctttggccttccaaagtgttgggattacaggcgtgagccaagtcacacagcctgattactgtagctcttataataagtcttgaaattggaatggtggttccttctaagaccaaaattgtgtgccacttttctactcttgtattgacctgtgggcagccgcacacccttcaaatagtaccccgagatgagtatgataatcccaccaacaattccatgtccttgagagatgagcacaattacaccttgtccattcatgagctcggccctcaagaagaagagagtactggtgtctcatttgagaaatcagtaacatccaacaggcagactttccaggtgttcttgcgactcaccctgcattctcgaggctgcttccatgcttgcatttcataccaaaatcagccaatcaataatggtgaatttgacattattgtcctaagtgaggatgagaagaatatcgtcgaacgcaatgtgtccacttcaggcgtgagcatttactttgaggcttatctttataatgctaccaactgtagcagcactccatggcacctgccacccatgcacatgacctcttcccagcgccggccatccactgctgttgacgaggaagatgaagactcgccctctgagtgccacacccctgagaaggtgaagaaaccgaagaaggtgtactgctatgtgtcaccaaagcaattctcagtgaaggagttctacctgaagatcatcccctggcgcctttacaccttccgagtgtgtccaggaacaaaattttcataccttggtcctgaccctgtccataagctgctcacactggtggtggatgatggcattcaacctcctgtggagctcagctgtaaggagaggaacattctagcagccacttttatccgctccctgcataagaacataggaggctctgagacctttcaggacaaggtgaactttttccagcgagagcttcggcaggtacatatgaaaagaccacattccaaagtcaccctgaaggtcagcagacatgccttgttggaatcgtctctgaaagccactcggaatttctccatctcagattggagcaagaactttgaggttgttttccaggatgaagaagctctggactggggagggcctcgccgggaatggtttgagctaatctgcaaagcactatttgataccaccaatcagctcttcacccggttcagtgacaacaaccaagcattagtgcatcccaaccctaatcgccccgctcatctgcgcctgaaaatgtatgagtttgcgggacggctcgtgggcaagtgtctctatgagtcctctctaggaggagcctacaagcagttggtccgagctcgcttcacccgctctttcctggcccaaatcataggactgcgtatgcattacaagtactttgaaacagatgacccagaattctacaaatctaaagtttgttttatcctcaacaatgacatgagtgagatggagctggtctttgcagaagagaaatataataaatcaggtcaattggataaggttgtagaactcatgacaggtggagctcaaactccagtcaccaatgcgaataaaatcttctatttaaatttgctggcccaatatcggctggccagtcaagtgaaagaggaggtggaacatttcctaaaaggcctgaatgaattggtccctgagaaccttttggctatttttgatgagaatgagcttgagctgctgatgtgtgggactggagacatcagtgtgtctgacttcaaagcccatgcagtagttgttggtggctcatggcatttcagagaaaaggtcatgaggtggttttggactgtggtttccagtctgacccaggaggagttggctcggctacttcagttcacaacaggctcctctcagctaccacctggaggctttgccgccctctgtccctcatttcagattattgccgctccgacccatagcacgctgcctactgcacacacatgttttaaccagctgtgcctccctacatatgactcctatgaagaggtgcacaggatgctgcagctggccatcagcgagggttgcgagggctttggcatgctctgaccactctcctgtcatccagttggctcccatgctctctggagcttctgggcgcaagttacagacatcataaccactgatcctaacacacataaccatcagccagaagatgccgcatgctcccctgtgtctggaggattttgtcacctacaagccttgtctttacctcacctgctccctgcccatatctaccacaggccactttggcatggtatgtaagctgagctcttcattctgtcatgagaagaggaccatgctgctatcatttatttggtcctttgaagatctcagtagctgagggagatggcacacggggctcagccctgttgggaaactggtgtggagacccttaaatccacactgtgctccaaaactccctctgctgatactccttggagacaccctctttggccctcactacttgaccagactggtacttgagtccttctcatgggtggggtgattgcctcttctcatcaggagccaggagagagggggacagataggaggtggcccataggagcagtcccgctgcacaatggtaggcataggccatggcactggactgcctctaaggactgctaaaaagaatatttttttgtggtgtcagaactggaaaaagcactttcccttcgggcatttctggaaatgattattaatccacaaagaagaactctgtaagctttttcttgaattgtagccagtgagaaaagcagatagactgaagaatatgaaggatagctgagctgtagcctccagagtggggcatgcctaggcatatggctggcttggagactactgatgcttttccctgagtttgttattggcactgaagtatggccggcttgggccactgacttccccattatgtagtctgctaaaagctggggatcctttagcattctactgaagaaaattttgtagcaaaagattagaacagtaagaatagtatgccagcaatccctgattctctctctgcttggtgttctctggcagcactaagacaaaggaacagggactaggagtttacgtgcttatcacaggtccttggcgtcaggacactagggatgaacatggaggtgatatgttacacagtaaacacctgccaacccctgtactcccctttgctccatcagttatcaggaaggagaactaaggagggaggaagcttattaggttcactgttgaatgatgattgaagagtacctgctgctgtatcttggaagatgacaacatcctttttcattactgtttgattgaaaataatttcaagattcaaaatctcattgacttcccaaatttgtgtttttaagaaggctttgctgcaagctaccattcccaatggggcagtcaactctgagaatattacaagccatctttattgccaaaaccagcaagtacacagagtcctgaaacaaggcaggactttggcaatgccttggcctcctggaagcatgtctgagccctcctgttcgcagggatcatgaggaacaagccctcctgagctgctacagttcctgcctgacctcagtctttcgcagtcatcatttgtcctttcttggcacatgggtgctgacctcactcatccttggggtccgggatccagcatcagggtctctataccccaggatcctccatgccacatggtcactgctctcctcagggaccaggacaaggtgctgctgcttgcccaaatgttttcccatgggatatgtaccggaaggtttatcaccaccctgggaaacataatgctgccccttgggcccagaaaggggtttccagctgggggcacgtggactggttctgctgtttttggcagtcgcttttctgaattctcccctccggcagccttccagagactgatcctggagattgagttgattgtcttggctagacctgtcattttaagctctagtcatagcactttttcagagcatcttaggcaccattgcaacccaaccagggaagctgcatccctgtggtggtccttaggcaccagtctttgttaaacaaaaccctttggcactattgtggttttctattctctgtctgaactctattcaaaagtatctttgctctcttgggccttttcttttactgttttgttttttttttctaatcctgctttcatactagccagtgtggggaaaaggtacaatatgtcaaagagatgagagagtgttatttcttgggcaattttctattagtgtttcttattttggccagttcttttatttatgtccttgtgacccaggtacttggggggccagctacccttctggccttttagcgtctttgaaggagaccagacatgagtgaatacctaggagagtgtcagcatgtttctggaaaattggcagagaccaagccctgctgcagattcgtcaggccaggtgaaagggccaggcagttgcagctgatgatgtaaatattttgtacagtagataaataaatgtttaaaagaaaaaaaaaa

SEQ ID NO: 430426 - DNA, 5187 bp, Homo sapiens
agcccggaagcggaaactccttggggaaagggcaatcccccgagccggttcccaggccgggtggagaccaactctggggtctgttggtgggagagtggggagcccgtcttctgctgagtgctgccgccccttcccaggacagcggaggtggaacttcgtcgcgctgcaacccccggctcgggatcctggggcgtcctttggcagtcgattgcaccctgcactagagagaagtccaggaatgatatattcttgggctgtatttctctaccctggagttcatccagttcatcccagaaacactgacctgattactgtgacaaagtctgatggatagaccctttctgttgaccttgtggcgtttttctttcatgtggaagttggaagacaaggtgaaaggggccaaaagttacctgctttggtgaataggagtgctctacttggttctcagaacatgggccctcgtttaaagctgcagctgtgatcctcggctgtctgttggcattgacgggacctgatgttttacgttattgttattctataagaacgggcagcctttccctgcacatcggcctgtgggactaagagttcacatctctcatgtcgagctagcagtggaaattccagtgacccaggaagtccttcaggagcccaattccaacgtagtaaaagtggccttcactgtgcgcaaggctgggcgttatgaaatcacagtgaagcttggtggattaaatgtggcatatagtccctactacaaaatttttcaacctggaatggtggttccttctaagaccaaaattgtgtgccacttttctactcttgtattgacctgtgggcagccgcacacccttcaaatagtaccccgagatgagtatgataatcccaccaacaattccatgtccttgagagatgagcacaattacaccttgtccattcatgagctcggccctcaagaagaagagagtactggtgtctcatttgagaaatcagtaacatccaacaggcagactttccaggtgttcttgcgactcaccctgcattctcgaggctgcttccatgcttgcatttcataccaaaatcagccaatcaataatggtgaatttgacattattgtcctaagtgaggatgagaagaatatcgtcgaacgcaatgtgtccacttcaggcgtgagcatttactttgaggcttatctttataatgctaccaactgtagcagcactccatggcacctgccacccatgcacatgacctcttcccagcgccggccatccactgctgttgacgaggaagatgaagactcgccctctgagtgccacacccctgagaagcaattctcagtgaaggagttctacctgaagatcatcccctggcgcctttacaccttccgagtgtgtccaggaacaaaattttcataccttggtcctgaccctgtccataagctgctcacactggtggtggatgatggcattcaacctcctgtggagctcagctgtaaggagaggaacattctagcagccacttttatccgctccctgcataagaacataggaggctctgagacctttcaggacaaggtgaactttttccagcgagagcttcggcaggtacatatgaaaagaccacattccaaagtcaccctgaaggtcagcagacatgccttgttggaatcgtctctgaaagccactcggaatttctccatctcagattggagcaagaactttgaggttgttttccaggatgaagaagctctggactggggagggcctcgccgggaatggtttgagctaatctgcaaagcactatttgataccaccaatcagctcttcacccggttcagtgacaacaaccaagcattagtgcatcccaaccctaatcgccccgctcatctgcgcctgaaaatgtatgagtttgcgggacggctcgtgggcaagtgtctctatgagtcctctctaggaggagcctacaagcagttggtccgagctcgcttcacccgctctttcctggcccaaatcataggactgcgtatgcattacaagtactttgaaacagatgacccagaattctacaaatctaaagtttgttttatcctcaacaatgacatgagtgagatggagctggtctttgcagaagagaaatataataaatcaggtcaattggataaggttgtagaactcatgacaggtggagctcaaactccagtcaccaatgcgaataaaatcttctatttaaatttgctggcccaatatcggctggccagtcaagtgaaagaggaggtggaacatttcctaaaaggcctgaatgaattggtccctgagaaccttttggctatttttgatgagaatgagcttgagctgctgatgtgtgggactggagacatcagtgtgtctgacttcaaagcccatgcagtagttgttggtggctcatggcatttcagagaaaaggtcatgaggtggttttggactgtggtttccagtctgacccaggaggagttggctcggctacttcagttcacaacaggctcctctcagctaccacctggaggctttgccgccctctgtccctcatttcagattattgccgctccgacccatagcacgctgcctactgcacacacatgttttaaccagctgtgcctccctacatatgactcctatgaagaggtgcacaggatgctgcagctggccatcagcgagggttgcgagggctttggcatgctctgaccactctcctgtcatccagttggctcccatgctctctggagcttctgggcgcaagttacagacatcataaccactgatcctaacacacataaccatcagccagaagatgccgcatgctcccctgtgtctggaggattttgtcacctacaagccttgtctttacctcacctgctccctgcccatatctaccacaggccactttggcatggtatgtaagctgagctcttcattctgtcatgagaagaggaccatgctgctatcatttatttggtcctttgaagatctcagtagctgagggagatggcacacggggctcagccctgttgggaaactggtgtggagacccttaaatccacactgtgctccaaaactccctctgctgatactccttggagacaccctctttggccctcactacttgaccagactggtacttgagtccttctcatgggtggggtgattgcctcttctcatcaggagccaggagagagggggacagataggaggtggcccataggagcagtcccgctgcacaatggtaggcataggccatggcactggactgcctctaaggactgctaaaaagaatatttttttgtggtgtcagaactggaaaaagcactttcccttcgggcatttctggaaatgattattaatccacaaagaagaactctgtaagctttttcttgaattgtagccagtgagaaaagcagatagactgaagaatatgaaggatagctgagctgtagcctccagagtggggcatgcctaggcatatggctggcttggagactactgatgcttttccctgagtttgttattggcactgaagtatggccggcttgggccactgacttccccattatgtagtctgctaaaagctggggatcctttagcattctactgaagaaaattttgtagcaaaagattagaacagtaagaatagtatgccagcaatccctgattctctctctgcttggtgttctctggcagcactaagacaaaggaacagggactaggagtttacgtgcttatcacaggtccttggcgtcaggacactagggatgaacatggaggtgatatgttacacagtaaacacctgccaacccctgtactcccctttgctccatcagttatcaggaaggagaactaaggagggaggaagcttattaggttcactgttgaatgatgattgaagagtacctgctgctgtatcttggaagatgacaacatcctttttcattactgtttgattgaaaataatttcaagattcaaaatctcattgacttcccaaatttgtgtttttaagaaggctttgctgcaagctaccattcccaatggggcagtcaactctgagaatattacaagccatctttattgccaaaaccagcaagtacacagagtcctgaaacaaggcaggactttggcaatgccttggcctcctggaagcatgtctgagccctcctgttcgcagggatcatgaggaacaagccctcctgagctgctacagttcctgcctgacctcagtctttcgcagtcatcatttgtcctttcttggcacatgggtgctgacctcactcatccttggggtccgggatccagcatcagggtctctataccccaggatcctccatgccacatggtcactgctctcctcagggaccaggacaaggtgctgctgcttgcccaaatgttttcccatgggatatgtaccggaaggtttatcaccaccctgggaaacataatgctgccccttgggcccagaaaggggtttccagctgggggcacgtggactggttctgctgtttttggcagtcgcttttctgaattctcccctccggcagccttccagagactgatcctggagattgagttgattgtcttggctagacctgtcattttaagctctagtcatagcactttttcagagcatcttaggcaccattgcaacccaaccagggaagctgcatccctgtggtggtccttaggcaccagtctttgttaaacaaaaccctttggcactattgtggttttctattctctgtctgaactctattcaaaagtatctttgctctcttgggccttttcttttactgttttgttttttttttctaatcctgctttcatactagccagtgtggggaaaaggtacaatatgtcaaagagatgagagagtgttatttcttgggcaattttctattagtgtttcttattttggccagttcttttatttatgtccttgtgacccaggtacttggggggccagctacccttctggccttttagcgtctttgaaggagaccagacatgagtgaatacctaggagagtgtcagcatgtttctggaaaattggcagagaccaagccctgctgcagattcgtcaggccaggtgaaagggccaggcagttgcagctgatgatgtaaatattttgtacagtagataaataaatgtttaaaagaaaaaaaaaa

SEQ ID NO: 430427 - DNA, 2946 bp, Homo sapiens
gagtaaacacctgccaacccctgtactcccctttgctccatcagttatcaggaaggagaactaaggagggaggaagcttattaggttcactgttgaatgagcttgagctgctgatgtgtgggactggagacatcagtgtgtctgacttcaaagcccatgcagtagttgttggtggctcatggcatttcagagaaaaggtcatgaggtggttttggactgtggtttccagtctgacccaggaggagttggctcggctacttcagttcacaacaggctcctctcagctaccacctggaggctttgccgccctctgtccctcatttcagattattgccgctccgacccatagcacgctgcctactgcacacacatgttttaaccagctgtgcctccctacatatgactcctatgaagaggtgcacaggatgctgcagctggccatcagcgagggttgcgagggctttggcatgctctgaccactctcctgtcatccagttggctcccatgctctctggagcttctgggcgcaagttacagacatcataaccactgatcctaacacacataaccatcagccagaagatgccgcatgctcccctgtgtctggaggattttgtcacctacaagccttgtctttacctcacctgctccctgcccatatctaccacaggccactttggcatggtatgtaagctgagctcttcattctgtcatgagaagaggaccatgctgctatcatttatttggtcctttgaagatctcagtagctgagggagatggcacacggggctcagccctgttgggaaactggtgtggagacccttaaatccacactgtgctccaaaactccctctgctgatactccttggagacaccctctttggccctcactacttgaccagactggtacttgagtccttctcatgggtggggtgattgcctcttctcatcaggagccaggagagagggggacagataggaggtggcccataggagcagtcccgctgcacaatggtaggcataggccatggcactggactgcctctaaggactgctaaaaagaatatttttttgtggtgtcagaactggaaaaagcactttcccttcgggcatttctggaaatgattattaatccacaaagaagaactctgtaagctttttcttgaattgtagccagtgagaaaagcagatagactgaagaatatgaaggatagctgagctgtagcctccagagtggggcatgcctaggcatatggctggcttggagactactgatgcttttccctgagtttgttattggcactgaagtatggccggcttgggccactgacttccccattatgtagtctgctaaaagctggggatcctttagcattctactgaagaaaattttgtagcaaaagattagaacagtaagaatagtatgccagcaatccctgattctctctctgcttggtgttctctggcagcactaagacaaaggaacagggactaggagtttacgtgcttatcacaggtccttggcgtcaggacactagggatgaacatggaggtgatatgttacacagtaaacacctgccaacccctgtactcccctttgctccatcagttatcaggaaggagaactaaggagggaggaagcttattaggttcactgttgaatgatgattgaagagtacctgctgctgtatcttggaagatgacaacatcctttttcattactgtttgattgaaaataatttcaagattcaaaatctcattgacttcccaaatttgtgtttttaagaaggctttgctgcaagctaccattcccaatggggcagtcaactctgagaatattacaagccatctttattgccaaaaccagcaagtacacagagtcctgaaacaaggcaggactttggcaatgccttggcctcctggaagcatgtctgagccctcctgttcgcagggatcatgaggaacaagccctcctgagctgctacagttcctgcctgacctcagtctttcgcagtcatcatttgtcctttcttggcacatgggtgctgacctcactcatccttggggtccgggatccagcatcagggtctctataccccaggatcctccatgccacatggtcactgctctcctcagggaccaggacaaggtgctgctgcttgcccaaatgttttcccatgggatatgtaccggaaggtttatcaccaccctgggaaacataatgctgccccttgggcccagaaaggggtttccagctgggggcacgtggactggttctgctgtttttggcagtcgcttttctgaattctcccctccggcagccttccagagactgatcctggagattgagttgattgtcttggctagacctgtcattttaagctctagtcatagcactttttcagagcatcttaggcaccattgcaacccaaccagggaagctgcatccctgtggtggtccttaggcaccagtctttgttaaacaaaaccctttggcactattgtggttttctattctctgtctgaactctattcaaaagtatctttgctctcttgggccttttcttttactgttttgttttttttttctaatcctgctttcatactagccagtgtggggaaaaggtacaatatgtcaaagagatgagagagtgttatttcttgggcaattttctattagtgtttcttattttggccagttcttttatttatgtccttgtgacccaggtacttggggggccagctacccttctggccttttagcgtctttgaaggagaccagacatgagtgaatacctaggagagtgtcagcatgtttctggaaaattggcagagaccaagccctgctgcagattcgtcaggccaggtgaaagggccaggcagttgcagctgatgatgtaaatattttgtacagtagataaataaatgtttaaaagaaaaaaaaaa

SEQ ID NO: 430428 - DNA, 2944 bp, Homo sapiens
catagtaacaccttaccatctttttccagctgctgatgtgtgggactggagacatcagtgtgtctgacttcaaagcccatgcagtagttgttggtggctcatggcatttcagagaaaaggtcatgaggtggttttggactgtggtttccagtctgacccaggaggagttggctcggctacttcagttcacaacaggctcctctcagctaccacctggaggctttgccgccctctgtccctcatttcagattattgccgctccgacccatagcacgctgcctactgcacacacatggtaggtatctgcccgcctgatgcatgcccagtgtttttggtggtatgaagttaatcacttctccttgcccttccagttttaaccagctgtgcctccctacatatgactcctatgaagaggtgcacaggatgctgcagctggccatcagcgagggttgcgagggctttggcatgctctgaccactctcctgtcatccagttggctcccatgctctctggagcttctgggcgcaagttacagacatcataaccactgatcctaacacacataaccatcagccagaagatgccgcatgctcccctgtgtctggaggattttgtcacctacaagccttgtctttacctcacctgctccctgcccatatctaccacaggccactttggcatggtatgtaagctgagctcttcattctgtcatgagaagaggaccatgctgctatcatttatttggtcctttgaagatctcagtagctgagggagatggcacacggggctcagccctgttgggaaactggtgtggagacccttaaatccacactgtgctccaaaactccctctgctgatactccttggagacaccctctttggccctcactacttgaccagactggtacttgagtccttctcatgggtggggtgattgcctcttctcatcaggagccaggagagagggggacagataggaggtggcccataggagcagtcccgctgcacaatggtaggcataggccatggcactggactgcctctaaggactgctaaaaagaatatttttttgtggtgtcagaactggaaaaagcactttcccttcgggcatttctggaaatgattattaatccacaaagaagaactctgtaagctttttcttgaattgtagccagtgagaaaagcagatagactgaagaatatgaaggatagctgagctgtagcctccagagtggggcatgcctaggcatatggctggcttggagactactgatgcttttccctgagtttgttattggcactgaagtatggccggcttgggccactgacttccccattatgtagtctgctaaaagctggggatcctttagcattctactgaagaaaattttgtagcaaaagattagaacagtaagaatagtatgccagcaatccctgattctctctctgcttggtgttctctggcagcactaagacaaaggaacagggactaggagtttacgtgcttatcacaggtccttggcgtcaggacactagggatgaacatggaggtgatatgttacacagtaaacacctgccaacccctgtactcccctttgctccatcagttatcaggaaggagaactaaggagggaggaagcttattaggttcactgttgaatgatgattgaagagtacctgctgctgtatcttggaagatgacaacatcctttttcattactgtttgattgaaaataatttcaagattcaaaatctcattgacttcccaaatttgtgtttttaagaaggctttgctgcaagctaccattcccaatggggcagtcaactctgagaatattacaagccatctttattgccaaaaccagcaagtacacagagtcctgaaacaaggcaggactttggcaatgccttggcctcctggaagcatgtctgagccctcctgttcgcagggatcatgaggaacaagccctcctgagctgctacagttcctgcctgacctcagtctttcgcagtcatcatttgtcctttcttggcacatgggtgctgacctcactcatccttggggtccgggatccagcatcagggtctctataccccaggatcctccatgccacatggtcactgctctcctcagggaccaggacaaggtgctgctgcttgcccaaatgttttcccatgggatatgtaccggaaggtttatcaccaccctgggaaacataatgctgccccttgggcccagaaaggggtttccagctgggggcacgtggactggttctgctgtttttggcagtcgcttttctgaattctcccctccggcagccttccagagactgatcctggagattgagttgattgtcttggctagacctgtcattttaagctctagtcatagcactttttcagagcatcttaggcaccattgcaacccaaccagggaagctgcatccctgtggtggtccttaggcaccagtctttgttaaacaaaaccctttggcactattgtggttttctattctctgtctgaactctattcaaaagtatctttgctctcttgggccttttcttttactgttttgttttttttttctaatcctgctttcatactagccagtgtggggaaaaggtacaatatgtcaaagagatgagagagtgttatttcttgggcaattttctattagtgtttcttattttggccagttcttttatttatgtccttgtgacccaggtacttggggggccagctacccttctggccttttagcgtctttgaaggagaccagacatgagtgaatacctaggagagtgtcagcatgtttctggaaaattggcagagaccaagccctgctgcagattcgtcaggccaggtgaaagggccaggcagttgcagctgatgatgtaaatattttgtacagtagataaataaatgtttaaaagaaaaaaaaaa

SEQ ID NO: 430429 - DNA, 1925 bp, Homo sapiens
agcccggaagcggaaactccttggggaaagggcaatcccccgagccggttcccaggccgggtggagaccaactctggggtctgttggtgggagagtggggagcccgtcttctgctgagtgctgccgccccttcccaggacagcggaggtggaacttcgtcgcgctgcaacccccggctcgggatcctggggcgtcctttggcagtcgattgcaccctgcactagagagaagtccaggaatgatatattcttgggctgtatttctctaccctggagttcatccagttcatcccagaaacactgacctgattactgtgacaaagtctgatggatagaccctttctgttgaccttgtggcgtttttctttcatgtggaagttggaagacaaggtgaaaggggccaaaagttacctgctttggtgaataggagtgctctacttggttctcagaacatgggccctcgtttaaagctgcagctgtgatcctcggctgtctgttggcattgacgggacctgatgttttacgttattgttattctataagaacgggcagcctttccctgcacatcggcctgtgggactaagagttcacatctctcatgtcgagctagcagtggaaattccagtgacccaggaagtccttcaggagcccaattccaacgtagtaaaagtggccttcactgtgcgcaaggctgggcgttatgaaatcacagtgaagcttggtggattaaatgtggcatatagtccctactacaaaatttttcaacctggaatggtggttccttctaagaccaaaattgtgtgccacttttctactcttgtattgacctgtgggcagccgcacacccttcaaatagtaccccgagatgagtatgataatcccaccaacaattccatgtccttgagagatgagcacaattacaccttgtccattcatgagctcggccctcaagaagaagagagtactggtgtctcatttgagaaatcagtaacatccaacaggcagactttccaggtgttcttgcgactcaccctgcattctcgaggctgcttccatgcttgcatttcataccaaaatcagccaatcaataatggtgaatttgacattattgtcctaagtgaggatgagaagaatatcgtcgaacgcaatgtgtccacttcaggcgtgagcatttactttgaggcttatctttataatgctaccaactgtagcagcactccatggcacctgccacccatgcacatgacctcttcccagcgccggccatccactgctgttgacgaggaagatgaagactcgccctctgagtgccacacccctgagaaggtgaagaaaccgaagaaggtgtactgctatgtgtcaccaaaggttggaccttccattctcgacataaaatccccctgcttgaacctgtgtgtaattggtatttggtagcagaaaccacaaagtaacagtctgagaatcaggggcaagattgttaactagttgtatagaaagccactttcaactgttaaaaatttcttgctagcataaaaattactgttggcttcttgtgctgtgtcaaaacaatttgatcttttgttctgtgattcatggaaaccacagtaaatggatgtcactattaggctacaggattggagtaaaagaaattttgggcagaggaaagaaggtgaatttcccaagcccctgagctatagaagcactttgtgttagtttcttttcaatatttgtttttccttattcattcagtcctcataaaaatggagactctgtgaaacatcccatggcatctctttaatctgcataaccaaaactgagttctaattctgttctacttcagaacactttgctgtgtaccattcttcatttaaaaatctagccttaatttggactaggggtatgctctgatcaggatccgctagagca

SEQ ID NO: 430430 - DNA, 583 bp, Homo sapiens
tgctgagattatagatgtgagccatccacacttggccatcagggtaatatttttaatttgcctttttaaatagagagttaatgtatttatttgactttagtactcactaaattattacttttgtccatggagaggaaaggttatgagaaatgtaaatagggactatgatatttgaattagaatacccaaatagagcctttttatttatcattcacttcatttcctgtctgttggtcctccagcaattctcagtgaaggagttctacctgaagatcatcccctggcgcctttacaccttccgagtgtgtccaggaacaaaagtaagctgaaccttacatctggttcacatcaagcatgcttcatctctggactatctcagccttttattttttctcagaagcacttttagtgtttctgcaagatctcacagtgtacacaggattcgttgccaaataaagcatcattatctcctcactaaatggcatgaagaatatataaattctggaaggacgcatgcctacagaaacaggaattagcagcaactcagaatacttcaacagtgatcctttgccttcaagactaa

SEQ ID NO: 430431 - DNA, 341 bp, Homo sapiens
gagccggttcccaggccgggtggagaccaactctggggtctgttggtgggagagtggggagcccgtcttctgctgagtgctgccgccccttcccaggacagcggaggtggaacttcgtcgcgctgcaacccccggctcgggtaacgtttctctccagccttaggcagagcccagaagacctgcctttaccagagttccagagagagagggaggaaaagggtaggggggttcagactcctggtttgcccagtagtttgggggaacacattctcctcaccctgtagcgttggggtatccggtgtctatggtccagccctgaggctgtggttcctatttggttt

SEQ ID NO: 430432 - DNA, 5229 bp, Homo sapiens
agcccggaagcggaaactccttggggaaagggcaatcccccgagccggttcccaggccgggtggagaccaactctggggtctgttggtgggagagtggggagcccgtcttctgctgagtgctgccgccccttcccaggacagcggaggtggaacttcgtcgcgctgcaacccccggctcgggatcctggggcgtcctttggcagtcgattgcaccctgcactagagagaagtccaggaatgatatattcttgggctgtatttctctaccctggagttcatccagttcatcccagaaacactgacctgattactgtgacaaagtctgatggatagaccctttctgttgaccttgtggcgtttttctttcatgtggaagttggaagacaaggtgaaaggggccaaaagttacctgctttggtgaataggagtgctctacttggttctcagaacatgggccctcgtttaaagctgcagctgtgatcctcggctgtctgttggcattgacgggacctgatgttttacgttattgttattctataagaacgggcagcctttccctgcacatcggcctgtgggactaagagttcacatctctcatgtcgagctagcagtggaaattccagtgacccaggaagtccttcaggagcccaattccaacgtagtaaaagtggccttcactgtgcgcaaggctgggcgttatgaaatcacagtgaagcttggtggattaaatgtggcatatagtccctactacaaaatttttcaacctggaatggtggttccttctaagaccaaaattgtgtgccacttttctactcttgtattgacctgtgggcagccgcacacccttcaaatagtaccccgagatgagtatgataatcccaccaacaattccatgtccttgagagatgagcacaattacaccttgtccattcatgagctcggccctcaagaagaagagagtactggtgtctcatttgagaaatcagtaacatccaacaggcagactttccaggtgttcttgcgactcaccctgcattctcgaggctgcttccatgcttgcatttcataccaaaatcagccaatcaataatggtgaatttgacattattgtcctaagtgaggatgagaagaatatcgtcgaacgcaatgtgtccacttcaggcgtgagcatttactttgaggcttatctttataatgctaccaactgtagcagcactccatggcacctgccacccatgcacatgacctcttcccagcgccggccatccactgctgttgacgaggaagatgaagactcgccctctgagtgccacacccctgagaaggtgaagaaaccgaagaaggtgtactgctatgtgtcaccaaagcaattctcagtgaaggagttctacctgaagatcatcccctggcgcctttacaccttccgagtgtgtccaggaacaaaattttcataccttggtcctgaccctgtccataagctgctcacactggtggtggatgatggcattcaacctcctgtggagctcagctgtaaggagaggaacattctagcagccacttttatccgctccctgcataagaacataggaggctctgagacctttcaggacaaggtgaactttttccagcgagagcttcggcaggtacatatgaaaagaccacattccaaagtcaccctgaaggtcagcagacatgccttgttggaatcgtctctgaaagccactcggaatttctccatctcagattggagcaagaactttgaggttgttttccaggatgaagaagctctggactggggagggcctcgccgggaatggtttgagctaatctgcaaagcactatttgataccaccaatcagctcttcacccggttcagtgacaacaaccaagcattagtgcatcccaaccctaatcgccccgctcatctgcgcctgaaaatgtatgagtttgcgggacggctcgtgggcaagtgtctctatgagtcctctctaggaggagcctacaagcagttggtccgagctcgcttcacccgctctttcctggcccaaatcataggactgcgtatgcattacaagtactttgaaacagatgacccagaattctacaaatctaaagtttgttttatcctcaacaatgacatgagtgagatggagctggtctttgcagaagagaaatataataaatcaggtcaattggataaggttgtagaactcatgacaggtggagctcaaactccagtcaccaatgcgaataaaatcttctatttaaatttgctggcccaatatcggctggccagtcaagtgaaagaggaggtggaacatttcctaaaaggcctgaatgaattggtccctgagaaccttttggctatttttgatgagaatgagcttgagctgctgatgtgtgggactggagacatcagtgtgtctgacttcaaagcccatgcagtagttgttggtggctcatggcatttcagagaaaaggtcatgaggtggttttggactgtggtttccagtctgacccaggaggagttggctcggctacttcagttcacaacaggctcctctcagctaccacctggaggctttgccgccctctgtccctcatttcagattattgccgctccgacccatagcacgctgcctactgcacacacatgttttaaccagctgtgcctccctacatatgactcctatgaagaggtgcacaggatgctgcagctggccatcagcgagggttgcgagggctttggcatgctctgaccactctcctgtcatccagttggctcccatgctctctggagcttctgggcgcaagttacagacatcataaccactgatcctaacacacataaccatcagccagaagatgccgcatgctcccctgtgtctggaggattttgtcacctacaagccttgtctttacctcacctgctccctgcccatatctaccacaggccactttggcatggtatgtaagctgagctcttcattctgtcatgagaagaggaccatgctgctatcatttatttggtcctttgaagatctcagtagctgagggagatggcacacggggctcagccctgttgggaaactggtgtggagacccttaaatccacactgtgctccaaaactccctctgctgatactccttggagacaccctctttggccctcactacttgaccagactggtacttgagtccttctcatgggtggggtgattgcctcttctcatcaggagccaggagagagggggacagataggaggtggcccataggagcagtcccgctgcacaatggtaggcataggccatggcactggactgcctctaaggactgctaaaaagaatatttttttgtggtgtcagaactggaaaaagcactttcccttcgggcatttctggaaatgattattaatccacaaagaagaactctgtaagctttttcttgaattgtagccagtgagaaaagcagatagactgaagaatatgaaggatagctgagctgtagcctccagagtggggcatgcctaggcatatggctggcttggagactactgatgcttttccctgagtttgttattggcactgaagtatggccggcttgggccactgacttccccattatgtagtctgctaaaagctggggatcctttagcattctactgaagaaaattttgtagcaaaagattagaacagtaagaatagtatgccagcaatccctgattctctctctgcttggtgttctctggcagcactaagacaaaggaacagggactaggagtttacgtgcttatcacaggtccttggcgtcaggacactagggatgaacatggaggtgatatgttacacagtaaacacctgccaacccctgtactcccctttgctccatcagttatcaggaaggagaactaaggagggaggaagcttattaggttcactgttgaatgatgattgaagagtacctgctgctgtatcttggaagatgacaacatcctttttcattactgtttgattgaaaataatttcaagattcaaaatctcattgacttcccaaatttgtgtttttaagaaggctttgctgcaagctaccattcccaatggggcagtcaactctgagaatattacaagccatctttattgccaaaaccagcaagtacacagagtcctgaaacaaggcaggactttggcaatgccttggcctcctggaagcatgtctgagccctcctgttcgcagggatcatgaggaacaagccctcctgagctgctacagttcctgcctgacctcagtctttcgcagtcatcatttgtcctttcttggcacatgggtgctgacctcactcatccttggggtccgggatccagcatcagggtctctataccccaggatcctccatgccacatggtcactgctctcctcagggaccaggacaaggtgctgctgcttgcccaaatgttttcccatgggatatgtaccggaaggtttatcaccaccctgggaaacataatgctgccccttgggcccagaaaggggtttccagctgggggcacgtggactggttctgctgtttttggcagtcgcttttctgaattctcccctccggcagccttccagagactgatcctggagattgagttgattgtcttggctagacctgtcattttaagctctagtcatagcactttttcagagcatcttaggcaccattgcaacccaaccagggaagctgcatccctgtggtggtccttaggcaccagtctttgttaaacaaaaccctttggcactattgtggttttctattctctgtctgaactctattcaaaagtatctttgctctcttgggccttttcttttactgttttgttttttttttctaatcctgctttcatactagccagtgtggggaaaaggtacaatatgtcaaagagatgagagagtgttatttcttgggcaattttctattagtgtttcttattttggccagttcttttatttatgtccttgtgacccaggtacttggggggccagctacccttctggccttttagcgtctttgaaggagaccagacatgagtgaatacctaggagagtgtcagcatgtttctggaaaattggcagagaccaagccctgctgcagattcgtcaggccaggtgaaagggccaggcagttgcagctgatgatgtaaatattttgtacagtagataaataaatgtttaaaagaaaaaaaaaa

SEQ ID NO: 430433 - DNA, 4131 bp, Homo sapiens
ttattccttattatacttcagaggatgagaagaatatcgtcgaacgcaatgtgtccacttcaggcgtgagcatttactttgaggcttatctttataatgctaccaactgtagcagcactccatggcacctgccacccatgcacatgacctcttcccagcgccggccatccactgctgttgacgaggaagatgaagactcgccctctgagtgccacacccctgagaaggtgaagaaaccgaagaaggtgtactgctatgtgtcaccaaagcaattctcagtgaaggagttctacctgaagatcatcccctggcgcctttacaccttccgagtgtgtccaggaacaaaattttcataccttggtcctgaccctgtccataagctgctcacactggtggtggatgatggcattcaacctcctgtggagctcagctgtaaggagaggaacattctagcagccacttttatccgctccctgcataagaacataggaggctctgagacctttcaggacaaggtgaactttttccagcgagagcttcggcaggtacatatgaaaagaccacattccaaagtcaccctgaaggtcagcagacatgccttgttggaatcgtctctgaaagccactcggaatttctccatctcagattggagcaagaactttgaggttgttttccaggatgaagaagctctggactggggagggcctcgccgggaatggtttgagctaatctgcaaagcactatttgataccaccaatcagctcttcacccggttcagtgacaacaaccaagcattagtgcatcccaaccctaatcgccccgctcatctgcgcctgaaaatgtatgagtttgcgggacggctcgtgggcaagtgtctctatgagtcctctctaggaggagcctacaagcagttggtccgagctcgcttcacccgctctttcctggcccaaatcataggactgcgtatgcattacaagtactttgaaacagatgacccagaattctacaaatctaaagtttgttttatcctcaacaatgacatgagtgagatggagctggtctttgcagaagagaaatataataaatcaggtcaattggataaggttgtagaactcatgacaggtggagctcaaactccagtcaccaatgcgaataaaatcttctatttaaatttgctggcccaatatcggctggccagtcaagtgaaagaggaggtggaacatttcctaaaaggcctgaatgaattggtccctgagaaccttttggctatttttgatgagaatgagcttgagctgctgatgtgtgggactggagacatcagtgtgtctgacttcaaagcccatgcagtagttgttggtggctcatggcatttcagagaaaaggtcatgaggtggttttggactgtggtttccagtctgacccaggaggagttggctcggctacttcagttcacaacaggctcctctcagctaccacctggaggctttgccgccctctgtccctcatttcagattattgccgctccgacccatagcacgctgcctactgcacacacatgttttaaccagctgtgcctccctacatatgactcctatgaagaggtgcacaggatgctgcagctggccatcagcgagggttgcgagggctttggcatgctctgaccactctcctgtcatccagttggctcccatgctctctggagcttctgggcgcaagttacagacatcataaccactgatcctaacacacataaccatcagccagaagatgccgcatgctcccctgtgtctggaggattttgtcacctacaagccttgtctttacctcacctgctccctgcccatatctaccacaggccactttggcatggtatgtaagctgagctcttcattctgtcatgagaagaggaccatgctgctatcatttatttggtcctttgaagatctcagtagctgagggagatggcacacggggctcagccctgttgggaaactggtgtggagacccttaaatccacactgtgctccaaaactccctctgctgatactccttggagacaccctctttggccctcactacttgaccagactggtacttgagtccttctcatgggtggggtgattgcctcttctcatcaggagccaggagagagggggacagataggaggtggcccataggagcagtcccgctgcacaatggtaggcataggccatggcactggactgcctctaaggactgctaaaaagaatatttttttgtggtgtcagaactggaaaaagcactttcccttcgggcatttctggaaatgattattaatccacaaagaagaactctgtaagctttttcttgaattgtagccagtgagaaaagcagatagactgaagaatatgaaggatagctgagctgtagcctccagagtggggcatgcctaggcatatggctggcttggagactactgatgcttttccctgagtttgttattggcactgaagtatggccggcttgggccactgacttccccattatgtagtctgctaaaagctggggatcctttagcattctactgaagaaaattttgtagcaaaagattagaacagtaagaatagtatgccagcaatccctgattctctctctgcttggtgttctctggcagcactaagacaaaggaacagggactaggagtttacgtgcttatcacaggtccttggcgtcaggacactagggatgaacatggaggtgatatgttacacagtaaacacctgccaacccctgtactcccctttgctccatcagttatcaggaaggagaactaaggagggaggaagcttattaggttcactgttgaatgatgattgaagagtacctgctgctgtatcttggaagatgacaacatcctttttcattactgtttgattgaaaataatttcaagattcaaaatctcattgacttcccaaatttgtgtttttaagaaggctttgctgcaagctaccattcccaatggggcagtcaactctgagaatattacaagccatctttattgccaaaaccagcaagtacacagagtcctgaaacaaggcaggactttggcaatgccttggcctcctggaagcatgtctgagccctcctgttcgcagggatcatgaggaacaagccctcctgagctgctacagttcctgcctgacctcagtctttcgcagtcatcatttgtcctttcttggcacatgggtgctgacctcactcatccttggggtccgggatccagcatcagggtctctataccccaggatcctccatgccacatggtcactgctctcctcagggaccaggacaaggtgctgctgcttgcccaaatgttttcccatgggatatgtaccggaaggtttatcaccaccctgggaaacataatgctgccccttgggcccagaaaggggtttccagctgggggcacgtggactggttctgctgtttttggcagtcgcttttctgaattctcccctccggcagccttccagagactgatcctggagattgagttgattgtcttggctagacctgtcattttaagctctagtcatagcactttttcagagcatcttaggcaccattgcaacccaaccagggaagctgcatccctgtggtggtccttaggcaccagtctttgttaaacaaaaccctttggcactattgtggttttctattctctgtctgaactctattcaaaagtatctttgctctcttgggccttttcttttactgttttgttttttttttctaatcctgctttcatactagccagtgtggggaaaaggtacaatatgtcaaagagatgagagagtgttatttcttgggcaattttctattagtgtttcttattttggccagttcttttatttatgtccttgtgacccaggtacttggggggccagctacccttctggccttttagcgtctttgaaggagaccagacatgagtgaatacctaggagagtgtcagcatgtttctggaaaattggcagagaccaagccctgctgcagattcgtcaggccaggtgaaagggccaggcagttgcagctgatgatgtaaatattttgtacagtagataaataaatgtttaaaagaaaaaaaaaa

SEQ ID NO: 430434 - DNA, 3348 bp, Homo sapiens
agcccggaagcggaaactccttggggaaagggcaatcccccgagccggttcccaggccgggtggagaccaactctggggtctgttggtgggagagtggggagcccgtcttctgctgagtgctgccgccccttcccaggacagcggaggtggaacttcgtcgcgctgcaacccccggctcgggatcctggggcgtcctttggcagtcgattgcaccctgcactagagagaagtccaggaatgatatattcttgggctgtatttctctaccctggagttcatccagttcatcccagaaacactgacctgattactgtgacaaagtctgatggatagaccctttctgttgaccttgtggcgtttttctttcatgtggaagttggaagacaaggtgaaaggggccaaaagttacctgctttggtgaataggagtgctctacttggttctcagaacatgggccctcgtttaaagctgcagctgtgatcctcggctgtctgttggcattgacgggacctgatgttttacgttattgttattctataagaacgggcagcctttccctgcacatcggcctgtgggactaagagttcacatctctcatgtcgagctagcagtggaaattccagtgacccaggaagtccttcaggagcccaattccaacgtagtaaaagtggccttcactgtgcgcaaggctgggcgttatgaaatcacagtgaagcttggtggattaaatgtggcatatagtccctactacaaaatttttcaacctggaatggtggttccttctaagaccaaaattgtgtgccacttttctactcttgtattgacctgtgggcagccgcacacccttcaaatagtaccccgagatgagtatgataatcccaccaacaattccatgtccttgagagatgagcacaattacaccttgtccattcatgagctcggccctcaagaagaagagagtactggtgtctcatttgagaaatcagtaacatccaacaggcagactttccaggtgttcttgcgactcaccctgcattctcgaggctgcttccatgcttgcatttcataccaaaatcagccaatcaataatggtgaatttgacattattgtcctaagtgaggatgagaagaatatcgtcgaacgcaatgtgtccacttcaggcgtgagcatttactttgaggcttatctttataatgctaccaactgtagcagcactccatggcacctgccacccatgcacatgacctcttcccagcgccggccatccactgctgttgacgaggaagatgaagactcgccctctgagtgccacacccctgagaaggtgaagaaaccgaagaaggtgtactgctatgtgtcaccaaagcaattctcagtgaaggagttctacctgaagatcatcccctggcgcctttacaccttccgagtgtgtccaggaacaaaattttcataccttggtcctgaccctgtccataagctgctcacactggtggtggatgatggcattcaacctcctgtggagctcagctgtaaggagaggaacattctagcagccacttttatccgctccctgcataagaacataggaggctctgagacctttcaggacaaggtgaactttttccagcgagagcttcggcaggtacatatgaaaagaccacattccaaagtcaccctgaaggtcagcagacatgccttgttggaatcgtctctgaaagccactcggaatttctccatctcagattggagcaagaactttgaggttgttttccaggatgaagaagctctggactggggagggcctcgccgggaatggtttgagctaatctgcaaagcactatttgataccaccaatcagctcttcacccggttcagtgacaacaaccaagcattagtgcatcccaaccctaatcgccccgctcatctgcgcctgaaaatgtatgagtttgcgggacggctcgtgggcaagtgtctctatgagtcctctctaggaggagcctacaagcagttggtccgagctcgcttcacccgctctttcctggcccaaatcataggactgcgtatgcattacaagtactttgaaacagatgacccagaattctacaaatctaaagtttgttttatcctcaacaatgacatgagtgagatggagctggtctttgcagaagagaaatataataaatcaggtcaattggataaggttgtagaactcatgacaggtggagctcaaactccagtcaccaatgcgaataaaatcttctatttaaatttgctggcccaatatcggctggccagtcaagtgaaagaggaggtggaacatttcctaaaaggcctgaatgaattggtccctgagaaccttttggctatttttgatgagaatgagcttgagctgctgatgtgtgggactggagacatcagtgtgtctgacttcaaagcccatgcagtagttgttggtggctcatggcatttcagagaaaaggtcatgaggtggttttggactgtggtttccagtctgacccaggaggagttggctcggctacttcagttcacaacaggctcctctcagctaccacctggaggctttgccgccctctgtccctcatttcagattattgccgctccgacccatagcacgctgcctactgcacacacatgttttaaccagctgtgcctccctacatatgactcctatgaagaggtgcacaggatgctgcagctggccatcagcgagggttgcgagggctttggcatgctctgaccactctcctgtcatccagttggctcccatgctctctggagcttctgggcgcaagttacagacatcataaccactgatcctaacacacataaccatcagccagaagatgccgcatgctcccctgtgtctggaggattttgtcacctacaagccttgtctttacctcacctgctccctgcccatatctaccacaggccactttggcatggtatgtaagctgagctcttcattctgtcatgagaagaggaccatgctgctatcatttatttggtcctttgaagatctcagtagctgagggagatggcacacggggctcagccctgttgggaaactggtgtggagacccttaaatccacactgtgctccaaaactccctctgctgatactccttggagacaccctctttggccctcactacttgaccagaatgagtgaatacctaggagagtgtcagcatgtttctggaaaattggcagagaccaagccctgctgcagattcgtcaggccaggtgaaagggccaggcagttgcagctgatgatgtaaatattttgtacagtagataaataaatgtttaaaagaaaaaaaaaa

SEQ ID NO: 430435 - DNA, 573 bp, Homo sapiens
agcccggaagcggaaactccttggggaaagggcaatcccccgagccggttcccaggccgggtggagaccaactctggggtctgttggtgggagagtggggagcccgtcttctgctgagtgctgccgccccttcccaggacagcggaggtggaacttcgtcgcgctgcaacccccggctcgggtaacgtttctctccagccttaggcagagcccagaagacctgcctttaccagagttccagagagagagggaggaaaagggatcctggggcgtcctttggcagtcgattgcaccctgcactagagagaagtccaggaatgatatattcttgggctgtatttctctaccctggagttcatccagttcatcccagaaacactgacctgattactgtgacaaagtctgatggatagaccctttctgttgaccttgtggcgtttttctttcatgtggaagttggaagacaaggtgaaaggggccaaaagttacctgctttggtgaataggagtgctctacttggttctcagaacatgggccctcgtttaaaggtaaggtaacagactgagttaagct

SEQ ID NO: 430436 - DNA, 3624 bp, Homo sapiens
ggcgtgggcagaggccaggagggtcagtggggtatgggctctatgaagatggtctcatcaagtgagcactcagtaggcaagaggacaaaaaggcacagcgaaggagggcctttctgtctgtgggtttctctgtccatctggggccatcagtgtccttgggcctgtgctctctcaggggctgtgccatggttaggtatccagcccaggagcgagggagaggcgggagtcctgggggtgaggcattgcctacattgtcacctgcccccaacctccaaggggatgcagtaaggagagggaagtccatagccgaaacacgaggccgggagatgctgatgccctcagtgaccctgcttgcaggaaagctctgacccagtccagtgcctggctctccacagatcgctggcctccccaacgacacactgtcagtggagaacggggtcatcaaccagttttcccagcgctggacccacttcattgaccctcagagccaggccaacaaatggatcaagaacatggagaaggacaatgggctggatgtgttcaagttgggtgaccgcgacttcctgcgcagcatggagaacgccatccgctttggcaagccatgtctcctggagaacgtgggcgaggagctagacccagccctggagccagtgctgctcaagcagacgtacaagcagcagggaagcacggtgctgaagctgggggacacggtgatcccctaccatgaggacttcaggatgtacatcaccaccaagctgcccaacccacactacacgcccgagatctccaccaaactcaccctcatcaacttcaccctgtcgcccagtggcctagaggaccagctactgggccaggtagtggcagaggagcgacccgacctggaggaggccaagaaccagctgattatcagtaatgccaagatgcgccaggagctgaaggacattgaggaccagatcctgtaccggctcagctcctccgagggcaaccctgtagatgacatggaactcatcaaggtgctggaagcctccaagatgaaggctgctgagatccaggccaaagtcaggattgcagagcagacggagaaggacatcgacctgacgcgcatggagtacatacccgtggccatccgcacccagatcctcttcttctgtgtgtccgacctggccaacgtggaccccatgtaccagtactcccttgagtggtttctcaacatcttcctctcgggcatcgccaactcagagagagcagacaacctgaagaagcgcatctccaacatcaaccgctacctgacctacagcctctacagcaacgtctgccgcagcctctttgagaagcacaagctgatgtttgccttcctgctgtgtgttcgcatcatgatgaacgagggcaaaatcaaccagagtgagtggcgatacctcctgtctgggggctccatctcgatcatgactgagaatccggcaccggactggctgtcagaccgggcttggcgagacatcctagcactctcgaacctgccaaccttttcctccttctcttccgacttcgtgaagcacctctcagaattccgggtcatcttcgacagccttgagccccaccgggagcctttgcctggcatctgggaccagtacctagaccagttccagaagctgctagtcctccgctgcctgcgtggggacaaggttaccaacgccatgcaggactttgtggccaccaacctggagccacgcttcattgaaccccagacagccaatctgtcagtggtgttcaaagactccaactccaccacacccctcatctttgtgctgtcacccggcacagaccctgctgccgacctctacaagtttgccgaagaaatgaagttctccaaaaagctctctgccatctccctgggccaggggcagggccctcgggcagaagccatgatgcgcagctccatagagaggggcaaatgggtcttcttccagaactgccacctggcaccaagctggatgccagccctagaacgcctcatcgagcacatcaaccccgacaaggtacacagggacttccgcctctggctcaccagcctgcccagcaacaagttcccagtgtccatcctgcagaacggctccaagatgaccattgagccgccacgcggtgtcagggccaacctgctgaagtcctatagtagccttggtgaagacttcctcaactcctgccacaaggtgatggagttcaagtctctgctgctgtctctgtgcttgttccatgggaacgccctggagcgccgtaagtttgggcccctgggcttcaacatcccctatgagttcacggatggagatctgcgcatctgcatcagccagctcaagatgttcctggacgaatatgatgacatcccctacaaggtcctcaagtacacggcaggggagatcaattacgggggccgtgtcactgatgactgggaccggcgctgcatcatgaacatcttggaggacttctacaaccctgacgtgctctcccctgagcacagctacagcgcctcgggcatctaccaccagatcccgcctacctacgacctccacggctacctctcctacatcaagagcctcccactcaatgatatgcctgagatctttggcctgcatgacaatgccaacatcacctttgcccagaacgagacgttcgccctcctgggcaccatcatccagctgcaacccaaatcatcttctgcaggcagccagggccgggaggagatagtggaggacgtcacccaaaacattctgctcaaggtgcctgagcctatcaacttgcaatgggtgatggccaagtacccagtgctgtatgaggaatcaatgaacacagtactagtacaagaggtcattaggtacaatcggctgctgcaggtgatcacacagacactgcaagacctactcaaggcactcaaggggctggtagtgatgtcctctcagctggagctgatggctgccagcctgtacaacaatactgtgcctgagctctggagtgccaaggcctacccatcgctcaagcctctgtcatcatgggtcatggacctgctgcaacgcctggactttctgcaggcctggatccaagatggcatcccagctgtcttctggatcagtggattcttcttcccccaggctttcttaacaggcactctgcagaattttgcccgcaaatttgtcatctccattgacaccatctcctttgatttcaaggtgatgtttgaggcaccatcagagttaacacaaagaccccaagtagggtgctatatccatggattattcctggaaggtgcccgctgggatccagaggccttccagctggctgagtctcagcccaaggagctgtacacagagatggccgttatctggctcttgccaacacccaaccgcaaggcccaggaccaggacttttacctgtgccccatctacaagacactgactcgtgctggaacactatcaaccacaggacactctaccaactatgtcattgctgtggagatccccacccatcagccccagcgacactggataaagcgtggtgtggccctcatctgtgccctggactactagactcagacagaagggctggggccattaaagctgaattttctaagcaaaaaag

SEQ ID NO: 430437 - DNA, 3967 bp, Homo sapiens
ggcgtgggcagaggccaggagggtcagtggggtatgggctctatgaagatggtctcatcaagtgagcactcagtaggcaagaggacaaaaaggcacagcgaaggagggcctttctgtctgtgggtttctctgtccatctggggccatcagtgtccttgggcctgtgctctctcaggggctgtgccatggttaggtatccagcccaggagcgagggagaggcgggagtcctgggggtgaggcattgcctacattgtcacctgcccccaacctccaaggggatgcagtaaggagagggaagtccatagccgaaacacgaggccgggagatgctgatgccctcagtgaccctgcttgcaggaaagctctgacccagtccagtgcctggctctccacagatcgctggcctccccaacgacacactgtcagtggagaacggggtcatcaaccagttttcccagcgctggacccacttcattgaccctcagagccaggccaacaaatggatcaagaacatggagaaggacaatgggctggatgtgttcaagttgggtgaccgcgacttcctgcgcagcatggagaacgccatccgctttggcaagccatgtctcctggagaacgtgggcgaggagctagacccagccctggagccagtgctgctcaagcagacgtacaagcagcagggaagcacggtgctgaagctgggggacacggtgatcccctaccatgaggacttcaggatgtacatcaccaccaagctgcccaacccacactacacgcccgagatctccaccaaactcaccctcatcaacttcaccctgtcgcccagtggcctagaggaccagctactgggccaggtagtggcagaggagcgacccgacctggaggaggccaagaaccagctgattatcagtaatgccaagatgcgccaggagctgaaggacattgaggaccagatcctgtaccggctcagctcctccgagggcaaccctgtagatgacatggaactcatcaaggtgctggaagcctccaagatgaaggctgctgagatccaggccaaagtcaggattgcagagcagacggagaaggacatcgacctgacgcgcatggagtacatacccgtggccatccgcacccagatcctcttcttctgtgtgtccgacctggccaacgtggaccccatgtaccagtactcccttgagtggtttctcaacatcttcctctcgggcatcgccaactcagagagagcagacaacctgaagaagcgcatctccaacatcaaccgctacctgacctacagcctctacagcaacgtctgccgcagcctctttgagaagcacaagctgatgtttgccttcctgctgtgtgttcgcatcatgatgaacgagggcaaaatcaaccagagtgagtggcgatacctcctgtctgggggctccatctcgatcatgactgagaatccggcaccggactggctgtcagaccgggcttggcgagacatcctagcactctcgaacctgccaaccttttcctccttctcttccgacttcgtgaagcacctctcagaattccgggtcatcttcgacagccttgagccccaccgggagcctttgcctggcatctgggaccagtacctagaccagttccagaagctgctagtcctccgctgcctgcgtggggacaaggttaccaacgccatgcaggactttgtggccaccaacctggagccacgcttcattgaaccccagacagccaatctgtcagtggtgttcaaagactccaactccaccacacccctcatctttgtgctgtcacccggcacagaccctgctgccgacctctacaagtttgccgaagaaatgaagttctccaaaaagctctctgccatctccctgggccaggggcagggccctcgggcagaagccatgatgcgcagctccatagagaggggcaaatgggtcttcttccagaactgccacctggcaccaagctggatgccagccctagaacgcctcatcgagcacatcaaccccgacaaggtacacagggacttccgcctctggctcaccagcctgcccagcaacaagttcccagtgtccatcctgcagaacggctccaagatgaccattgagccgccacgcggtgtcagggccaacctgctgaagtcctatagtagccttggtgaagacttcctcaactcctgccacaaggtgatggagttcaagtctctgctgctgtctctgtgcttgttccatgggaacgccctggagcgccgtaagtttgggcccctgggcttcaacatcccctatgagttcacggatggagatctgcgcatctgcatcagccagctcaagatgttcctggacgaatatgatgacatcccctacaaggtcctcaagtacacggcaggggagatcaattacgggggccgtgtcactgatgactgggaccggcgctgcatcatgaacatcttggaggacttctacaaccctgacgtgctctcccctgagcacagctacagcgcctcgggcatctaccaccagatcccgcctacctacgacctccacggctacctctcctacatcaagagcctcccactcaatgatatgcctgagatctttggcctgcatgacaatgccaacatcacctttgcccagaacgagacgttcgccctcctgggcaccatcatccagctgcaacccaaatcatcttctgcaggcagccagggccgggaggagatagtggaggacgtcacccaaaacattctgctcaaggtgcctgagcctatcaacttgcaatgggtgatggccaagtacccagtgctgtatgaggaatcaatgaacacagtactagtacaagaggtcattaggtacaatcggctgctgcaggtgatcacacagacactgcaagacctactcaaggcactcaaggggctggtagtgatgtcctctcagctggagctgatggctgccagcctgtacaacaatactgtgcctgagctctggagtgccaaggcctacccatcgctcaagcctctgtcatcatgggtcatggacctgctgcaacgcctggactttctgcaggcctggatccaagatggcatcccagctgtcttctggatcagtggattcttcttcccccaggctttcttaacaggcactctgcagaattttgcccgcaaatttgtcatctccattgacaccatctcctttgatttcaaggtctgggcacagccagggccaggtcaggtgacaggctatggtacagcccaaggaggagaggctctgaggccacggttggttggcagttgggggacccctaagccagggcatggaaagacccaagccagaagaggccatgagtcccaggaacgggtctgggctgggtccatcagaaatccacaggggcagggcacagaccacaggccatgggctaaagtggtaggtacgtgatgatgggcaggcaggcagcattaggcagctctctcagaagggagttttgtgcctcctaacccagattctgggtattgttatgtgtgtggggtgtgtctgtgtctacccacaggtgatgtttgaggcaccatcagagttaacacaaagaccccaagtagggtgctatatccatggattattcctggaaggtgcccgctgggatccagaggccttccagctggctgagtctcagcccaaggagctgtacacagagatggccgttatctggctcttgccaacacccaaccgcaaggcccaggaccaggacttttacctgtgccccatctacaagacactgactcgtgctggaacactatcaaccacaggacactctaccaactatgtcattgctgtggagatccccacccatcagccccagcgacactggataaagcgtggtgtggccctcatctgtgccctggactactagactcagacagaagggctggggccattaaagctgaattttctaagcaaaaaag

SEQ ID NO: 430438 - DNA, 3707 bp, Homo sapiens
ggcgtgggcagaggccaggagggtcagtggggtatgggctctatgaagatggtctcatcaagtgagcactcagtaggcaagaggacaaaaaggcacagcgaaggagggcctttctgtctgtgggtttctctgtccatctggggccatcagtgtccttgggcctgtgctctctcaggggctgtgccatggttaggtatccagcccaggagcgagggagaggcgggagtcctgggggtgaggcattgcctacattgtcacctgcccccaacctccaaggggatgcagtaaggagagggaagtccatagccgaaacacgaggccgggagatgctgatgccctcagtgaccctgcttgcaggaaagctctgacccagtccagtgcctggctctccacagatcgctggcctccccaacgacacactgtcagtggagaacggggtcatcaaccagttttcccagcgctggacccacttcattgaccctcagagccaggccaacaaatggatcaagaacatggagaaggacaatgggctggatgtgttcaagttgggtgaccgcgacttcctgcgcagcatggagaacgccatccgctttggcaagccatgtctcctggagaacgtgggcgaggagctagacccagccctggagccagtgctgctcaagcagacgtacaagcagcagggaagcacggtgctgaagctgggggacacggtgatcccctaccatgaggacttcaggatgtacatcaccaccaagctgcccaacccacactacacgcccgagatctccaccaaactcaccctcatcaacttcaccctgtcgcccagtggcctagaggaccagctactgggccaggtagtggcagaggagcgacccgacctggaggaggccaagaaccagctgattatcagtaatgccaagatgcgccaggagctgaaggacattgaggaccagatcctgtaccggctcagctcctccgagggcaaccctgtagatgacatggaactcatcaaggtgctggaagcctccaagatgaaggctgctgagatccaggccaaagtcaggattgcagagcagacggagaaggacatcgacctgacgcgcatggagtacatacccgtggccatccgcacccagatcctcttcttctgtgtgtccgacctggccaacgtggaccccatgtaccagtactcccttgagtggtttctcaacatcttcctctcgggcatcgccaactcagagagagcagacaacctgaagaagcgcatctccaacatcaaccgctacctgacctacagcctctacagcaacgtctgccgcagcctctttgagaagcacaagctgatgtttgccttcctgctgtgtgttcgcatcatgatgaacgagggcaaaatcaaccagagtgagtggcgatacctcctgtctgggggctccatctcgatcatgactgagaatccggcaccggactggctgtcagaccgggcttggcgagacatcctagcactctcgaacctgccaaccttttcctccttctcttccgacttcgtgaagcacctctcagaattccgggtcatcttcgacagccttgagccccaccgggagcctttgcctggcatctgggaccagtacctagaccagttccagaagctgctagtcctccgctgcctgcgtggggacaaggttaccaacgccatgcaggactttgtggccaccaacctggagccacgcttcattgaaccccagacagccaatctgtcagtggtgttcaaagactccaactccaccacacccctcatctttgtgctgtcacccggcacagaccctgctgccgacctctacaagtttgccgaagaaatgaagttctccaaaaagctctctgccatctccctgggccaggggcagggccctcgggcagaagccatgatgcgcagctccatagagaggggcaaatgggtcttcttccagaactgccacctggcaccaagctggatgccagccctagaacgcctcatcgagcacatcaaccccgacaaggtacacagggacttccgcctctggctcaccagcctgcccagcaacaagttcccagtgtccatcctgcagaacggctccaagatgaccattgagccgccacgcggtgtcagggccaacctgctgaagtcctatagtagccttggtgaagacttcctcaactcctgccacaaggtgatggagttcaagtctctgctgctgtctctgtgcttgttccatgggaacgccctggagcgccgtaagtttgggcccctgggcttcaacatcccctatgagttcacggatggagatctgcgcatctgcatcagccagctcaagatgttcctggacgaatatgatgacatcccctacaaggtcctcaagtacacggcaggggagatcaattacgggggccgtgtcactgatgactgggaccggcgctgcatcatgaacatcttggaggacttctacaaccctgacgtgctctcccctgagcacagctacagcgcctcgggcatctaccaccagatcccgcctacctacgacctccacggctacctctcctacatcaagagcctcccactcaatgatatgcctgagatctttggcctgcatgacaatgccaacatcacctttgcccagaacgagacgttcgccctcctgggcaccatcatccagctgcaacccaaatcatcttctgcaggcagccagggccgggaggagatagtggaggacgtcacccaaaacattctgctcaaggtgcctgagcctatcaacttgcaatgggtgatggccaagtacccagtgctgtatgaggaatcaatgaacacagtactagtacaagaggtcattaggtacaatcggctgctgcaggtgatcacacagacactgcaagacctactcaaggcactcaaggggctggtagtgatgtcctctcagctggagctgatggctgccagcctgtacaacaatactgtgcctgagctctggagtgccaaggcctacccatcgctcaagcctctgtcatcatgggtcatggacctgctgcaacgcctggactttctgcaggcctggatccaagatggcatcccagctgtcttctggatcagtggattcttcttcccccaggctttcttaacaggcactctgcagaattttgcccgcaaatttgtcatctccattgacaccatctcctttgatttcaaggtgatgtttgaggcaccatcagagttaacacaaagaccccaagtagggtgctatatccatggattattcctggaaggtgcccgctgggatccagaggccttccagctggctgagtctcagcccaaggagctgtacacagagatggccgttatctggctcttgccaacacccaaccgcaaggcccaggaccaggacttttacctgtgccccatctacaagacactgactcgtgctggtatgaggcctgggatgggagcctacactatgggcggggacccaggactaacccagcccagcccaagccagtcacttatccaggaacactatcaaccacaggacactctaccaactatgtcattgctgtggagatccccacccatcagccccagcgacactggataaagcgtggtgtggccctcatctgtgccctggactactagactcagacagaagggctggggccattaaagctgaattttctaagcaaaaaag

SEQ ID NO: 430439 - DNA, 232 bp, Homo sapiens
gcgcatggagtacatacccgtggccatccgcacccagatcctcttcttctgtgtgtccgacctggccaacgtggaccccatgtaccagtactcccttgagtggtttctcaacatcttcctctcgggcatcgccaactcagagagagcaggtagcaccggcatgccaggctcctaccctgcacagatatgacccatgtggacacatttccactgtggggcacacacaaactca

SEQ ID NO: 430440 - DNA, 1924 bp, Homo sapiens
tcatcttcagatctgatcttattttgctacttaggagttctgatactgggcaagtcacctagcctgtgagcttcatttgcttatacagttgttggaattagatgtggtgacatgcgaaaagcacaaaacctggctcctatcaagcttctgcatctatttttttttctatttttctctcaattattggaagctcatagaagcattttgggatagaattttagtagtttgcaagtatttttaaacattttatcataggtacacttataattttgatatgatctcagtattaacctgataactcccaaattgatattttcctagttcaactgaaattaaagggagaaatatgggattgtaggagtgccttgtcctcaaattgactgtatttctgttttgagaaagatcttggtactgatcacgtagtcaactttctaatgcaatgttaaagtttatatatttgtaaatgttattgttataaaagcataaaaccagaaattaagtcttagatttagtttctacatcttttattggaagatgactgtagataaatatctttctgtatatcattttaataaatgagaaaagagagctgttgaatgaaagatcatgaacatcagtatttatctgaggaacatcctgcggaggaatccctttccccatttattaaacacaaaattgccagtgtttcaagtagttctctgatcgatagaccaacaactgaaattaaatgcttttagtctcaagtgcccatttttattaaaatgtaattatcatgaacagaaaaagcaatacaaggcgtgtgttcttaataattctgccattctctttttgacatttaaaggagaagagcctaggctggatgtcttgatcaataacgcagggatcttccagtgcccttacatgaagactgaagatgggtttgagatgcagttcggagtgaaccatctggggcactttctactcaccaatcttctccttggactcctcaaaagttcagctcccagcaggattgtggtagtttcttccaaactttataaatacggagacatcaattttgatgacttgaacagtgaacaaagctataataaaagcttttgttatagccggagcaaactggctaacattctttttaccagggaactagcccgccgcttagaaggcacaaatgtcaccgtcaatgtgttgcatcctggtattgtacggacaaatctggggaggcacatacacattccactgttggtcaaaccactcttcaatttggtgtcatgggcttttttcaaaactccagtagaaggtgcccagacttccatttatttggcctcttcacctgaggtagaaggagtgtcaggaagatactttggggattgtaaagaggaagaactgttgcccaaagctatggatgaatctgttgcaagaaaactctgggatatcagtgaagtgatggttggcctgctaaaataggaacaaggagtaaaagagctgtttataaaactgcatatcagttatatctgtgatcaggaatggtgtggattgagaacttgttacttgaagaaaaagaattttgatattggaatagcctgctaagaggtacatgtgggtattttggagttactgaaaaattatttttgggataagagaatttcagcaaagatgttttaaatatatatagtaagtataatgaataataagtacaatgaaaaatacaattatattgtaaaattataactgggcaagcatggatgacatattaatatttgtcagaattaagtgactcaaagtgctatcgagaggtttttcaagtatctttgagtttcatggccaaagtgttaactagttttactacaatgtttggtgtttgtgtggaaattatctgcctggtgtgtgcacacaagtcttacttggaataaatttactggtacaaatt

SEQ ID NO: 430441 - DNA, 334 bp, Homo sapiens
  misc_feature (2)..(2): n is a, c, g, or t
  misc_feature (7)..(7): n is a, c, g, or t
tncggcngcgagaagacgacagaagggtacggctgcgagagacgacagaggggagaacgcatgttttaaatatatatagtaagtataatgaataataagtacaatgaaaaatacaattatattgtaaaattataactgggcaagcatggatgacatattaatatttgtcagaattaagtgactcaaagtgctatcgagaggtttttcaagtatctttgagtttcatggccaaagtgttaactagttttactacaatgtttggtgtttgtgtggaaattatctgcctggtgtgtgcacacaagtcttacttggaataaatttactggtacaaatt

SEQ ID NO: 430442 - DNA, 1695 bp, Homo sapiens
agcttccacggagggcgcaggacccagggcgctgaactctcacaaccaatcaggcgacccccccagagggaaactacaagtcccagcatgccccacgcgcaccgtcaggggccgacccgccgcgccccagcgttctccgcgtacaggtggtctcttgggttccggtaaggcggcggctgcggaactcccgtggaggggccggtgggccctcgggcctgacgatggcagtggccactgcggcggcagtactggccgctctgggcggggcgctgtggctggcggcccgccggttcgtggggcccagggtccagcggctgcgcagaggcggggaccccggcctcatgcacgggaagactgtgctgatcaccggggcgaacagcggcctgggccgcgccacggccgccgagctactgcgcctgggagcgcgggtgatcatgggctgccgggaccgcgcgcgcgccgaggaggcggcgggtcagctccgccgcgagctccgccaggccgcggagtgcggcccagagcctggcgtcagcggggtgggcgagctcatagtccgggagctggacctcgcctcgctgcgctcggtgcgcgccttctgccaggaaatgctccaggaagagcctaggctggatgtcttgatcaataacgcagggatcttccagtgcccttacatgaagactgaagatgggtttgagatgcagttcggagtgaaccatctggggcactttctactcaccaatcttctccttggactcctcaaaagttcagctcccagcaggattgtggtagtttcttccaaactttataaatacggagacatcaattttgatgacttgaacagtgaacaaagctataataaaagcttttgttatagccggagcaaactggctaacattctttttaccagggaactagcccgccgcttagaaggcacaaatgtcaccgtcaatgtgttgcatcctggtattgtacggacaaatctggggaggcacatacacattccactgttggtcaaaccactcttcaatttggtgtcatgggcttttttcaaaactccagtagaaggtgcccagacttccatttatttggcctcttcacctgaggtagaaggagtgtcaggaagatactttggggattgtaaagaggaagaactgttgcccaaagctatggatgaatctgttgcaagaaaactctgggatatcagtgaagtgatggttggcctgctaaaataggaacaaggagtaaaagagctgtttataaaactgcatatcagttatatctgtgatcaggaatggtgtggattgagaacttgttacttgaagaaaaagaattttgatattggaatagcctgctaagaggtacatgtgggtattttggagttactgaaaaattatttttgggataagagaatttcagcaaagatgttttaaatatatatagtaagtataatgaataataagtacaatgaaaaatacaattatattgtaaaattataactgggcaagcatggatgacatattaatatttgtcagaattaagtgactcaaagtgctatcgagaggtttttcaagtatctttgagtttcatggccaaagtgttaactagttttactacaatgtttggtgtttgtgtggaaattatctgcctggtgtgtgcacacaagtcttacttggaataaatttactggtacaaatt

SEQ ID NO: 430443 - DNA, 1898 bp, Homo sapiens
  misc_feature (1697)..(1697): n is a, c, g, or t
  misc_feature (1701)..(1701): n is a, c, g, or t
agcttccacggagggcgcaggacccagggcgctgaactctcacaaccaatcaggcgacccccccagagggaaactacaagtcccagcatgccccacgcgcaccgtcaggggccgacccgccgcgccccagcgttctccgcgtacaggtggtctcttgggttccggtaaggcggcggctgcggaactcccgtggaggggccggtgggccctcgggcctgacgatggcagtggccactgcggcggcagtactggccgctctgggcggggcgctgtggctggcggcccgccggttcgtggggcccagggtccagcggctgcgcagaggcggggaccccggcctcatgcacgggaagactgtgctgatcaccggggcgaacagcggcctgggccgcgccacggccgccgagctactgcgcctgggagcgcgggtgatcatgggctgccgggaccgcgcgcgcgccgaggaggcggcgggtcagctccgccgcgagctccgccaggccgcggagtgcggcccagagcctggcgtcagcggggtgggcgagctcatagtccgggagctggacctcgcctcgctgcgctcggtgcgcgccttctgccaggaaatgctccaggaagagcctaggctggatgtcttgatcaataacgcagggatcttccagtgcccttacatgaagactgaagatgggtttgagatgcagttcggagtgaaccatctggggcactttctactcaccaatcttctccttggactcctcaaaagttcagctcccagcaggattgtggtagtttcttccaaactttataaatacggagacatcaattttgatgacttgaacagtgaacaaagctataataaaagcttttgttatagccggagcaaactggctaacattctttttaccagggaactagcccgccgcttagaaggcacaaatgtcaccgtcaatgtgttgcatcctggtattgtacggacaaatctggggaggcacatacacattccactgttggtcaaaccactcttcaatttggtgtcatgggcttttttcaaaactccagtagaaggtgcccagacttccatttatttggcctcttcacctgaggtagaaggagtgtcaggaagatactttggggattgtaaagaggaagaactgttgcccaaagctatggatgaatctgttgcaagaaaactctgggatatcagtgaagtgatggttggcctgctaaaataggaacaaggagtaaaagagctgtttataaaactgcatatcagttatatctgtgatcaggaatggtgtggattgagaacttgttacttgaagaaaaagaattttgatattggaatagcctgctaagaggtacatgtgggtattttggagttactgaaaaattatttttgggataagagaatttcagcaaagatgttttaaatatatatagtaagtataatgaataataagtacaatgaaaaatacaattatattgtaaaattataactgggcaagcatggatgacatattaatatttgtcagaattaagtgactcaaagtgctatcgagaggtttttcaagtatctttgagtttcatggccaaagtgttaactagttttactacaatgtttggtgtttgtgtggaaattatctgcctggtgtgtgcacacaagtcttacttggaataaatttactggtacaaattanaaanaaaaaaaaaaaaaaaagggcgggcgccggctctcatagagagaagttatctcccccttcagaggagggcgccccaaaagagctttacagcgcgttccacccaggatttctcttgtgttcccaagggtggcgcccttaaataagggagagtcggatatatataaagcttgaggcccatggggcacgagagcgggttaa

SEQ ID NO: 430444 - DNA, 1139 bp, Homo sapiens
  misc_feature (22)..(22): n is a, c, g, or t
  misc_feature (25)..(25): n is a, c, g, or t
  misc_feature (36)..(36): n is a, c, g, or t
  misc_feature (49)..(49): n is a, c, g, or t
  misc_feature (57)..(57): n is a, c, g, or t
gcagggggggcgcaggggaganagnaaagttttggnccgtcttggcganaaagaccnagaagagcctaggctggatgtcttgatcaataacgcagggatcttccagtgcccttacatgaagactgaagatgggtttgagatgcagttcggagtgaaccatctggggcactttctactcaccaatcttctccttggactcctcaaaagttcagctcccagcaggattgtggtagtttcttccaaactttataaatacggagacatcaattttgatgacttgaacagtgaacaaagctataataaaagcttttgttatagccggagcaaactggctaacattctttttaccagggaactagcccgccgcttagaaggcacaaatgtcaccgtcaatgtgttgcatcctggtattgtacggacaaatctggggaggcacatacacattccactgttggtcaaaccactcttcaatttggtgtcatgggcttttttcaaaactccagtagaaggtgcccagacttccatttatttggcctcttcacctgaggtagaaggagtgtcaggaagatactttggggattgtaaagaggaagaactgttgcccaaagctatggatgaatctgttgcaagaaaactctgggatatcagtgaagtgatggttggcctgctaaaataggaacaaggagtaaaagagctgtttataaaactgcatatcagttatatctgtgatcaggaatggtgtggattgagaacttgttacttgaagaaaaagaattttgatattggaatagcctgctaagaggtacatgtgggtattttggagttactgaaaaattatttttgggataagagaatttcagcaaagatgttttaaatatatatagtaagtataatgaataataagtacaatgaaaaatacaattatattgtaaaattataactgggcaagcatggatgacatattaatatttgtcagaattaagtgactcaaagtgctatcgagaggtttttcaagtatctttgagtttcatggccaaagtgttaactagttttactacaatgtttggtgtttgtgtggaaattatctgcctggtgtgtgcacacaagtcttacttggaataaatttactggtacaaatt

SEQ ID NO: 430445 - DNA, 1245 bp, Homo sapiens
agcttccacggagggcgcaggacccagggcgctgaactctcacaaccaatcaggcgacccccccagagggaaactacaagtcccagcatgccccacgcgcaccgtcaggggccgacccgccgcgccccagcgttctccgcgtacaggtggtctcttgggttccggaagagcctaggctggatgtcttgatcaataacgcagggatcttccagtgcccttacatgaagactgaagatgggtttgagatgcagttcggagtgaaccatctggggcactttctactcaccaatcttctccttggactcctcaaaagttcagctcccagcaggattgtggtagtttcttccaaactttataaatacggagacatcaattttgatgacttgaacagtgaacaaagctataataaaagcttttgttatagccggagcaaactggctaacattctttttaccagggaactagcccgccgcttagaaggcacaaatgtcaccgtcaatgtgttgcatcctggtattgtacggacaaatctggggaggcacatacacattccactgttggtcaaaccactcttcaatttggtgtcatgggcttttttcaaaactccagtagaaggtgcccagacttccatttatttggcctcttcacctgaggtagaaggagtgtcaggaagatactttggggattgtaaagaggaagaactgttgcccaaagctatggatgaatctgttgcaagaaaactctgggatatcagtgaagtgatggttggcctgctaaaataggaacaaggagtaaaagagctgtttataaaactgcatatcagttatatctgtgatcaggaatggtgtggattgagaacttgttacttgaagaaaaagaattttgatattggaatagcctgctaagaggtacatgtgggtattttggagttactgaaaaattatttttgggataagagaatttcagcaaagatgttttaaatatatatagtaagtataatgaataataagtacaatgaaaaatacaattatattgtaaaattataactgggcaagcatggatgacatattaatatttgtcagaattaagtgactcaaagtgctatcgagaggtttttcaagtatctttgagtttcatggccaaagtgttaactagttttactacaatgtttggtgtttgtgtggaaattatctgcctggtgtgtgcacacaagtcttacttggaataaatttactggtacaaatt

SEQ ID NO: 430446 - DNA, 1077 bp, Homo sapiens
atgggttggattttatactaactctagtttttactagaaatttaatctctgattattttaaatgagccagaatagctttaaaagaaagttctgttatattgactaacagaatgaaagggaacctgctttgggatttcacaagcaagtttttcatacttgtgagaattctaagtatccatcactgttctttaaatgcatttgatgagatgggccctccaggagccacagaattcatcctcctctctctagggctatgcctgttgctttcattacccttttataatttgtggctgcagggagaggctctgttaagatatttcagaatataaatgctactacttttcatttctgttcttttcttgcctttccaagtgtgcacagggacttgtgcagctagagattggaagactccgagctggttcctggacctccgcaaggacgacatcacagaacagtcaggttgtcgatggcttctcatcagactgactcactcttctgcccccactgggagaaagttccccatttaataaatggttgtttggaaataatatctaatgtacagcatattcacagcaccaagtttagtgaactttcatgtgtttgaaataaaaatgaaaggtgggatggaaattcattaatccctagatttttctctcctttattgcttgcaaatgttttcttggaagctcttttctctctattagttctatattgcctatgcacgcatgtacacagctgtgtttatttaaaaaaaaaaaaaggcaacatctggtggcaatttgaccctcattagcacaacattgttctattcattcaattaaatattgctataaagttaacttgtgactagccactcacacatgccgagggcaattaatggcatattcctaggagaaccaagtgtgggggtttttcctgtgggagggagggcttagtgggtgatattttgtgggttagcaaacatcttatatttatttgcaaagctgatgtaagtgccatttttttttagcaaagtatatttcactatatttttttcattgtaatggctgacaaaatcaagatggtagactgtatggt

SEQ ID NO: 430447 - DNA, 606 bp, Homo sapiens
tgctaatcaaggtcttattatacttgttttagcaaaatacataatacattttgggtaataaagttgactgtaaccccaaatgaaacatagtgcccattagctgactatatatacataaacactatgtggcaacctaggaaaatggttttgattttatgtggagcaagaacagctgaaatgattctatggtctccaccttggtgattgaaaccatatacaaaagcacacataatggagaaagcaatggaggaaatgtctaaatgggattgggttgaggtagtaagagaatagtgtgggtgatttttgttttctttcctggcctcctcacgattttctgttagatggttatggtgacatcagtaattggcacactaatggataagtatgcatttagggggtcaagtcagtgtctgcacacaggtgacccctgggtctttctttcagggtagtcagcagagtgcacacagcagctgtcatccctccttcgctcctgtcatcactggcctgcaaaacctggttggcacaaaaagagtttcagatccttcccagaaaaattcaggtattacacggacacacccagagcaaaactatcctgttacccaaatt

SEQ ID NO: 430448 - DNA, 720 bp, Homo sapiens
gagacactcttaaaaaaaaaaaaaaaaaaaaaagtttgagagaatagtccttgtgtcaaatggtctagataaattgaataagattaggattgagaactgacccttggatacagcatggtttctctaattctccccttctttataatgaaatacctttttttcactttttccccaggttgtagcagataccaatataagcgccatagcagctcagcttgaaaacatgtctacaggctaccaccttggttcgcccactgctgaacaccatccagaagacacagagtgagtatttcagatgcagagggcctattatgcatgtgggcaaagctcggaagaacttttccagacactcaagtgcactctaaaggagaagtggccaaagcgcccgtgactttttctaaattctagggaatccttatttctcacaaggcttaattccaccacatgagttcttgaaagaccattgttgcagggcctgcacacacactgcatctggtcactttgacacagtgcctatgcctgcttccctaagaaaccacggatgtatagcccaggtgcacgctgctttattgtgcaaggaaccacgtttcctgaacttctaggctaaaatcttgttctgagatgaaatcttgttgttatacttgctgacatgtttcattaaaaccagtcatcgcagttaaagttgttcattaaagcagggtttctcaaactaaaaaaaag

SEQ ID NO: 430449 - DNA, 4653 bp, Homo sapiens
  misc_feature (1630)..(1631): n is a, c, g, or t
  misc_feature (1701)..(1701): n is a, c, g, or t
  misc_feature (1787)..(1787): n is a, c, g, or t
  misc_feature (1805)..(1805): n is a, c, g, or t
gtggtttccaggctcctctgtcagtggaccccgcaacgtgtcccattgtccctggacaggaaatgattatagaaatatccaagggacgttcagggcttggtctcagcattgtgggaggaaaagacacacccttgaatgctatagttatccatgaagtctatgaagaaggggcagcagccagagatggaagactttgggctggtgaccagatattagaggttaatggggttgacctgaggaactccagccacgaagaagccatcacagccctgaggcagaccccccagaaggtgcggctggtggtgtatagagatgaagcacactaccgggatgaggagaacttggagattttccctgtggatctgcagaagaaagctggccggggcctgggcctgagcatcgttgggaaacgaaatggaagcggagtgtttatttctgacatcgtgaaaggcggagccgcagacctggatgggagattgattcagggagatcagatcttatctgtgaatggggaggacatgagaaatgcctcacaggagacagtggccaccatcctcaagtgtgcacagggacttgtgcagctagagattggaagactccgagctggttcctggacctccgcaaggacgacatcacagaacagtcagggtagtcagcagagtgcacacagcagctgtcatccctccttcgctcctgtcatcactggcctgcaaaacctggttggcacaaaaagagtttcagatccttcccagaaaaattcaggcacagatatggaaccaaggactgttgagataaacagggagctcagtgatgcccttggaatcagtattgctggaggaagaggaagtcccttaggagatatccccgtatttattgccatgattcaggctagcggagtggccgcacggacacagaagcttaaagttggagatcggattgtcagcattaacgggcaacctttggatgggctgtctcacgcggatgtggttaatctgctgaagaacgcctacgggcgcattatcctgcaggttgtagcagataccaatataagcgccatagcagctcagcttgaaaacatgtctacaggctaccaccttggttcgcccactgctgaacaccatccagaagacacagaggagcagctgcagatgacggccgattaaaacgaggggatcagattttagctgttaatggcgagaccctggaaggtgttactcatgagcaagcagtcgccattctaaaacaccagagagggactgtaaccttaactgtgctgtcatgagcctcgggcctgatcacaagatagatgttgttgtttagaatatccacaggcagatgaagttctgagtgggtatgaaaagcaccctcaactaaaatgcaccttcattcttatttcttgccctctctgctcaggagaaatggctgaggtttcatgtgaatttcccaaatcaacaatcatctcctaatgtttcccagttcctgtcacctgttggcgaggttgatttctaaaacttaaatgagtctacctgttttgcatttaatttcagtgttccgatttctttttttttttttttttttttgagacggagtctcactctgtcacccaggctggagtgcaatggcgcaatcnnggctcactgcaacctcggcctcccaggttggagcgattctcctgcctcagcctcccgagtagctgggatnacaggcatgcatcaccacactgggtttatttttgtttttttagtagagatggagcttccccatgtgggccaggctggtcttgaacntctgacctcaggtgatcngcctgccttggcctcccaaagtgctgggattccaggcgtgagccactgcgcccagcccagtattctgattttaaccaactggttctgattatatttaccaaaactggagttaacttctctttccttatactcttctctccctatcccctactcacaccgaggcttaacagcaacctcagatctcatccaatggacagaaacaaatgttaagcaacttgtcatctcactcatgatttacttatgctaattgtctcttcaagtaagcaagaaaacattagcagtgtaattaatttaccagtgatccccaagatgaaataccagattctcctatgggaaattactgtgctgtcttctgtatgacttatggtcaaataagtctcaaattcatttctctggatagatctttatatgctagtcattggtgattttgatgagtcaatttacagactgtaatcttctaaaaattctgaaagactaattgttttctgtgccatataaatgcataccactgagcaaatgaaccttattctcagcaggaacaactagcatacatgttctgaattctaacagtgctaaattacattcaagtccaggaagatcacctggaattaatggcatttcagttggcaggcatcattcccacccctcggtcttaggaaaaggaggtagaagccccagaaccacacggcagagatcagcaagttttgtctcaagtcagacaaggtctaggtggccttggccttatgcaaagtgggtgacatatttgattatatttccctttacctccatagtagtcaggccagcagcatggactgcaagaacctaagggagcaacatacttagctgcaaagtgagcaaatgaattgagcctaggaatatgtgatgaaaatgcatggctgatgtttcctgatctccaaggagactcccatttgctgaagttttgcatgctaagaaatcaactacagcagaaaatacaagaatacctttaagttgattattggcaatcttattcatatattagcaagaaaaagggagagatgcttactggtggatgctatagagtcctctgtttttaaaagtaccatggccgggtgcagtggctcacgcctgtaatcccagcactttgggaggccagggcaggcgaatcatgaggtcaggagttcgagaccagcctggccaatatggtgaaaccctgtctctactaaaaatacaaaaattagctgggtgcagtggcaggcgcctgtaatcccagctactccggaggttgaagcaggaaaattgcttgaacctgggaggtggaggttgcagtgagccaagttcgtgccactccactccagcctgggtgacagagcaagactctgtctcgaaaaagaaaaaaaaccatgaaggatgagtactagagtcagtaatagaagtagttcagcattatttaactacaacacaatgctgcaaatatttcacagtaattatcaaaatttaatgggctctaatttaaaatgttatttaataagtatagattttaattgagaattatctttgagtagatgtaatcacaaagtgcattaactcttgttggaatattttatggctattccaaagtatagagtgcctaaattttgtgttgaaaatgtctttcatgacggtattaagttttctgaaattacacatggcttttaaaatttctaatgtatccaagatgtgcaatgttgttaggatctcattcttcagtgcatgaaaagctactaccctcagaacattttgtgttaattgtacctgcaagaacacctcaggcaagccaagaagaaatgaaacccaaataaaacttgaaaatgcaccttaaaaatatatatacatataatagttttgaaatgggattctgctttattttgatggaatggccattaaatacacattttgagataatacattgttgtggtgtttctttatacattatccttttaggtcgtgctagtaaaagtatattgatgaaggaattatgatgctttatacttcttactgcactaaattgatagaactagtacttgtcataatcggttctgtctccgctcacatgactaatacgtaattgcctttccaaaaagatatttttgcctcagaacttactgacaagctgagaggctatgaagatggaaatttgtgaaagaagtagtgctcttatatttggcctcatcatttgggccatttcagtatagtaatgatatcactaatcggaattagcatgagagggaagtaagccaggaagaataaaactgctgaatgtttgtatgtgtaagatatttccaaagattctaaataaatgtagttgcctacagagcaaatggagttttattatatatgaaaaagtgtactttctggatctaattgtgctttttcttcagcattttcttccctaatagaaaaaaaaaaaaagtccaacttttcacaaggttttttggtgtcctgttaaaatctggaatccatgtggctcaggatccatgccgccatgcccagccaacctctaatgtttctttcctggccctttcatgcatgtgcaggtgagtatttgacaaagaggcgatctccatggctctgtcaacctacagctccctcctttccagacactacatgttctagccaacttggctggcctccctgaacgtgaatctctttctcctctactcgtggactctgtgtgagtttccccttcctgagtgtgacatggatactgcctccagggataaaactgggacagttgtagaatttaccttgttttccttcttgcagggatcaaaatcctatgctgcctgttatctgatgtctaaaaatgtttcatatattatgtccattt

SEQ ID NO: 430450 - DNA, 3546 bp, Homo sapiens
  misc_feature (523)..(524): n is a, c, g, or t
  misc_feature (594)..(594): n is a, c, g, or t
  misc_feature (680)..(680): n is a, c, g, or t
  misc_feature (698)..(698): n is a, c, g, or t
attaaactgaaatgtttcttgtttgtagggagcagctgcagatgacggccgattaaaacgaggggatcagattttagctgttaatggcgagaccctggaaggtgttactcatgagcaagcagtcgccattctaaaacaccagagagggactgtaaccttaactgtgctgtcatgagcctcgggcctgatcacaagatagatgttgttgtttagaatatccacaggcagatgaagttctgagtgggtatgaaaagcaccctcaactaaaatgcaccttcattcttatttcttgccctctctgctcaggagaaatggctgaggtttcatgtgaatttcccaaatcaacaatcatctcctaatgtttcccagttcctgtcacctgttggcgaggttgatttctaaaacttaaatgagtctacctgttttgcatttaatttcagtgttccgatttctttttttttttttttttttttgagacggagtctcactctgtcacccaggctggagtgcaatggcgcaatcnnggctcactgcaacctcggcctcccaggttggagcgattctcctgcctcagcctcccgagtagctgggatnacaggcatgcatcaccacactgggtttatttttgtttttttagtagagatggagcttccccatgtgggccaggctggtcttgaacntctgacctcaggtgatcngcctgccttggcctcccaaagtgctgggattccaggcgtgagccactgcgcccagcccagtattctgattttaaccaactggttctgattatatttaccaaaactggagttaacttctctttccttatactcttctctccctatcccctactcacaccgaggcttaacagcaacctcagatctcatccaatggacagaaacaaatgttaagcaacttgtcatctcactcatgatttacttatgctaattgtctcttcaagtaagcaagaaaacattagcagtgtaattaatttaccagtgatccccaagatgaaataccagattctcctatgggaaattactgtgctgtcttctgtatgacttatggtcaaataagtctcaaattcatttctctggatagatctttatatgctagtcattggtgattttgatgagtcaatttacagactgtaatcttctaaaaattctgaaagactaattgttttctgtgccatataaatgcataccactgagcaaatgaaccttattctcagcaggaacaactagcatacatgttctgaattctaacagtgctaaattacattcaagtccaggaagatcacctggaattaatggcatttcagttggcaggcatcattcccacccctcggtcttaggaaaaggaggtagaagccccagaaccacacggcagagatcagcaagttttgtctcaagtcagacaaggtctaggtggccttggccttatgcaaagtgggtgacatatttgattatatttccctttacctccatagtagtcaggccagcagcatggactgcaagaacctaagggagcaacatacttagctgcaaagtgagcaaatgaattgagcctaggaatatgtgatgaaaatgcatggctgatgtttcctgatctccaaggagactcccatttgctgaagttttgcatgctaagaaatcaactacagcagaaaatacaagaatacctttaagttgattattggcaatcttattcatatattagcaagaaaaagggagagatgcttactggtggatgctatagagtcctctgtttttaaaagtaccatggccgggtgcagtggctcacgcctgtaatcccagcactttgggaggccagggcaggcgaatcatgaggtcaggagttcgagaccagcctggccaatatggtgaaaccctgtctctactaaaaatacaaaaattagctgggtgcagtggcaggcgcctgtaatcccagctactccggaggttgaagcaggaaaattgcttgaacctgggaggtggaggttgcagtgagccaagttcgtgccactccactccagcctgggtgacagagcaagactctgtctcgaaaaagaaaaaaaaccatgaaggatgagtactagagtcagtaatagaagtagttcagcattatttaactacaacacaatgctgcaaatatttcacagtaattatcaaaatttaatgggctctaatttaaaatgttatttaataagtatagattttaattgagaattatctttgagtagatgtaatcacaaagtgcattaactcttgttggaatattttatggctattccaaagtatagagtgcctaaattttgtgttgaaaatgtctttcatgacggtattaagttttctgaaattacacatggcttttaaaatttctaatgtatccaagatgtgcaatgttgttaggatctcattcttcagtgcatgaaaagctactaccctcagaacattttgtgttaattgtacctgcaagaacacctcaggcaagccaagaagaaatgaaacccaaataaaacttgaaaatgcaccttaaaaatatatatacatataatagttttgaaatgggattctgctttattttgatggaatggccattaaatacacattttgagataatacattgttgtggtgtttctttatacattatccttttaggtcgtgctagtaaaagtatattgatgaaggaattatgatgctttatacttcttactgcactaaattgatagaactagtacttgtcataatcggttctgtctccgctcacatgactaatacgtaattgcctttccaaaaagatatttttgcctcagaacttactgacaagctgagaggctatgaagatggaaatttgtgaaagaagtagtgctcttatatttggcctcatcatttgggccatttcagtatagtaatgatatcactaatcggaattagcatgagagggaagtaagccaggaagaataaaactgctgaatgtttgtatgtgtaagatatttccaaagattctaaataaatgtagttgcctacagagcaaatggagttttattatatatgaaaaagtgtactttctggatctaattgtgctttttcttcagcattttcttccctaatagaaaaaaaaaaaaagtccaacttttcacaaggttttttggtgtcctgttaaaatctggaatccatgtggctcaggatccatgccgccatgcccagccaacctctaatgtttctttcctggccctttcatgcatgtgcaggtgagtatttgacaaagaggcgatctccatggctctgtcaacctacagctccctcctttccagacactacatgttctagccaacttggctggcctccctgaacgtgaatctctttctcctctactcgtggactctgtgtgagtttccccttcctgagtgtgacatggatactgcctccagggataaaactgggacagttgtagaatttaccttgttttccttcttgcagggatcaaaatcctatgctgcctgttatctgatgtctaaaaatgtttcatatattatgtccattt

SEQ ID NO: 430451 - DNA, 3727 bp, Homo sapiens
  misc_feature (1630)..(1631): n is a, c, g, or t
  misc_feature (1701)..(1701): n is a, c, g, or t
  misc_feature (1787)..(1787): n is a, c, g, or t
  misc_feature (1805)..(1805): n is a, c, g, or t
gtggtttccaggctcctctgtcagtggaccccgcaacgtgtcccattgtccctggacaggaaatgattatagaaatatccaagggacgttcagggcttggtctcagcattgtgggaggaaaagacacacccttgaatgctatagttatccatgaagtctatgaagaaggggcagcagccagagatggaagactttgggctggtgaccagatattagaggttaatggggttgacctgaggaactccagccacgaagaagccatcacagccctgaggcagaccccccagaaggtgcggctggtggtgtatagagatgaagcacactaccgggatgaggagaacttggagattttccctgtggatctgcagaagaaagctggccggggcctgggcctgagcatcgttgggaaacgaaatggaagcggagtgtttatttctgacatcgtgaaaggcggagccgcagacctggatgggagattgattcagggagatcagatcttatctgtgaatggggaggacatgagaaatgcctcacaggagacagtggccaccatcctcaagtgtgcacagggacttgtgcagctagagattggaagactccgagctggttcctggacctccgcaaggacgacatcacagaacagtcagggtagtcagcagagtgcacacagcagctgtcatccctccttcgctcctgtcatcactggcctgcaaaacctggttggcacaaaaagagtttcagatccttcccagaaaaattcaggcacagatatggaaccaaggactgttgagataaacagggagctcagtgatgcccttggaatcagtattgctggaggaagaggaagtcccttaggagatatccccgtatttattgccatgattcaggctagcggagtggccgcacggacacagaagcttaaagttggagatcggattgtcagcattaacgggcaacctttggatgggctgtctcacgcggatgtggttaatctgctgaagaacgcctacgggcgcattatcctgcaggttgtagcagataccaatataagcgccatagcagctcagcttgaaaacatgtctacaggctaccaccttggttcgcccactgctgaacaccatccagaagacacagaggagcagctgcagatgacggccgattaaaacgaggggatcagattttagctgttaatggcgagaccctggaaggtgttactcatgagcaagcagtcgccattctaaaacaccagagagggactgtaaccttaactgtgctgtcatgagcctcgggcctgatcacaagatagatgttgttgtttagaatatccacaggcagatgaagttctgagtgggtatgaaaagcaccctcaactaaaatgcaccttcattcttatttcttgccctctctgctcaggagaaatggctgaggtttcatgtgaatttcccaaatcaacaatcatctcctaatgtttcccagttcctgtcacctgttggcgaggttgatttctaaaacttaaatgagtctacctgttttgcatttaatttcagtgttccgatttctttttttttttttttttttttgagacggagtctcactctgtcacccaggctggagtgcaatggcgcaatcnnggctcactgcaacctcggcctcccaggttggagcgattctcctgcctcagcctcccgagtagctgggatnacaggcatgcatcaccacactgggtttatttttgtttttttagtagagatggagcttccccatgtgggccaggctggtcttgaacntctgacctcaggtgatcngcctgccttggcctcccaaagtgctgggattccaggcgtgagccactgcgcccagcccagtattctgattttaaccaactggttctgattatatttaccaaaactggagttaacttctctttccttatactcttctctccctatcccctactcacaccgaggcttaacagcaacctcagatctcatccaatggacagaaacaaatgttaagcaacttgtcatctcactcatgatttacttatgctaattgtctcttcaagtaagcaagaaaacattagcagtgtaattaatttaccagtgatccccaagatgaaataccagattctcctatgggaaattactgtgctgtcttctgtatgacttatggtcaaataagtctcaaattcatttctctggatagatctttatatgctagtcattggtgattttgatgagtcaatttacagactgtaatcttctaaaaattctgaaagactaattgttttctgtgccatataaatgcataccactgagcaaatgaaccttattctcagcaggaacaactagcatacatgttctgaattctaacagtgctaaattacattcaagtccaggaagatcacctggaattaatggcatttcagttggcaggcatcattcccacccctcggtcttaggaaaaggaggtagaagccccagaaccacacggcagagatcagcaagttttgtctcaagtcagacaaggtctaggtggccttggccttatgcaaagtgggtgacatatttgattatatttccctttacctccatagtagtcaggccagcagcatggactgcaagaacctaagggagcaacatacttagctgcaaagtgagcaaatgaattgagcctaggaatatgtgatgaaaatgcatggctgatgtttcctgatctccaaggagactcccatttgctgaagttttgcatgctaagaaatcaactacagcagaaaatacaagaatacctttaagttgattattggcaatcttattcatatattagcaagaaaaagggagagatgcttactggtggatgctatagagtcctctgtttttaaaagtaccatggccgggtgcagtggctcacgcctgtaatcccagcactttgggaggccagggcaggcgaatcatgaggtcaggagttcgagaccagcctggccaatatggtgaaaccctgtctctactaaaaatacaaaaattagctgggtgcagtggcaggcgcctgtaatcccagctactccggaggttgaagcaggaaaattgcttgaacctgggaggtggaggttgcagtgagccaagttcgtgccactccactccagcctgggtgacagagcaagactctgtctcgaaaaagaaaaaaaaccatgaaggatgagtactagagtcagtaatagaagtagttcagcattatttaactacaacacaatgctgcaaatatttcacagtaattatcaaaatttaatgggctctaatttaaaatgttatttaataagtatagattttaattgagaattatctttgagtagatgtaatcacaaagtgcattaactcttgttggaatattttatggctattccaaagtatagagtgcctaaattttgtgttgaaaatgtctttcatgacggtattaagttttctgaaattacacatggcttttaaaatttctaatgtatccaagatgtgcaatgttgttaggatctcattcttcagtgcatgaaaagctactaccctcagaacattttgtgttaattgtacctgcaagaacacctcaggcaagccaagaagaaatgaaacccaaataaaacttgaaaatgcaccttaaaaatatatatacatataatagttttgaaatgggattctgctttattttgatggaatggccattaaatacacattttgagata

SEQ ID NO: 430452 - DNA, 3160 bp, Homo sapiens
gtggtttccaggctcctctgtcagtggaccccgcaacgtgtcccattgtccctggacaggaaatgattatagaaatatccaagggacgttcagggcttggtctcagcattgtgggaggaaaagacacacccttgaatgctatagttatccatgaagtctatgaagaaggggcagcagccagagatggaagactttgggctggtgaccagatattagaggttaatggggttgacctgaggaactccagccacgaagaagccatcacagccctgaggcagaccccccagaaggtgcggctggtggtgtatagagatgaagcacactaccgggatgaggagaacttggagattttccctgtggatctgcagaagaaagctggccggggcctgggcctgagcatcgttgggaaacgaaatggaagcggagtgtttatttctgacatcgtgaaaggcggagccgcagacctggatgggagattgattcagggagatcagatcttatctgtgaatggggaggacatgagaaatgcctcacaggagacagtggccaccatcctcaagtgtgcacagggacttgtgcagctagagattggaagactccgagctggttcctggacctccgcaaggacgacatcacagaacagtcagggtagtcagcagagtgcacacagcagctgtcatccctccttcgctcctgtcatcactggcctgcaaaacctggttggcacaaaaagagtttcagatccttcccagaaaaattcaggcacagatatggaaccaaggactgttgagataaacagggagctcagtgatgcccttggaatcagtattgctggaggaagaggaagtcccttaggagatatccccgtatttattgccatgattcaggctagcggagtggccgcacggacacagaagcttaaagttggagatcggattgtcagcattaacgggcaacctttggatgggctgtctcacgcggatgtggttaatctgctgaagaacgcctacgggcgcattatcctgcaggttgtagcagataccaatataagcgccatagcagctcagcttgaaaacatgtctacaggctaccaccttggttcgcccactgctgaacaccatccagaagacacagaggagcagctgcagatgacggccgattaaaacgaggggatcagattttagctgttaatggcgagaccctggaaggtgttactcatgagcaagcagtcgccattctaaaacaccagagagggactgtaaccttaactgtgctgtcatgagcctcgggcctgatcacaagatagatgttgttgtttagaatatccacaggcagatgaagttctgagtgggtatgaaaagcaccctcaactaaaatgcaccttcattcttatttcttgccctctctgctcaggagaaatggctgaggtttcatgtgaatttcccaaatcaacaatcatctcctaatgtttcccagttcctgtcacctgttggcgaggttgatttctaaaacttaaatgagtctacctgttttgcatttaatttcagtgttccgatttctttttttttttttttttttttgagacggagtctcactctgtcacccaggctggagttgcagtgagccaagttcgtgccactccactccagcctgggtgacagagcaagactctgtctcgaaaaagaaaaaaaaccatgaaggatgagtactagagtcagtaatagaagtagttcagcattatttaactacaacacaatgctgcaaatatttcacagtaattatcaaaatttaatgggctctaatttaaaatgttatttaataagtatagattttaattgagaattatctttgagtagatgtaatcacaaagtgcattaactcttgttggaatattttatggctattccaaagtatagagtgcctaaattttgtgttgaaaatgtctttcatgacggtattaagttttctgaaattacacatggcttttaaaatttctaatgtatccaagatgtgcaatgttgttaggatctcattcttcagtgcatgaaaagctactaccctcagaacattttgtgttaattgtacctgcaagaacacctcaggcaagccaagaagaaatgaaacccaaataaaacttgaaaatgcaccttaaaaatatatatacatataatagttttgaaatgggattctgctttattttgatggaatggccattaaatacacattttgagataatacattgttgtggtgtttctttatacattatccttttaggtcgtgctagtaaaagtatattgatgaaggaattatgatgctttatacttcttactgcactaaattgatagaactagtacttgtcataatcggttctgtctccgctcacatgactaatacgtaattgcctttccaaaaagatatttttgcctcagaacttactgacaagctgagaggctatgaagatggaaatttgtgaaagaagtagtgctcttatatttggcctcatcatttgggccatttcagtatagtaatgatatcactaatcggaattagcatgagagggaagtaagccaggaagaataaaactgctgaatgtttgtatgtgtaagatatttccaaagattctaaataaatgtagttgcctacagagcaaatggagttttattatatatgaaaaagtgtactttctggatctaattgtgctttttcttcagcattttcttccctaatagaaaaaaaaaaaaagtccaacttttcacaaggttttttggtgtcctgttaaaatctggaatccatgtggctcaggatccatgccgccatgcccagccaacctctaatgtttctttcctggccctttcatgcatgtgcaggtgagtatttgacaaagaggcgatctccatggctctgtcaacctacagctccctcctttccagacactacatgttctagccaacttggctggcctccctgaacgtgaatctctttctcctctactcgtggactctgtgtgagtttccccttcctgagtgtgacatggatactgcctccagggataaaactgggacagttgtagaatttaccttgttttccttcttgcagggatcaaaatcctatgctgcctgttatctgatgtctaaaaatgtttcatatattatgtccattt

SEQ ID NO: 430453 - DNA, 1515 bp, Homo sapiens
gtggtttccaggctcctctgtcagtggaccccgcaacgtgtcccattgtccctggacaggaaatgattatagaaatatccaagggacgttcagggcttggtctcagcattgtgggaggaaaagacacacccttgaatgctatagttatccatgaagtctatgaagaaggggcagcagccagagatggaagactttgggctggtgaccagatattagaggttaatggggttgacctgaggaactccagccacgaagaagccatcacagccctgaggcagaccccccagaaggtgcggctggtggtgtatagagatgaagcacactaccgggatgaggagaacttggagattttccctgtggatctgcagaagaaagctggccggggcctgggcctgagcatcgttgggaaacgaaatggaagcggagtgtttatttctgacatcgtgaaaggcggagccgcagacctggatgggagattgattcagggagatcagatcttatctgtgaatggggaggacatgagaaatgcctcacaggagacagtggccaccatcctcaagtgtgcacagggacttgtgcagctagagattggaagactccgagctggttcctggacctccgcaaggacgacatcacagaacagtcagggtagtcagcagagtgcacacagcagctgtcatccctccttcgctcctgtcatcactggcctgcaaaacctggttggcacaaaaagagtttcagatccttcccagaaaaattcaggcacagatatggaaccaaggactgttgagataaacagggagctcagtgatgcccttggaatcagtattgctggaggaagaggaagtcccttaggagatatccccgtatttattgccatgattcaggctagcggagtggccgcacggacacagaagcttaaagttggagatcggattgtcagcattaacgggcaacctttggatgggctgtctcacgcggatgtggttaatctgctgaagaacgcctacgggcgcattatcctgcaggttgtagcagataccaatataagcgccatagcagctcagcttgaaaacatgtctacaggctaccaccttggttcgcccactgctgaacaccatccagaagacacagaggagcagctgcagatgacggccgattaaaacgaggggatcagattttagctgttaatggcgagaccctggaaggtgttactcatgagcaagcagtcgccattctaaaacaccagagagggactgtaaccttaactgtgctgtcatgagcctcgggcctgatcacaagatagatgttgttgtttagaatatccacaggcagatgaagttctgagtgggtatgaaaagcaccctcaactaaaatgcaccttcattcttatttcttgccctctctgctcaggagaaatggctgaggtttcatgtgatcgtccacgggattctacacagtatctgacgatgtatacgacggccagtaccagcggagctgacagtgattagagga

SEQ ID NO: 430454 - DNA, 1498 bp, Homo sapiens
gtggtttccaggctcctctgtcagtggaccccgcaacgtgtcccattgtccctggacaggaaatgattatagaaatatccaagggacgttcagggcttggtctcagcattgtgggaggaaaagacacacccttgaatgctatagttatccatgaagtctatgaagaaggggcagcagccagagatggaagactttgggctggtgaccagatattagaggttaatggggttgacctgaggaactccagccacgaagaagccatcacagccctgaggcagaccccccagaaggtgcggctggtggtgtatagagatgaagcacactaccgggatgaggagaacttggagattttccctgtggatctgcagaagaaagctggccggggcctgggcctgagcatcgttgggaaacgaaatggaagcggagtgtttatttctgacatcgtgaaaggcggagccgcagacctggatgggagattgattcagggagatcagatcttatctgtgaatggggaggacatgagaaatgcctcacaggagacagtggccaccatcctcaagtgtgcacagggacttgtgcagctagagattggaagactccgagctggttcctggacctccgcaaggacgacatcacagaacagtcagggtagtcagcagagtgcacacagcagctgtcatccctccttcgctcctgtcatcactggcctgcaaaacctggttggcacaaaaagagtttcagatccttcccagaaaaattcaggcacagatatggaaccaaggactgttgagataaacagggagctcagtgatgcccttggaatcagtattgctggaggaagaggaagtcccttaggagatatccccgtatttattgccatgattcaggctagcggagtggccgcacggacacagaagcttaaagttggagatcggattgtcagcattaacgggcaacctttggatgggctgtctcacgcggatgtggttaatctgctgaagaacgcctacgggcgcattatcctgcaggtattgcgatcaacggagcacgcagctgtgcaaggcagataagtggcatgcaaaaaagattgagcgtcactggcagtagacatcgccacccagcagggtgcttgctgatgtgaattacgaaggttgaaagcaagaaattattatttttattcagaaattctttaatgccacccatacaggtagtgagcatgattatatgaaagcataacaaggggagaaaaattactctctgcttcacatgataaatcaacacagcttttagtttccagtgttcttttgtaaatcagaatttgtaaggaataagaaatgatttcttttcttatgcccaaagactgttactgaactgcccaagtgctgtttcttcttttccccttaaaggaagaggaaaaatacaatggtctttttcctttagcatagattgccaacactgttaaattgtcacgcgtagcagtcatcaaccaaggcagaca

SEQ ID NO: 430455 - DNA, 1573 bp, Homo sapiens
gtggtttccaggctcctctgtcagtggaccccgcaacgtgtcccattgtccctggacaggaaatgattatagaaatatccaagggacgttcagggcttggtctcagcattgtgggaggaaaagacacacccttgaatgctatagttatccatgaagtctatgaagaaggggcagcagccagagatggaagactttgggctggtgaccagatattagaggttaatggggttgacctgaggaactccagccacgaagaagccatcacagccctgaggcagaccccccagaaggtgcggctggtggtgtatagagatgaagcacactaccgggatgaggagaacttggagattttccctgtggatctgcagaagaaagctggccggggcctgggcctgagcatcgttgggaaacgaaatggaagcggagtgtttatttctgacatcgtgaaaggcggagccgcagacctggatgggagattgattcagggagatcagatcttatctgtgaatggggaggacatgagaaatgcctcacaggagacagtggccaccatcctcaagtgtgcacagggacttgtgcagctagagattggaagactccgagctggttcctggacctccgcaaggacgacatcacagaacagtcagggtagtcagcagagtgcacacagcagctgtcatccctccttcgctcctgtcatcactggcctgcaaaacctggttggcacaaaaagagtttcagatccttcccagaaaaattcaggcacagatatggaaccaaggactgttgagataaacagggagctcagtgatgcccttggaatcagtattgctggaggaagaggaagtcccttaggagatatccccgtatttattgccatgattcaggctagcggagtggccgcacggacacagaagcttaaagttggagatcggattgtcagcattaacgggcaacctttggatgggctgtctcacgcggatgtggttaatctgctgaagaacgcctacgggcgcattatcctgcaggttgtagcagataccaatataagcgccatagcagctcagcttgaaaacatgtctacaggctaccaccttggttcgcccactgctgaacaccatccagaagacacagagtgagtatttcagatgcagagggcctattatgcatgtgggcaaagctcggaagaacttttccagacactcaagtgcactctaaaggagaagtggccaaagcgcccgtgactttttctaaattctagggaatccttatttctcacaaggcttaattccaccacatgagttcttgaaagaccattgttgcagggcctgcacacacactgcatctggtcactttgacacagtgcctatgcctgcttccctaagaaaccacggatgtatagcccaggtgcacgctgctttattgtgcaaggaaccacgtttcctgaacttctaggctaaaatcttgttctgagatgaaatcttgttgttatacttgctgacatgtttcattaaaaccagtcatcgcagttaaagttgttcattaaagcagggtttctcaaactaaaaaaaag

SEQ ID NO: 430456 - DNA, 1257 bp, Homo sapiens
gtggtttccaggctcctctgtcagtggaccccgcaacgtgtcccattgtccctggacaggaaatgattatagaaatatccaagggacgttcagggcttggtctcagcattgtgggaggaaaagacacacccttgaatgctatagttatccatgaagtctatgaagaaggggcagcagccagagatggaagactttgggctggtgaccagatattagaggttaatggggttgacctgaggaactccagccacgaagaagccatcacagccctgaggcagaccccccagaaggtgcggctggtggtgtatagagatgaagcacactaccgggatgaggagaacttggagattttccctgtggatctgcagaagaaagctggccggggcctgggcctgagcatcgttgggaaacgaaatggaagcggagtgtttatttctgacatcgtgaaaggcggagccgcagacctggatgggagattgattcagggagatcagatcttatctgtgaatggggaggacatgagaaatgcctcacaggagacagtggccaccatcctcaagtgtgcacagggacttgtgcagctagagattggaagactccgagctggttcctggacctccgcaaggacgacatcacagaacagtcagggtagtcagcagagtgcacacagcagctgtcatccctccttcgctcctgtcatcactggcctgcaaaacctggttggcacaaaaagagtttcagatccttcccagaaaaattcaggcacagatatggaaccaaggactgttgagataaacagggagctcagtgatgcccttggaatcagtattgctggaggaagaggaagtcccttaggagatatccccgtatttattgccatgattcaggctagcggagtggccgcacggacacagaagcttaaagttggagatcggattgtcagcattaacgggcaacctttggatgggctgtctcacgcggatgtggttaatctgctgaagaacgcctacgggcgcattatcctgcaggttgtagcagataccaatataagcgccatagcagctcagcttgaaaacatgtctacaggctaccaccttggttcgcccactgctgaacaccatccagaagacacagaggagcagctgcagatgacggccgattaaaacgaggggatcagattttagctctggaaaatgagttcaaaaatttcagtgtactgtcatacggatgtcgggatacagagatcattttttcctt

SEQ ID NO: 430457 - DNA, 2568 bp, Homo sapiens
gtggtttccaggctcctctgtcagtggaccccgcaacgtgtcccattgtccctggacaggaaatgattatagaaatatccaagggacgttcagggcttggtctcagcattgtgggaggaaaagacacacccttgaatgctatagttatccatgaagtctatgaagaaggggcagcagccagagatggaagactttgggctggtgaccagatattagaggttaatggggttgacctgaggaactccagccacgaagaagccatcacagccctgaggcagaccccccagaaggtgcggctggtggtgtatagagatgaagcacactaccgggatgaggagaacttggagattttccctgtggatctgcagaagaaagctggccggggcctgggcctgagcatcgttgggaaacggtaaagacgtgctgtgggagttgggatctgcctttttcatccagagctctgatgcctgtgaacactgaaagagaaagcctaatgtaaagtagtgatgggatttctaaaaataagatatttatgaaaatttgacaacatgggtcatatttctgagcaaggtcttaccagaaaaattgtcatatcaagatagaactccaagtccaatcaatccagactgatatatttctgtacagagtaagaacaactagcaaggttctttcacttggaattactaagatcggagttttgcagaggttgattaaagcaaccatacccaagaaatagctagcatcaagaatgagatttatccaatgttgggtcaagaacattgcttcgacatggaaattaacatggaacattgcttttcgtgatactgttaatttcatactatgttgaaactagttgagtagacatagttaagagataaacataattcttcacgatagtagttttctattaagaaaaatgtcctgctgggcacagtggcatgtacctgttgtctcagctatgtgggaagatcacttgaggccaggagttcaaggctatagtgtgctatgatcatgcctgtgaatagccactgcacttgagcctcttgggaaacataacaagaccccatctgtaaataaaaaaaaaaaaaagaaaaggaaaaaagaaagatgtccccaaagtaatagtttgcaccaaaaatgtaggtaggtagatcctagtggccaggctactcttttgaaatatatgttgctgccagatgcagtggctcatgcctgtagtcccagcactttgggaggccgaggtgggtggatcacctgaggtcaggagttcaagaccagcctgaccaatatggtgaaaccccatctctactaaaaaatacaaaaaattagccaggcatagtggcagatgcctgtaatcccagctacttgggagactgaggcaggagaattgcttgaacttgggaggtggaggttgcagtgagctgagatcacgccattgcattccagcctgtgcaacaagagcgaaactccatctcaaaaataaataaataaataaaaagaggtatatgttgcctaggccaggcatagtggctcacgtctataatcccaacactttgggaagctgagttgggaggatcgcttgaggtgaggagttcaagatcagtctggcaacatagcaagacttgtctctaaaaaaattttttaaataaagaaaaatgaagtctatactgcttaacagtcgtttgttccaggataatattactaagtttctcttgcagtgaattggaaaggtaagtaatagcttgaaacaaagcctagcttccatggtttactggcttttaggtatctagtatgtatttatcccaacagggctataggatttccaggtaatatcctaatatggccttaaagtgtatcaaccatcttgttaaggaagaaatcaagttgcttttatgcatgttatgttatatgccctcacagacctctggtgactagcctagtgtctgtccagcaggccaagctgttattaaaataaaaatattagctacaatttttgagtactgattttgggccaagtattgtgctgtcataatttcatttttttttacttcagcaccatagaaccatcactctgaaaatgcattaccaaacaaaaaaagctgagtctcttacatttctaaacaaaaatcagtgcacatctgggtgcagagcaactgacagagccagtgttgaagtttgctttcttgttttgacacatgcgtatacctggtgcggttttatttacagcaatgttttttgcttttagtgaatgtcagtatttcaggttgagtttgtaaggaacatttacattccttagcacaaaaacttgcattgtaaaggatgagatgtatagttctcaaaagtcactattttctttgactaacaattccatcaccaggactttatcttaaagatatacttacaagtattcattgctcattgcaatagttaaagaatggaaataacctgtatgtccatcagtaagctactggtaagtgaaattatgaaacatcatagaatagtatgtagctatttaaaaaatgaggaagctccaagtgctgataaaggcaaattaccaaggtatgaaag

SEQ ID NO: 430458 - DNA, 1014 bp, Homo sapiens
gtggtttccaggctcctctgtcagtggaccccgcaacgtgtcccattgtccctggacaggaaatgattatagaaatatccaagggacgttcagggcttggtctcagcattgtgggaggaaaagacacacccttgaatgctatagttatccatgaagtctatgaagaaggggcagcagccagagatggaagactttgggctggtgaccagatattagaggttaatggggttgacctgaggaactccagccacgaagaagccatcacagccctgaggcagaccccccagaaggtgcggctggtggtgtatagagatgaagcacactaccgggatgaggagaacttggagattttccctgtggatctgcagaagaaagctggccggggcctgggcctgagcatcgttgggaaacgaaatggaagcggagtgtttatttctgacatcgtgaaaggcggagccgcagacctggatgggagattgattcagggagatcagatcttatctgtgaatggggaggacatgagaaatgcctcacaggagacagtggccaccatcctcaagtgtgcacagggacttgtgcagctagagattggaagactccgagctggttcctggacctccgcaaggacgacatcacagaacagtcagggtagtcagcagagtgcacacagcagctgtcatccctccttcgctcctgtcatcactggcctgcaaaacctggttggcacaaaaagagtttcagatccttcccagaaaaattcaggcacagatatggaaccaaggactgttgagataaacagggagctcagtgatgcccttggaatcagtattgctggaggaagaggaagtcccttaggagatatccccgtatttattgccatgattcaggctagcggagtggccgcacggacacagaagcttaaagtaaacgagagaactggttgaaagactaacaatatgtgttggggtgggagaggaagttgcagccctgggcaccttgtttaaagttggaatt

SEQ ID NO: 430459 - DNA, 1265 bp, Homo sapiens
gtggtttccaggctcctctgtcagtggaccccgcaacgtgtcccattgtccctggacaggaaatgattatagaaatatccaagggacgttcagggcttggtctcagcattgtgggaggaaaagacacacccttgaatgctatagttatccatgaagtctatgaagaaggggcagcagccagagatggaagactttgggctggtgaccagatattagaggttaatggggttgacctgaggaactccagccacgaagaagccatcacagccctgaggcagaccccccagaaggtgcggctggtggtgtatagagatgaagcacactaccgggatgaggagaacttggagattttccctgtggatctgcagaagaaagctggccggggcctgggcctgagcatcgttgggaaacgaaatggaagcggagtgtttatttctgacatcgtgaaaggcggagccgcagacctggatgggagattgattcagggagatcagatcttatctgtgaatggggaggacatgagaaatgcctcacaggagacagtggccaccatcctcaagtgtgcacagggacttgtgcagctagagattggaagactccgagctggttcctggacctccgcaaggacgacatcacagaacagtcaggttgtcgatggcttctcatcagactgactcactcttctgcccccactgggagaaagttccccatttaataaatggttgtttggaaataatatctaatgtacagcatattcacagcaccaagtttagtgaactttcatgtgtttgaaataaaaatgaaaggtgggatggaaattcattaatccctagatttttctctcctttattgcttgcaaatgttttcttggaagctcttttctctctattagttctatattgcctatgcacgcatgtacacagctgtgtttatttaaaaaaaaaaaaaggcaacatctggtggcaatttgaccctcattagcacaacattgttctattcattcaattaaatattgctataaagttaacttgtgactagccactcacacatgccgagggcaattaatggcatattcctaggagaaccaagtgtgggggtttttcctgtgggagggagggcttagtgggtgatattttgtgggttagcaaacatcttatatttatttgcaaagctgatgtaagtgccatttttttttagcaaagtatatttcactatatttttttcattgtaatggctgacaaaatcaagatggtagactgtatggt

SEQ ID NO: 430460 - DNA, 1340 bp, Homo sapiens
gtggtttccaggctcctctgtcagtggaccccgcaacgtgtcccattgtccctggacaggaaatgattatagaaatatccaagggacgttcagggcttggtctcagcattgtgggaggaaaagacacacccttgaatgctatagttatccatgaagtctatgaagaaggggcagcagccagagatggaagactttgggctggtgaccagatattagaggttaatggggttgacctgaggaactccagccacgaagaagccatcacagccctgaggcagaccccccagaaggtgcggctggtggtgtatagagatgaagcacactaccgggatgaggagaacttggagattttccctgtggatctgcagaagaaagctggccggggcctgggcctgagcatcgttgggaaacggtaaagacgtgctgtgggagttgggatctgcctttttcatccagagctctgatgcctgtgaacactgaaagagaaagcctaatgtaaagtagtgatgggatttctaaaaataagatatttatgaaaatttgacaacatgggtcatatttctgagcaaggtcttaccagaaaaattgtcatatcaagatagaactccaagtccaatcaatccagactgatatatttctgtacagagtaagaacaactagcaaggttctttcacttggaattactaagatcggagttttgcagaggttgattaaagcaaccatacccaagaaatagctagcatcaagaatgagatttatccaatgttgggtcaagaacattgcttcgacatggaaattaacatggaacattgcttttcgtgatactgttaatttcatactatgttgaaactagttgagtagacatagttaagagataaacataattcttcacgatagtagttttctattaagaaaaatgtcctgctgggcacagtggcatgtacctgttgtctcagctatgtgggaagatcacttgaggccaggagttcaaggctatagtgtgctatgatcatgcctgtgaatagccactgcacttgagcctcttgggaaacataacaagaccccatctgtaaataaaaaaaaaaaaaagaaaaggaaaaaagaaagatgtccccaaagtaatagtttgcaccaaaaatgtaggtaggtagatcctagtggccaggctactcttttgaaatatatgttgctgccagatgcagtggctcatgcctgtactcccaaagtgcctggatgacaggtgtgagcccccgcgcccagccgcatcttcataatttttaagttcacactcaaagacagaactaccaaatttagaagctacatcattaaatatcaaaaaa

SEQ ID NO: 430461 - DNA, 507 bp, Homo sapiens
gtggtttccaggctcctctgtcagtggaccccgcaacgtgtcccattgtccctggacaggaaatgattatagaaatatccaagggacgttcagggcttggtctcagcattgtgggaggaaaagacacacccttgaatgctatagttatccatgaagtctatgaagaaggggcagcagccagagatggaagactttgggctggtgaccagatattagaggttaatggggttgacctgaggaactccagccacgaagaagccatcacagccctgaggcagaccccccagaaggtgcggctggtaggaaacaccgacaggtgctgtcgccaggaagtctgtatggggaacgattagtgggcggcagatcggaggacgtggagaggccggaggagactgtcgggcatgtgctcaggcagttcagagtgagtctcaattggtactttgataatctcggctagtatatataagcattaataacatatatgatgcttgtcttttctgtctttac

SEQ ID NO: 430462 - DNA, 1363 bp, Homo sapiens
ggggtgaaccgtgacagcgcttcggcccgcactaaggccggctcttgtgccggaaggaggaaggcgtggggcattcgcccctcggagctagggagtgtgtgcgacgccgctgcgaggtcacgtgagccactgccggcagagagggaaaggggcggggcccagaacgaagcggggaggcgccccttgtttccctggggtcacgcgcagccggaagtggcggctgctgcggagaattggagatggggaccgccctggacatcaagattaaaagagcgaataaagtttatcacgccggggtgagtgaattattgtaaggcaaacccttgtaaccctacccacatcctgctggagaggagactggaagtaggatcactccatctagattctgggagaagaccctgctccaaaggaccttgatgaggtttcatggtttggtaacctcatgcactgtgggaatgtcagaggaccccgagataatgcttcactgccaagtctgaaaattgtgtccacaagatttgattggtagtattttctatcattgtacaacttaaaatatcttctaatttccatttttttttttgacatgagttgtatagaaatgtgtgcttcagtttctgttatagcaacaactcttgtcacccatagccttacaaaaattcctaattttaatatttaaattttagaaactttcttacaagcagaattacaaaaagagtaactaacaagaaagtgagattgtgatgggataacggaatgtcaagtctaattgtcaggaaaagacaaaataacatgggaatgacaatcaaaatggactaaggacttagaagatccgaaactatgaagctactaaaagaaacattggggaatgctccaggacattggtctgggcaaagatttcttgagcaataccttaaaaggacaggcaacccaagcaaaaatggacagatgggatcacatcaagctaaaaaacttctacacagcgaaggaaacaaagtgaacagaataacatgggaatgttttctgtaatttagtagtaactggcaatagtttacaaacacattttgtgtatactgctgtcattgcactgattaccttctgttgtagtgactttgttctattagtccactcaattaaaatatttggttttgtttatctttgtattcctgggcctggcagtactcaccacttaataggtgctcaaaaactttattaaatgatgagttgaagccctgaaacatttaaacaaaatgcagaagactgataattttataaatgcattgatcagaaaggggaaactatggtattgtaggcacattatggattttgcttcgtaattataaataatattctaggtatcaatttc

SEQ ID NO: 430463 - DNA, 3253 bp, Homo sapiens
ggggtgaaccgtgacagcgcttcggcccgcactaaggccggctcttgtgccggaaggaggaaggcgtggggcattcgcccctcggagctagggagtgtgtgcgacgccgctgcgaggtcacgtgagccactgccggcagagagggaaaggggcggggcccagaacgaagcggggaggcgccccttgtttccctggggtcacgcgcagccggaagtggcggctgctgcggagaattggagatggggaccgccctggacatcaagattaaaagagcgaataaagtttatcacgccggggaagtgctctctggcgtggtggtcatatcgagtaaggattcagtccaacaccagggagtgtctttgaccatggaaggaactgtaaacctccagctcagtgccaaaagtgtgggtgtgtttgaagctttttataattctgttaagcctatccagattatcaacagcaccatagaaatggtgaagccggggaaatttcccagcggcaaaacagaaatcccttttgaatttcctctgcacttgaagggtaacaaagttctgtatgagacgtatcatggcgtgtttgtcaacattcagtatacactgcgctgtgacatgaagcggtctctgttggccaaggacttgacaaagacctgtgaatttatcgttcactccgctcctcagaaggggaagtttactcccagtcccgtggacttcacgattacacctgaaaccttacagaacgtcaaagagagagctttgcttcccaaatttctccttcgaggacatctcaactcaacaaactgtgtcatcacgcagccactaacgggagagctggtggtggagagctcggaagccgccatcagaagcgtggagctgcagctggtgcgcgtggagacgtgcgggtgtgcagaaggctatgcccgcgacgccacggagattcagaacattcagatcgccgacggggatgtgtgcaggggcctctctgtccccatctacatggtcttccctaggctgttcacctgccctacactggagaccaccaacttcaaagtggaatttgaggttaacatcgtggtgctgcttcaccctgaccacctcatcacggagaacttcccgctgaagctctgcaggatatagcccggaggagggaagcatagagaacgggagtggccatctggaaatccagctggttatccaaatcctaaggggagctacagccagcggcatatacttgtttttgtgattattctgtatcagaaatgaaacagaccctcaaattaactttccttcctcatttcttgaggcttctgcttccaacaggcacctctaatcagaccttttctttgaaattcaacaagatttcttaatgctatttgccaagaccatttcacagaaaacattgactgtggctcttgccttatctgttcctttttaggtacagtaaaacaattgtgacagcagtttgagcttgctggagagtggcatcatggggacaaaaggaaacctctgacttgctaatggatgtagccagggactccccatagcaaagggtctgtggccagttgacatccaggatggctgcaagcgcacttgatggtcaggaagtttgcagatactcgccaaggcagagcgcaaagtgctagccactggaaatgcatgacttccctccacccctactctattctgtagttttttggttttgtttctgagacggagtctcagtctgtcacccaggctggagtgatctcagctcactgcaacctccacctcccaggttcaagcgactctcctgcctcagcctcccgagtagttgggattacaggtgactgccaccgtgcccggctaatgtttgtatttttagtagagacggggcttcaccatcttggccaggctggtcttgaactcctgacctcgtgacccacccgccttggcctcccaaagtgctgggattacaggtgtgagccaccacacccagcctctgtagttctttttacaacatttttcattataactttaaattttttaagcaactggaaaagtgttccttgctctcttggggggatttggctggtgccgaagtgtttctgaagtctcaagaactgccataaaatctcacgctgccatttccctgaacagatacatacatagagagagacagttttccaaactgtgtcacgcaggctgagtgcactggcaggatcacagctcacggcagcctcaacctccctggctcaagcgatccctcccctcagcctcctgagtagctgagactacaggtgagtgccaccacactcagctaattttcaaattttttgtagacagggtctccctatgttgcccaggctggtcttgaactcctagactcaagtgatcctcctgtcttggcctcccaaagtgctgagattacaggtgtgagccactgtgcccagcagtttcccagaatatatttaaatgcaaagttacatgaggggaaaacatgtatgtttgctcctgttgttactgggtaggttctgaacagcagaaacccatgtgcagggtgggctggtgaaggcccctctccgcaaggtggtagcaggaaaaggtccttgacttgatgaatttggtctgcctctgagccactggaggaagctgttttgagccagggttttttggcctaaagccagcatttcctcagtctccctttgtggttcgaaggatatggactattgcaatacatttcttccttcaaatcctgccactgttttgttggcccacaactaataggacctcaaaataagccatgctgctttgcacacacactagccttcttttgtacttttcattctggatgggcttggccaaaacaggctcaggccaaagacctcccaagctgtatgtacttccagtatcctgaaacagtgtttggtgacataatgccaagggtaaacaagcctgatttaggcactgctttatccaggggcttcacccatgaaattaataaaacttatctgagtcacttgaaacttggttcccagaaaacacatttctggtttataatctccttttatgctcacctgacattaattatctatccttgatgatgtgtttaaactgagtagcagaaaacagaggccacactttctgggaaattttaaaggaagaaaccatttttaatgagatgaaaatatttaacgaatttaaaaagctaatgacaattttgagaaaaggtttgggatgtatattgctatgtaatttaataaactgattttatggatata

SEQ ID NO: 430464 - DNA, 864 bp, Homo sapiens
ggggtgaaccgtgacagcgcttcggcccgcactaaggccggctcttgtgccggaaggaggaaggcgtggggcattcgcccctcggagctagggagtgtgtgcgacgccgctgcgaggtcacgtgagccactgccggcagagagggaaaggggcggggcccagaacgaagcggggaggcgccccttgtttccctggggtcacgcgcagccggaagtggcggctgctgcggagaattggagatggggaccgccctggacatcaagattaaaagagcgaataaagtttatcacgccggggaagtgctctctggcgtggtggtcatatcgagtaaggattcagtccaacaccagggagtgtctttgaccatggaaggaactgtaaacctccagctcagtgccaaaagtgtgggtgtgtttgaagctttttataattctgttaagcctatccagattatcaacagcaccatagaaatggtgaagccggggaaatttcccagcggcaaaacagaaatcccttttgaatttcctctgcacttgaagggtaacaaagttctgtatgagacgtatcatggcgtgtttgtcaacattcaggtgagagcttcctagtcctacgcgactgacttcacaagttttcttctgacaaacggtgtggtctttctctcaacgttagtagacgggcccaagaatttaatactgtgtttattgctgagacctcgcatgtatattcgacgttaatttctcatttccctgctacctcgcctctccgtacggcccgtcttcctgacgccagtcttacggccctcggccctgcactctcttcctcctccgtcctccggcctcttcttccgccccctcccttctctct

SEQ ID NO: 430465 - DNA, 5947 bp, Homo sapiens
  misc_feature (4332)..(4332): n is a, c, g, or t
ggggtgaaccgtgacagcgcttcggcccgcactaaggccggctcttgtgccggaaggaggaaggcgtggggcattcgcccctcggagctagggagtgtgtgcgacgccgctgcgaggtcacgtgagccactgccggcagagagggaaaggggcggggcccagaacgaagcggggaggcgccccttgtttccctggggtcacgcgcagccggaagtggcggctgctgcggagaattggagatggggaccgccctggacatcaagattaaaagagcgaataaagtttatcacgccggggaagtgctctctggcgtggtggtcatatcgagtaaggattcagtccaacaccagggagtgtctttgaccatggaaggaactgtaaacctccagctcagtgccaaaagtgtgggtgtgtttgaagctttttataattctgttaagcctatccagattatcaacagcaccatagaaatggtgaagccggggaaatttcccagcggcaaaacagaaatcccttttgaatttcctctgcacttgaagggtaacaaagttctgtatgagacgtatcatggcgtgtttgtcaacattcagtatacactgcgctgtgacatgaagcggtctctgttggccaaggacttgacaaagacctgtgaatttatcgttcactccgctcctcagaaggggaagtttactcccagtcccgtggacttcacgattacacctgaaaccttacagaacgtcaaagagagagctttgcttcccaaatttctccttcgaggacatctcaactcaacaaactgtgtcatcacgcagccactaacgggagagctggtggtggagagctcggaagccgccatcagaagcgtggagctgcagctggtgcgcgtggagacgtgcgggtgtgcagaaggctatgcccgcgacgccacggagattcagaacattcagatcgccgacggggatgtgtgcaggggcctctctgtccccatctacatggtcttccctaggctgttcacctgccctacactggagaccaccaacttcaaagtggaatttgaggttaacatcgtggtgctgcttcaccctgaccacctcatcacggagaacttcccgctgaagctctgcaggatatagcccggaggagggaagcatagagaacgggagtggccatctggaaatccagctggttatccaaatcctaaggggagctacagccagcggcatatacttgtttttgtgattattctgtatcagaaatgaaacagaccctcaaattaactttccttcctcatttcttgaggcttctgcttccaacaggcacctctaatcagaccttttctttgaaattcaacaagatttcttaatgctatttgccaagaccatttcacagaaaacattgactgtggctcttgccttatctgttcctttttaggtacagtaaaacaattgtgacagcagtttgagcttgctggagagtggcatcatggggacaaaaggaaacctctgacttgctaatggatgtagccagggactccccatagcaaagggtctgtggccagttgacatccaggatggctgcaagcgcacttgatggtcaggaagtttgcagatactcgccaaggcagagcgcaaagtgctagccactggaaatgcatgacttccctccacccctactctattctgtagttttttggttttgtttctgagacggagtctcagtctgtcacccaggctggagtgatctcagctcactgcaacctccacctcccaggttcaagcgactctcctgcctcagcctcccgagtagttgggattacaggtgactgccaccgtgcccggctaatgtttgtatttttagtagagacggggcttcaccatcttggccaggctggtcttgaactcctgacctcgtgacccacccgccttggcctcccaaagtgctgggattacaggtgtgagccaccacacccagcctctgtagttctttttacaacatttttcattataactttaaattttttaagcaactggaaaagtgttccttgctctcttggggggatttggctggtgccgaagtgtttctgaagtctcaagaactgccataaaatctcacgctgccatttccctgaacagatacatacatagagagagacagttttccaaactgtgtcacgcaggctgagtgcactggcaggatcacagctcacggcagcctcaacctccctggctcaagcgatccctcccctcagcctcctgagtagctgagactacaggtgagtgccaccacactcagctaattttcaaattttttgtagacagggtctccctatgttgcccaggctggtcttgaactcctagactcaagtgatcctcctgtcttggcctcccaaagtgctgagattacaggtgtgagccactgtgcccagcagtttcccagaatatatttaaatgcaaagttacatgaggggaaaacatgtatgtttgctcctgttgttactgggtaggttctgaacagcagaaacccatgtgcagggtgggctggtgaaggcccctctccgcaaggtggtagcaggaaaaggtccttgacttgatgaatttggtctgcctctgagccactggaggaagctgttttgagccagggttttttggcctaaagccagcatttcctcagtctccctttgtggttcgaaggatatggactattgcaatacatttcttccttcaaatcctgccactgttttgttggcccacaactaataggacctcaaaataagccatgctgctttgcacacacactagccttcttttgtacttttcattctggatgggcttggccaaaacaggctcaggccaaagacctcccaagctgtatgtacttccagtatcctgaaacagtgtttggtgacataatgccaagggtaaacaagcctgatttaggcactgctttatccaggggcttcacccatgaaattaataaaacttatctgagtcacttgaaacttggttcccagaaaacacatttctggtttataatctccttttatgctcacctgacattaattatctatccttgatgatgtgtttaaactgagtagcagaaaacagaggccacactttctgggaaattttaaaggaagaaaccatttttaatgagatgaaaatatttaacgaatttaaaaagctaatgacaattttgagaaaaggtttgggatgtatattgctatgtaatttaataaactgattttatggatataaaaaaaactgctttccttagagaataattattacctgaagcgcatccagacaacgtggctacctttatcatttcattcaaccctgagtggcccaaacaaaggcctcaggccggccacttccttccacttcttggtctgacctctccatgatctgttactaggcaaaactcagatgtttggctaccttgggctgcaactgtcccactcttgcccaggcttgctggagttggggttatccacagtcagaggttcagagttgtcaaattctccaattagagcaagagatgaggaaaggaaagggagacgaaagaaagaggctgtgcctcagaaataataacgccgcatatctacaactatctgatctttgacaaacctgagaaaaacaagcaatggggaaaggattccctatttaataaatggtgctgggaaaactggccaaccaatgtagaaagctgaaactggatcccttccttgcaccttatacaaaaatcagttcaagatggattaaagacttaaacgttagacctaaaaccataacctaggcattaccattcaggacataggcatgggcaaggacttcatgtctaaaacaccaaaaccaatggcaaccaaaggcaaaattgacaaatgggatctaattaaactaaagagcttctgcacagcaaaagaaactaccatcagagtgaacaggcaacctacaaaatgggagaaaattttcgcaacctactcatctgacaaagggctaatatccagaatctacaatgaactcaaacaaatttacaagaaaaaaacaaccccatcaacaagtgggtgaaggatatgaacagacacttctcaaaagaagacatttatgcagccaaaaaacacatgaaaaaatgctcatcatcactggccatcagagaaatgcaaatcaaaaccacaatgagataccatctcacaccagttagaatggcgatcattcaaaagtcaggaaacaacaggtgctggagaggatgtggagaaataagaacacttttacactgttggtaggactgtacactagttcaaccattgtggaagacagtgtggcgattcctcanggatctagaactagaaataccatttgacccagccatcccattactgggtatatacccaaaggactataaatcatgctgctataaagacacacgcacgtgtatgtttattgcggcattattcacaatagcaaagacttggaaccaacccaaatgtccaacaatgacagattggattaagaaaatgtggcacatatacaccatggaatactatgcagccataaaaaacgatgagttcatgtcctttgtagggacatggatgaaattggaaatcatcattctcagtaaactatcgcaagaacaaaaaaccaaacaccgcatattctcactcataggtgggaactgaacaatgagaacacatggacacaggaaggggaacatcacactctggggactgttgtggggtggggggagggggagggatagcattgggagatatacctaatgctagatgacgagttagtgggtgcagcgcaccagcatggcacatgtatacatatgtaactaacctgcacactgtgcacatgtaccctaaaacttaaagtataataataaaaaagaaaaattgcttcaaatgaacaacaaaaaaaaagaggctgtgaacaatgaatctaaaacaatattttcttttgggaaatgcccgttttggcaggaatacattttggctccgctgtgctgtgaattcggaggaaaagtagggagggccggaaagcccagggcttcatgcagagtagacatcaagaacccacctgctctggagtcttggtgggcaaggggaacgaaccttccagtccatttctaccgtcaccataattcctgtgtctgaatctgaatcaccttcttcaaaaactgggggctgaggttgcctccacatgctaacgctgattcagggcggcagcagatgctggtgttctcagttccttcctgcttccgcttcctgttcaggaacagggccgcattttcccatcctcttcggctgtaggcgtggtcacgtgaccaggagggcggggcgcgcctgcctagcataagctggaggacggcgccctcaccctggcgggaggtggatccccagcgcggtgcagttacatcgcagacatgggctcgtctatacgctgctggacggccggggtctgggctccacagccggggggcaccaccctggagctggtgataggggagggaatcgccgctcgggcgcccgggcctcgcgcggagcctgcgtgcgcgggagttcacggggcaaatcctgcccatcctccgcgctcaggcgtggcttcaaaagcctcgggccgggtggtgcagccccagcataacctggcgccccggtggctgctggagtggttggctcagaatggaaggaaacggtggggtctgcgttactctgtggtgataaaaaagagaagcggcagcttagcgccaagaataaatgatgaccgccggaatccctgccgttaggcgcaggtcttggcatgagagctgcaacagggcggccagctgggcgccagggggcctgggccgcctgtccggtgcgggtccccgaatatcctgggctcttccgggaagtgccgctgcggtgaggccagagcctcccgctacggaggatgcgatgtgatgtgct

SEQ ID NO: 430466 - DNA, 6003 bp, Homo sapiens
  misc_feature (4388)..(4388): n is a, c, g, or t
ggggtgaaccgtgacagcgcttcggcccgcactaaggccggctcttgtgccggaaggaggaaggcgtggggcattcgcccctcggagctagggagtgtgtgcgacgccgctgcgaggtcacgtgagccactgccggcagagagggaaaggggcggggcccagaacgaagcggggaggcgccccttgtttccctggggtcacgcgcagccggaagtggcggctgctgcggagaattggagatggggaccgccctggacatcaagattaaaagagcgaataaagtttatcacgccggggtgaccgcaaaggtctaatgaacgaaagctaaaacaaaccttggaagcagaaatgggaagtgctctctggcgtggtggtcatatcgagtaaggattcagtccaacaccagggagtgtctttgaccatggaaggaactgtaaacctccagctcagtgccaaaagtgtgggtgtgtttgaagctttttataattctgttaagcctatccagattatcaacagcaccatagaaatggtgaagccggggaaatttcccagcggcaaaacagaaatcccttttgaatttcctctgcacttgaagggtaacaaagttctgtatgagacgtatcatggcgtgtttgtcaacattcagtatacactgcgctgtgacatgaagcggtctctgttggccaaggacttgacaaagacctgtgaatttatcgttcactccgctcctcagaaggggaagtttactcccagtcccgtggacttcacgattacacctgaaaccttacagaacgtcaaagagagagctttgcttcccaaatttctccttcgaggacatctcaactcaacaaactgtgtcatcacgcagccactaacgggagagctggtggtggagagctcggaagccgccatcagaagcgtggagctgcagctggtgcgcgtggagacgtgcgggtgtgcagaaggctatgcccgcgacgccacggagattcagaacattcagatcgccgacggggatgtgtgcaggggcctctctgtccccatctacatggtcttccctaggctgttcacctgccctacactggagaccaccaacttcaaagtggaatttgaggttaacatcgtggtgctgcttcaccctgaccacctcatcacggagaacttcccgctgaagctctgcaggatatagcccggaggagggaagcatagagaacgggagtggccatctggaaatccagctggttatccaaatcctaaggggagctacagccagcggcatatacttgtttttgtgattattctgtatcagaaatgaaacagaccctcaaattaactttccttcctcatttcttgaggcttctgcttccaacaggcacctctaatcagaccttttctttgaaattcaacaagatttcttaatgctatttgccaagaccatttcacagaaaacattgactgtggctcttgccttatctgttcctttttaggtacagtaaaacaattgtgacagcagtttgagcttgctggagagtggcatcatggggacaaaaggaaacctctgacttgctaatggatgtagccagggactccccatagcaaagggtctgtggccagttgacatccaggatggctgcaagcgcacttgatggtcaggaagtttgcagatactcgccaaggcagagcgcaaagtgctagccactggaaatgcatgacttccctccacccctactctattctgtagttttttggttttgtttctgagacggagtctcagtctgtcacccaggctggagtgatctcagctcactgcaacctccacctcccaggttcaagcgactctcctgcctcagcctcccgagtagttgggattacaggtgactgccaccgtgcccggctaatgtttgtatttttagtagagacggggcttcaccatcttggccaggctggtcttgaactcctgacctcgtgacccacccgccttggcctcccaaagtgctgggattacaggtgtgagccaccacacccagcctctgtagttctttttacaacatttttcattataactttaaattttttaagcaactggaaaagtgttccttgctctcttggggggatttggctggtgccgaagtgtttctgaagtctcaagaactgccataaaatctcacgctgccatttccctgaacagatacatacatagagagagacagttttccaaactgtgtcacgcaggctgagtgcactggcaggatcacagctcacggcagcctcaacctccctggctcaagcgatccctcccctcagcctcctgagtagctgagactacaggtgagtgccaccacactcagctaattttcaaattttttgtagacagggtctccctatgttgcccaggctggtcttgaactcctagactcaagtgatcctcctgtcttggcctcccaaagtgctgagattacaggtgtgagccactgtgcccagcagtttcccagaatatatttaaatgcaaagttacatgaggggaaaacatgtatgtttgctcctgttgttactgggtaggttctgaacagcagaaacccatgtgcagggtgggctggtgaaggcccctctccgcaaggtggtagcaggaaaaggtccttgacttgatgaatttggtctgcctctgagccactggaggaagctgttttgagccagggttttttggcctaaagccagcatttcctcagtctccctttgtggttcgaaggatatggactattgcaatacatttcttccttcaaatcctgccactgttttgttggcccacaactaataggacctcaaaataagccatgctgctttgcacacacactagccttcttttgtacttttcattctggatgggcttggccaaaacaggctcaggccaaagacctcccaagctgtatgtacttccagtatcctgaaacagtgtttggtgacataatgccaagggtaaacaagcctgatttaggcactgctttatccaggggcttcacccatgaaattaataaaacttatctgagtcacttgaaacttggttcccagaaaacacatttctggtttataatctccttttatgctcacctgacattaattatctatccttgatgatgtgtttaaactgagtagcagaaaacagaggccacactttctgggaaattttaaaggaagaaaccatttttaatgagatgaaaatatttaacgaatttaaaaagctaatgacaattttgagaaaaggtttgggatgtatattgctatgtaatttaataaactgattttatggatataaaaaaaactgctttccttagagaataattattacctgaagcgcatccagacaacgtggctacctttatcatttcattcaaccctgagtggcccaaacaaaggcctcaggccggccacttccttccacttcttggtctgacctctccatgatctgttactaggcaaaactcagatgtttggctaccttgggctgcaactgtcccactcttgcccaggcttgctggagttggggttatccacagtcagaggttcagagttgtcaaattctccaattagagcaagagatgaggaaaggaaagggagacgaaagaaagaggctgtgcctcagaaataataacgccgcatatctacaactatctgatctttgacaaacctgagaaaaacaagcaatggggaaaggattccctatttaataaatggtgctgggaaaactggccaaccaatgtagaaagctgaaactggatcccttccttgcaccttatacaaaaatcagttcaagatggattaaagacttaaacgttagacctaaaaccataacctaggcattaccattcaggacataggcatgggcaaggacttcatgtctaaaacaccaaaaccaatggcaaccaaaggcaaaattgacaaatgggatctaattaaactaaagagcttctgcacagcaaaagaaactaccatcagagtgaacaggcaacctacaaaatgggagaaaattttcgcaacctactcatctgacaaagggctaatatccagaatctacaatgaactcaaacaaatttacaagaaaaaaacaaccccatcaacaagtgggtgaaggatatgaacagacacttctcaaaagaagacatttatgcagccaaaaaacacatgaaaaaatgctcatcatcactggccatcagagaaatgcaaatcaaaaccacaatgagataccatctcacaccagttagaatggcgatcattcaaaagtcaggaaacaacaggtgctggagaggatgtggagaaataagaacacttttacactgttggtaggactgtacactagttcaaccattgtggaagacagtgtggcgattcctcanggatctagaactagaaataccatttgacccagccatcccattactgggtatatacccaaaggactataaatcatgctgctataaagacacacgcacgtgtatgtttattgcggcattattcacaatagcaaagacttggaaccaacccaaatgtccaacaatgacagattggattaagaaaatgtggcacatatacaccatggaatactatgcagccataaaaaacgatgagttcatgtcctttgtagggacatggatgaaattggaaatcatcattctcagtaaactatcgcaagaacaaaaaaccaaacaccgcatattctcactcataggtgggaactgaacaatgagaacacatggacacaggaaggggaacatcacactctggggactgttgtggggtggggggagggggagggatagcattgggagatatacctaatgctagatgacgagttagtgggtgcagcgcaccagcatggcacatgtatacatatgtaactaacctgcacactgtgcacatgtaccctaaaacttaaagtataataataaaaaagaaaaattgcttcaaatgaacaacaaaaaaaaagaggctgtgaacaatgaatctaaaacaatattttcttttgggaaatgcccgttttggcaggaatacattttggctccgctgtgctgtgaattcggaggaaaagtagggagggccggaaagcccagggcttcatgcagagtagacatcaagaacccacctgctctggagtcttggtgggcaaggggaacgaaccttccagtccatttctaccgtcaccataattcctgtgtctgaatctgaatcaccttcttcaaaaactgggggctgaggttgcctccacatgctaacgctgattcagggcggcagcagatgctggtgttctcagttccttcctgcttccgcttcctgttcaggaacagggccgcattttcccatcctcttcggctgtaggcgtggtcacgtgaccaggagggcggggcgcgcctgcctagcataagctggaggacggcgccctcaccctggcgggaggtggatccccagcgcggtgcagttacatcgcagacatgggctcgtctatacgctgctggacggccggggtctgggctccacagccggggggcaccaccctggagctggtgataggggagggaatcgccgctcgggcgcccgggcctcgcgcggagcctgcgtgcgcgggagttcacggggcaaatcctgcccatcctccgcgctcaggcgtggcttcaaaagcctcgggccgggtggtgcagccccagcataacctggcgccccggtggctgctggagtggttggctcagaatggaaggaaacggtggggtctgcgttactctgtggtgataaaaaagagaagcggcagcttagcgccaagaataaatgatgaccgccggaatccctgccgttaggcgcaggtcttggcatgagagctgcaacagggcggccagctgggcgccagggggcctgggccgcctgtccggtgcgggtccccgaatatcctgggctcttccgggaagtgccgctgcggtgaggccagagcctcccgctacggaggatgcgatgtgatgtgct

SEQ ID NO: 430467 - DNA, 5786 bp, Homo sapiens
  misc_feature (4171)..(4171): n is a, c, g, or t
ggggtgaaccgtgacagcgcttcggcccgcactaaggccggctcttgtgccggaaggaggaaggcgtggggcattcgcccctcggagctagggagtgtgtgcgacgccgctgcgaggtcacgtgagccactgccggcagagagggaaaggggcggggcccagaacgaagcggggaggcgccccttgtttccctggggtcacgcgcagccggaagtggcggctgctgcggagaattggagatggggaccgccctggacatcaagattaaaagagcgaataaagtttatcacgccggggaagtgctctctggcgtggtggtcatatcgagtaaggattcagtccaacaccagggagtgtctttgaccatggaaggaactgtaaacctccagctcagtgccaaaagtgtgggtgtgtttgaagctttttataattctgttaagcctatccagattatcaacagcaccatagaaatggtgaagccggggaaatttcccagcggcaaaacagaaatcccttttgaatttcctctgcacttgaagggtaacaaagttctgtatgagacgtatcatggcgtgtttgtcaacattcagtatacactgcgctgtgacatgaagcggtctctgttggccaaggacttgacaaagacctgtgaatttatcgttcactccgctcctcagaaggggaagtttactcccagtcccgtggacttcacgattacacctgaaaccttacagaacgtcaaagagagagctttgcttcccaaatttctccttcgaggacatctcaactcaacaaactgtgtcatcacgcagccactaacgggagagctggtggtggagagctcggaagccgccatcagaagcgtggagctgcagctggtgcgcgtggagacgtgcgggtgtgcagaaggctatgcccgcgacgccacggagattcagaacattcagatcgccgacggggatgtgtgcaggggcctctctgtccccatctacatggtcttccctaggctgttcacctgccctacactggagaccaccaacttcaaagtggaatttgaggttaacatcgtggtgctgcttcaccctgaccacctcatcacggagaacttcccgctgaagctctgcaggatatagcccggaggagggaagcatagagaacgggagtggccatctggaaatccagctggttatccaaatcctaaggggagctacagccagcggcatatacttgtttttgtgattattctgtatcagaaatgaaacagaccctcaaattaactttccttcctcatttcttgaggcttctgcttccaacaggcacctctaatcagaccttttctttgaaattcaacaagatttcttaatgctatttgccaagaccatttcacagaaaacattgactgtggctcttgccttatctgttcctttttaggtacagtaaaacaattgtgacagcagtttgagcttgctggagagtggcatcatggggacaaaaggaaacctctgacttgctaatggatgtagccagggactccccatagcaaagggtctgtggccagttgacatccaggatggctgcaagcgcacttgatggtcaggaagtttgcagatactcgccaaggcagagcgcaaagtgctagccactggaaatgcatgacttccctccacccctactctattctgtagttttttggttttgtttctgagacggagtctcagtctgtcacccaggctggagtgatctcagctcactgcaacctccacctcccaggttcaagcgactctcctgcctcagcctcccgagtagttgggattacaggtgactgccaccgtgcccggctaatgtttgtatttttagtagagacggggcttcaccatcttggccaggctggtcttgaactcctgacctcgtgactgtttctgaagtctcaagaactgccataaaatctcacgctgccatttccctgaacagatacatacatagagagagacagttttccaaactgtgtcacgcaggctgagtgcactggcaggatcacagctcacggcagcctcaacctccctggctcaagcgatccctcccctcagcctcctgagtagctgagactacaggtgagtgccaccacactcagctaattttcaaattttttgtagacagggtctccctatgttgcccaggctggtcttgaactcctagactcaagtgatcctcctgtcttggcctcccaaagtgctgagattacaggtgtgagccactgtgcccagcagtttcccagaatatatttaaatgcaaagttacatgaggggaaaacatgtatgtttgctcctgttgttactgggtaggttctgaacagcagaaacccatgtgcagggtgggctggtgaaggcccctctccgcaaggtggtagcaggaaaaggtccttgacttgatgaatttggtctgcctctgagccactggaggaagctgttttgagccagggttttttggcctaaagccagcatttcctcagtctccctttgtggttcgaaggatatggactattgcaatacatttcttccttcaaatcctgccactgttttgttggcccacaactaataggacctcaaaataagccatgctgctttgcacacacactagccttcttttgtacttttcattctggatgggcttggccaaaacaggctcaggccaaagacctcccaagctgtatgtacttccagtatcctgaaacagtgtttggtgacataatgccaagggtaaacaagcctgatttaggcactgctttatccaggggcttcacccatgaaattaataaaacttatctgagtcacttgaaacttggttcccagaaaacacatttctggtttataatctccttttatgctcacctgacattaattatctatccttgatgatgtgtttaaactgagtagcagaaaacagaggccacactttctgggaaattttaaaggaagaaaccatttttaatgagatgaaaatatttaacgaatttaaaaagctaatgacaattttgagaaaaggtttgggatgtatattgctatgtaatttaataaactgattttatggatataaaaaaaactgctttccttagagaataattattacctgaagcgcatccagacaacgtggctacctttatcatttcattcaaccctgagtggcccaaacaaaggcctcaggccggccacttccttccacttcttggtctgacctctccatgatctgttactaggcaaaactcagatgtttggctaccttgggctgcaactgtcccactcttgcccaggcttgctggagttggggttatccacagtcagaggttcagagttgtcaaattctccaattagagcaagagatgaggaaaggaaagggagacgaaagaaagaggctgtgcctcagaaataataacgccgcatatctacaactatctgatctttgacaaacctgagaaaaacaagcaatggggaaaggattccctatttaataaatggtgctgggaaaactggccaaccaatgtagaaagctgaaactggatcccttccttgcaccttatacaaaaatcagttcaagatggattaaagacttaaacgttagacctaaaaccataacctaggcattaccattcaggacataggcatgggcaaggacttcatgtctaaaacaccaaaaccaatggcaaccaaaggcaaaattgacaaatgggatctaattaaactaaagagcttctgcacagcaaaagaaactaccatcagagtgaacaggcaacctacaaaatgggagaaaattttcgcaacctactcatctgacaaagggctaatatccagaatctacaatgaactcaaacaaatttacaagaaaaaaacaaccccatcaacaagtgggtgaaggatatgaacagacacttctcaaaagaagacatttatgcagccaaaaaacacatgaaaaaatgctcatcatcactggccatcagagaaatgcaaatcaaaaccacaatgagataccatctcacaccagttagaatggcgatcattcaaaagtcaggaaacaacaggtgctggagaggatgtggagaaataagaacacttttacactgttggtaggactgtacactagttcaaccattgtggaagacagtgtggcgattcctcanggatctagaactagaaataccatttgacccagccatcccattactgggtatatacccaaaggactataaatcatgctgctataaagacacacgcacgtgtatgtttattgcggcattattcacaatagcaaagacttggaaccaacccaaatgtccaacaatgacagattggattaagaaaatgtggcacatatacaccatggaatactatgcagccataaaaaacgatgagttcatgtcctttgtagggacatggatgaaattggaaatcatcattctcagtaaactatcgcaagaacaaaaaaccaaacaccgcatattctcactcataggtgggaactgaacaatgagaacacatggacacaggaaggggaacatcacactctggggactgttgtggggtggggggagggggagggatagcattgggagatatacctaatgctagatgacgagttagtgggtgcagcgcaccagcatggcacatgtatacatatgtaactaacctgcacactgtgcacatgtaccctaaaacttaaagtataataataaaaaagaaaaattgcttcaaatgaacaacaaaaaaaaagaggctgtgaacaatgaatctaaaacaatattttcttttgggaaatgcccgttttggcaggaatacattttggctccgctgtgctgtgaattcggaggaaaagtagggagggccggaaagcccagggcttcatgcagagtagacatcaagaacccacctgctctggagtcttggtgggcaaggggaacgaaccttccagtccatttctaccgtcaccataattcctgtgtctgaatctgaatcaccttcttcaaaaactgggggctgaggttgcctccacatgctaacgctgattcagggcggcagcagatgctggtgttctcagttccttcctgcttccgcttcctgttcaggaacagggccgcattttcccatcctcttcggctgtaggcgtggtcacgtgaccaggagggcggggcgcgcctgcctagcataagctggaggacggcgccctcaccctggcgggaggtggatccccagcgcggtgcagttacatcgcagacatgggctcgtctatacgctgctggacggccggggtctgggctccacagccggggggcaccaccctggagctggtgataggggagggaatcgccgctcgggcgcccgggcctcgcgcggagcctgcgtgcgcgggagttcacggggcaaatcctgcccatcctccgcgctcaggcgtggcttcaaaagcctcgggccgggtggtgcagccccagcataacctggcgccccggtggctgctggagtggttggctcagaatggaaggaaacggtggggtctgcgttactctgtggtgataaaaaagagaagcggcagcttagcgccaagaataaatgatgaccgccggaatccctgccgttaggcgcaggtcttggcatgagagctgcaacagggcggccagctgggcgccagggggcctgggccgcctgtccggtgcgggtccccgaatatcctgggctcttccgggaagtgccgctgcggtgaggccagagcctcccgctacggaggatgcgatgtgatgtgct

SEQ ID NO: 430468 - DNA, 5866 bp, Homo sapiens
  misc_feature (4251)..(4251): n is a, c, g, or t
ggggtgaaccgtgacagcgcttcggcccgcactaaggccggctcttgtgccggaaggaggaaggcgtggggcattcgcccctcggagctagggagtgtgtgcgacgccgctgcgaggtcacgtgagccactgccggcagagagggaaaggggcggggcccagaacgaagcggggaggcgccccttgtttccctggggtcacgcgcagccggaagtggcggctgctgcggagaattggagatggggaccgccctggacatcaagattaaaagagcgaataaagtttatcacgccggggaagtgctctctggcgtggtggtcatatcgagtaaggattcagtccaacaccagggagtgtctttgaccatggaaggaactgtaaacctccagctcagtgccaaaagtgtgggtgtgtttgaagctttttataattctgttaagcctatccagattatcaacagcaccatagaaatggtgaagccggggaaatttcccagcggcaaaacagaaatcccttttgaatttcctctgcacttgaagggtaacaaagttctgtatgagacgtatcatggcgtgtttgtcaacattcagcctcagaaggggaagtttactcccagtcccgtggacttcacgattacacctgaaaccttacagaacgtcaaagagagagctttgcttcccaaatttctccttcgaggacatctcaactcaacaaactgtgtcatcacgcagccactaacgggagagctggtggtggagagctcggaagccgccatcagaagcgtggagctgcagctggtgcgcgtggagacgtgcgggtgtgcagaaggctatgcccgcgacgccacggagattcagaacattcagatcgccgacggggatgtgtgcaggggcctctctgtccccatctacatggtcttccctaggctgttcacctgccctacactggagaccaccaacttcaaagtggaatttgaggttaacatcgtggtgctgcttcaccctgaccacctcatcacggagaacttcccgctgaagctctgcaggatatagcccggaggagggaagcatagagaacgggagtggccatctggaaatccagctggttatccaaatcctaaggggagctacagccagcggcatatacttgtttttgtgattattctgtatcagaaatgaaacagaccctcaaattaactttccttcctcatttcttgaggcttctgcttccaacaggcacctctaatcagaccttttctttgaaattcaacaagatttcttaatgctatttgccaagaccatttcacagaaaacattgactgtggctcttgccttatctgttcctttttaggtacagtaaaacaattgtgacagcagtttgagcttgctggagagtggcatcatggggacaaaaggaaacctctgacttgctaatggatgtagccagggactccccatagcaaagggtctgtggccagttgacatccaggatggctgcaagcgcacttgatggtcaggaagtttgcagatactcgccaaggcagagcgcaaagtgctagccactggaaatgcatgacttccctccacccctactctattctgtagttttttggttttgtttctgagacggagtctcagtctgtcacccaggctggagtgatctcagctcactgcaacctccacctcccaggttcaagcgactctcctgcctcagcctcccgagtagttgggattacaggtgactgccaccgtgcccggctaatgtttgtatttttagtagagacggggcttcaccatcttggccaggctggtcttgaactcctgacctcgtgacccacccgccttggcctcccaaagtgctgggattacaggtgtgagccaccacacccagcctctgtagttctttttacaacatttttcattataactttaaattttttaagcaactggaaaagtgttccttgctctcttggggggatttggctggtgccgaagtgtttctgaagtctcaagaactgccataaaatctcacgctgccatttccctgaacagatacatacatagagagagacagttttccaaactgtgtcacgcaggctgagtgcactggcaggatcacagctcacggcagcctcaacctccctggctcaagcgatccctcccctcagcctcctgagtagctgagactacaggtgagtgccaccacactcagctaattttcaaattttttgtagacagggtctccctatgttgcccaggctggtcttgaactcctagactcaagtgatcctcctgtcttggcctcccaaagtgctgagattacaggtgtgagccactgtgcccagcagtttcccagaatatatttaaatgcaaagttacatgaggggaaaacatgtatgtttgctcctgttgttactgggtaggttctgaacagcagaaacccatgtgcagggtgggctggtgaaggcccctctccgcaaggtggtagcaggaaaaggtccttgacttgatgaatttggtctgcctctgagccactggaggaagctgttttgagccagggttttttggcctaaagccagcatttcctcagtctccctttgtggttcgaaggatatggactattgcaatacatttcttccttcaaatcctgccactgttttgttggcccacaactaataggacctcaaaataagccatgctgctttgcacacacactagccttcttttgtacttttcattctggatgggcttggccaaaacaggctcaggccaaagacctcccaagctgtatgtacttccagtatcctgaaacagtgtttggtgacataatgccaagggtaaacaagcctgatttaggcactgctttatccaggggcttcacccatgaaattaataaaacttatctgagtcacttgaaacttggttcccagaaaacacatttctggtttataatctccttttatgctcacctgacattaattatctatccttgatgatgtgtttaaactgagtagcagaaaacagaggccacactttctgggaaattttaaaggaagaaaccatttttaatgagatgaaaatatttaacgaatttaaaaagctaatgacaattttgagaaaaggtttgggatgtatattgctatgtaatttaataaactgattttatggatataaaaaaaactgctttccttagagaataattattacctgaagcgcatccagacaacgtggctacctttatcatttcattcaaccctgagtggcccaaacaaaggcctcaggccggccacttccttccacttcttggtctgacctctccatgatctgttactaggcaaaactcagatgtttggctaccttgggctgcaactgtcccactcttgcccaggcttgctggagttggggttatccacagtcagaggttcagagttgtcaaattctccaattagagcaagagatgaggaaaggaaagggagacgaaagaaagaggctgtgcctcagaaataataacgccgcatatctacaactatctgatctttgacaaacctgagaaaaacaagcaatggggaaaggattccctatttaataaatggtgctgggaaaactggccaaccaatgtagaaagctgaaactggatcccttccttgcaccttatacaaaaatcagttcaagatggattaaagacttaaacgttagacctaaaaccataacctaggcattaccattcaggacataggcatgggcaaggacttcatgtctaaaacaccaaaaccaatggcaaccaaaggcaaaattgacaaatgggatctaattaaactaaagagcttctgcacagcaaaagaaactaccatcagagtgaacaggcaacctacaaaatgggagaaaattttcgcaacctactcatctgacaaagggctaatatccagaatctacaatgaactcaaacaaatttacaagaaaaaaacaaccccatcaacaagtgggtgaaggatatgaacagacacttctcaaaagaagacatttatgcagccaaaaaacacatgaaaaaatgctcatcatcactggccatcagagaaatgcaaatcaaaaccacaatgagataccatctcacaccagttagaatggcgatcattcaaaagtcaggaaacaacaggtgctggagaggatgtggagaaataagaacacttttacactgttggtaggactgtacactagttcaaccattgtggaagacagtgtggcgattcctcanggatctagaactagaaataccatttgacccagccatcccattactgggtatatacccaaaggactataaatcatgctgctataaagacacacgcacgtgtatgtttattgcggcattattcacaatagcaaagacttggaaccaacccaaatgtccaacaatgacagattggattaagaaaatgtggcacatatacaccatggaatactatgcagccataaaaaacgatgagttcatgtcctttgtagggacatggatgaaattggaaatcatcattctcagtaaactatcgcaagaacaaaaaaccaaacaccgcatattctcactcataggtgggaactgaacaatgagaacacatggacacaggaaggggaacatcacactctggggactgttgtggggtggggggagggggagggatagcattgggagatatacctaatgctagatgacgagttagtgggtgcagcgcaccagcatggcacatgtatacatatgtaactaacctgcacactgtgcacatgtaccctaaaacttaaagtataataataaaaaagaaaaattgcttcaaatgaacaacaaaaaaaaagaggctgtgaacaatgaatctaaaacaatattttcttttgggaaatgcccgttttggcaggaatacattttggctccgctgtgctgtgaattcggaggaaaagtagggagggccggaaagcccagggcttcatgcagagtagacatcaagaacccacctgctctggagtcttggtgggcaaggggaacgaaccttccagtccatttctaccgtcaccataattcctgtgtctgaatctgaatcaccttcttcaaaaactgggggctgaggttgcctccacatgctaacgctgattcagggcggcagcagatgctggtgttctcagttccttcctgcttccgcttcctgttcaggaacagggccgcattttcccatcctcttcggctgtaggcgtggtcacgtgaccaggagggcggggcgcgcctgcctagcataagctggaggacggcgccctcaccctggcgggaggtggatccccagcgcggtgcagttacatcgcagacatgggctcgtctatacgctgctggacggccggggtctgggctccacagccggggggcaccaccctggagctggtgataggggagggaatcgccgctcgggcgcccgggcctcgcgcggagcctgcgtgcgcgggagttcacggggcaaatcctgcccatcctccgcgctcaggcgtggcttcaaaagcctcgggccgggtggtgcagccccagcataacctggcgccccggtggctgctggagtggttggctcagaatggaaggaaacggtggggtctgcgttactctgtggtgataaaaaagagaagcggcagcttagcgccaagaataaatgatgaccgccggaatccctgccgttaggcgcaggtcttggcatgagagctgcaacagggcggccagctgggcgccagggggcctgggccgcctgtccggtgcgggtccccgaatatcctgggctcttccgggaagtgccgctgcggtgaggccagagcctcccgctacggaggatgcgatgtgatgtgct

SEQ ID NO: 430469 - DNA, 5572 bp, Homo sapiens
  misc_feature (3957)..(3957): n is a, c, g, or t
ggggtgaaccgtgacagcgcttcggcccgcactaaggccggctcttgtgccggaaggaggaaggcgtggggcattcgcccctcggagctagggagtgtgtgcgacgccgctgcgaggtcacgtgagccactgccggcagagagggaaaggggcggggcccagaacgaagcggggaggcgccccttgtttccctggggtcacgcgcagccggaagtggcggctgctgcggagaattggagatggggaccgccctggacatcaagattaaaagagcgaataaagtttatcacgccgggcctcagaaggggaagtttactcccagtcccgtggacttcacgattacacctgaaaccttacagaacgtcaaagagagagctttgcttcccaaatttctccttcgaggacatctcaactcaacaaactgtgtcatcacgcagccactaacgggagagctggtggtggagagctcggaagccgccatcagaagcgtggagctgcagctggtgcgcgtggagacgtgcgggtgtgcagaaggctatgcccgcgacgccacggagattcagaacattcagatcgccgacggggatgtgtgcaggggcctctctgtccccatctacatggtcttccctaggctgttcacctgccctacactggagaccaccaacttcaaagtggaatttgaggttaacatcgtggtgctgcttcaccctgaccacctcatcacggagaacttcccgctgaagctctgcaggatatagcccggaggagggaagcatagagaacgggagtggccatctggaaatccagctggttatccaaatcctaaggggagctacagccagcggcatatacttgtttttgtgattattctgtatcagaaatgaaacagaccctcaaattaactttccttcctcatttcttgaggcttctgcttccaacaggcacctctaatcagaccttttctttgaaattcaacaagatttcttaatgctatttgccaagaccatttcacagaaaacattgactgtggctcttgccttatctgttcctttttaggtacagtaaaacaattgtgacagcagtttgagcttgctggagagtggcatcatggggacaaaaggaaacctctgacttgctaatggatgtagccagggactccccatagcaaagggtctgtggccagttgacatccaggatggctgcaagcgcacttgatggtcaggaagtttgcagatactcgccaaggcagagcgcaaagtgctagccactggaaatgcatgacttccctccacccctactctattctgtagttttttggttttgtttctgagacggagtctcagtctgtcacccaggctggagtgatctcagctcactgcaacctccacctcccaggttcaagcgactctcctgcctcagcctcccgagtagttgggattacaggtgactgccaccgtgcccggctaatgtttgtatttttagtagagacggggcttcaccatcttggccaggctggtcttgaactcctgacctcgtgacccacccgccttggcctcccaaagtgctgggattacaggtgtgagccaccacacccagcctctgtagttctttttacaacatttttcattataactttaaattttttaagcaactggaaaagtgttccttgctctcttggggggatttggctggtgccgaagtgtttctgaagtctcaagaactgccataaaatctcacgctgccatttccctgaacagatacatacatagagagagacagttttccaaactgtgtcacgcaggctgagtgcactggcaggatcacagctcacggcagcctcaacctccctggctcaagcgatccctcccctcagcctcctgagtagctgagactacaggtgagtgccaccacactcagctaattttcaaattttttgtagacagggtctccctatgttgcccaggctggtcttgaactcctagactcaagtgatcctcctgtcttggcctcccaaagtgctgagattacaggtgtgagccactgtgcccagcagtttcccagaatatatttaaatgcaaagttacatgaggggaaaacatgtatgtttgctcctgttgttactgggtaggttctgaacagcagaaacccatgtgcagggtgggctggtgaaggcccctctccgcaaggtggtagcaggaaaaggtccttgacttgatgaatttggtctgcctctgagccactggaggaagctgttttgagccagggttttttggcctaaagccagcatttcctcagtctccctttgtggttcgaaggatatggactattgcaatacatttcttccttcaaatcctgccactgttttgttggcccacaactaataggacctcaaaataagccatgctgctttgcacacacactagccttcttttgtacttttcattctggatgggcttggccaaaacaggctcaggccaaagacctcccaagctgtatgtacttccagtatcctgaaacagtgtttggtgacataatgccaagggtaaacaagcctgatttaggcactgctttatccaggggcttcacccatgaaattaataaaacttatctgagtcacttgaaacttggttcccagaaaacacatttctggtttataatctccttttatgctcacctgacattaattatctatccttgatgatgtgtttaaactgagtagcagaaaacagaggccacactttctgggaaattttaaaggaagaaaccatttttaatgagatgaaaatatttaacgaatttaaaaagctaatgacaattttgagaaaaggtttgggatgtatattgctatgtaatttaataaactgattttatggatataaaaaaaactgctttccttagagaataattattacctgaagcgcatccagacaacgtggctacctttatcatttcattcaaccctgagtggcccaaacaaaggcctcaggccggccacttccttccacttcttggtctgacctctccatgatctgttactaggcaaaactcagatgtttggctaccttgggctgcaactgtcccactcttgcccaggcttgctggagttggggttatccacagtcagaggttcagagttgtcaaattctccaattagagcaagagatgaggaaaggaaagggagacgaaagaaagaggctgtgcctcagaaataataacgccgcatatctacaactatctgatctttgacaaacctgagaaaaacaagcaatggggaaaggattccctatttaataaatggtgctgggaaaactggccaaccaatgtagaaagctgaaactggatcccttccttgcaccttatacaaaaatcagttcaagatggattaaagacttaaacgttagacctaaaaccataacctaggcattaccattcaggacataggcatgggcaaggacttcatgtctaaaacaccaaaaccaatggcaaccaaaggcaaaattgacaaatgggatctaattaaactaaagagcttctgcacagcaaaagaaactaccatcagagtgaacaggcaacctacaaaatgggagaaaattttcgcaacctactcatctgacaaagggctaatatccagaatctacaatgaactcaaacaaatttacaagaaaaaaacaaccccatcaacaagtgggtgaaggatatgaacagacacttctcaaaagaagacatttatgcagccaaaaaacacatgaaaaaatgctcatcatcactggccatcagagaaatgcaaatcaaaaccacaatgagataccatctcacaccagttagaatggcgatcattcaaaagtcaggaaacaacaggtgctggagaggatgtggagaaataagaacacttttacactgttggtaggactgtacactagttcaaccattgtggaagacagtgtggcgattcctcanggatctagaactagaaataccatttgacccagccatcccattactgggtatatacccaaaggactataaatcatgctgctataaagacacacgcacgtgtatgtttattgcggcattattcacaatagcaaagacttggaaccaacccaaatgtccaacaatgacagattggattaagaaaatgtggcacatatacaccatggaatactatgcagccataaaaaacgatgagttcatgtcctttgtagggacatggatgaaattggaaatcatcattctcagtaaactatcgcaagaacaaaaaaccaaacaccgcatattctcactcataggtgggaactgaacaatgagaacacatggacacaggaaggggaacatcacactctggggactgttgtggggtggggggagggggagggatagcattgggagatatacctaatgctagatgacgagttagtgggtgcagcgcaccagcatggcacatgtatacatatgtaactaacctgcacactgtgcacatgtaccctaaaacttaaagtataataataaaaaagaaaaattgcttcaaatgaacaacaaaaaaaaagaggctgtgaacaatgaatctaaaacaatattttcttttgggaaatgcccgttttggcaggaatacattttggctccgctgtgctgtgaattcggaggaaaagtagggagggccggaaagcccagggcttcatgcagagtagacatcaagaacccacctgctctggagtcttggtgggcaaggggaacgaaccttccagtccatttctaccgtcaccataattcctgtgtctgaatctgaatcaccttcttcaaaaactgggggctgaggttgcctccacatgctaacgctgattcagggcggcagcagatgctggtgttctcagttccttcctgcttccgcttcctgttcaggaacagggccgcattttcccatcctcttcggctgtaggcgtggtcacgtgaccaggagggcggggcgcgcctgcctagcataagctggaggacggcgccctcaccctggcgggaggtggatccccagcgcggtgcagttacatcgcagacatgggctcgtctatacgctgctggacggccggggtctgggctccacagccggggggcaccaccctggagctggtgataggggagggaatcgccgctcgggcgcccgggcctcgcgcggagcctgcgtgcgcgggagttcacggggcaaatcctgcccatcctccgcgctcaggcgtggcttcaaaagcctcgggccgggtggtgcagccccagcataacctggcgccccggtggctgctggagtggttggctcagaatggaaggaaacggtggggtctgcgttactctgtggtgataaaaaagagaagcggcagcttagcgccaagaataaatgatgaccgccggaatccctgccgttaggcgcaggtcttggcatgagagctgcaacagggcggccagctgggcgccagggggcctgggccgcctgtccggtgcgggtccccgaatatcctgggctcttccgggaagtgccgctgcggtgaggccagagcctcccgctacggaggatgcgatgtgatgtgct

SEQ ID NO: 430470 - DNA, 4929 bp, Homo sapiens
  misc_feature (3314)..(3314): n is a, c, g, or t
attttctgatgtcgtatgacatttccaggagatacccaatctttactcccattgccaaacgcccaatcgcccgatacaactctccaggtagagattcatttggacaatccctatgcaccactcccgtaccagcttggaacgggagtggccatctggaaatccagctggttatccaaatcctaaggggagctacagccagcggcatatacttgtttttgtgattattctgtatcagaaatgaaacagaccctcaaattaactttccttcctcatttcttgaggcttctgcttccaacaggcacctctaatcagaccttttctttgaaattcaacaagatttcttaatgctatttgccaagaccatttcacagaaaacattgactgtggctcttgccttatctgttcctttttaggtacagtaaaacaattgtgacagcagtttgagcttgctggagagtggcatcatggggacaaaaggaaacctctgacttgctaatggatgtagccagggactccccatagcaaagggtctgtggccagttgacatccaggatggctgcaagcgcacttgatggtcaggaagtttgcagatactcgccaaggcagagcgcaaagtgctagccactggaaatgcatgacttccctccacccctactctattctgtagttttttggttttgtttctgagacggagtctcagtctgtcacccaggctggagtgatctcagctcactgcaacctccacctcccaggttcaagcgactctcctgcctcagcctcccgagtagttgggattacaggtgactgccaccgtgcccggctaatgtttgtatttttagtagagacggggcttcaccatcttggccaggctggtcttgaactcctgacctcgtgacccacccgccttggcctcccaaagtgctgggattacaggtgtgagccaccacacccagcctctgtagttctttttacaacatttttcattataactttaaattttttaagcaactggaaaagtgttccttgctctcttggggggatttggctggtgccgaagtgtttctgaagtctcaagaactgccataaaatctcacgctgccatttccctgaacagatacatacatagagagagacagttttccaaactgtgtcacgcaggctgagtgcactggcaggatcacagctcacggcagcctcaacctccctggctcaagcgatccctcccctcagcctcctgagtagctgagactacaggtgagtgccaccacactcagctaattttcaaattttttgtagacagggtctccctatgttgcccaggctggtcttgaactcctagactcaagtgatcctcctgtcttggcctcccaaagtgctgagattacaggtgtgagccactgtgcccagcagtttcccagaatatatttaaatgcaaagttacatgaggggaaaacatgtatgtttgctcctgttgttactgggtaggttctgaacagcagaaacccatgtgcagggtgggctggtgaaggcccctctccgcaaggtggtagcaggaaaaggtccttgacttgatgaatttggtctgcctctgagccactggaggaagctgttttgagccagggttttttggcctaaagccagcatttcctcagtctccctttgtggttcgaaggatatggactattgcaatacatttcttccttcaaatcctgccactgttttgttggcccacaactaataggacctcaaaataagccatgctgctttgcacacacactagccttcttttgtacttttcattctggatgggcttggccaaaacaggctcaggccaaagacctcccaagctgtatgtacttccagtatcctgaaacagtgtttggtgacataatgccaagggtaaacaagcctgatttaggcactgctttatccaggggcttcacccatgaaattaataaaacttatctgagtcacttgaaacttggttcccagaaaacacatttctggtttataatctccttttatgctcacctgacattaattatctatccttgatgatgtgtttaaactgagtagcagaaaacagaggccacactttctgggaaattttaaaggaagaaaccatttttaatgagatgaaaatatttaacgaatttaaaaagctaatgacaattttgagaaaaggtttgggatgtatattgctatgtaatttaataaactgattttatggatataaaaaaaactgctttccttagagaataattattacctgaagcgcatccagacaacgtggctacctttatcatttcattcaaccctgagtggcccaaacaaaggcctcaggccggccacttccttccacttcttggtctgacctctccatgatctgttactaggcaaaactcagatgtttggctaccttgggctgcaactgtcccactcttgcccaggcttgctggagttggggttatccacagtcagaggttcagagttgtcaaattctccaattagagcaagagatgaggaaaggaaagggagacgaaagaaagaggctgtgcctcagaaataataacgccgcatatctacaactatctgatctttgacaaacctgagaaaaacaagcaatggggaaaggattccctatttaataaatggtgctgggaaaactggccaaccaatgtagaaagctgaaactggatcccttccttgcaccttatacaaaaatcagttcaagatggattaaagacttaaacgttagacctaaaaccataacctaggcattaccattcaggacataggcatgggcaaggacttcatgtctaaaacaccaaaaccaatggcaaccaaaggcaaaattgacaaatgggatctaattaaactaaagagcttctgcacagcaaaagaaactaccatcagagtgaacaggcaacctacaaaatgggagaaaattttcgcaacctactcatctgacaaagggctaatatccagaatctacaatgaactcaaacaaatttacaagaaaaaaacaaccccatcaacaagtgggtgaaggatatgaacagacacttctcaaaagaagacatttatgcagccaaaaaacacatgaaaaaatgctcatcatcactggccatcagagaaatgcaaatcaaaaccacaatgagataccatctcacaccagttagaatggcgatcattcaaaagtcaggaaacaacaggtgctggagaggatgtggagaaataagaacacttttacactgttggtaggactgtacactagttcaaccattgtggaagacagtgtggcgattcctcanggatctagaactagaaataccatttgacccagccatcccattactgggtatatacccaaaggactataaatcatgctgctataaagacacacgcacgtgtatgtttattgcggcattattcacaatagcaaagacttggaaccaacccaaatgtccaacaatgacagattggattaagaaaatgtggcacatatacaccatggaatactatgcagccataaaaaacgatgagttcatgtcctttgtagggacatggatgaaattggaaatcatcattctcagtaaactatcgcaagaacaaaaaaccaaacaccgcatattctcactcataggtgggaactgaacaatgagaacacatggacacaggaaggggaacatcacactctggggactgttgtggggtggggggagggggagggatagcattgggagatatacctaatgctagatgacgagttagtgggtgcagcgcaccagcatggcacatgtatacatatgtaactaacctgcacactgtgcacatgtaccctaaaacttaaagtataataataaaaaagaaaaattgcttcaaatgaacaacaaaaaaaaagaggctgtgaacaatgaatctaaaacaatattttcttttgggaaatgcccgttttggcaggaatacattttggctccgctgtgctgtgaattcggaggaaaagtagggagggccggaaagcccagggcttcatgcagagtagacatcaagaacccacctgctctggagtcttggtgggcaaggggaacgaaccttccagtccatttctaccgtcaccataattcctgtgtctgaatctgaatcaccttcttcaaaaactgggggctgaggttgcctccacatgctaacgctgattcagggcggcagcagatgctggtgttctcagttccttcctgcttccgcttcctgttcaggaacagggccgcattttcccatcctcttcggctgtaggcgtggtcacgtgaccaggagggcggggcgcgcctgcctagcataagctggaggacggcgccctcaccctggcgggaggtggatccccagcgcggtgcagttacatcgcagacatgggctcgtctatacgctgctggacggccggggtctgggctccacagccggggggcaccaccctggagctggtgataggggagggaatcgccgctcgggcgcccgggcctcgcgcggagcctgcgtgcgcgggagttcacggggcaaatcctgcccatcctccgcgctcaggcgtggcttcaaaagcctcgggccgggtggtgcagccccagcataacctggcgccccggtggctgctggagtggttggctcagaatggaaggaaacggtggggtctgcgttactctgtggtgataaaaaagagaagcggcagcttagcgccaagaataaatgatgaccgccggaatccctgccgttaggcgcaggtcttggcatgagagctgcaacagggcggccagctgggcgccagggggcctgggccgcctgtccggtgcgggtccccgaatatcctgggctcttccgggaagtgccgctgcggtgaggccagagcctcccgctacggaggatgcgatgtgatgtgct

SEQ ID NO: 430471 - DNA, 4414 bp, Homo sapiens
  misc_feature (2799)..(2799): n is a, c, g, or t
ggggtgaaccgtgacagcgcttcggcccgcactaaggccggctcttgtgccggaaggaggaaggcgtggggcattcgcccctcggagctagggagtgtgtgcgacgccgctgcgaggtcacgtgagccactgccggcagagagggaaaggggcggggcccagaacgaagcggggaggcgccccttgtttccctggggtcacgcgcagccggaagtggcggctgctgcggagaattggagatggggaccgccctggacatcaagattaaaagagcgaataaagtttatcacgccggggaagtgctctctggcgtggtggtcatatcgagtaaggattcagtccaacaccagggagtgtctttgaccatggaaggaactgtaaacctccagctcagtgccaaaagttgctgggattacaggtgtgagccaccacacccagcctctgtagttctttttacaacatttttcattataactttaaattttttaagcaactggaaaagtgttccttgctctcttggggggatttggctggtgccgaagtgtttctgaagtctcaagaactgccataaaatctcacgctgccatttccctgaacagatacatacatagagagagacagttttccaaactgtgtcacgcaggctgagtgcactggcaggatcacagctcacggcagcctcaacctccctggctcaagcgatccctcccctcagcctcctgagtagctgagactacaggtgagtgccaccacactcagctaattttcaaattttttgtagacagggtctccctatgttgcccaggctggtcttgaactcctagactcaagtgatcctcctgtcttggcctcccaaagtgctgagattacaggtgtgagccactgtgcccagcagtttcccagaatatatttaaatgcaaagttacatgaggggaaaacatgtatgtttgctcctgttgttactgggtaggttctgaacagcagaaacccatgtgcagggtgggctggtgaaggcccctctccgcaaggtggtagcaggaaaaggtccttgacttgatgaatttggtctgcctctgagccactggaggaagctgttttgagccagggttttttggcctaaagccagcatttcctcagtctccctttgtggttcgaaggatatggactattgcaatacatttcttccttcaaatcctgccactgttttgttggcccacaactaataggacctcaaaataagccatgctgctttgcacacacactagccttcttttgtacttttcattctggatgggcttggccaaaacaggctcaggccaaagacctcccaagctgtatgtacttccagtatcctgaaacagtgtttggtgacataatgccaagggtaaacaagcctgatttaggcactgctttatccaggggcttcacccatgaaattaataaaacttatctgagtcacttgaaacttggttcccagaaaacacatttctggtttataatctccttttatgctcacctgacattaattatctatccttgatgatgtgtttaaactgagtagcagaaaacagaggccacactttctgggaaattttaaaggaagaaaccatttttaatgagatgaaaatatttaacgaatttaaaaagctaatgacaattttgagaaaaggtttgggatgtatattgctatgtaatttaataaactgattttatggatataaaaaaaactgctttccttagagaataattattacctgaagcgcatccagacaacgtggctacctttatcatttcattcaaccctgagtggcccaaacaaaggcctcaggccggccacttccttccacttcttggtctgacctctccatgatctgttactaggcaaaactcagatgtttggctaccttgggctgcaactgtcccactcttgcccaggcttgctggagttggggttatccacagtcagaggttcagagttgtcaaattctccaattagagcaagagatgaggaaaggaaagggagacgaaagaaagaggctgtgcctcagaaataataacgccgcatatctacaactatctgatctttgacaaacctgagaaaaacaagcaatggggaaaggattccctatttaataaatggtgctgggaaaactggccaaccaatgtagaaagctgaaactggatcccttccttgcaccttatacaaaaatcagttcaagatggattaaagacttaaacgttagacctaaaaccataacctaggcattaccattcaggacataggcatgggcaaggacttcatgtctaaaacaccaaaaccaatggcaaccaaaggcaaaattgacaaatgggatctaattaaactaaagagcttctgcacagcaaaagaaactaccatcagagtgaacaggcaacctacaaaatgggagaaaattttcgcaacctactcatctgacaaagggctaatatccagaatctacaatgaactcaaacaaatttacaagaaaaaaacaaccccatcaacaagtgggtgaaggatatgaacagacacttctcaaaagaagacatttatgcagccaaaaaacacatgaaaaaatgctcatcatcactggccatcagagaaatgcaaatcaaaaccacaatgagataccatctcacaccagttagaatggcgatcattcaaaagtcaggaaacaacaggtgctggagaggatgtggagaaataagaacacttttacactgttggtaggactgtacactagttcaaccattgtggaagacagtgtggcgattcctcanggatctagaactagaaataccatttgacccagccatcccattactgggtatatacccaaaggactataaatcatgctgctataaagacacacgcacgtgtatgtttattgcggcattattcacaatagcaaagacttggaaccaacccaaatgtccaacaatgacagattggattaagaaaatgtggcacatatacaccatggaatactatgcagccataaaaaacgatgagttcatgtcctttgtagggacatggatgaaattggaaatcatcattctcagtaaactatcgcaagaacaaaaaaccaaacaccgcatattctcactcataggtgggaactgaacaatgagaacacatggacacaggaaggggaacatcacactctggggactgttgtggggtggggggagggggagggatagcattgggagatatacctaatgctagatgacgagttagtgggtgcagcgcaccagcatggcacatgtatacatatgtaactaacctgcacactgtgcacatgtaccctaaaacttaaagtataataataaaaaagaaaaattgcttcaaatgaacaacaaaaaaaaagaggctgtgaacaatgaatctaaaacaatattttcttttgggaaatgcccgttttggcaggaatacattttggctccgctgtgctgtgaattcggaggaaaagtagggagggccggaaagcccagggcttcatgcagagtagacatcaagaacccacctgctctggagtcttggtgggcaaggggaacgaaccttccagtccatttctaccgtcaccataattcctgtgtctgaatctgaatcaccttcttcaaaaactgggggctgaggttgcctccacatgctaacgctgattcagggcggcagcagatgctggtgttctcagttccttcctgcttccgcttcctgttcaggaacagggccgcattttcccatcctcttcggctgtaggcgtggtcacgtgaccaggagggcggggcgcgcctgcctagcataagctggaggacggcgccctcaccctggcgggaggtggatccccagcgcggtgcagttacatcgcagacatgggctcgtctatacgctgctggacggccggggtctgggctccacagccggggggcaccaccctggagctggtgataggggagggaatcgccgctcgggcgcccgggcctcgcgcggagcctgcgtgcgcgggagttcacggggcaaatcctgcccatcctccgcgctcaggcgtggcttcaaaagcctcgggccgggtggtgcagccccagcataacctggcgccccggtggctgctggagtggttggctcagaatggaaggaaacggtggggtctgcgttactctgtggtgataaaaaagagaagcggcagcttagcgccaagaataaatgatgaccgccggaatccctgccgttaggcgcaggtcttggcatgagagctgcaacagggcggccagctgggcgccagggggcctgggccgcctgtccggtgcgggtccccgaatatcctgggctcttccgggaagtgccgctgcggtgaggccagagcctcccgctacggaggatgcgatgtgatgtgct

SEQ ID NO: 430472 - DNA, 3095 bp, Homo sapiens
ggggtgaaccgtgacagcgcttcggcccgcactaaggccggctcttgtgccggaaggaggaaggcgtggggcattcgcccctcggagctagggagtgtgtgcgacgccgctgcgaggtcacgtgagccactgccggcagagagggaaaggggcggggcccagaacgaagcggggaggcgccccttgtttccctggggtcacgcgcagccggaagtggcggctgctgcggagaattggagatggggaccgccctggacatcaagattaaaagagcgaataaagtttatcacgccggggaagtgctctctggcgtggtggtcatatcgagtaaggattcagtccaacaccagggagtgtctttgaccatggaaggaactgtaaacctccagctcagtgccaaaagtgtgggtgtgtttgaagctttttataattctgttaagcctatccagattatcaacagcaccatagaaatggtgaagccggggaaatttcccagcggcaaaacagaaatcccttttgaatttcctctgcacttgaagggtaacaaagttctgtatgagacgtatcatggcgtgtttgtcaacattcagtatacactgcgctgtgacatgaagcggtctctgttggccaaggacttgacaaagacctgtgaatttatcgttcactccgctcctcagaaggggaagtttactcccagtcccgtggacttcacgattacacctgaaaccttacagaacgtcaaagagagagctttgcttcccaaatttctccttcgaggacatctcaactcaacaaactgtgtcatcacgcagccactaacgggagagctggtggtggagagctcggaagccgccatcagaagcgtggagctgcagctggtgcgcgtggagacgtgcgggtgtgcagaaggctatgcccgcgacgccacggagattcagaacattcagatcgccgacggggatgtgtgcaggggcctctctgtccccatctacatggtcttccctaggctgttcacctgccctacactggagaccaccaacttcaaagtggaatttgaggttaacatcgtggtgctgcttcaccctgaccacctcatcacggagaacttcccgctgaagctctgcaggatatagcccggaggagggaagcatagagaacgggagtggccatctggaaatccagctggttatccaaatcctaaggggagctacagccagcggcatatacttgtttttgtgattattctgtatcagaaatgaaacagaccctcaaattaactttccttcctcatttcttgaggcttctgcttccaacaggcacctctaatcagaccttttctttgaaattcaacaagatttcttaatgctatttgccaagaccatttcacagaaaacattgactgtggctcttgccttatctgttcctttttaggtacagtaaaacaattgtgacagcagtttgagcttgctggagagtggcatcatggggacaaaaggaaacctctgacttgctaatggatgtagccagggactccccatagcaaagggtctgtggccagttgacatccaggatggctgcaagcgcacttgatggtcaggaagtttgcagatactcgccaaggcagagcgcaaagtgctagccactggaaatgcatgacttccctccacccctactctattctgtagttttttggttttgtttctgagacggagtctcagtctgtcacccaggctggagtgatctcagctcactgcaacctccacctcccaggttcaagcgactctcctgcctcagcctcccgagtagttgggattacaggtgactgccaccgtgcccggctaatgtttgtatttttagtagagacggggcttcaccatcttggccaggctggtcttgaactcctgacctcgtgacccacccgccttggcctcccaaagtgctgggattacaggtgtgagccaccacacccagcctctgtagttctttttacaacatttttcattataactttaaattttttaagcaactggaaaagtgttccttgctctcttggggggatttggctggtgccgaagtgtttctgaagtctcaagaactgccataaaatctcacgctgccatttccctgaacagatacatacatagagagagacagttttccaaactgtgtcacgcaggctgagtgcactggcaggatcacagctcacggcagcctcaacctccctggctcaagcgatccctcccctcagcctcctgagtagctgagactacaggtgagtgccaccacactcagctaattttcaaattttttgtagacagggtctccctatgttgcccaggctggtcttgaactcctagactcaagtgatcctcctgtcttggcctcccaaagtgctgagattacaggtgtgagccactgtgcccagcagtttcccagaatatatttaaatgcaaagttacatgaggggaaaacatgtatgtttgctcctgttgttactgggtaggttctgaacagcagaaacccatgtgcagggtgggctggtgaaggcccctctccgcaaggtggtagcaggaaaaggtccttgacttgatgaatttggtctgcctctgagccactggaggaagctgttttgagccagggttttttggcctaaagccagcatttcctcagtctccctttgtggttcgaaggatatggactattgcaatacatttcttccttcaaatcctgaaacagtgtttggtgacataatgccaagggtaaacaagcctgatttaggcactgctttatccaggggcttcacccatgaaattaataaaacttatctgagtcacttgaaacttggttcccagaaaacacatttctggtttataatctccttttatgctcacctgacattaattatctatccttgatgatgtgtttaaactgagtagcagaaaacagaggccacactttctgggaaattttaaaggaagaaaccatttttaatgagatgaaaatatttaacgaatttaaaaagctaatgacaattttgagaaaaggtttgggatgtatattgctatgtaatttaataaactgattttatggatata

SEQ ID NO: 430473 - DNA, 3745 bp, Homo sapiens
  misc_feature (2130)..(2130): n is a, c, g, or t
atcacgttttcagtgatcatatttgttaactcctgcgttcatcaagacttaccaaaagaagatgaatttgtttaaagtcaaattggaaaccccatccttttccacatgttgccaagacagatgttcagatatacatagaaaacgtgtgtgctggccaggcacagtggctcctgtcttggcctcccaaagtgctgagattacaggtgtgagccactgtgcccagcagtttcccagaatatatttaaatgcaaagttacatgaggggaaaacatgtatgtttgctcctgttgttactgggtaggttctgaacagcagaaacccatgtgcagggtgggctggtgaaggcccctctccgcaaggtggtagcaggaaaaggtccttgacttgatgaatttggtctgcctctgagccactggaggaagctgttttgagccagggttttttggcctaaagccagcatttcctcagtctccctttgtggttcgaaggatatggactattgcaatacatttcttccttcaaatcctgccactgttttgttggcccacaactaataggacctcaaaataagccatgctgctttgcacacacactagccttcttttgtacttttcattctggatgggcttggccaaaacaggctcaggccaaagacctcccaagctgtatgtacttccagtatcctgaaacagtgtttggtgacataatgccaagggtaaacaagcctgatttaggcactgctttatccaggggcttcacccatgaaattaataaaacttatctgagtcacttgaaacttggttcccagaaaacacatttctggtttataatctccttttatgctcacctgacattaattatctatccttgatgatgtgtttaaactgagtagcagaaaacagaggccacactttctgggaaattttaaaggaagaaaccatttttaatgagatgaaaatatttaacgaatttaaaaagctaatgacaattttgagaaaaggtttgggatgtatattgctatgtaatttaataaactgattttatggatataaaaaaaactgctttccttagagaataattattacctgaagcgcatccagacaacgtggctacctttatcatttcattcaaccctgagtggcccaaacaaaggcctcaggccggccacttccttccacttcttggtctgacctctccatgatctgttactaggcaaaactcagatgtttggctaccttgggctgcaactgtcccactcttgcccaggcttgctggagttggggttatccacagtcagaggttcagagttgtcaaattctccaattagagcaagagatgaggaaaggaaagggagacgaaagaaagaggctgtgcctcagaaataataacgccgcatatctacaactatctgatctttgacaaacctgagaaaaacaagcaatggggaaaggattccctatttaataaatggtgctgggaaaactggccaaccaatgtagaaagctgaaactggatcccttccttgcaccttatacaaaaatcagttcaagatggattaaagacttaaacgttagacctaaaaccataacctaggcattaccattcaggacataggcatgggcaaggacttcatgtctaaaacaccaaaaccaatggcaaccaaaggcaaaattgacaaatgggatctaattaaactaaagagcttctgcacagcaaaagaaactaccatcagagtgaacaggcaacctacaaaatgggagaaaattttcgcaacctactcatctgacaaagggctaatatccagaatctacaatgaactcaaacaaatttacaagaaaaaaacaaccccatcaacaagtgggtgaaggatatgaacagacacttctcaaaagaagacatttatgcagccaaaaaacacatgaaaaaatgctcatcatcactggccatcagagaaatgcaaatcaaaaccacaatgagataccatctcacaccagttagaatggcgatcattcaaaagtcaggaaacaacaggtgctggagaggatgtggagaaataagaacacttttacactgttggtaggactgtacactagttcaaccattgtggaagacagtgtggcgattcctcanggatctagaactagaaataccatttgacccagccatcccattactgggtatatacccaaaggactataaatcatgctgctataaagacacacgcacgtgtatgtttattgcggcattattcacaatagcaaagacttggaaccaacccaaatgtccaacaatgacagattggattaagaaaatgtggcacatatacaccatggaatactatgcagccataaaaaacgatgagttcatgtcctttgtagggacatggatgaaattggaaatcatcattctcagtaaactatcgcaagaacaaaaaaccaaacaccgcatattctcactcataggtgggaactgaacaatgagaacacatggacacaggaaggggaacatcacactctggggactgttgtggggtggggggagggggagggatagcattgggagatatacctaatgctagatgacgagttagtgggtgcagcgcaccagcatggcacatgtatacatatgtaactaacctgcacactgtgcacatgtaccctaaaacttaaagtataataataaaaaagaaaaattgcttcaaatgaacaacaaaaaaaaagaggctgtgaacaatgaatctaaaacaatattttcttttgggaaatgcccgttttggcaggaatacattttggctccgctgtgctgtgaattcggaggaaaagtagggagggccggaaagcccagggcttcatgcagagtagacatcaagaacccacctgctctggagtcttggtgggcaaggggaacgaaccttccagtccatttctaccgtcaccataattcctgtgtctgaatctgaatcaccttcttcaaaaactgggggctgaggttgcctccacatgctaacgctgattcagggcggcagcagatgctggtgttctcagttccttcctgcttccgcttcctgttcaggaacagggccgcattttcccatcctcttcggctgtaggcgtggtcacgtgaccaggagggcggggcgcgcctgcctagcataagctggaggacggcgccctcaccctggcgggaggtggatccccagcgcggtgcagttacatcgcagacatgggctcgtctatacgctgctggacggccggggtctgggctccacagccggggggcaccaccctggagctggtgataggggagggaatcgccgctcgggcgcccgggcctcgcgcggagcctgcgtgcgcgggagttcacggggcaaatcctgcccatcctccgcgctcaggcgtggcttcaaaagcctcgggccgggtggtgcagccccagcataacctggcgccccggtggctgctggagtggttggctcagaatggaaggaaacggtggggtctgcgttactctgtggtgataaaaaagagaagcggcagcttagcgccaagaataaatgatgaccgccggaatccctgccgttaggcgcaggtcttggcatgagagctgcaacagggcggccagctgggcgccagggggcctgggccgcctgtccggtgcgggtccccgaatatcctgggctcttccgggaagtgccgctgcggtgaggccagagcctcccgctacggaggatgcgatgtgatgtgct

SEQ ID NO: 430474 - DNA, 1874 bp, Homo sapiens
ggggtgaaccgtgacagcgcttcggcccgcactaaggccggctcttgtgccggaaggaggaaggcgtggggcattcgcccctcggagctagggagtgtgtgcgacgccgctgcgaggtcacgtgagccactgccggcagagagggaaaggggcggggcccagaacgaagcggggaggcgccccttgtttccctggggtcacgcgcagccggaagtggcggctgctgcggagaattggagatggggaccgccctggacatcaagattaaaagagcgaataaagtttatcacgccggggaagtgctctctggcgtggtggtcatatcgagtaaggattcagtccaacaccagggagtgtctttgaccatggaaggaactgtaaacctccagctcagtgccaaaagtgtgggtgtgtttgaagctttttataattctgttaagcctatccagattatcaacagcaccatagaaatggtgaagccggggaaatttcccagcggcaaaacagaaatcccttttgaatttcctctgcacttgaagggtaacaaagttctgtatgagacgtatcatggcgtgtttgtcaacattcagtatacactgcgctgtgacatgaagcggtctctgttggccaaggacttgacaaagacctgtgaatttatcgttcactccgctcctcagaaggggaagtttactcccagtcccgtggacttcacgattacacctgaaaccttacagaacgtcaaagagagagctttgcttcccaaatttctccttcgaggacatctcaactcaacaaactgtgtcatcacgcagccactaacgggagagctggtggtggagagctcggaagccgccatcagaagcgtggagctgcagctggtgcgcgtggagacgtgcgggtgtgcagaaggctatgcccgcgacgccacggagattcagaacattcagatcgccgacggggatgtgtgcaggggcctctctgtccccatctacatggtcttccctaggctgttcacctgccctacactggagaccaccaacttcaaagtggaatttgaggttaacatcgtggtgctgcttcaccctgaccacctcatcacggagaacttcccgctgaagctctgcaggatatagcccggaggagggaagcatagagaacgggagtggccatctggaaatccagctggttatccaaatcctaaggggagctacagccagcggcatatacttgtttttgtgattattctgtatcagaaatgaaacagaccctcaaattaactttccttcctcatttcttgaggcttctgcttccaacaggcacctctaatcagaccttttctttgaaattcaacaagatttcttaatgctatttgccaagaccatttcacagaaaacattgactgtggctcttgccttatctgttcctttttaggtacagtaaaacaattgtgacagcagtttgagcttgctggagagtggcatcatggggacaaaaggaaacctctgacttgctaatggatgtagccagggactccccatagcaaagggtctgtggccagttgacatccaggatggctgcaagcgcacttgatggtcaggaagtttgcagatactcgccaaggcagagcgcaaagtgctagccactggaaatgcatgacttccctccacccctactctattctgtagttttttggttttgtttctgagacggagtctcagtctgtcacccaggctggagtgatctcagctcactgcaacctccacctcccaggctgaggcaggagaattgcttgaacccaggaggcagagtttgcagtgagccgagatcacgccatcgcactccagcctgagcaacaagagtgaaactccatctca

SEQ ID NO: 430475 - DNA, 1795 bp, Homo sapiens
ggggtgaaccgtgacagcgcttcggcccgcactaaggccggctcttgtgccggaaggaggaaggcgtggggcattcgcccctcggagctagggagtgtgtgcgacgccgctgcgaggtcacgtgagccactgccggcagagagggaaaggggcggggcccagaacgaagcggggaggcgccccttgtttccctggggtcacgcgcagccggaagtggcggctgctgcggagaattggagatggggaccgccctggacatcaagattaaaagagcgaataaagtttatcacgccggggaagtgctctctggcgtggtggtcatatcgagtaaggattcagtccaacaccagggagtgtctttgaccatggaaggaactgtaaacctccagctcagtgccaaaagtgtgggtgtgtttgaagctttttataattctgttaagcctatccagattatcaacagcaccatagaaatggtgaagccggggaaatttcccagcggcaaaacagaaatcccttttgaatttcctctgcacttgaagggtaacaaagttctgtatgagacgtatcatggcgtgtttgtcaacattcagtatacactgcgctgtgacatgaagcggtctctgttggccaaggacttgacaaagacctgtgaatttatcgttcactccgctcctcagaaggggaagtttactcccagtcccgtggacttcacgattacacctgaaaccttacagaacgtcaaagagagagctttgcttcccaaatttctccttcgaggacatctcaactcaacaaactgtgtcatcacgcagccactaacgggagagctggtggtggagagctcggaagccgccatcagaagcgtggagctgcagctggtgcgcgtggagacgtgcgggtgtgcagaaggctatgcccgcgacgccacggagattcagaacattcagatcgccgacggggatgtgtgcaggggcctctctgtccccatctacatggtcttccctaggctgttcacctgccctacactggagaccaccaacttcaaagtggaatttgaggttaacatcgtggtgctgcttcaccctgaccacctcatcacggagaacttcccgctgaagctctgcaggatatagcccggaggagggaagcatagagaacgggagtggccatctggaaatccagctggttatccaaatcctaaggggagctacagccagcggcatatacttgtttttgtgattattctgtatcagaaatgaaacagaccctcaaattaactttccttcctcatttcttgaggcttctgcttccaacaggcacctctaatcagaccttttctttgaaattcaacaagatttcttaatgctatttgccaagaccatttcacagaaaacattgactgtggctcttgccttatctgttcctttttaggtacagtaaaacaattgtgacagcagtttgagcttgctggagagtggcatcatggggacaaaaggaaacctctgacttgctaatggatgtagccagggactccccatagcaaagggtctgtggccagttgacatccaggatggctgcaagcgcacttgatggtcaggaagtttgcagatactcgccaaggcagagcgcaaagtgctagccactggaaatgcatgacttccctccacccctactctattctgtagttttttggttttgtttctgagacggagtctcagtctgtcacccaggctggagtgagccaggattgtgcgactgcactccagcctgggtgacagggtgaaacgccatctca

SEQ ID NO: 430476 - DNA, 841 bp, Homo sapiens
ggggtgaaccgtgacagcgcttcggcccgcactaaggccggctcttgtgccggaaggaggaaggcgtggggcattcgcccctcggagctagggagtgtgtgcgacgccgctgcgaggtcacgtgagccactgccggcagagagggaaaggggcggggcccagaacgaagcggggaggcgccccttgtttccctggggtcacgcgcagccggaagtggcggctgctgcggagaattggagatggggaccgccctggacatcaagattaaaagagcgaataaagtttatcacgccggggaagtgctctctggcgtggtggtcatatcgagtaaggattcagtccaacaccagggagtgtctttgaccatggaaggaactgtaaacctccagctcagtgccaaaagtgtgggtgtgtttgaagctttttataattctgttaagcctatccagattatcaacagcaccatagaaatggtgaagccggggaaatttcccagcggcaaaacagaaatcccttttgaatttcctctgcacttgaagggtaacaaagttctgtatgagacgtatcatggcgtgtttgtcaacattcaggtgagagcttcctagtcctacgcgactgacttcacaagttttcttctgacaaacggtgtggtctttctctcaacgttagtagacgggcccaagaatttaatactgtgtttattgctgagacctcgcatgtatattcgacgttaatttctcatttccctgataaatgcatttgatgtatggccgttatttctgatgggagcctcaggcactcgtgctgtaacttcttttccctctgtttcttctgggctctt

SEQ ID NO: 430477 - DNA, 492 bp, Homo sapiens
agcttcctgcgactgcagtggtggcggcgtgtggtttcgctgcttggtaacagtgagcacaaacccaccctctcttctcttctcagaatttgaggttaacatcgtggtgctgcttcaccctgaccacctcatcacggagaacttcccgctgaagctctgcaggatatagcccggaggagggaagcatagagaacgggagtggccatctggaaatccagctggttatccaaatcctaaggggagctacagccagcggcatatacttgtttttgtgattattctgtatcagaaatgaaacagaccctcaaattaactttccttcctcatttcttgaggcttctgcttccaacaggcacctctaatcagaccttttctttgaaattcaacaagatttcttaatgctatttgccaagaccatttcacagaaaacattgactgtggctcttgccttatctgttcctttttaggtacagtaaaacaattgtgacagca

SEQ ID NO: 430478 - DNA, 4745 bp, Homo sapiens
gtggcccgagtcgcgcgcaccggcggcggcgggggcagcgcggcgcgtgtctgtgcgctgcggtcgctcgggaccgggaccggggcgaggcgccgcggggctgagcccagcagacattgcgttggcctccgagcagggcgcatcatgcagcgttcgcgcaccggagagaaaactgagaatgaaattgctttggcaagctaaaatgagctcgattcaggactggggtgaagaggtagaggaaggagctgtttaccatgtcaccctcaaaagagtccagattcaacaggctgccaataaaggagcaagatggctaggggttgaaggggaccagctgcctccaggacacacagtcagtcaatatgaaacctgtaagatcaggaccataaaagctggcaccttggagaagcttgtggagaacctgctgacagcttttggggacaatgactttacctatatcagcatctttctttcaacgtacagaggctttgcctccactaaagaagtgctggaactactgctggacaggtatggaaacctgacaagcccaaactgtgaagaagatggaagccaaagttcatcagagtccaaaatggtgatcaggaatgcaatcgcttccatactaagggcctggcttgaccagtgtgcagaagacttccgagagccccctcacttcccttgcttacagaaactgctggattatctcacacggatgatgccgggctctgacccagaaagaagagcacaaaatcttcttgagcagtttcagaagcaagaagtggaaactgacaatgggcttcccaacacgatctccttcagcctggaagaggaagaggaactggagggtggagagtcagcagaattcacgtgcttctcagaagatctcgtggcagagcagctgacctacatggatgcacaactcttcaagaaagtagtgcctcaccactgcctgggctgcatttggtctcgaagggataagaaggaaaacaaacatttggctcctacgatccgtgccaccatctctcagtttaataccctcaccaaatgtgttgtcagcaccatcctggggggcaaagaactcaaaactcagcagagagccaaaatcattgagaagtggatcaacatcgctcatgaatgtagactcctgaagaatttttcctccttgagggccatcgtttcggcactgcagtctaattccatctatcggttaaaaaagacttgggctgccgtcccaagggaccgaatgctgatgtttgaagaactttcagatatcttctcagaccataataaccatttgaccagccgagaactactgatgaaggaaggaacctcaaaatttgcaaacctggacagcagtgtgaaagaaaaccagaagcgtacccagaggcggctgcagctccagaaggacatgggtgtgatgcagggaactgtgccctacctgggcaccttcctgactgacctgaccatgcttgacactgcccttcaggactacatcgagggtggactgataaactttgagaaaaggagaagggaatttgaagtgattgcccagataaagctcttacagtctgcctgcaacagctattgcatgaccccagaccaaaagttcatccagtggttccagaggcagcagctcctgacagaggaggagagctatgccctgtcatgtgagattgaagcagctgctgacgccagcaccacctcgcccaagcctcggaagagcatggtgaagagactcagcctactgtttctagggtctgacatgatcaccagtcccactcccaccaaagagcagcccaagtccactgccagcgggagctctggtgaaagcatggactctgtcagcgtgtcatcctgcgagtcgaaccactcagaggctgaggagggctccattactcccatggacacccctgatgagcctcaaaaaaagctctctgagtcctcctcatcctgttcttctatccattccatggacacaaattcctcagggatgtcttccttaatcaaccccctctcctcccctccgtcctgcaacaacaaccccaaaatccacaagcgctctgtctcggtgacgtccattacctcgactgtgctgcctcctgtttacaaccaacagaatgaagacacctgcataatccgcatcagtgtggaagacaataacggcaacatgtacaagagcatcatgttgacgagccaggataaaacccccgctgtgatccagagagccatgctgaagcacaatctggactcagaccccgccgaggagtacgagctggtgcaggtcatctcggaggacaaagaacttgtgattccagactcagcaaatgtcttttatgccatgaacagccaagtgaactttgacttcattttgcgcaaaaagaactccatggaagaacaagtgaaactgcgtagccggaccagcttgacgttgcccaggacagctaaacggggctgctggagtaacagacacagcaaaatcaccctctgaagggagggaccagtggccccttgtttgccaaaggcagagtggggctgagaaacaggctgcggtgattgcaattaccatccggtgttcgaggatcattggtgaagtcagcagatatttattgagttcctgtggtgtgcaaagcattatgataggcaccgtggggaaactggaaatgaatttgacatgaaaaggatgaacgattcactgattctctttgactcatttgagactaaaatgcagaattaccaacatttaaaacatatatatgcacatgtatttggtatgcatgtgtatctatataaaaatatataagagggactttatgggatagtatggactatggaaaaacaaatttgcacaatggcctgggaagttgaggtcactttttacagggaaatagaagaaactgagaacctagtctcgtatattctgagtaaatggaatcagtcctgggaatagagagtgtcctttgtgccagtattacaagaagcccaaactttatttttataaagggagaggatgactttctcaatcaagtgccaccagataaaaacaactgcagaggctggaactgccacaggctgtatgaaaggccactttggaaagggtttggatgagctggtggccttcaacctctgcctgcatctgccactttctgctaccctagggaggccaggaggagcttcggaggaccatcgccccactggtctagccatcatgacacctctggaggtgtcaagctcctgaaacaagctcatttcagtttctggcaaccccgtgtatttccgttttccccctaaagaacatatcataatcattgcacaaataaccatgttctttggtaatgaagccagaaaagaaagcgcaaaagaatggtgactcatttggactcttatctgtcttggaatgtcactgcttcattgccttctctgattgccttttgcatgtaaaactatgtgtctggagtcttttgccatctggatcttagtacctctttattatgtgcaatttattcctcaggtgtggaaatttctactgcaattgactacgtttgattattttgagcttgtgaaagatttctgaacagtgattgtcccgttaatagcccctcagaagatgttccctgctgataacagcatcctattttacttacttttatagcattactgtgcctagtcgtggggaaagagatggggctgtatagattatctgaatcatttgtctaagaggtacattcttccagatggaatcaataacttttttttttccaggttcccgtgcttgctatcacagtatcattgttaagtgacacttttgtctctcataacaccatcacactcttccttccaagtctgagctgtgctggggtttgaactaaaagccatatgtggaatattgacatgtgtaagaagcactttcagaatgttgtcctttttaagaaatgattctcaaaataccagtttttattccaaaaatttagagaacaaacccggaatatgaagtgcagattgtaacatggagctatttttttttcctaatcccataatacagctcctaaaagttgtgtgggatttgcgttgcataaatagccatgtgaattccacaagaagcaccagggaaagtttagagatttgcggcaatggaccgaagaacgggccaggaagtcctccaatttcctttggtctttccaggagattggactacacattgtaaagactgactgggtttcaactagtcaaaaagcactttcttctgttttcaatccctgttcgatttgtgcttctgtgcttgtaggagagatggccagggtggcagccctcatgcaggttgaagtatatgtagcctcagcctgatattcttggtgcgaaggtaaaaaaaaaaaaaataaataaaaccattggcctggttgagggcgtgaccaccaagacatatatgttgtgcccgtgttcatcctgtgtatttatactgtatatgtagagtctagatttatatactgcaatgtaaaatatatatatatttaccttttttaaagacaatggaaattccaagtagctaaaacttagcttcatttatttaatgccactttaaatgtcttaaatttgtttcctggtggacagccgggtaatgcttttagctgctcgcatgcttgtctttctgcatctccatcatctgtttaccttttggttaaactaataaactagtttgggacttggctggcatgtgctgccagacccaaagggattgtatctggattattaac

SEQ ID NO: 430479 - DNA, 795 bp, Homo sapiens
ctgcggtccagtctagggggtctcagattggcggggatgggcagcagcggcaggtggccttggcttttgctgcagccgtcaacgacctatcatcggggtcctgcgtaaggtccggctggctgggacttggctgtgggtgggatggactggctgccggaccgagtgccctgcagttggtaggagtatgaggcagagtgatgcacacccgggcgcccagcatcgttctaattgccggagacattgcctcagactgtgcgctgctagaggctgcgttcctgagcaggaagcccgtttcctgggattggaactacccttcttggccagcgggaagtccccaaggacggagtcgaaaggtcaaatcttatctgtcagtgctgtgtgacagcatcgcaacgggatctgcagaacctgaactcggtatcaaatctattgggagggaggggaacgtgtccgggcaggcgctggggtcgggtggcaaaactggggtgaatttgtagaatttgggaaagggtcattgacatcttaaaataggtggtcgtttggagcaagaatgctcgaaaggggtgagggtaggttaggctgtctagtgctgggggaaaacaaaatgtggaaggattggtggaaaccagacctttaagatttatattatgatttgagatttatatgattccatctaggccagatttaaaaaaatatttgacatccccatttctggaatgtaggagataaaggcactaagacgaaggaaatggtagttgtgctgtgtgtattacactgaagaacaaatatttgcag

SEQ ID NO: 430480 - DNA, 413 bp, Homo sapiens
gagggcctgctcctcagcacctttctcctggtctagatgtgcagtttcctcaagggcagagattttgtccatcttgtccactactatatgccaagtgtttggaacagtttgcacggaggaatggttcctgaatgaattgaatgcatggatgaagtttcttcacctttggccaccttggatactgttttcttagcttggaatgtgttttcctcacttcattcaaaggaccagcttaaacatcacctcctcatagagacctacactgtgcctgtgtcttggtttagctcccttgcctacttttactttaagacacttatcacaatgatgatggtattatttatgtgatcatttatgtaatgactatctctgtcactagattaaagacctcatagggtcagggtctgtgactattt

SEQ ID NO: 430481 - DNA, 583 bp, Homo sapiens
agaagttactgtttttctctttccctcctctattatttgagagttagtcaccaagtctagcccaaggggttatattaatagtgatgccccatgcttttgtggtacatacttctctgtgtacaacagccaatggtgaggcaatgactatccagtgccatccccaactaccaggaatgtccccatgctctgaaagagaacagacatccttctcacttgagccaaagcaaaacataaaccccacagtcaacacttttgaacagatgtgtatgatctcctggctttgaggcttggttttcatgatttcacaagttagatattagatcatggagtttctatcctatttgtgtagaaatttaaaaaatgttattcatggaggttagcaccactggcccgcagttaggccttgaatacatccatttgctccagcttgaagattcctaaaacccctcaacttttcaatgacaataaagacagttttgctttggatgctcttcagggtgtgatgcagggaactgtgccctacctgggcaccttcctgactgacctgaccatgcttgacactgcccttcaggactacatcgag

SEQ ID NO: 430482 - DNA, 793 bp, Homo sapiens
ctgcggtccagtctagggggtctcagattggcggggatgggcagcagcggcaggtggccttggcttttgctgcagccgtcaacgacctatcatcggggtcctgcgtaaggtccggctggctgggacttggctgtgggtgggatggactggctgccggaccgagtgccctgcagttggtaggagtatgaggcagagtgatgcacacccgggcgcccagcatcgttctaattgccggagacattgcctcagactgtgcgctgctagaggctgcgttcctgagcaggaagcccgtttcctgggattggaactacccttcttggccagcgggaagtccccaaggacggagtcgaaaggtcaaatcttatctgtcagtgctgtgtgacagcatcgcaacgggatctgcagaacctgaactcgtgtgcagtttcctcaagggcagagattttgtccatcttgtccactactatatgccaagtgtttggaacagtttgcacggaggaatggttcctgaatgaattgaatgcatggatgaagtttcttcacctttggccaccttggatactgttttcttagcttggaatgtgttttcctcacttcattcaaaggaccagcttaaacatcacctcctcatagagacctacactgtgcctgtgtcttggtttagctcccttgcctacttttactttaagacacttatcacaatgatgatggtattatttatgtgatcatttatgtaatgactatctctgtcactagattaaagacctcatagggtcagggtctgtgactattt

SEQ ID NO: 430483 - DNA, 5121 bp, Homo sapiens
ctgcggtccagtctagggggtctcagattggcggggatgggcagcagcggcaggtggccttggcttttgctgcagccgtcaacgacctatcatcggggtcctgcgtaaggtccggctggctgggacttggctgtgggtgggatggactggctgccggaccgagtgccctgcagttggtaggagtatgaggcagagtgatgcacacccgggcgcccagcatcgttctaattgccggagacattgcctcagactgtgcgctgctagaggctgcgttcctgagcaggaagcccgtttcctgggattggaactacccttcttggccagcgggaagtccccaaggacggagtcgaaaggtcaaatcttatctgtcagtgctgtgtgacagcatcgcaacgggatctgcagaacctgaactcgatccgtaatgcctcctgcctgcctctttcaagatggaggtgaaacctgtgggagaacctactcaagaggtgtctaaattcaaactttccaccaaggtagaaagcacgggacactggctggtggaagatcatgttcgaatatgggaagttttaaagacagaggagagctcgattcaggactggggtgaagaggtagaggaaggagctgtttaccatgtcaccctcaaaagagtccagattcaacaggctgccaataaaggagcaagatggctaggggttgaaggggaccagctgcctccaggacacacagtcagtcaatatgaaacctgtaagatcaggaccataaaagctggcaccttggagaagcttgtggagaacctgctgacagcttttggggacaatgactttacctatatcagcatctttctttcaacgtacagaggctttgcctccactaaagaagtgctggaactactgctggacaggtatggaaacctgacaagcccaaactgtgaagaagatggaagccaaagttcatcagagtccaaaatggtgatcaggaatgcaatcgcttccatactaagggcctggcttgaccagtgtgcagaagacttccgagagccccctcacttcccttgcttacagaaactgctggattatctcacacggatgatgccgggctctgacccagaaagaagagcacaaaatcttcttgagcagtttcagaagcaagaagtggaaactgacaatgggcttcccaacacgatctccttcagcctggaagaggaagaggaactggagggtggagagtcagcagaattcacgtgcttctcagaagatctcgtggcagagcagctgacctacatggatgcacaactcttcaagaaagtagtgcctcaccactgcctgggctgcatttggtctcgaagggataagaaggaaaacaaacatttggctcctacgatccgtgccaccatctctcagtttaataccctcaccaaatgtgttgtcagcaccatcctggggggcaaagaactcaaaactcagcagagagccaaaatcattgagaagtggatcaacatcgctcatgaatgtagactcctgaagaatttttcctccttgagggccatcgtttcggcactgcagtctaattccatctatcggttaaaaaagacttgggctgccgtcccaagggaccgaatgctgatgtttgaagaactttcagatatcttctcagaccataataaccatttgaccagccgagaactactgatgaaggaaggaacctcaaaatttgcaaacctggacagcagtgtgaaagaaaaccagaagcgtacccagaggcggctgcagctccagaaggacatgggtgtgatgcagggaactgtgccctacctgggcaccttcctgactgacctgaccatgcttgacactgcccttcaggactacatcgagggtggactgataaactttgagaaaaggagaagggaatttgaagtgattgcccagataaagctcttacagtctgcctgcaacagctattgcatgaccccagaccaaaagttcatccagtggttccagaggcagcagctcctgacagaggaggagagctatgccctgtcatgtgagattgaagcagctgctgacgccagcaccacctcgcccaagcctcggaagagcatggtgaagagactcagcctactgtttctagggtctgacatgatcaccagtcccactcccaccaaagagcagcccaagtccactgccagcgggagctctggtgaaagcatggactctgtcagcgtgtcatcctgcgagtcgaaccactcagaggctgaggagggctccattactcccatggacacccctgatgagcctcaaaaaaagctctctgagtcctcctcatcctgttcttctatccattccatggacacaaattcctcagggatgtcttccttaatcaaccccctctcctcccctccgtcctgcaacaacaaccccaaaatccacaagcgctctgtctcggtgacgtccattacctcgactgtgctgcctcctgtttacaaccaacagaatgaagacacctgcataatccgcatcagtgtggaagacaataacggcaacatgtacaagagcatcatgttgacgagccaggataaaacccccgctgtgatccagagagccatgctgaagcacaatctggactcagaccccgccgaggagtacgagctggtgcaggtcatctcggaggacaaagaacttgtgattccagactcagcaaatgtcttttatgccatgaacagccaagtgaactttgacttcattttgcgcaaaaagaactccatggaagaacaagtgaaactgcgtagccggaccagcttgacgttgcccaggacagctaaacggggctgctggagtaacagacacagcaaaatcaccctctgaagggagggaccagtggccccttgtttgccaaaggcagagtggggctgagaaacaggctgcggtgattgcaattaccatccggtgttcgaggatcattggtgaagtcagcagatatttattgagttcctgtggtgtgcaaagcattatgataggcaccgtggggaaactggaaatgaatttgacatgaaaaggatgaacgattcactgattctctttgactcatttgagactaaaatgcagaattaccaacatttaaaacatatatatgcacatgtatttggtatgcatgtgtatctatataaaaatatataagagggactttatgggatagtatggactatggaaaaacaaatttgcacaatggcctgggaagttgaggtcactttttacagggaaatagaagaaactgagaacctagtctcgtatattctgagtaaatggaatcagtcctgggaatagagagtgtcctttgtgccagtattacaagaagcccaaactttatttttataaagggagaggatgactttctcaatcaagtgccaccagataaaaacaactgcagaggctggaactgccacaggctgtatgaaaggccactttggaaagggtttggatgagctggtggccttcaacctctgcctgcatctgccactttctgctaccctagggaggccaggaggagcttcggaggaccatcgccccactggtctagccatcatgacacctctggaggtgtcaagctcctgaaacaagctcatttcagtttctggcaaccccgtgtatttccgttttccccctaaagaacatatcataatcattgcacaaataaccatgttctttggtaatgaagccagaaaagaaagcgcaaaagaatggtgactcatttggactcttatctgtcttggaatgtcactgcttcattgccttctctgattgccttttgcatgtaaaactatgtgtctggagtcttttgccatctggatcttagtacctctttattatgtgcaatttattcctcaggtgtggaaatttctactgcaattgactacgtttgattattttgagcttgtgaaagatttctgaacagtgattgtcccgttaatagcccctcagaagatgttccctgctgataacagcatcctattttacttacttttatagcattactgtgcctagtcgtggggaaagagatggggctgtatagattatctgaatcatttgtctaagaggtacattcttccagatggaatcaataacttttttttttccaggttcccgtgcttgctatcacagtatcattgttaagtgacacttttgtctctcataacaccatcacactcttccttccaagtctgagctgtgctggggtttgaactaaaagccatatgtggaatattgacatgtgtaagaagcactttcagaatgttgtcctttttaagaaatgattctcaaaataccagtttttattccaaaaatttagagaacaaacccggaatatgaagtgcagattgtaacatggagctatttttttttcctaatcccataatacagctcctaaaagttgtgtgggatttgcgttgcataaatagccatgtgaattccacaagaagcaccagggaaagtttagagatttgcggcaatggaccgaagaacgggccaggaagtcctccaatttcctttggtctttccaggagattggactacacattgtaaagactgactgggtttcaactagtcaaaaagcactttcttctgttttcaatccctgttcgatttgtgcttctgtgcttgtaggagagatggccagggtggcagccctcatgcaggttgaagtatatgtagcctcagcctgatattcttggtgcgaaggtaaaaaaaaaaaaaataaataaaaccattggcctggttgagggcgtgaccaccaagacatatatgttgtgcccgtgttcatcctgtgtatttatactgtatatgtagagtctagatttatatactgcaatgtaaaatatatatatatttaccttttttaaagacaatggaaattccaagtagctaaaacttagcttcatttatttaatgccactttaaatgtcttaaatttgtttcctggtggacagccgggtaatgcttttagctgctcgcatgcttgtctttctgcatctccatcatctgtttaccttttggttaaactaataaactagtttgggacttggctggcatgtgctgccagacccaaagggattgtatctggattattaac

SEQ ID NO: 430484 - DNA, 1194 bp, Homo sapiens
acgctgtcgctgcgcacacctggcctctgtgccgcctgctccctgctcgtcctcccctccccaccctcacccacctgccatggacgggcccgccgagccccagatcccgggcttgtgggacacctatgaagatgacatctcggaaatcagccagaagttgccaggtgaatacttccggtacaagggcgtccccttccccgtcggcctgtactcgctcgagagcatcagcttggcggagaacacccaagatgtgcgggacgacgacatctttatcatcacctaccccaagtcaggcacgacctggatgatcgagatcatctgcttaatcctgaaggaaggggatccatcctggatccgctccgtgcccatctgggagcgggcaccctggtgtgagaccattgtgggtgccttcagcctcccggaccagtacagcccccgcctcatgagctcccatcttcccatccagatcttcaccaaggccttcttcagctccaaggccaaggtgatctacatgggccgcaacccccgggacgttgtggtctccctctatcattactccaagatcgccgggcagttaaaggacccgggcacacccgaccagttcctgagggacttcctcaaaggcgaagtgcagtttggctcctggttcgaccacattaagggctggcttcggatgaagggcaaagacaacttcctatttatcacctacgaggagctgcagcaggacttacagggctccgtggagcgcatctgtgggttcctgggccgtccgctgggcaaggaggcactgggctccgtcgtggcacactcaaccttcagcgccatgaaggccaacaccatgtccaactacacgctgctgcctcccagcctgctggaccaccgtcgcggggccttcctccggaaaggggtctgtggcgactggaagaaccacttcacggtggcccagagcgaagccttcgatcgtgcctaccgcaagcagatgcgggggatgccgaccttcccctgggatgaagacccggaggaggacggcagcccagatcctgagcccagccctgagcctgagcccaagcccagccttgagcccaacaccagcctggagcgtgagcccagacccaactccagccccagccccagccccggccaggcctctgagaccccgcacccacgaccctcataataaacacgtcgattctg

SEQ ID NO: 430485 - DNA, 1092 bp, Homo sapiens
tagaggatcccctgatttggattctgaagatgacatctcggaaatcagccagaagttgccaggtgaatacttccggtacaagggcgtccccttccccgtcggcctgtactcgctcgagagcatcagcttggcggagaacacccaagatgtgcgggacgacgacatctttatcatcacctaccccaagtcaggcacgacctggatgatcgagatcatctgcttaatcctgaaggaaggggatccatcctggatccgctccgtgcccatctgggagcgggcaccctggtgtgagaccattgtgggtgccttcagcctcccggaccagtacagcccccgcctcatgagctcccatcttcccatccagatcttcaccaaggccttcttcagctccaaggccaaggtgatctacatgggccgcaacccccgggacgttgtggtctccctctatcattactccaagatcgccgggcagttaaaggacccgggcacacccgaccagttcctgagggacttcctcaaaggcgaagtgcagtttggctcctggttcgaccacattaagggctggcttcggatgaagggcaaagacaacttcctatttatcacctacgaggagctgcagcaggacttacagggctccgtggagcgcatctgtgggttcctgggccgtccgctgggcaaggaggcactgggctccgtcgtggcacactcaaccttcagcgccatgaaggccaacaccatgtccaactacacgctgctgcctcccagcctgctggaccaccgtcgcggggccttcctccggaaaggggtctgtggcgactggaagaaccacttcacggtggcccagagcgaagccttcgatcgtgcctaccgcaagcagatgcgggggatgccgaccttcccctgggatgaagacccggaggaggacggcagcccagatcctgagcccagccctgagcctgagcccaagcccagccttgagcccaacaccagcctggagcgtgagcccagacccaactccagccccagccccagccccggccaggcctctgagaccccgcacccacgaccctcataataaacacgtcgattctg

SEQ ID NO: 430486 - DNA, 1138 bp, Homo sapiens
ggatccccgatatgtattttttatttcctctttctgatggctaatagaaacctcagagcaaactatggatccctctttctaacacagtacaggatatggtgacttccccttgggacactaaccttactcctggtttgatctttttctagcctatcctctttttctcctccttctcagtcccttttattttatcttgaaaaattgtttatatctttatcatcacctaccccaagtcaggcacgacctggatgatcgagatcatctgcttaatcctgaaggaaggggatccatcctggatccgctccgtgcccatctgggagcgggcaccctggtgtgagaccattgtgggtgccttcagcctcccggaccagtacagcccccgcctcatgagctcccatcttcccatccagatcttcaccaaggccttcttcagctccaaggccaaggtgatctacatgggccgcaacccccgggacgttgtggtctccctctatcattactccaagatcgccgggcagttaaaggacccgggcacacccgaccagttcctgagggacttcctcaaaggcgaagtgcagtttggctcctggttcgaccacattaagggctggcttcggatgaagggcaaagacaacttcctatttatcacctacgaggagctgcagcaggacttacagggctccgtggagcgcatctgtgggttcctgggccgtccgctgggcaaggaggcactgggctccgtcgtggcacactcaaccttcagcgccatgaaggccaacaccatgtccaactacacgctgctgcctcccagcctgctggaccaccgtcgcggggccttcctccggaaaggggtctgtggcgactggaagaaccacttcacggtggcccagagcgaagccttcgatcgtgcctaccgcaagcagatgcgggggatgccgaccttcccctgggatgaagacccggaggaggacggcagcccagatcctgagcccagccctgagcctgagcccaagcccagccttgagcccaacaccagcctggagcgtgagcccagacccaactccagccccagccccagccccggccaggcctctgagaccccgcacccacgaccctcataataaacacgtcgattctg

SEQ ID NO: 430487 - DNA, 871 bp, Homo sapiens
agtgctgggattacagacatgagccaccgcagctggccaagtgttctttctcagcctccctccctttatgcctttgtcattccctcaagcaatttccagaacctcctgtgtgtggggctctgggctaaggctctaggaacgtgtaagaccttgcctgtcctcaaggggttcctcaatctgtgatctacatgggccgcaacccccgggacgttgtggtctccctctatcattactccaagatcgccgggcagttaaaggacccgggcacacccgaccagttcctgagggacttcctcaaaggcgaagtgcagtttggctcctggttcgaccacattaagggctggcttcggatgaagggcaaagacaacttcctatttatcacctacgaggagctgcagcaggacttacagggctccgtggagcgcatctgtgggttcctgggccgtccgctgggcaaggaggcactgggctccgtcgtggcacactcaaccttcagcgccatgaaggccaacaccatgtccaactacacgctgctgcctcccagcctgctggaccaccgtcgcggggccttcctccggaaaggggtctgtggcgactggaagaaccacttcacggtggcccagagcgaagccttcgatcgtgcctaccgcaagcagatgcgggggatgccgaccttcccctgggatgaagacccggaggaggacggcagcccagatcctgagcccagccctgagcctgagcccaagcccagccttgagcccaacaccagcctggagcgtgagcccagacccaactccagccccagccccagccccggccaggcctctgagaccccgcacccacgaccctcataataaacacgtcgattctg

SEQ ID NO: 430488 - DNA, 897 bp, Homo sapiens
acgctgtcgctgcgcacacctggcctctgtgccgcctgctccctgctcgtcctcccctccccaccctcacccacctgccatggacgggcccgccgagccccagatcccgggcttgtgggacacctatgaagatgacatctcggaaatcagccagaagttgccaggtgaatacttccggtacaagggcgtccccttccccgtcggcctgtactcgctcgagagcatcagcttggcggagaacacccaagatgtgcgggacgacgacatctttatcatcacctaccccaagtcaggcacgacctggatgatcgagatcatctgcttaatcctgaaggaaggggatccatcctggatccgctccgtgcccatctgggagcgggcaccctggtgtgagaccattgtgggtgccttcagcctcccggaccagtacagcccccgcctcatgagctcccatcttcccatccagatcttcaccaaggccttcttcagctccaaggccaaggtgatctacatgggccgcaacccccgggacgttgtggtctccctctatcattactccaagatcgccgggcagttaaaggacccgggcacacccgaccagttcctgagggacttcctcaaaggcgaagtgcagtttggctcctggttcgaccacattaagggctggcttcggatgaagggcaaagacaacttcctatttatcacctacgaggagctgcagcaggacttacagggctccgtggagcgcatctgtgggttcctgggccgtccgctgggcaaggaggcactgggctccgtcgtgcgtgagcccagacccaactccagccccagccccagccccggccaggcctctgagaccccgcacccacgaccctcataataaacacgtcgattctg

SEQ ID NO: 430489 - DNA, 791 bp, Homo sapiens
tagaggatcccctgatttggattctgaagatgacatctcggaaatcagccagaagttgccaggtgaatacttccggtacaagggcgtccccttccccgtcggcctgtactcgctcgagagcatcagcttggcggagaacacccaagatgtgcgggacgacgacatctttatcatcacctaccccaagtcaggcacgacctggatgatcgagatcatctgcttaatcctgaaggaaggggatccatcctggatccgctccgtgcccatctgggagcgggcaccctggtgtgagaccattgtgggtgccttcagcctcccggaccagtacagcccccgcctcatgagctcccatcttcccatccagatcttcaccaaggccttcttcagctccaaggccaaggtgatctacatgggccgcaacccccgggacgttgtggtctccctctatcattactccaagatcgccgggcagttaaaggacccgggcacacccgaccagttcgggtctgtggcgactggaagaaccacttcacggtggcccagagcgaagccttcgatcgtgcctaccgcaagcagatgcgggggatgccgaccttcccctgggatgaagacccggaggaggacggcagcccagatcctgagcccagccctgagcctgagcccaagcccagccttgagcccaacaccagcctggagcgtgagcccagacccaactccagccccagccccagccccggccaggcctctgagaccccgcacccacgaccctcataataaacacgtcgattctg

SEQ ID NO: 430490 - DNA, 375 bp, Homo sapiens
tcatcacctaccccaagtcaggtacctgccgggctgcgggcgtcgggggctggggagagtggggagggggtgcggcagaggacaggaaaggcacatagagaaggaggggaggaggaaaagtggggccgggtctgttcagagcggtgcccctgccagaagtagcctcccagggatacccacccggtgcccagcctctcccctccaggtcagttctcaacacttcaccttccctgacctccctggctgaaatagcgtcctcgttctgttcctccctttcccctttaccctctacttctcttttttttttttttttttgtagagatggggtctcgctacattgcccaggctggtcttgaactcctgatctcaagtgat

SEQ ID NO: 430491 - DNA, 1445 bp, Homo sapiens
ccgtgatctcggctcactgcaacctccgcctcctgggttcaagcgattctcctgcctcagcctccggagtaactgggagtacaggcatgcgccaccacgcttggctgatttttgtctttttagtaggggcggggtttcaccatgttggccaggctggtctcaaactcctgacctcaggtgatccacccacctctgtctcccaaagtgctgggattacaggagtgtgccactgcgcctgaccagctttataaagtttatagggacagtgtcaccactttacagaagagggactgaggctctgaggaggaagttccttgccagggtccgagtgtcgccaccctgagaactccagcacccacctccctactctccctcatggcgtctcccccacctttccacagccagaagttgccaggtgaatacttccggtacaagggcgtccccttccccgtcggcctgtactcgctcgagagcatcagcttggcggagaacacccaagatgtgcgggacgacgacatctttatcatcacctaccccaagtcaggcacgacctggatgatcgagatcatctgcttaatcctgaaggaaggggatccatcctggatccgctccgtgcccatctgggagcgggcaccctggtgtgagaccattgtgggtgccttcagcctcccggaccagtacagcccccgcctcatgagctcccatcttcccatccagatcttcaccaaggccttcttcagctccaaggccaaggtgatctacatgggccgcaacccccgggacgttgtggtctccctctatcattactccaagatcgccgggcagttaaaggacccgggcacacccgaccagttcctgagggacttcctcaaaggcgaagtgcagtttggctcctggttcgaccacattaagggctggcttcggatgaagggcaaagacaacttcctatttatcacctacgaggagctgcagcaggacttacagggctccgtggagcgcatctgtgggttcctgggccgtccgctgggcaaggaggcactgggctccgtcgtggcacactcaaccttcagcgccatgaaggccaacaccatgtccaactacacgctgctgcctcccagcctgctggaccaccgtcgcggggccttcctccggaaaggggtctgtggcgactggaagaaccacttcacggtggcccagagcgaagccttcgatcgtgcctaccgcaagcagatgcgggggatgccgaccttcccctgggatgaagacccggaggaggacggcagcccagatcctgagcccagccctgagcctgagcccaagcccagccttgagcccaacaccagcctggagcgtgagcccagacccaactccagccccagccccagccccggccaggcctctgagaccccgcacccacgaccctcataataaacacgtcgattctg

SEQ ID NO: 430492 - DNA, 342 bp, Homo sapiens
gagagagagagagagagagagagagagagagagagagagagagagagagagagagggcctgcatgaactaccagatgagtaagggaaccccaggcaggcggccctgccacagcccccaaagacactggcctcctgctccagcttccctgtcctggccccacctgtcctgttgctgccagcagggcccttgtttgggattatgaacaaacctcacagactttgaggacctggatggtcctgcattcacggcatcaacactacccgcgctgctgttagacactccgccattcctggttctctccgaaccgttctttgtacagtaaatgtaattcagctgtggtc

SEQ ID NO: 430493 - DNA, 601 bp, Homo sapiens
  misc_feature (35)..(35): n is a, c, g, or t
  misc_feature (43)..(43): n is a, c, g, or t
  misc_feature (53)..(53): n is a, c, g, or t
  misc_feature (65)..(65): n is a, c, g, or t
  misc_feature (118)..(118): n is a, c, g, or t
  misc_feature (126)..(126): n is a, c, g, or t
  misc_feature (129)..(129): n is a, c, g, or t
atacgtattgagctcggtacttagggtcgcctgtncaatctgnaaacggccantggagggggagnaaggggtctgaaaatgtcactgaggcgttcgctttactagtgcgacttcgttntcttttcnttntcttttttttgtctgctttaccagatgcgactttcttgtcttttccttttcgtttttgagacggagtcttgctgtgttcgcccaggctggtcttgaactgctgaccttgtgatccaccctcctcggcctcccaaagtgctgggattacaagggtgagccactgtgcctggcctctaattgtgctgttttataagttggactggcatggccttacttaaattttcaggaaactgttgagtcagtaggtagaatattgaatgttaagtttgtccagaggccagatgccagaacttttggacaagtgagttaatgtccacctccagtccttagcacttgctctaagcgctcacaggcaacagggcaaatgcttgcatggcaggtgcacggcagtgccagccaggtctctcgcagggtggtgtggacacagatgactcgtgtcgagcacacgtgttgtggcctgcacgatgagcta

SEQ ID NO: 430494 - DNA, 459 bp, Homo sapiens
cggccgcgtccccgggcggaaggctcacgctcggtgacgccgcgctgtcccagaacctcagcgactttgcagactcactggtgacccaacggtgcgccccgccgccgccgggcggaagtcccgcccctgccccggagaggaagttccgcctcatcgagcgccgattggccgcaccgccttagagaggacgcgcccggggccaccccgccgctccctccgagggttctgcggaagcaggcggcacagcctgcgaggggctttcgtttcccggactcagccgcatcgcctcggctcgggcgcgcctgcatcctgccgcccgtccgcgcgttgaaggggcggatacaaacaacgtggacttccgagcccctgattggcgagcgtgtaggaaaggggcggggttagcagagccgtgatggacatgcaagcgacccaatggcgccggcgacggggcgggcgagg

SEQ ID NO: 430495 - DNA, 2723 bp, Homo sapiens
tggggcggcgcggcgcggcctggtggtgcgggaagcggcggggcggcggcgaggctgaggtgcgcccgggcgcgggcggggcggggccggcgctgggcttcgggcgcgcccactcggccgccgtggggcggacgcaacgggcgcaggtgcggggcgcgggctctctcacgccgcggcctcacccggcggtgcttcggcaggcggccggcgcggggcgcaggcggcgcggccatgggctcgcagggcagtccggtgaagagctacgactacctgctcaagttcctgctggtgggcgacagcgacgtgggcaagggcgagatcctggagagcctgcaggacggcgcggcagagtccccgtacgcctacagtaacgggatcgactacaagaccaccaccatcctgctggacggccggcgcgtgaagctggagctctgggacacgtcgggccagggccggttctgcaccatcttcaggtcctactccaggggcgctcaggggatcctcttggtgtatgacatcaccaaccgctggtcctttgacggcatcgaccgctggatcaaggagatcgatgagcatgcacccggagtcccccggatcttggttggaaaccggctgcacctggccttcaagcggcaggtcccgacggagcaggcccgcgcgtacgcagagaagaactgcatgaccttctttgaggtcagccccctgtgcaacttcaacgtcatcgagtccttcacggagctatcccgcatcgtgctcatgcggcacggcatggagaagatctggaggcccaaccgagtgttcagcctgcaggacctctgctgccgggccatcgtctcctgcacccccgtgcacctcatcgacaagcttccactgcccgtcaccatcaagagccacctcaagtccttctcgatggccaacggcatgaacgcggtcatgatgcacggccgttcctactccctggccagcggggccgggggcggcggcagcaagggcaacagcctcaagaggtccaagtccatccgtccaccccagagccccccccagaactgctcgcggagtaactgcaagatctcctagcggggacgggcggggccgcctgtgcagatgccaggagggctcgagctggacactcctggctggacgccaggccagtgccgcctacgtggagactgtccacacagctgcctcagaagcgccgggctttcctcacacctgagccgggtgcgaggaggagcatgcacggaccaagcgcggcaggcgggaggagggggcgcggctgggctgctggtgcttccgggaatcttggtcggaaacaagccgggcctccccagctgcctgggcttgaccggcggggagcctggttggcctttcttatttatatagagaacacttcacttttttgtacatttttaaggggccttcagggaagcctgggtgtggcccggtggtggtgcactggtgacttcatggccacgccagctgcggggacgcacttgggactcctcgagaggggactcgcggccgcgatggcaaggcatcctgtgaattcatgcgctgcgagtggcggggctgcccagaggccgggggagcagacagggccggtgctccctctggaagcttgggtgaccggggccctggctcccacgggatggagggtgtggtcctgtggtcagagcccaagcagcactcaggagaggggagaaaggaggtgcacctggcagcccacatttttgttgctccccaaatccctccccacgtggggatgagaaccttcctgctgtgatgtgacaccttcggggacattgaccactcaaaactcagatcatctcgcccaccctggagagtgcagagctatctgtagacttaggaatacttgatgggcagcggtgcagaccccgggcacctgcgtgcagcctcctgttctcggcagcttctgtcgctggccctggggtccccacagctgcagctctcctgtgaggttgcacggcatcagaaccatcctgaccttcttagggacgtgcctggaaccacctcgtccacgtccacgtccacctgggggcctcgggaggctaggcccctcctcaaaggcccaccagcccggcgctcatgctgagccccaggcacgcagggccggccacctctctcctgaagccattggccgctcctccacccagtgcttctgcccatgcctgccccagcagcccctctgcacggtcaccatcgcctgggcctgcccacagcactggtgctcacctctacctcctgtcctcaggccgtgcggcacgacatggccagcacgcagaaggagccctcccgggacccaggaccccccgtggtggactccgcggcacatgcttcccaaggtggtcccacggagggtgttactgggcaccagtggactcgccccatggcccgttcctgggagatgagggccgtggcctgcatgaactaccagatgagtaagggaaccccaggcaggcggccctgccacagcccccaaagacactggcctcctgctccagcttccctgtcctggccccacctgtcctgttgctgccagcagggcccttgtttgggattatgaacaaacctcacagactttgaggacctggatggtcctgcattcacggcatcaacactacccgcgctgctgttagacactccgccattcctggttctctccgaaccgttctttgtacagtaaatgtaattcagctgtggtc

SEQ ID NO: 430496 - DNA, 2904 bp, Homo sapiens
cggccgcgtccccgggcggaaggctcacgctcggtgacgccgcgctgtcccagaacctcagcgactttgcagactcactggtgacccaacggtgcgccccgccgccgccgggcggaagtcccgcccctgccccggagaggaagttccgcctcatcgagcgccgattggccgcaccgccttagagaggacgcgcccggggccaccccgccgctccctccgagggttctgcggaagcaggcggcacagcctgcgaggggctttcgtttcccggactcagccgcatcgcctcggctcgggcgcgcctgcatcctgccgcccgtccgcgcgttgaaggggcggatacaaacaacgtggacttccgagcccctgattggcgagcgtgcggccggcgcggggcgcaggcggcgcggccatgggctcgcagggcagtccggtgaagagctacgactacctgctcaagttcctgctggtgggcgacagcgacgtgggcaagggcgagatcctggagagcctgcaggacggcgcggcagagtccccgtacgcctacagtaacgggatcgactacaagaccaccaccatcctgctggacggccggcgcgtgaagctggagctctgggacacgtcgggccagggccggttctgcaccatcttcaggtcctactccaggggcgctcaggggatcctcttggtgtatgacatcaccaaccgctggtcctttgacggcatcgaccgctggatcaaggagatcgatgagcatgcacccggagtcccccggatcttggttggaaaccggctgcacctggccttcaagcggcaggtcccgacggagcaggcccgcgcgtacgcagagaagaactgcatgaccttctttgaggtcagccccctgtgcaacttcaacgtcatcgagtccttcacggagctatcccgcatcgtgctcatgcggcacggcatggagaagatctggaggcccaaccgagtgttcagcctgcaggacctctgctgccgggccatcgtctcctgcacccccgtgcacctcatcgacaagcttccactgcccgtcaccatcaagagccacctcaagtccttctcgatggccaacggcatgaacgcggtcatgatgcacggccgttcctactccctggccagcggggccgggggcggcggcagcaagggcaacagcctcaagaggtccaagtccatccgtccaccccagagccccccccagaactgctcgcggagtaactgcaagatctcctagcggggacgggcggggccgcctgtgcagatgccaggagggctcgagctggacactcctggctggacgccaggccagtgccgcctacgtggagactgtccacacagctgcctcagaagcgccgggctttcctcacacctgagccgggtgcgaggaggagcatgcacggaccaagcgcggcaggcgggaggagggggcgcggctgggctgctggtgcttccgggaatcttggtcggaaacaagccgggcctccccagctgcctgggcttgaccggcggggagcctggttggcctttcttatttatatagagaacacttcacttttttgtacatttttaaggggccttcagggaagcctgggtgtggcccggtggtggtgcactggtgacttcatggccacgccagctgcggggacgcacttgggactcctcgagaggggactcgcggccgcgatggcaaggcatcctgtgaattcatgcgctgcgagtggcggggctgcccagaggccgggggagcagacagggccggtgctccctctggaagcttgggtgaccggggccctggctcccacgggatggagggtgtggtcctgtggtcagagcccaagcagcactcaggagaggggagaaaggaggtgcacctggcagcccacatttttgttgctccccaaatccctccccacgtggggatgagaaccttcctgctgtgatgtgacaccttcggggacattgaccactcaaaactcagatcatctcgcccaccctggagagtgcagagctatctgtagacttaggaatacttgatgggcagcggtgcagaccccgggcacctgcgtgcagcctcctgttctcggcagcttctgtcgctggccctggggtccccacagctgcagctctcctgtgaggttgcacggcatcagaaccatcctgaccttcttagggacgtgcctggaaccacctcgtccacgtccacgtccacctgggggcctcgggaggctaggcccctcctcaaaggcccaccagcccggcgctcatgctgagccccaggcacgcagggccggccacctctctcctgaagccattggccgctcctccacccagtgcttctgcccatgcctgccccagcagcccctctgcacggtcaccatcgcctgggcctgcccacagcactggtgctcacctctacctcctgtcctcaggccgtgcggcacgacatggccagcacgcagaaggagccctcccgggacccaggaccccccgtggtggactccgcggcacatgcttcccaaggtggtcccacggagggtgttactgggcaccagtggactcgccccatggcccgttcctgggagatgagggccgtggcctgcatgaactaccagatgagtaagggaaccccaggcaggcggccctgccacagcccccaaagacactggcctcctgctccagcttccctgtcctggccccacctgtcctgttgctgccagcagggcccttgtttgggattatgaacaaacctcacagactttgaggacctggatggtcctgcattcacggcatcaacactacccgcgctgctgttagacactccgccattcctggttctctccgaaccgttctttgtacagtaaatgtaattcagctgtggtc

SEQ ID NO: 430497 - DNA, 3036 bp, Homo sapiens
cggccgcgtccccgggcggaaggctcacgctcggtgacgccgcgctgtcccagaacctcagcgactttgcagactcactggtgacccaacggtgcgccccgccgccgccgggcggaagtcccgcccctgccccggagaggaagttccgcctcatcgagcgccgattggccgcaccgccttagagaggacgcgcccggggccaccccgccgctccctccgagggttctgcggaagcaggcggcacagcctgcgaggggctttcgtttcccggactcagccgcatcgcctcggctcgggcgcgcctgcatcctgccgcccgtccgcgcgttgaaggggcggatacaaacaacgtggacttccgagcccctgattggcgagcgtgcggccggcgcggggcgcaggcggcgcggccatgggctcgcagggcagtccggtgaagagctacgactacctgctcaagttcctgctggtgggcgacagcgacgtgggcaagggcgagatcctggagagcctgcaggacggcgcggcagagtccccgtacgcctacagtaacgattgcagctgagaaggcgcgaagctgctggtccctgaaaagctgccgcctaccctggtctggagcccctgcgagctggcgtagagcaggaaggggttgcatcacggctgagtcctcccctgcgcagcacatgggatcgactacaagaccaccaccatcctgctggacggccggcgcgtgaagctggagctctgggacacgtcgggccagggccggttctgcaccatcttcaggtcctactccaggggcgctcaggggatcctcttggtgtatgacatcaccaaccgctggtcctttgacggcatcgaccgctggatcaaggagatcgatgagcatgcacccggagtcccccggatcttggttggaaaccggctgcacctggccttcaagcggcaggtcccgacggagcaggcccgcgcgtacgcagagaagaactgcatgaccttctttgaggtcagccccctgtgcaacttcaacgtcatcgagtccttcacggagctatcccgcatcgtgctcatgcggcacggcatggagaagatctggaggcccaaccgagtgttcagcctgcaggacctctgctgccgggccatcgtctcctgcacccccgtgcacctcatcgacaagcttccactgcccgtcaccatcaagagccacctcaagtccttctcgatggccaacggcatgaacgcggtcatgatgcacggccgttcctactccctggccagcggggccgggggcggcggcagcaagggcaacagcctcaagaggtccaagtccatccgtccaccccagagccccccccagaactgctcgcggagtaactgcaagatctcctagcggggacgggcggggccgcctgtgcagatgccaggagggctcgagctggacactcctggctggacgccaggccagtgccgcctacgtggagactgtccacacagctgcctcagaagcgccgggctttcctcacacctgagccgggtgcgaggaggagcatgcacggaccaagcgcggcaggcgggaggagggggcgcggctgggctgctggtgcttccgggaatcttggtcggaaacaagccgggcctccccagctgcctgggcttgaccggcggggagcctggttggcctttcttatttatatagagaacacttcacttttttgtacatttttaaggggccttcagggaagcctgggtgtggcccggtggtggtgcactggtgacttcatggccacgccagctgcggggacgcacttgggactcctcgagaggggactcgcggccgcgatggcaaggcatcctgtgaattcatgcgctgcgagtggcggggctgcccagaggccgggggagcagacagggccggtgctccctctggaagcttgggtgaccggggccctggctcccacgggatggagggtgtggtcctgtggtcagagcccaagcagcactcaggagaggggagaaaggaggtgcacctggcagcccacatttttgttgctccccaaatccctccccacgtggggatgagaaccttcctgctgtgatgtgacaccttcggggacattgaccactcaaaactcagatcatctcgcccaccctggagagtgcagagctatctgtagacttaggaatacttgatgggcagcggtgcagaccccgggcacctgcgtgcagcctcctgttctcggcagcttctgtcgctggccctggggtccccacagctgcagctctcctgtgaggttgcacggcatcagaaccatcctgaccttcttagggacgtgcctggaaccacctcgtccacgtccacgtccacctgggggcctcgggaggctaggcccctcctcaaaggcccaccagcccggcgctcatgctgagccccaggcacgcagggccggccacctctctcctgaagccattggccgctcctccacccagtgcttctgcccatgcctgccccagcagcccctctgcacggtcaccatcgcctgggcctgcccacagcactggtgctcacctctacctcctgtcctcaggccgtgcggcacgacatggccagcacgcagaaggagccctcccgggacccaggaccccccgtggtggactccgcggcacatgcttcccaaggtggtcccacggagggtgttactgggcaccagtggactcgccccatggcccgttcctgggagatgagggccgtggcctgcatgaactaccagatgagtaagggaaccccaggcaggcggccctgccacagcccccaaagacactggcctcctgctccagcttccctgtcctggccccacctgtcctgttgctgccagcagggcccttgtttgggattatgaacaaacctcacagactttgaggacctggatggtcctgcattcacggcatcaacactacccgcgctgctgttagacactccgccattcctggttctctccgaaccgttctttgtacagtaaatgtaattcagctgtggtc

SEQ ID NO: 430498 - DNA, 2892 bp, Homo sapiens
ggaggaacggggtgttcaccatggcaacagctaatgctgccagcgtgtgatgagtgttgcctgccagcaccggtgggcgctttccgctgcccccgtgtagcccccaccaccacctgtgagaaggcagcaccacccccactgtgcagacgagggattgaggctcaggaggcggcagctgtaggggtgggcttggggtccgggaggagccgccctgcaggcctcctgtgaagcagcgggcttcatggctcttcccctgtcctcctcacgtccacctgggcctggggacggctgccacacacctgcttctgctgcaccgcgcacactaagttctcctgagacccaagcctcagaggaccgcctcaggcccgggatgaccctggctggcatctgagaacccatgtggtcaggagattgcagctgagaaggcgcgaagctgctggtccctgaaaagctgccgcctaccctggtctggagcccctgcgagctggcgtagagcaggaaggggttgcatcacggctgagtcctcccctgcgcagcacatgggatcgactacaagaccaccaccatcctgctggacggccggcgcgtgaagctggagctctgggacacgtcgggccagggccggttctgcaccatcttcaggtcctactccaggggcgctcaggggatcctcttggtgtatgacatcaccaaccgctggtcctttgacggcatcgaccgctggatcaaggagatcgatgagcatgcacccggagtcccccggatcttggttggaaaccggctgcacctggccttcaagcggcaggtcccgacggagcaggcccgcgcgtacgcagagaagaactgcatgaccttctttgaggtcagccccctgtgcaacttcaacgtcatcgagtccttcacggagctatcccgcatcgtgctcatgcggcacggcatggagaagatctggaggcccaaccgagtgttcagcctgcaggacctctgctgccgggccatcgtctcctgcacccccgtgcacctcatcgacaagcttccactgcccgtcaccatcaagagccacctcaagtccttctcgatggccaacggcatgaacgcggtcatgatgcacggccgttcctactccctggccagcggggccgggggcggcggcagcaagggcaacagcctcaagaggtccaagtccatccgtccaccccagagccccccccagaactgctcgcggagtaactgcaagatctcctagcggggacgggcggggccgcctgtgcagatgccaggagggctcgagctggacactcctggctggacgccaggccagtgccgcctacgtggagactgtccacacagctgcctcagaagcgccgggctttcctcacacctgagccgggtgcgaggaggagcatgcacggaccaagcgcggcaggcgggaggagggggcgcggctgggctgctggtgcttccgggaatcttggtcggaaacaagccgggcctccccagctgcctgggcttgaccggcggggagcctggttggcctttcttatttatatagagaacacttcacttttttgtacatttttaaggggccttcagggaagcctgggtgtggcccggtggtggtgcactggtgacttcatggccacgccagctgcggggacgcacttgggactcctcgagaggggactcgcggccgcgatggcaaggcatcctgtgaattcatgcgctgcgagtggcggggctgcccagaggccgggggagcagacagggccggtgctccctctggaagcttgggtgaccggggccctggctcccacgggatggagggtgtggtcctgtggtcagagcccaagcagcactcaggagaggggagaaaggaggtgcacctggcagcccacatttttgttgctccccaaatccctccccacgtggggatgagaaccttcctgctgtgatgtgacaccttcggggacattgaccactcaaaactcagatcatctcgcccaccctggagagtgcagagctatctgtagacttaggaatacttgatgggcagcggtgcagaccccgggcacctgcgtgcagcctcctgttctcggcagcttctgtcgctggccctggggtccccacagctgcagctctcctgtgaggttgcacggcatcagaaccatcctgaccttcttagggacgtgcctggaaccacctcgtccacgtccacgtccacctgggggcctcgggaggctaggcccctcctcaaaggcccaccagcccggcgctcatgctgagccccaggcacgcagggccggccacctctctcctgaagccattggccgctcctccacccagtgcttctgcccatgcctgccccagcagcccctctgcacggtcaccatcgcctgggcctgcccacagcactggtgctcacctctacctcctgtcctcaggccgtgcggcacgacatggccagcacgcagaaggagccctcccgggacccaggaccccccgtggtggactccgcggcacatgcttcccaaggtggtcccacggagggtgttactgggcaccagtggactcgccccatggcccgttcctgggagatgagggccgtggcctgcatgaactaccagatgagtaagggaaccccaggcaggcggccctgccacagcccccaaagacactggcctcctgctccagcttccctgtcctggccccacctgtcctgttgctgccagcagggcccttgtttgggattatgaacaaacctcacagactttgaggacctggatggtcctgcattcacggcatcaacactacccgcgctgctgttagacactccgccattcctggttctctccgaaccgttctttgtacagtaaatgtaattcagctgtggtc

SEQ ID NO: 430499 - DNA, 3163 bp, Homo sapiens
tgtgccccaacctccagggttaacccctgggtgtgcatttgtttattctgaatcttatcatttatcgcccaccagactgacttggccatctctggcctcgaagggtctccctcagcgagaggtgtccttcctgagctgtcgctccatcctgagcaaggccttcgccctgggagcttagtaatgtcaaccttgttctaaacaggacctggggctacacttcagtcttccagatatcgaaagatggttctaagaggctctaaaaaccctaattttcagatggacagtgccctcttctttcagcctcagcctcttgtgtgataggctcttccattacgtgaaggttttgtcagcctaggagtagggtggatcacagctcattggctggatctggttgcagaattgtagggtgggagtggacgttggggagaggcgggcataggggaatgggcctgtgatgtcaccgtttcgcccgacagggctctgagtgtgagcagtgtgctcccctgtgctgctggagagccatgactgtcactgccgagatatttagggcaggtggaaacagcccagagctgagctccaagtaattggtctctaagggatgtggcaaaaagtccccgtggcaaaacctgctctgcctggctgggggagcttcacagaaactgtcctggagggactggcattctgctctgcaagttttaggttggaaaactcagaaatgcccccactcagctctgtcccaggtactcccggggggattcactgatggactggccgagaggacacttagcttccacagctgcacgtcccccggctgccagaaccccgcatctgcctgcccaggaaacttccacaggctgatggctccaggggagggaggggaagcggcatttctgacaccatggaaggcgcccacccccctgctgcagtcctgccaggggatcctcttggtgtatgacatcaccaaccgctggtcctttgacggcatcgaccgctggatcaaggagatcgatgagcatgcacccggagtcccccggatcttggttggaaaccggctgcacctggccttcaagcggcaggtcccgacggagcaggcccgcgcgtacgcagagaagaactgcatgaccttctttgaggtcagccccctgtgcaacttcaacgtcatcgagtccttcacggagctatcccgcatcgtgctcatgcggcacggcatggagaagatctggaggcccaaccgagtgttcagcctgcaggacctctgctgccgggccatcgtctcctgcacccccgtgcacctcatcgacaagcttccactgcccgtcaccatcaagagccacctcaagtccttctcgatggccaacggcatgaacgcggtcatgatgcacggccgttcctactccctggccagcggggccgggggcggcggcagcaagggcaacagcctcaagaggtccaagtccatccgtccaccccagagccccccccagaactgctcgcggagtaactgcaagatctcctagcggggacgggcggggccgcctgtgcagatgccaggagggctcgagctggacactcctggctggacgccaggccagtgccgcctacgtggagactgtccacacagctgcctcagaagcgccgggctttcctcacacctgagccgggtgcgaggaggagcatgcacggaccaagcgcggcaggcgggaggagggggcgcggctgggctgctggtgcttccgggaatcttggtcggaaacaagccgggcctccccagctgcctgggcttgaccggcggggagcctggttggcctttcttatttatatagagaacacttcacttttttgtacatttttaaggggccttcagggaagcctgggtgtggcccggtggtggtgcactggtgacttcatggccacgccagctgcggggacgcacttgggactcctcgagaggggactcgcggccgcgatggcaaggcatcctgtgaattcatgcgctgcgagtggcggggctgcccagaggccgggggagcagacagggccggtgctccctctggaagcttgggtgaccggggccctggctcccacgggatggagggtgtggtcctgtggtcagagcccaagcagcactcaggagaggggagaaaggaggtgcacctggcagcccacatttttgttgctccccaaatccctccccacgtggggatgagaaccttcctgctgtgatgtgacaccttcggggacattgaccactcaaaactcagatcatctcgcccaccctggagagtgcagagctatctgtagacttaggaatacttgatgggcagcggtgcagaccccgggcacctgcgtgcagcctcctgttctcggcagcttctgtcgctggccctggggtccccacagctgcagctctcctgtgaggttgcacggcatcagaaccatcctgaccttcttagggacgtgcctggaaccacctcgtccacgtccacgtccacctgggggcctcgggaggctaggcccctcctcaaaggcccaccagcccggcgctcatgctgagccccaggcacgcagggccggccacctctctcctgaagccattggccgctcctccacccagtgcttctgcccatgcctgccccagcagcccctctgcacggtcaccatcgcctgggcctgcccacagcactggtgctcacctctacctcctgtcctcaggccgtgcggcacgacatggccagcacgcagaaggagccctcccgggacccaggaccccccgtggtggactccgcggcacatgcttcccaaggtggtcccacggagggtgttactgggcaccagtggactcgccccatggcccgttcctgggagatgagggccgtggcctgcatgaactaccagatgagtaagggaaccccaggcaggcggccctgccacagcccccaaagacactggcctcctgctccagcttccctgtcctggccccacctgtcctgttgctgccagcagggcccttgtttgggattatgaacaaacctcacagactttgaggacctggatggtcctgcattcacggcatcaacactacccgcgctgctgttagacactccgccattcctggttctctccgaaccgttctttgtacagtaaatgtaattcagctgtggtc

SEQ ID NO: 430500 - DNA, 2847 bp, Homo sapiens
cggccgcgtccccgggcggaaggctcacgctcggtgacgccgcgctgtcccagaacctcagcgactttgcagactcactggtgacccaacggtgcgccccgccgccgccgggcggaagtcccgcccctgccccggagaggaagttccgcctcatcgagcgccgattggccgcaccgccttagagaggacgcgcccggggccaccccgccgctccctccgagggttctgcggaagcaggcggcacagcctgcgaggggctttcgtttcccggactcagccgcatcgcctcggctcgggcgcgcctgcatcctgccgcccgtccgcgcgttgaaggggcggatacaaacaacgtggacttccgagcccctgattggcgagcgtgcggccggcgcggggcgcaggcggcgcggccatgggctcgcagggcagtccggtgaagagctacgactacctgctcaagttcctgctggtgggcgacagcgacgtgggcaagggcgagatcctggagagcctgcaggacggcgcggcagagtccccgtacgcctacagtaacgggatcgactacaagaccaccaccatcctgctggacggccggcgcgtgaagctggagctctgggacacgtcgggccagggccggttctgcaccatcttcaggtcctactccaggggcgctcaggggatcctcttggtgtatgacatcaccaaccgctggtcctttgacggcatcgaccgctggatcaaggagatcgatgagcggcaggtcccgacggagcaggcccgcgcgtacgcagagaagaactgcatgaccttctttgaggtcagccccctgtgcaacttcaacgtcatcgagtccttcacggagctatcccgcatcgtgctcatgcggcacggcatggagaagatctggaggcccaaccgagtgttcagcctgcaggacctctgctgccgggccatcgtctcctgcacccccgtgcacctcatcgacaagcttccactgcccgtcaccatcaagagccacctcaagtccttctcgatggccaacggcatgaacgcggtcatgatgcacggccgttcctactccctggccagcggggccgggggcggcggcagcaagggcaacagcctcaagaggtccaagtccatccgtccaccccagagccccccccagaactgctcgcggagtaactgcaagatctcctagcggggacgggcggggccgcctgtgcagatgccaggagggctcgagctggacactcctggctggacgccaggccagtgccgcctacgtggagactgtccacacagctgcctcagaagcgccgggctttcctcacacctgagccgggtgcgaggaggagcatgcacggaccaagcgcggcaggcgggaggagggggcgcggctgggctgctggtgcttccgggaatcttggtcggaaacaagccgggcctccccagctgcctgggcttgaccggcggggagcctggttggcctttcttatttatatagagaacacttcacttttttgtacatttttaaggggccttcagggaagcctgggtgtggcccggtggtggtgcactggtgacttcatggccacgccagctgcggggacgcacttgggactcctcgagaggggactcgcggccgcgatggcaaggcatcctgtgaattcatgcgctgcgagtggcggggctgcccagaggccgggggagcagacagggccggtgctccctctggaagcttgggtgaccggggccctggctcccacgggatggagggtgtggtcctgtggtcagagcccaagcagcactcaggagaggggagaaaggaggtgcacctggcagcccacatttttgttgctccccaaatccctccccacgtggggatgagaaccttcctgctgtgatgtgacaccttcggggacattgaccactcaaaactcagatcatctcgcccaccctggagagtgcagagctatctgtagacttaggaatacttgatgggcagcggtgcagaccccgggcacctgcgtgcagcctcctgttctcggcagcttctgtcgctggccctggggtccccacagctgcagctctcctgtgaggttgcacggcatcagaaccatcctgaccttcttagggacgtgcctggaaccacctcgtccacgtccacgtccacctgggggcctcgggaggctaggcccctcctcaaaggcccaccagcccggcgctcatgctgagccccaggcacgcagggccggccacctctctcctgaagccattggccgctcctccacccagtgcttctgcccatgcctgccccagcagcccctctgcacggtcaccatcgcctgggcctgcccacagcactggtgctcacctctacctcctgtcctcaggccgtgcggcacgacatggccagcacgcagaaggagccctcccgggacccaggaccccccgtggtggactccgcggcacatgcttcccaaggtggtcccacggagggtgttactgggcaccagtggactcgccccatggcccgttcctgggagatgagggccgtggcctgcatgaactaccagatgagtaagggaaccccaggcaggcggccctgccacagcccccaaagacactggcctcctgctccagcttccctgtcctggccccacctgtcctgttgctgccagcagggcccttgtttgggattatgaacaaacctcacagactttgaggacctggatggtcctgcattcacggcatcaacactacccgcgctgctgttagacactccgccattcctggttctctccgaaccgttctttgtacagtaaatgtaattcagctgtggtc

SEQ ID NO: 430501 - DNA, 2435 bp, Homo sapiens
cggctctgcaccctgcactgtcccacggcctacgcctgggcatgctggtcactgtgcacacgacagtcgggcgtggagcccagcaagaccaggagctacggggccacccggaagggctgcactgtagggcctgagccctggggtctgcccaccttgacctccgcccaccttgacctcccacggccctcaccccatcatagtccagacaatgagggcgggccctgctgcggctgaggggtgggtggcaccctgcgtttgtgcgtctgctgagttctgtgcccccagcatgcacccggagtcccccggatcttggttggaaaccggctgcacctggccttcaagcggcaggtcccgacggagcaggcccgcgcgtacgcagagaagaactgcatgaccttctttgaggtcagccccctgtgcaacttcaacgtcatcgagtccttcacggagctatcccgcatcgtgctcatgcggcacggcatggagaagatctggaggcccaaccgagtgttcagcctgcaggacctctgctgccgggccatcgtctcctgcacccccgtgcacctcatcgacaagcttccactgcccgtcaccatcaagagccacctcaagtccttctcgatggccaacggcatgaacgcggtcatgatgcacggccgttcctactccctggccagcggggccgggggcggcggcagcaagggcaacagcctcaagaggtccaagtccatccgtccaccccagagccccccccagaactgctcgcggagtaactgcaagatctcctagcggggacgggcggggccgcctgtgcagatgccaggagggctcgagctggacactcctggctggacgccaggccagtgccgcctacgtggagactgtccacacagctgcctcagaagcgccgggctttcctcacacctgagccgggtgcgaggaggagcatgcacggaccaagcgcggcaggcgggaggagggggcgcggctgggctgctggtgcttccgggaatcttggtcggaaacaagccgggcctccccagctgcctgggcttgaccggcggggagcctggttggcctttcttatttatatagagaacacttcacttttttgtacatttttaaggggccttcagggaagcctgggtgtggcccggtggtggtgcactggtgacttcatggccacgccagctgcggggacgcacttgggactcctcgagaggggactcgcggccgcgatggcaaggcatcctgtgaattcatgcgctgcgagtggcggggctgcccagaggccgggggagcagacagggccggtgctccctctggaagcttgggtgaccggggccctggctcccacgggatggagggtgtggtcctgtggtcagagcccaagcagcactcaggagaggggagaaaggaggtgcacctggcagcccacatttttgttgctccccaaatccctccccacgtggggatgagaaccttcctgctgtgatgtgacaccttcggggacattgaccactcaaaactcagatcatctcgcccaccctggagagtgcagagctatctgtagacttaggaatacttgatgggcagcggtgcagaccccgggcacctgcgtgcagcctcctgttctcggcagcttctgtcgctggccctggggtccccacagctgcagctctcctgtgaggttgcacggcatcagaaccatcctgaccttcttagggacgtgcctggaaccacctcgtccacgtccacgtccacctgggggcctcgggaggctaggcccctcctcaaaggcccaccagcccggcgctcatgctgagccccaggcacgcagggccggccacctctctcctgaagccattggccgctcctccacccagtgcttctgcccatgcctgccccagcagcccctctgcacggtcaccatcgcctgggcctgcccacagcactggtgctcacctctacctcctgtcctcaggccgtgcggcacgacatggccagcacgcagaaggagccctcccgggacccaggaccccccgtggtggactccgcggcacatgcttcccaaggtggtcccacggagggtgttactgggcaccagtggactcgccccatggcccgttcctgggagatgagggccgtggcctgcatgaactaccagatgagtaagggaaccccaggcaggcggccctgccacagcccccaaagacactggcctcctgctccagcttccctgtcctggccccacctgtcctgttgctgccagcagggcccttgtttgggattatgaacaaacctcacagactttgaggacctggatggtcctgcattcacggcatcaacactacccgcgctgctgttagacactccgccattcctggttctctccgaaccgttctttgtacagtaaatgtaattcagctgtggtc

SEQ ID NO: 430502 - DNA, 1793 bp, Homo sapiens
tggggcggcgcggcgcggcctggtggtgcgggaagcggcggggcggcggcgaggctgaggtgcgcccgggcgcgggcggggcggggccggcgctgggcttcgggcgcgcccactcggccgccgtggggcggacgcaacgggcgcaggtgcggggcgcgggctctctcacgccgcggcctcacccggcggtgcttcggcaggcggccggcgcggggcgcaggcggcgcggccatgggctcgcagggcagtccggtgaagagctacgactacctgctcaagttcctgctggtgggcgacagcgacgtgggcaagggcgagatcctggagagcctgcaggacggcgcggcagagtccccgtacgcctacagtaacgggatcgactacaagaccaccaccatcctgctggacggccggcgcgtgaagctggagctctgggacacgtcgggccagggccggttctgcaccatcttcaggtcctactccaggggcgctcaggggatcctcttggtgtatgacatcaccaaccgctggtcctttgacggcatcgaccgctggatcaaggagatcgatgagcatgcacccggagtcccccggatcttggttggaaaccggctgcacctggccttcaagcggcaggtcccgacggagcaggcccgcgcgtacgcagagaagaactgcatgaccttctttgaggtcagccccctgtgcaacttcaacgtcatcgagtccttcacggagctatcccgcatcgtgctcatgcggcacggcatggagaagatctggaggcccaaccgagtgttcagcctgcaggacctctgctgccgggccatcgtctcctgcacccccgtgcacctcatcgacaagcttccactgcccgtcaccatcaagagccacctcaagtccttctcgatggccaacggcatgaacgcggtcatgatgcacggccgttcctactccctggccagcggggccgggggcggcggcagcaagggcaacagcctcaagaggtccaagtccatccgtccaccccagagccccccccagaactgctcgcggagtaactgcaagatctcctagcggggacgggcggggccgcctgtgcagatgccaggagggctcgagctggacactcctggctggacgccaggccagtgccgcctacgtggagactgtccacacagctgcctcagaagcgccgggctttcctcacacctgagccgggtgcgaggaggagcatgcacggaccaagcgcggcaggcgggaggagggggcgcggctgggctgctggtgcttccgggaatcttggtcggaaacaagccgggcctccccagctgcctgggcttgaccggcggggagcctggttggcctttcttatttatatagagaacacttcacttttttgtacatttttaaggggccttcagggaagcctgggtgtggcccggtggtggtgcactggtgacttcatggccacgccagctgcggggacgcacttgggactcctcgagaggggactcgcggccgcgatggcaaggcatcctgtgaattcatgcgctgccacagcccccaaagacactggcctcctgctccagcttccctgtcctggccccacctgtcctgttgctgccagcagggcccttgtttgggattatgaacaaacctcacagactttgaggacctggatggtcctgcattcacggcatcaacactacccgcgctgctgttagacactccgccattcctggttctctccgaaccgttctttgtacagtaaatgtaattcagctgtggtc

SEQ ID NO: 430503 - DNA, 1096 bp, Homo sapiens
gctgggtgactgtgcccatgctgaccctgtgcttatggtggtgatgaaggcctggaggagcaggatgagtaggagcatgtggtgcacctggcagcccacatttttgttgctccccaaatccctccccacgtggggatgagaaccttcctgctgtgatgtgacaccttcggggacattgaccactcaaaactcagatcatctcgcccaccctggagagtgcagagctatctgtagacttaggaatacttgatgggcagcggtgcagaccccgggcacctgcgtgcagcctcctgttctcggcagcttctgtcgctggccctggggtccccacagctgcagctctcctgtgaggttgcacggcatcagaaccatcctgaccttcttagggacgtgcctggaaccacctcgtccacgtccacgtccacctgggggcctcgggaggctaggcccctcctcaaaggcccaccagcccggcgctcatgctgagccccaggcacgcagggccggccacctctctcctgaagccattggccgctcctccacccagtgcttctgcccatgcctgccccagcagcccctctgcacggtcaccatcgcctgggcctgcccacagcactggtgctcacctctacctcctgtcctcaggccgtgcggcacgacatggccagcacgcagaaggagccctcccgggacccaggaccccccgtggtggactccgcggcacatgcttcccaaggtggtcccacggagggtgttactgggcaccagtggactcgccccatggcccgttcctgggagatgagggccgtggcctgcatgaactaccagatgagtaagggaaccccaggcaggcggccctgccacagcccccaaagacactggcctcctgctccagcttccctgtcctggccccacctgtcctgttgctgccagcagggcccttgtttgggattatgaacaaacctcacagactttgaggacctggatggtcctgcattcacggcatcaacactacccgcgctgctgttagacactccgccattcctggttctctccgaaccgttctttgtacagtaaatgtaattcagctgtggtc

SEQ ID NO: 430504 - DNA, 843 bp, Homo sapiens
gtgctgttttataagttggactggcatggccttacttaaattttcaggaaactgttgagtcagtaggtagaatattgaatgttaagtttgtccagaggccagatgccagaacttttggacaagtgagttaatgtccacctccagtccttagcacttgctctaagcgctcacaggcaacagggcaaatgcttgcatggcaggtgcacggcagtgccagccaggtctctcgcagggtggtgtggacacagatgactcgtgtcgagcacacgtgttgtggcctgcacgatgagctaaattgaacagtgtttcaggaaggaagccacatcggggagctgagaggtgggcgggaaggacacaagggagggatctgggtcctcgcaggtacttttgcctcttgttctatttgaagattgcagctgagaaggcgcgaagctgctggtccctgaaaagctgccgcctaccctggtctggagcccctgcgagctggcgtagagcaggaaggggttgcatcacggctgagtcctcccctgcgcagcacatggtacgatgccaccccaccgagggccgttctggggcccaggggccacgtcagccagggtgtcatccgccgggcgtttggagtaagcagggaaaggtgtcggcgtccagcatcctggtgcggagaacgctgccgaaccactgtgagaaggcggggagactgcttgtcaggctgagctgacttcctgggcggtcgggagaaggatgtgcagactgtggaactggcgggtgtcagggaccagaagttacgaaggcggtgggaagaggagcagctgtgggaagaaggactggctgccaagaccatgg

SEQ ID NO: 430505 - DNA, 2609 bp, Homo sapiens
agcggatttctctgggaggcagccgcagggaagggaatgatcttggtgaacttataatcgaaccaatggttccgggaaagcaggaggcggccggcgcggggcgcaggcggcgcggccatgggctcgcagggcagtccggtgaagagctacgactacctgctcaagttcctgctggtgggcgacagcgacgtgggcaagggcgagatcctggagagcctgcaggacggcgcggcagagtccccgtacgcctacagtaacgggatcgactacaagaccaccaccatcctgctggacggccggcgcgtgaagctggagctctgggacacgtcgggccagggccggttctgcaccatcttcaggtcctactccaggggcgctcaggggatcctcttggtgtatgacatcaccaaccgctggtcctttgacggcatcgaccgctggatcaaggagatcgatgagcatgcacccggagtcccccggatcttggttggaaaccggctgcacctggccttcaagcggcaggtcccgacggagcaggcccgcgcgtacgcagagaagaactgcatgaccttctttgaggtcagccccctgtgcaacttcaacgtcatcgagtccttcacggagctatcccgcatcgtgctcatgcggcacggcatggagaagatctggaggcccaaccgagtgttcagcctgcaggacctctgctgccgggccatcgtctcctgcacccccgtgcacctcatcgacaagcttccactgcccgtcaccatcaagagccacctcaagtccttctcgatggccaacggcatgaacgcggtcatgatgcacggccgttcctactccctggccagcggggccgggggcggcggcagcaagggcaacagcctcaagaggtccaagtccatccgtccaccccagagccccccccagaactgctcgcggagtaactgcaagatctcctagcggggacgggcggggccgcctgtgcagatgccaggagggctcgagctggacactcctggctggacgccaggccagtgccgcctacgtggagactgtccacacagctgcctcagaagcgccgggctttcctcacacctgagccgggtgcgaggaggagcatgcacggaccaagcgcggcaggcgggaggagggggcgcggctgggctgctggtgcttccgggaatcttggtcggaaacaagccgggcctccccagctgcctgggcttgaccggcggggagcctggttggcctttcttatttatatagagaacacttcacttttttgtacatttttaaggggccttcagggaagcctgggtgtggcccggtggtggtgcactggtgacttcatggccacgccagctgcggggacgcacttgggactcctcgagaggggactcgcggccgcgatggcaaggcatcctgtgaattcatgcgctgcgagtggcggggctgcccagaggccgggggagcagacagggccggtgctccctctggaagcttgggtgaccggggccctggctcccacgggatggagggtgtggtcctgtggtcagagcccaagcagcactcaggagaggggagaaaggaggtgcacctggcagcccacatttttgttgctccccaaatccctccccacgtggggatgagaaccttcctgctgtgatgtgacaccttcggggacattgaccactcaaaactcagatcatctcgcccaccctggagagtgcagagctatctgtagacttaggaatacttgatgggcagcggtgcagaccccgggcacctgcgtgcagcctcctgttctcggcagcttctgtcgctggccctggggtccccacagctgcagctctcctgtgaggttgcacggcatcagaaccatcctgaccttcttagggacgtgcctggaaccacctcgtccacgtccacgtccacctgggggcctcgggaggctaggcccctcctcaaaggcccaccagcccggcgctcatgctgagccccaggcacgcagggccggccacctctctcctgaagccattggccgctcctccacccagtgcttctgcccatgcctgccccagcagcccctctgcacggtcaccatcgcctgggcctgcccacagcactggtgctcacctctacctcctgtcctcaggccgtgcggcacgacatggccagcacgcagaaggagccctcccgggacccaggaccccccgtggtggactccgcggcacatgcttcccaaggtggtcccacggagggtgttactgggcaccagtggactcgccccatggcccgttcctgggagatgagggccgtggcctgcatgaactaccagatgagtaagggaaccccaggcaggcggccctgccacagcccccaaagacactggcctcctgctccagcttccctgtcctggccccacctgtcctgttgctgccagcagggcccttgtttgggattatgaacaaacctcacagactttgaggacctggatggtcctgcattcacggcatcaacactacccgcgctgctgttagacactccgccattcctggttctctccgaaccgttctttgtacagtaaatgtaattcagctgtggtc

SEQ ID NO: 430506 - DNA, 2582 bp, Homo sapiens
tggggcggcgcggcgcggcctggtggtgcgggaagcggcggggcggcggcgaggctgaggcggccggcgcggggcgcaggcggcgcggccatgggctcgcagggcagtccggtgaagagctacgactacctgctcaagttcctgctggtgggcgacagcgacgtgggcaagggcgagatcctggagagcctgcaggacggcgcggcagagtccccgtacgcctacagtaacgggatcgactacaagaccaccaccatcctgctggacggccggcgcgtgaagctggagctctgggacacgtcgggccagggccggttctgcaccatcttcaggtcctactccaggggcgctcaggggatcctcttggtgtatgacatcaccaaccgctggtcctttgacggcatcgaccgctggatcaaggagatcgatgagcatgcacccggagtcccccggatcttggttggaaaccggctgcacctggccttcaagcggcaggtcccgacggagcaggcccgcgcgtacgcagagaagaactgcatgaccttctttgaggtcagccccctgtgcaacttcaacgtcatcgagtccttcacggagctatcccgcatcgtgctcatgcggcacggcatggagaagatctggaggcccaaccgagtgttcagcctgcaggacctctgctgccgggccatcgtctcctgcacccccgtgcacctcatcgacaagcttccactgcccgtcaccatcaagagccacctcaagtccttctcgatggccaacggcatgaacgcggtcatgatgcacggccgttcctactccctggccagcggggccgggggcggcggcagcaagggcaacagcctcaagaggtccaagtccatccgtccaccccagagccccccccagaactgctcgcggagtaactgcaagatctcctagcggggacgggcggggccgcctgtgcagatgccaggagggctcgagctggacactcctggctggacgccaggccagtgccgcctacgtggagactgtccacacagctgcctcagaagcgccgggctttcctcacacctgagccgggtgcgaggaggagcatgcacggaccaagcgcggcaggcgggaggagggggcgcggctgggctgctggtgcttccgggaatcttggtcggaaacaagccgggcctccccagctgcctgggcttgaccggcggggagcctggttggcctttcttatttatatagagaacacttcacttttttgtacatttttaaggggccttcagggaagcctgggtgtggcccggtggtggtgcactggtgacttcatggccacgccagctgcggggacgcacttgggactcctcgagaggggactcgcggccgcgatggcaaggcatcctgtgaattcatgcgctgcgagtggcggggctgcccagaggccgggggagcagacagggccggtgctccctctggaagcttgggtgaccggggccctggctcccacgggatggagggtgtggtcctgtggtcagagcccaagcagcactcaggagaggggagaaaggaggtgcacctggcagcccacatttttgttgctccccaaatccctccccacgtggggatgagaaccttcctgctgtgatgtgacaccttcggggacattgaccactcaaaactcagatcatctcgcccaccctggagagtgcagagctatctgtagacttaggaatacttgatgggcagcggtgcagaccccgggcacctgcgtgcagcctcctgttctcggcagcttctgtcgctggccctggggtccccacagctgcagctctcctgtgaggttgcacggcatcagaaccatcctgaccttcttagggacgtgcctggaaccacctcgtccacgtccacgtccacctgggggcctcgggaggctaggcccctcctcaaaggcccaccagcccggcgctcatgctgagccccaggcacgcagggccggccacctctctcctgaagccattggccgctcctccacccagtgcttctgcccatgcctgccccagcagcccctctgcacggtcaccatcgcctgggcctgcccacagcactggtgctcacctctacctcctgtcctcaggccgtgcggcacgacatggccagcacgcagaaggagccctcccgggacccaggaccccccgtggtggactccgcggcacatgcttcccaaggtggtcccacggagggtgttactgggcaccagtggactcgccccatggcccgttcctgggagatgagggccgtggcctgcatgaactaccagatgagtaagggaaccccaggcaggcggccctgccacagcccccaaagacactggcctcctgctccagcttccctgtcctggccccacctgtcctgttgctgccagcagggcccttgtttgggattatgaacaaacctcacagactttgaggacctggatggtcctgcattcacggcatcaacactacccgcgctgctgttagacactccgccattcctggttctctccgaaccgttctttgtacagtaaatgtaattcagctgtggtc

SEQ ID NO: 430507 - DNA, 2782 bp, Homo sapiens
cggccgcgtccccgggcggaaggctcacgctcggtgacgccgcgctgtcccagaacctcagcgactttgcagactcactggtgacccaacggtgcgccccgccgccgccgggcggaagtcccgcccctgccccggagaggaagttccgcctcatcgagcgccgattggccgcaccgccttagagaggacgcgcccggggccaccccgccgctccctccgagggttctgcggaagcaggcggcacagcctgcgaggggctttcgtttcccggactcagccgcatcgcctcggctcgggcgcgcctgcatcctgccgcccgtccgcgcgttgaaggggcggatacaaacaacgtggacttccgagcccctgattggcgagcgtgcggccggcgcggggcgcaggcggcgcggccatgggctcgcagggcagtccggtgaagagctacgactacctgctcaagttcctgctggtgggcgacagcgacgtgggcaagggcgagatcctggagagcctgcaggacggcgcggcagagtccccgtacgcctacagtaacggggatcctcttggtgtatgacatcaccaaccgctggtcctttgacggcatcgaccgctggatcaaggagatcgatgagcatgcacccggagtcccccggatcttggttggaaaccggctgcacctggccttcaagcggcaggtcccgacggagcaggcccgcgcgtacgcagagaagaactgcatgaccttctttgaggtcagccccctgtgcaacttcaacgtcatcgagtccttcacggagctatcccgcatcgtgctcatgcggcacggcatggagaagatctggaggcccaaccgagtgttcagcctgcaggacctctgctgccgggccatcgtctcctgcacccccgtgcacctcatcgacaagcttccactgcccgtcaccatcaagagccacctcaagtccttctcgatggccaacggcatgaacgcggtcatgatgcacggccgttcctactccctggccagcggggccgggggcggcggcagcaagggcaacagcctcaagaggtccaagtccatccgtccaccccagagccccccccagaactgctcgcggagtaactgcaagatctcctagcggggacgggcggggccgcctgtgcagatgccaggagggctcgagctggacactcctggctggacgccaggccagtgccgcctacgtggagactgtccacacagctgcctcagaagcgccgggctttcctcacacctgagccgggtgcgaggaggagcatgcacggaccaagcgcggcaggcgggaggagggggcgcggctgggctgctggtgcttccgggaatcttggtcggaaacaagccgggcctccccagctgcctgggcttgaccggcggggagcctggttggcctttcttatttatatagagaacacttcacttttttgtacatttttaaggggccttcagggaagcctgggtgtggcccggtggtggtgcactggtgacttcatggccacgccagctgcggggacgcacttgggactcctcgagaggggactcgcggccgcgatggcaaggcatcctgtgaattcatgcgctgcgagtggcggggctgcccagaggccgggggagcagacagggccggtgctccctctggaagcttgggtgaccggggccctggctcccacgggatggagggtgtggtcctgtggtcagagcccaagcagcactcaggagaggggagaaaggaggtgcacctggcagcccacatttttgttgctccccaaatccctccccacgtggggatgagaaccttcctgctgtgatgtgacaccttcggggacattgaccactcaaaactcagatcatctcgcccaccctggagagtgcagagctatctgtagacttaggaatacttgatgggcagcggtgcagaccccgggcacctgcgtgcagcctcctgttctcggcagcttctgtcgctggccctggggtccccacagctgcagctctcctgtgaggttgcacggcatcagaaccatcctgaccttcttagggacgtgcctggaaccacctcgtccacgtccacgtccacctgggggcctcgggaggctaggcccctcctcaaaggcccaccagcccggcgctcatgctgagccccaggcacgcagggccggccacctctctcctgaagccattggccgctcctccacccagtgcttctgcccatgcctgccccagcagcccctctgcacggtcaccatcgcctgggcctgcccacagcactggtgctcacctctacctcctgtcctcaggccgtgcggcacgacatggccagcacgcagaaggagccctcccgggacccaggaccccccgtggtggactccgcggcacatgcttcccaaggtggtcccacggagggtgttactgggcaccagtggactcgccccatggcccgttcctgggagatgagggccgtggcctgcatgaactaccagatgagtaagggaaccccaggcaggcggccctgccacagcccccaaagacactggcctcctgctccagcttccctgtcctggccccacctgtcctgttgctgccagcagggcccttgtttgggattatgaacaaacctcacagactttgaggacctggatggtcctgcattcacggcatcaacactacccgcgctgctgttagacactccgccattcctggttctctccgaaccgttctttgtacagtaaatgtaattcagctgtggtc

SEQ ID NO: 430508 - DNA, 2244 bp, Homo sapiens
caagtctctgttgcaggggatcctcttggtgtatgacatcaccaaccgctggtcctttgacggcatcgaccgctggatcaaggagatcgatgagcatgcacccggagtcccccggatcttggttggaaaccggctgcacctggccttcaagcggcaggtcccgacggagcaggcccgcgcgtacgcagagaagaactgcatgaccttctttgaggtcagccccctgtgcaacttcaacgtcatcgagtccttcacggagctatcccgcatcgtgctcatgcggcacggcatggagaagatctggaggcccaaccgagtgttcagcctgcaggacctctgctgccgggccatcgtctcctgcacccccgtgcacctcatcgacaagcttccactgcccgtcaccatcaagagccacctcaagtccttctcgatggccaacggcatgaacgcggtcatgatgcacggccgttcctactccctggccagcggggccgggggcggcggcagcaagggcaacagcctcaagaggtccaagtccatccgtccaccccagagccccccccagaactgctcgcggagtaactgcaagatctcctagcggggacgggcggggccgcctgtgcagatgccaggagggctcgagctggacactcctggctggacgccaggccagtgccgcctacgtggagactgtccacacagctgcctcagaagcgccgggctttcctcacacctgagccgggtgcgaggaggagcatgcacggaccaagcgcggcaggcgggaggagggggcgcggctgggctgctggtgcttccgggaatcttggtcggaaacaagccgggcctccccagctgcctgggcttgaccggcggggagcctggttggcctttcttatttatatagagaacacttcacttttttgtacatttttaaggggccttcagggaagcctgggtgtggcccggtggtggtgcactggtgacttcatggccacgccagctgcggggacgcacttgggactcctcgagaggggactcgcggccgcgatggcaaggcatcctgtgaattcatgcgctgcgagtggcggggctgcccagaggccgggggagcagacagggccggtgctccctctggaagcttgggtgaccggggccctggctcccacgggatggagggtgtggtcctgtggtcagagcccaagcagcactcaggagaggggagaaaggaggtgcacctggcagcccacatttttgttgctccccaaatccctccccacgtggggatgagaaccttcctgctgtgatgtgacaccttcggggacattgaccactcaaaactcagatcatctcgcccaccctggagagtgcagagctatctgtagacttaggaatacttgatgggcagcggtgcagaccccgggcacctgcgtgcagcctcctgttctcggcagcttctgtcgctggccctggggtccccacagctgcagctctcctgtgaggttgcacggcatcagaaccatcctgaccttcttagggacgtgcctggaaccacctcgtccacgtccacgtccacctgggggcctcgggaggctaggcccctcctcaaaggcccaccagcccggcgctcatgctgagccccaggcacgcagggccggccacctctctcctgaagccattggccgctcctccacccagtgcttctgcccatgcctgccccagcagcccctctgcacggtcaccatcgcctgggcctgcccacagcactggtgctcacctctacctcctgtcctcaggccgtgcggcacgacatggccagcacgcagaaggagccctcccgggacccaggaccccccgtggtggactccgcggcacatgcttcccaaggtggtcccacggagggtgttactgggcaccagtggactcgccccatggcccgttcctgggagatgagggccgtggcctgcatgaactaccagatgagtaagggaaccccaggcaggcggccctgccacagcccccaaagacactggcctcctgctccagcttccctgtcctggccccacctgtcctgttgctgccagcagggcccttgtttgggattatgaacaaacctcacagactttgaggacctggatggtcctgcattcacggcatcaacactacccgcgctgctgttagacactccgccattcctggttctctccgaaccgttctttgtacagtaaatgtaattcagctgtggtc

SEQ ID NO: 430509 - DNA, 2872 bp, Homo sapiens
tggggcggcgcggcgcggcctggtggtgcgggaagcggcggggcggcggcgaggctgaggtgcgcccgggcgcgggcggggcggggccggcgctgggcttcgggcgcgcccactcggccgccgtggggcggacgcaacgggcgcaggtgcggggcgcgggctctctcacgccgcggcctcacccggcggtgcttcggcaggcggccggcgcggggcgcaggcggcgcggccatgggctcgcagggcagtccggtgaagagctacgactacctgctcaagttcctgctggtgggcgacagcgacgtgggcaagggcgagatcctggagagcctgcaggacggcgcggcagagtccccgtacgcctacagtaacgggatcgactacaagaccaccaccatcctgctggacggccggcgcgtgaagctggagctctgggacacgtcgggccagggccggttctgcaccatcttcaggtcctactccaggggcgctcagctctgtcccaggtactcccggggggattcactgatggactggccgagaggacacttagcttccacagctgcacgtcccccggctgccagaaccccgcatctgcctgcccaggaaacttccacaggctgatggctccaggggagggaggggaagcggcatttctgacaccatggaaggcgcccacccccctgctgcagtcctgccaggggatcctcttggtgtatgacatcaccaaccgctggtcctttgacggcatcgaccgctggatcaaggagatcgatgagcggcaggtcccgacggagcaggcccgcgcgtacgcagagaagaactgcatgaccttctttgaggtcagccccctgtgcaacttcaacgtcatcgagtccttcacggagctatcccgcatcgtgctcatgcggcacggcatggagaagatctggaggcccaaccgagtgttcagcctgcaggacctctgctgccgggccatcgtctcctgcacccccgtgcacctcatcgacaagcttccactgcccgtcaccatcaagagccacctcaagtccttctcgatggccaacggcatgaacgcggtcatgatgcacggccgttcctactccctggccagcggggccgggggcggcggcagcaagggcaacagcctcaagaggtccaagtccatccgtccaccccagagccccccccagaactgctcgcggagtaactgcaagatctcctagcggggacgggcggggccgcctgtgcagatgccaggagggctcgagctggacactcctggctggacgccaggccagtgccgcctacgtggagactgtccacacagctgcctcagaagcgccgggctttcctcacacctgagccgggtgcgaggaggagcatgcacggaccaagcgcggcaggcgggaggagggggcgcggctgggctgctggtgcttccgggaatcttggtcggaaacaagccgggcctccccagctgcctgggcttgaccggcggggagcctggttggcctttcttatttatatagagaacacttcacttttttgtacatttttaaggggccttcagggaagcctgggtgtggcccggtggtggtgcactggtgacttcatggccacgccagctgcggggacgcacttgggactcctcgagaggggactcgcggccgcgatggcaaggcatcctgtgaattcatgcgctgcgagtggcggggctgcccagaggccgggggagcagacagggccggtgctccctctggaagcttgggtgaccggggccctggctcccacgggatggagggtgtggtcctgtggtcagagcccaagcagcactcaggagaggggagaaaggaggtgcacctggcagcccacatttttgttgctccccaaatccctccccacgtggggatgagaaccttcctgctgtgatgtgacaccttcggggacattgaccactcaaaactcagatcatctcgcccaccctggagagtgcagagctatctgtagacttaggaatacttgatgggcagcggtgcagaccccgggcacctgcgtgcagcctcctgttctcggcagcttctgtcgctggccctggggtccccacagctgcagctctcctgtgaggttgcacggcatcagaaccatcctgaccttcttagggacgtgcctggaaccacctcgtccacgtccacgtccacctgggggcctcgggaggctaggcccctcctcaaaggcccaccagcccggcgctcatgctgagccccaggcacgcagggccggccacctctctcctgaagccattggccgctcctccacccagtgcttctgcccatgcctgccccagcagcccctctgcacggtcaccatcgcctgggcctgcccacagcactggtgctcacctctacctcctgtcctcaggccgtgcggcacgacatggccagcacgcagaaggagccctcccgggacccaggaccccccgtggtggactccgcggcacatgcttcccaaggtggtcccacggagggtgttactgggcaccagtggactcgccccatggcccgttcctgggagatgagggccgtggcctgcatgaactaccagatgagtaagggaaccccaggcaggcggccctgccacagcccccaaagacactggcctcctgctccagcttccctgtcctggccccacctgtcctgttgctgccagcagggcccttgtttgggattatgaacaaacctcacagactttgaggacctggatggtcctgcattcacggcatcaacactacccgcgctgctgttagacactccgccattcctggttctctccgaaccgttctttgtacagtaaatgtaattcagctgtggtc

SEQ ID NO: 430510 - DNA, 1461 bp, Homo sapiens
tggggcggcgcggcgcggcctggtggtgcgggaagcggcggggcggcggcgaggctgaggtgcgcccgggcgcgggcggggcggggccggcgctgggcttcgggcgcgcccactcggccgccgtggggcggacgcaacgggcgcaggtgcggggcgcgggctctctcacgccgcggcctcacccggcggtgcttcggcaggcggccggcgcggggcgcaggcggcgcggccatgggctcgcagggcagtccggtgaagagctacgactacctgctcaagttcctgctggtgggcgacagcgacgtgggcaagggcgagatcctggagagcctgcaggacggcgcggcagagtccccgtacgcctacagtaacgggatcgactacaagaccaccaccatcctgctggacggccggcgcgtgaagctggagctctgggacacgtcgggccagggccggttctgcaccatcttcaggtcctactccaggggcgctcaggggatcctcttggtgtatgacatcaccaaccgctggtcctttgacggcatcgaccgctggatcaaggagatcgatgagcatgcacccggagtcccccggatcttggttggaaaccggctgcacctggccttcaagcggcaggtcccgacggagcaggcccgcgcgtacgcagagaagaactgcatgaccttctttgaggtcagccccctgtgcaacttcaacgtcatcgagtccttcacggagctatcccgcatcgtgctcatgcggcacggcatggagaagatctggaggcccaaccgagtgttcagcctgcaggacctctgctgccgggccatcgtctcctgcacccccgtgcacctcatcgacaagcttccactgcccgtcaccatcaagagccacctcaagtccttctcgatggccaacggcatgaacgcggtcatgatgcacggccgttcggtcaccatcgcctgggcctgcccacagcactggtgctcacctctacctcctgtcctcaggccgtgcggcacgacatggccagcacgcagaaggagccctcccgggacccaggaccccccgtggtggactccgcggcacatgcttcccaaggtggtcccacggagggtgttactgggcaccagtggactcgccccatggcccgttcctgggagatgagggccgtggcctgcatgaactaccagatgagtaagggaaccccaggcaggcggccctgccacagcccccaaagacactggcctcctgctccagcttccctgtcctggccccacctgtcctgttgctgccagcagggcccttgtttgggattatgaacaaacctcacagactttgaggacctggatggtcctgcattcacggcatcaacactacccgcgctgctgttagacactccgccattcctggttctctccgaaccgttctttgtacagtaaatgtaattcagctgtggtc

SEQ ID NO: 430511 - DNA, 1180 bp, Homo sapiens
aacaaaaaggccctttcatctagaagttttaaaaccctctaataaacaactctggggtgaaagcagaaatacaaactggaattacagaaaaaaatgatacaaaatgataatcaaaacactacctatcagaatcaatgttatacatttaaagcagcaatcagaggaaaattcatagcactaaacactttttatcagaaaaaacacgccccacctttttaatctatttccaagtctgagtgtttcttaataattactgctgaaatggcttattcccagccacttctattatgcctctcctttccttgttcccaaatatccccaaccaaggatttttgccttaaaaaatcaaatgtcttcaatgaggttgaagaactatgtgacagctagctctatgtttattgacttaaatactggtagaggattcctgggctctttttcatggtgtaaaatcctcacagtgacgctcttggtgttgctctaatccctaaactcagatatgtacatatatatgtccagtggtccgaggtgaattggatggagaataatttcccagcataaaatctttcaaatgtctttatggtggcatgtagaaaaccatttccacaacataatctgaagctgtactatctattgctgtgtaactaattacccaaaatcttagtgacttcaaaccgcaaacattcatacctcacattttctgtgggtcagagatctaaacgcagtttagctgagagcctcaagctcaaggtcactatgagatttgggaggagttggtggccagggtcatagtctcatctgaaggcttgactggtgaggaatccacttacaaactaacttggcaggtctcggtccattgtcaaatggttctcttcacaggggtggccttaggacatggcagatggcttcctcacatggcaaattaaacaggagagagcaagagagatggaagtcacagtctttttataacctactcttgaatggtaccccatcacttctgctatattctattcgttagaagccagtcaataagtctagcctcaggagcaattactcaaaggtgtgaatatcaggctgtggcttacactgggaacatcttagggagcgcaacatagaaaaacagctcagtcacaaactcaacaacctgcagggccaaacagaaataaaatgagtgagtgggcct

SEQ ID NO: 430512 - DNA, 701 bp, Homo sapiens
aacaaaaaggccctttcatctagaagttttaaaaccctctaataaacaactctggggtgaaagcagaaatacaaactggaattacagaaaaaaatgatacaaaatgataatcaaaacactacctatcagaatcaatgttatacatttaaagcagcaatcagaggaaaattcatagcactaaacactttttatcagaaaaaacacgccccacctttttaatctatttccaagtctgagtgtttcttaataattactgctgaaatggcttattcccagccacttctattatgcctctcctttccttgttcccaaatatccccaaccaaggatttttgccttaaaaaatcaaatgtcttcaatgaggttgaagaactatgtgacagctagctctatgtttattgacttaaatactggtagaggattcctgggctctttttcatggtgtaaaatcctcacagtgacgctcttggtgttgctctaatccctaaactcagatatgtacatatatatgtccagtggtccgaggtgaattggatggagaataatttcccagcctgttggctatttttggatgcacacacatgcctctcaccatttgttcctaacatttccaggagctcaagtcagcgcccccaaggcatgactttctaggcacctcatgagcctctagttacagatagttccttttcatattttctttt

SEQ ID NO: 430513 - DNA, 944 bp, Homo sapiens
agaagaggaagaatgaaggaagcagaataaacattgaaaaagaaaaggcccaattcttcctaaattccaaagcctctgtcgtaatactacaaaatgtttctgagagaaattaaggaagacttaaataaagtatatactatgtttatggattggaagatgttatcgttaagatggcagttctccccaaattacactgtagactcaatgcagtgtctaccatgatcccagcagacatttttaaaaaaattgacaagacggttgtaaagtttacatggagatgcagaggaccttggaatggcttaatcagtcttgtagaagaacaaagctagatttacattacgtgatttcaagagtttctatgaaatgtatcaagacacagaagtgttagtgtaaagatagacaaatagatggatggaatagagtagttattccaaaatagactcacccttatttggtcaattggtttctgacagagatccaagcaatccaatggtaaggtttttgtttggtttgtttgttttctaagagtcagggtctcactctgtcgcccaggttggagtgcagtggcacgatcataacttattgcagcctcaaactcctggactccagcaatcctccttcctcagcctccttagtagctgggacgacaggcatgagccaccatgccctgctcgaaaaagaggcgttttgagaaattgttctggaacatgtggatattcctatgggaaaaaagtgaaccctgctacttcataccacgcacataaattaacttgagatgaaatcagagacctaaacagagtggctaaaactatgaagttccgataagaaaatatattgtgattgaaagacagcaaagatttcttagacaaggcacaaggatttcttaggacacaggacagagccaggatgcgactaaggaaaggtgataaattaggctttattaa

SEQ ID NO: 430514 - DNA, 4802 bp, Homo sapiens
tcagaatggaacaaaagtgggacttttaaaatgttgccctgtaagaagagaagaactacagtgacagagtccctacagcataaaggcaatcaagaggaaaacaacgtagacctagaatcagccgttaaaccagaatctgaccaggttaaggacttgagttcggtgtcactatcctgggatccaagtcatggcagagtagctggcttcgaagtacagtctttgcaggatgcaggaaatcagcttggtatggaggatacatctctgagctctggaatgctcacccagaacacaaatgtaccaattctagaaggtgttgatgtggccatctctcagggaatcaccctaccttccttggagtcttttcacccccttaatatacacattggtaaaggaaaactccacgctactggctcaaagagagggaaaaaaatgacactcaggcctgggccagttacccaagaagacagatgtgatcatcttaccctaaaggagcctttttcaggagagcctagtgaagaagtcaaggaagaaggaggtgaggtctcataattcactgcaacctacaattcctggccttaaatgatcctgctgcttcagccttctaaagtgctgggcttacagggaaacctcaaatgaattctgaaggggagataccttccctgccatcaggcagccaatctgcaaaaccagtaagccagcccaggaaatcaacccagccagatgtttgtgcctctcctcaagaaaagccactcaggactctgtttcaccaacctgaggaagagatagaagatggtggactcttcattccaatggaagaacaagacaatgaagaaagtgagaaaaggagaaaaaagaaaaagggtaccaagaggaaacgagatggaaggggtcaagaagggaccttggcatatgacctgaaactggatgacatgcttgaccgtaccttggaggatggtgccaagcagcacaatctaacagcagtcaatgtccgaaacatccttcatgaagtaatcacaaatgaacacgtggtagctatgatgaaagcagccatcagtgagacggaagatatgccaatgtttgagcctaaaatgacacgctctaaactgaaggaagtagtggaaaaaggagtggtaattccaacatggaatatttcaccaattaagaaggccaatgaaattaagcctcctcagtttgtggatatccaccttgaagaagatgattcctcagatgaagaataccagccggatgatgaagaagaagatgatactgctgaagagagcttattggaaagtgatgttgaaagcactgcttcatctccacgtggggcaaagaaatccagattgaggcagtcttctgagatgactgaaacagatgaggagagtggcatattatcagaggctgagaaagtcaccacaccagccatcaggcacatcagtgctgaggtagtgcccatggggcccccgccccctccaaagccgaaacagaccagagatagtactttcatggagaagttacatgcggtagatgaggagctggcttccagtccagtctgcatggattctttccagcccatggatgacagtctcattgcatttcgaacgcgttctaagatgcccctgaaagatgttcccctgggccaattagaggcagagctccaagctccagacatcactccagatatgtatgaccccaatacggcagatgatgaggactggaagatgtggctggggggacttatgaatgatgatgtggggaatgaagatgaagcagatgatgatgatgatccagaatataatttcctggaagacctcgatgaaccagacacagaggatttccggactgaccgggcagtgagaatcaccaaaaaggaagtaaatgagctgatggaagagctgtttgaaactttccaagatgagatgggattctccaacatggaagatgatggcccagaagaggaggagtgtgtagctgagcctcgtcctaactttaacacccctcaagctctacggtttgaggaaccactggccaacctgttaaatgaacaacatcggacagtgaaggagctatttgaacagctgaagatgaagaaatcttcagccaaacagctgcaggaagtagagaaggttaaaccccagagtgagaaagttcatcagactctgattctggacccagcacagaggaagagactccagcagcagatgcagcagcacgttcagctcttgacccaaatccaccttcttgccacctgcaaccccaacctcaatccggaggccactaccaccaggatatttcttaaagagctgggaacctttgctcaaagctccatcgcccttcaccatcagtacaaccccaagtttcagaccctgttccaaccctgtaacttgatgggagctatgcagctgattgaagacttcagcacacatgtcagcattgactgcagccctcataaaactgtcaagaagactgcgaatgaatttccctgtttgccaaagcaagtggcttggattctggccacaagcaaggttttcatgtatccagagttacttccagtgtgttccctgaaggcaaagaatccccaggataagatcgtcttcaccaaggctgaggacaatttgttagctttaggactgaagcattttgaaggaactgagtttcctaatcctctaatcagcaagtaccttctaacctgcaaaactgcccaccaactgacagtgagaatcaagaacctcaacatgaacagagctcctgacaacatcattaaattttataagaagaccaaacagctgccagtcctaggaaaatgctgtgaagagatccagccacatcagtggaagccacctatagagagagaagaacaccggctcccattctggttaaaggccagtctgccatccatccaggaagaactgcggcacatggctgatggtgctagagaggtaggaaatatgactggaaccactgagatcaactcagatcgaagcctagaaaaagacaatttggagttggggagtgaatctcggtacccactgctattgcctaagggtgtagtcctgaaactgaagccagttgccacccgtttccccaggaaggcttggagacagaagcgttcatcagtcctgaagcccctccttatccaacccagcccctctctccagcccagcttcaaccctgggaaaacaccagcccgatcaactcattcagaagcccctccgagcaaaatggtgctccggattcctcacccaatacagccagccactgttttacagacagttccaggtgtccctccactgggggtcagtggaggtgagagttttgagtctcctgcagcactgcctgctgtgccccctgaggccaggacaagcttccctctgtctgagtcccagactttgctctcttctgcccctgtgcccaaggtaatgctgccctcccttgccccttctaagtttcgaaagccatatgtgagacggagaccctcaaagagaagaggagtcaaggcctctccctgtatgaaacctgcccctgttatccaccaccctgcatctgttatcttcactgttcctgctaccactgtgaagattgtgagccttggcggtggctgtaacatgatccagcctgtcaatgcggctgtggcccagagtccccagactattcccatcactaccctcttggttaaccctacttccttcccctgtccattgaaccagtcccttgtggcctcctctgtctcacccttaattgtttctggcaattctgtgaatcttcctataccatccacccctgaagataaggcccacgtgaatgtggacattgcttgtgctgtggctgatggggaaaatgcctttcagggcctagaacccaaattagagccccaggaactatctcctctctctgctactgttttcccgaaagtggaacatagcccagggcctccactagcagatgcagagtgccaagaaggattgtcagagaatagtgcctgtcgctggaccgttgtgaaaacagaggaggggaggcaagctctggagccgctccctcagggcatccaggagtctctaaacaaccctacccctggggatttagaggaaattgtcaagatggaacctgaagaagctagagaggaaatcagtggatcccctgagcgtgatatttgtgatgacatcaaagtggaacatgctgtggaattggacactggtgccccaagcgaggagttgagcagtgctggagaagtaacgaaacagacagtcttacagaaggaagaggagaggagtcagccaactaaaaccccttcatcttctcaagagccccctgatgaaggaacctcagggacagatgtgaacaaaggatcatcaaagaatgctttgtcctcaatggatcctgaagtgaggcttagtagccccccagggaagccagaagattcatccagtgttgatggtcagtcagtggggactccagttgggccagaaactggaggagagaagaatgggccagaagaagaggaagaagaggactttgatgacctcacccaagatgaggaagatgaaatgtcatcagcttctgaggaatctgtgctttctgtcccagaactccaggtgagagctggagaatattctcaagtatttcgtggactcagtaatatgtatcacttattgatatgccacctgcttgcttgctgcactatggatagtcctaaaatcatttgtatttgatttgtgaatgcattatgggacatgattgtggagttgaggtgaaatgagatggaaaggatgaaattttacttattatattaaactcgtttacacatt

SEQ ID NO: 430515 - DNA, 3256 bp, Homo sapiens
cccaagtgtatcccccccctggcgctctttagggggcccccccatagcctttccccccaaaaaaaaaaaaaaaaaaaaaaaaaaaaaaaggagagagagattgataattttgagttatccacgctctgtccttactgttacaagttgactggttgaatgacttctttcttggcataatagccatcccaagtgtgggtttgtgggaatcctgaagtgagaaagttctgacattggctctttctgggtgccagcattattatagtcttgtaatctatagttttcactcttccttcccaatactggagcaacattcagaggcccattccccaggaaaaccctccctttcctttgcccacagttccaagatgagatgggattctccaacatggaagatgatggcccagaagaggaggagtgtgtagctgagcctcgtcctaactttaacacccctcaagctctacggtttgaggaaccactggccaacctgttaaatgaacaacatcggacagtgaaggagctatttgaacagctgaagatgaagaaatcttcagccaaacagctgcaggaagtagagaaggttaaaccccagagtgagaaagttcatcagactctgattctggacccagcacagaggaagagactccagcagcagatgcagcagcacgttcagctcttgacccaaatccaccttcttgccacctgcaaccccaacctcaatccggaggccactaccaccaggatatttcttaaagagctgggaacctttgctcaaagctccatcgcccttcaccatcagtacaaccccaagtttcagaccctgttccaaccctgtaacttgatgggagctatgcagctgattgaagacttcagcacacatgtcagcattgactgcagccctcataaaactgtcaagaagactgcgaatgaatttccctgtttgccaaagcaagtggcttggattctggccacaagcaaggttttcatgtatccagagttacttccagtgtgttccctgaaggcaaagaatccccaggataagatcgtcttcaccaaggctgaggacaatttgttagctttaggactgaagcattttgaaggaactgagtttcctaatcctctaatcagcaagtaccttctaacctgcaaaactgcccaccaactgacagtgagaatcaagaacctcaacatgaacagagctcctgacaacatcattaaattttataagaagaccaaacagctgccagtcctaggaaaatgctgtgaagagatccagccacatcagtggaagccacctatagagagagaagaacaccggctcccattctggttaaaggccagtctgccatccatccaggaagaactgcggcacatggctgatggtgctagagaggtaggaaatatgactggaaccactgagatcaactcagatcgaagcctagaaaaagacaatttggagttggggagtgaatctcggtacccactgctattgcctaagggtgtagtcctgaaactgaagccagttgccacccgtttccccaggaaggcttggagacagaagcgttcatcagtcctgaagcccctccttatccaacccagcccctctctccagcccagcttcaaccctgggaaaacaccagcccgatcaactcattcagaagcccctccgagcaaaatggtgctccggattcctcacccaatacagccagccactgttttacagacagttccaggtgtccctccactgggggtcagtggaggtgagagttttgagtctcctgcagcactgcctgctgtgccccctgaggccaggacaagcttccctctgtctgagtcccagactttgctctcttctgcccctgtgcccaaggtaatgctgccctcccttgccccttctaagtttcgaaagccatatgtgagacggagaccctcaaagagaagaggagtcaaggcctctccctgtatgaaacctgcccctgttatccaccaccctgcatctgttatcttcactgttcctgctaccactgtgaagattgtgagccttggcggtggctgtaacatgatccagcctgtcaatgcggctgtggcccagagtccccagactattcccatcactaccctcttggttaaccctacttccttcccctgtccattgaaccagtcccttgtggcctcctctgtctcacccttaattgtttctggcaattctgtgaatcttcctataccatccacccctgaagataaggcccacgtgaatgtggacattgcttgtgctgtggctgatggggaaaatgcctttcagggcctagaacccaaattagagccccaggaactatctcctctctctgctactgttttcccgaaagtggaacatagcccagggcctccactagcagatgcagagtgccaagaaggattgtcagagaatagtgcctgtcgctggaccgttgtgaaaacagaggaggggaggcaagctctggagccgctccctcagggcatccaggagtctctaaacaaccctacccctggggatttagaggaaattgtcaagatggaacctgaagaagctagagaggaaatcagtggatcccctgagcgtgatatttgtgatgacatcaaagtggaacatgctgtggaattggacactggtgccccaagcgaggagttgagcagtgctggagaagtaacgaaacagacagtcttacagaaggaagaggagaggagtcagccaactaaaaccccttcatcttctcaagagccccctgatgaaggaacctcagggacagatgtgaacaaaggatcatcaaagaatgctttgtcctcaatggatcctgaagtgaggcttagtagccccccagggaagccagaagattcatccagtgttgatggtcagtcagtggggactccagttgggccagaaactggaggagagaagaatgggccagaagaagaggaagaagaggactttgatgacctcacccaagatgaggaagatgaaatgtcatcagcttctgaggaatctgtgctttctgtcccagaactccaggtgagagctggagaatattctcaagtatttcgtggactcagtaatatgtatcacttattgatatgccacctgcttgcttgctgcactatggatagtcctaaaatcatttgtatttgatttgtgaatgcattatgggacatgattgtggagttgaggtgaaatgagatggaaaggatgaaattttacttattatattaaactcgtttacacatt

SEQ ID NO: 430516 - DNA, 2756 bp, Homo sapiens
tcagaatggaacaaaagtgggacttttaaaatgttgccctgtaagaagagaagaactacagtgacagagtccctacagcataaaggcaatcaagaggaaaacaacgtagacctagaatcagccgttaaaccagaatctgaccaggttaaggacttgagttcggtgtcactatcctgggatccaagtcatggcagagtagctggcttcgaagtacagtctttgcaggatgcaggaaatcagcttggtatggaggatacatctctgagctctggaatgctcacccagaacacaaatgtaccaattctagaaggtgttgatgtggccatctctcagggaatcaccctaccttccttggagtcttttcacccccttaatatacacattggtaaaggaaaactccacgctactggctcaaagagagggaaaaaaatgacactcaggcctgggccagttacccaagaagacagatgtgatcatcttaccctaaaggagcctttttcaggagagcctagtgaagaagtcaaggaagaaggagggaaacctcaaatgaattctgaaggggagataccttccctgccatcaggcagccaatctgcaaaaccagtaagccagcccaggaaatcaacccagccagatgtttgtgcctctcctcaagaaaagccactcaggactctgtttcaccaacctgaggaagagatagaagatggtggactcttcattccaatggaagaacaagacaatgaagaaagtgagaaaaggagaaaaaagaaaaagggtaccaagaggaaacgagatggaaggggtcaagaagggaccttggcatatgacctgaaactggatgacatgcttgaccgtaccttggaggatggtgccaagcagcacaatctaacagcagtcaatgtccgaaacatccttcatgaagtaatcacaaatgaacacgtggtagctatgatgaaagcagccatcagtgagacggaagatatgccaatgtttgagcctaaaatgacacgctctaaactgaaggaagtagtggaaaaaggagtggtaattccaacatggaatatttcaccaattaagaaggccaatgaaattaagcctcctcagtttgtggatatccaccttgaagaagatgattcctcagatgaagaataccagccggatgatgaagaagaagatgatactgctgaagagagcttattggaaagtgatgttgaaagcactgcttcatctccacgtggggcaaagaaatccagattgaggcagtcttctgagatgactgaaacagatgaggagagtggcatattatcagaggctgagaaagtcaccacaccagccatcaggcacatcagtgctgaggtagtgcccatggggcccccgccccctccaaagccgaaacagaccagagatagtactttcatggagaagttacatgcggtagatgaggagctggcttccagtccagtctgcatggattctttccagcccatggatgacagtctcattgcatttcgaacgcgttctaagatgcccctgaaagatgttcccctgggccaattagaggcagagctccaagctccagacatcactccagatatgtatgaccccaatacggcagatgatgaggactggaagatgtggctggggggacttatgaatgatgatgtggggaatgaagatgaagcagatgatgatgatgatccagaatataatttcctggaagacctcgatgaaccagacacagaggatttccggactgaccgggcagtgagaatcaccaaaaaggaagtaaatgagctgatggaagagctgtttgaaactgtgagtaatgatcctcgagtgagaacatgggattttaagtcagttctccagcaagatgtgtcatttggtctctgtgatgctccctctaggagagggggtctgactgaaccaattctccttttagtctacctgggaaagaatataatgacaagggaattttgctaactactagactcttgattatatacatgtatgttgttcttattaacattttccttgaaacttctttttgtttgagggggttcttgctccatcacccaagccagagtgcagtggtgaaattacagctcacagcagccttgaccttctaggctcaagcagtccttcgtctaagcctcctgagtagctgggacataccaacacacccagctaattattttatttgtagagacagggtcttaccacattgctcaggttgttctggaacttctgggctcaagcaattttcctgccttgggcctcccagtgctggaattataggtgtgagccagcatgcctggcccctggaaaacttttgatgacttcccctactgtcatttggtgtgtccttaaagattgtcaactagttttaaactactttgtgtacaaataattacctttttcataaatttgtttcaaaagatttttcattttaagagattgatcattttgaggctgggtgcagtggctcacgcttataatcccagcactttgggaggccacggcaggtggatcatctgaggtcaggagtttgagaccagcctggccaacatgatgaaaccctgtctctattaaaaatacaaaaattaggcatggtggcgggcacctgtagtcacggttactgcagaggctgaggcaggaaaattgcttgaacctgggaggcggaggttgcagtaagcccagattgtgccactgcactccagcctgggcaatagagcaagactgcaagactctgtctc

SEQ ID NO: 430517 - DNA, 2671 bp, Homo sapiens
  misc_feature (65)..(65): n is a, c, g, or t
ccggacttggatccgcctgcttggcctccccaaatgctgggattactggcatgagccaccgcacncggcctattattattttttgagagacagtttcaccctgttgcccaggctggagtacagtggcacaatctcagctcagtgcaacctccgcctccaggttcaagtgattctcctgcctccgcctcctgagtagctgggattacaggcacatgccaccacacccaactaatttttgtatttttagtagagacggggtttcaccgtgttggtcaggctcatcctgaactcctgacctcaagtgatctgcccacttcagcctcccaaagtgctgggattacaggcgtgagccactgtgccaagcctctttttcccaaattctgacatatgctggatcagagtgttcttgtttccaataggccagtctgccatccatccaggaagaactgcggcacatggctgatggtgctagagaggtaggaaatatgactggaaccactgagatcaactcagatcgaagcctagaaaaagacaatttggagttggggagtgaatctcggtacccactgctattgcctaagggtgtagtcctgaaactgaagccagttgccacccgtttccccaggaaggcttggagacagaagcgttcatcagtcctgaagcccctccttatccaacccagcccctctctccagcccagcttcaaccctgggaaaacaccagcccgatcaactcattcagaagcccctccgagcaaaatggtgctccggattcctcacccaatacagccagccactgttttacagacagttccaggtgtccctccactgggggtcagtggaggtgagagttttgagtctcctgcagcactgcctgctgtgccccctgaggccaggacaagcttccctctgtctgagtcccagactttgctctcttctgcccctgtgcccaaggtaatgctgccctcccttgccccttctaagtttcgaaagccatatgtgagacggagaccctcaaagagaagaggagtcaaggcctctccctgtatgaaacctgcccctgttatccaccaccctgcatctgttatcttcactgttcctgctaccactgtgaagattgtgagccttggcggtggctgtaacatgatccagcctgtcaatgcggctgtggcccagagtccccagactattcccatcactaccctcttggttaaccctacttccttcccctgtccattgaaccagtcccttgtggcctcctctgtctcacccttaattgtttctggcaattctgtgaatcttcctataccatccacccctgaagataaggcccacgtgaatgtggacattgcttgtgctgtggctgatggggaaaatgcctttcagggcctagaacccaaattagagccccaggaactatctcctctctctgctactgttttcccgaaagtggaacatagcccagggcctccactagcagatgcagagtgccaagaaggattgtcagagaatagtgcctgtcgctggaccgttgtgaaaacagaggaggggaggcaagctctggagccgctccctcagggcatccaggagtctctaaacaaccctacccctggggatttagaggaaattgtcaagatggaacctgaagaagctagagaggaaatcagtggatcccctgagcgtgatatttgtgatgacatcaaagtggaacatgctgtggaattggacactggtgccccaagcgaggagttgagcagtgctggagaagtaacgaaacagacagtcttacagaaggaagaggagaggagtcagccaactaaaaccccttcatcttctcaagagccccctgatgaaggaacctcagggacagatgtgaacaaaggatcatcaaagaatgctttgtcctcaatggatcctgaagtgaggcttagtagccccccagggaagccagaagattcatccagtgttgatggtcagtcagtggggactccagttgggccagaaactggaggagagaagaatgggccagaagaagaggaagaagaggactttgatgacctcacccaagatgaggaagatgaaatgtcatcagcttctgaggaatctgtgctttctgtcccagaactccaggtgagagctggagaatattctcaagtatttcgtggactcagtaatatgtatcacttattgatatgccacctgcttgcttgctgcactatggatagtcctaaaatcatttgtatttgatttgtgaatgcattatgggacatgattgtggagttgaggtgaaatgagatggaaaggatgaaattttacttattatattaaactcgtttacacattaaattgaatcacctgaccatactttaaatgccttaaaaaatagtaataggctgggcttggtggctcactcctgtagtcccagcactttgggaggctgaggtgggtggatcacaaggccaggagtttcagactggcctggccgacgtggtaaaaccccatctatattaaaaataacaaaaattagccaggcatggtggcggacacctgtaatccctgctgcttgggaggcagaggcaggagaattgcttgagcccgagagacagaggttgcagtgagccgagatcacgtcattgctctccagcctgggcaacagagcaaggctctgtctc

SEQ ID NO: 430518 - DNA, 2533 bp, Homo sapiens
tcagaatggaacaaaagtgggacttttaaaatgttgccctgtaagaagagaagaactacagtgacagagtccctacagcataaaggcaatcaagaggaaaacaacgtagacctagaatcagccgttaaaccagaatctgaccaggttaaggacttgagttcggtgtcactatcctgggatccaagtcatggcagagtagctggcttcgaagtacagtctttgcaggatgcaggaaatcagcttggtatggaggatacatctctgagctctggaatgctcacccagaacacaaatgtaccaattctagaaggtgttgatgtggccatctctcagggaatcaccctaccttccttggagtcttttcacccccttaatatacacattggtaaaggaaaactccacgctactggctcaaagagagggaaaaaaatgacactcaggcctgggccagttacccaagaagacagatgtgatcatcttaccctaaaggagcctttttcaggagagcctagtgaagaagtcaaggaagaaggagggaaacctcaaatgaattctgaaggggagataccttccctgccatcaggcagccaatctgcaaaaccagtaagccagcccaggaaatcaacccagccagatgtttgtgcctctcctcaagaaaagccactcaggactctgtttcaccaacctgaggaagagatagaagatggtggactcttcattccaatggaagaacaagacaatgaagaaagtgagaaaaggagaaaaaagaaaaagggtaccaagaggaaacgagatggaaggggtcaagaagggaccttggcatatgacctgaaactggatgacatgcttgaccgtaccttggaggatggtgccaagcagcacaatctaacagcagtcaatgtccgaaacatccttcatgaagtaatcacaaatgaacacgtggtagctatgatgaaagcagccatcagtgagacggaagatatgccaatgtttgagcctaaaatgacacgctctaaactgaaggaagtagtggaaaaaggagtggtaattccaacatggaatatttcaccaattaagaaggccaatgaaattaagcctcctcagtttgtggatatccaccttgaagaagatgattcctcagatgaagaataccagccggatgatgaagaagaagatgatactgctgaagagagcttattggaaagtgatgttgaaagcactgcttcatctccacgtggggcaaagaaatccagattgaggcagtcttctgagatgactgaaacagatgaggagagtggcatattatcagaggctgagaaagtcaccacaccagccatcaggcacatcagtgctgaggtagtgcccatggggcccccgccccctccaaagccgaaacagaccagagatagtactttcatggagaagttacatgcggtagatgaggagctggcttccagtccagtctgcatggattctttccagcccatggatgacagtctcattgcatttcgaacgcgttctaagatgcccctgaaagatgttcccctgggccaattagaggcagagctccaagctccagacatcactccagatatgtatgaccccaatacggcagatgatgaggactggaagatgtggctggggggacttatgaatgatgatgtggggaatgaagatgaagcagatgatgatgatgatccagaatataatttcctggaagacctcgatgaaccagacacagaggatttccggactgaccgggcagtgagaatcaccaaaaaggaagtaaatgagctgatggaagagctgtttgaaactttccaagatgagatgggattctccaacatggaagatgatggcccagaagaggaggagtgtgtagctgagcctcgtcctaactttaacacccctcaagctctacggtttgaggaaccactggccaacctgttaaatgaacaacatcggacagtgaaggagctatttgaacagctgaagatgaagaaatcttcagccaaacagctgcaggaagtagagaaggttaaaccccagagtgagaaagttcatcagactctgattctggacccagcacagaggaagagactccagcagcagatgcagcagaaagagctgggaacctttgctcaaagctccatcgcccttcaccatcagtacaaccccaagtttcagaccctgttccaaccctgtaacttgatgggagctatgcagctgattgaagacttcagcacacatgtcagcattgactgcagccctcataaaactgtcaagaagactggtaggagacagatgtgtcagctttaagtttttacttgcggtgagaggtggtgggaatcttatcccatagataactaaggatacttgcctaggaatggaggacacaggacatttgtaatttcttccttctctcttttatcctccctttgtactcattatccaagttctagaattacatgataatctctgggcctgggtaaagtgtggaggcagtggacagtataggaatatgggaggtaga

SEQ ID NO: 430519 - DNA, 4716 bp, Homo sapiens
tcagaatggaacaaaagtgggacttttaaaatgttgccctgtaagaagagaagaactacagtgacagagtccctacagcataaaggcaatcaagaggaaaacaacgtagacctagaatcagccgttaaaccagaatctgaccaggttaaggacttgagttcggtgtcactatcctgggatccaagtcatggcagagtagctggcttcgaagtacagtctttgcaggatgcaggaaatcagcttggtatggaggatacatctctgagctctggaatgctcacccagaacacaaatgtaccaattctagaaggtgttgatgtggccatctctcagggaatcaccctaccttccttggagtcttttcacccccttaatatacacattggtaaaggaaaactccacgctactggctcaaagagagggaaaaaaatgacactcaggcctgggccagttacccaagaagacagatgtgatcatcttaccctaaaggagcctttttcaggagagcctagtgaagaagtcaaggaagaaggagggaaacctcaaatgaattctgaaggggagataccttccctgccatcaggcagccaatctgcaaaaccagtaagccagcccaggaaatcaacccagccagatgtttgtgcctctcctcaagaaaagccactcaggactctgtttcaccaacctgaggaagagatagaagatggtggactcttcattccaatggaagaacaagacaatgaagaaagtgagaaaaggagaaaaaagaaaaagggtaccaagaggaaacgagatggaaggggtcaagaagggaccttggcatatgacctgaaactggatgacatgcttgaccgtaccttggaggatggtgccaagcagcacaatctaacagcagtcaatgtccgaaacatccttcatgaagtaatcacaaatgaacacgtggtagctatgatgaaagcagccatcagtgagacggaagatatgccaatgtttgagcctaaaatgacacgctctaaactgaaggaagtagtggaaaaaggagtggtaattccaacatggaatatttcaccaattaagaaggccaatgaaattaagcctcctcagtttgtggatatccaccttgaagaagatgattcctcagatgaagaataccagccggatgatgaagaagaagatgatactgctgaagagagcttattggaaagtgatgttgaaagcactgcttcatctccacgtggggcaaagaaatccagattgaggcagtcttctgagatgactgaaacagatgaggagagtggcatattatcagaggctgagaaagtcaccacaccagccatcaggcacatcagtgctgaggtagtgcccatggggcccccgccccctccaaagccgaaacagaccagagatagtactttcatggagaagttacatgcggtagatgaggagctggcttccagtccagtctgcatggattctttccagcccatggatgacagtctcattgcatttcgaacgcgttctaagatgcccctgaaagatgttcccctgggccaattagaggcagagctccaagctccagacatcactccagatatgtatgaccccaatacggcagatgatgaggactggaagatgtggctggggggacttatgaatgatgatgtggggaatgaagatgaagcagatgatgatgatgatccagaatataatttcctggaagacctcgatgaaccagacacagaggatttccggactgaccgggcagtgagaatcaccaaaaaggaagtaaatgagctgatggaagagctgtttgaaactttccaagatgagatgggattctccaacatggaagatgatggcccagaagaggaggagtgtgtagctgagcctcgtcctaactttaacacccctcaagctctacggtttgaggaaccactggccaacctgttaaatgaacaacatcggacagtgaaggagctatttgaacagctgaagatgaagaaatcttcagccaaacagctgcaggaagtagagaaggttaaaccccagagtgagaaagttcatcagactctgattctggacccagcacagaggaagagactccagcagcagatgcagcagcacgttcagctcttgacccaaatccaccttcttgccacctgcaaccccaacctcaatccggaggccactaccaccaggatatttcttaaagagctgggaacctttgctcaaagctccatcgcccttcaccatcagtacaaccccaagtttcagaccctgttccaaccctgtaacttgatgggagctatgcagctgattgaagacttcagcacacatgtcagcattgactgcagccctcataaaactgtcaagaagactgcgaatgaatttccctgtttgccaaagcaagtggcttggattctggccacaagcaaggttttcatgtatccagagttacttccagtgtgttccctgaaggcaaagaatccccaggataagatcgtcttcaccaaggctgaggacaatttgttagctttaggactgaagcattttgaaggaactgagtttcctaatcctctaatcagcaagtaccttctaacctgcaaaactgcccaccaactgacagtgagaatcaagaacctcaacatgaacagagctcctgacaacatcattaaattttataagaagaccaaacagctgccagtcctaggaaaatgctgtgaagagatccagccacatcagtggaagccacctatagagagagaagaacaccggctcccattctggttaaaggccagtctgccatccatccaggaagaactgcggcacatggctgatggtgctagagaggtaggaaatatgactggaaccactgagatcaactcagatcgaagcctagaaaaagacaatttggagttggggagtgaatctcggtacccactgctattgcctaagggtgtagtcctgaaactgaagccagttgccacccgtttccccaggaaggcttggagacagaagcgttcatcagtcctgaagcccctccttatccaacccagcccctctctccagcccagcttcaaccctgggaaaacaccagcccgatcaactcattcagaagcccctccgagcaaaatggtgctccggattcctcacccaatacagccagccactgttttacagacagttccaggtgtccctccactgggggtcagtggaggtgagagttttgagtctcctgcagcactgcctgctgtgccccctgaggccaggacaagcttccctctgtctgagtcccagactttgctctcttctgcccctgtgcccaaggtaatgctgccctcccttgccccttctaagtttcgaaagccatatgtgagacggagaccctcaaagagaagaggagtcaaggcctctccctgtatgaaacctgcccctgttatccaccaccctgcatctgttatcttcactgttcctgctaccactgtgaagattgtgagccttggcggtggctgtaacatgatccagcctgtcaatgcggctgtggcccagagtccccagactattcccatcactaccctcttggttaaccctacttccttcccctgtccattgaaccagtcccttgtggcctcctctgtctcacccttaattgtttctggcaattctgtgaatcttcctataccatccacccctgaagataaggcccacgtgaatgtggacattgcttgtgctgtggctgatggggaaaatgcctttcagggcctagaacccaaattagagccccaggaactatctcctctctctgctactgttttcccgaaagtggaacatagcccagggcctccactagcagatgcagagtgccaagaaggattgtcagagaatagtgcctgtcgctggaccgttgtgaaaacagaggaggggaggcaagctctggagccgctccctcagggcatccaggagtctctaaacaaccctacccctggggatttagaggaaattgtcaagatggaacctgaagaagctagagaggaaatcagtggatcccctgagcgtgatatttgtgatgacatcaaagtggaacatgctgtggaattggacactggtgccccaagcgaggagttgagcagtgctggagaagtaacgaaacagacagtcttacagaaggaagaggagaggagtcagccaactaaaaccccttcatcttctcaagagccccctgatgaaggaacctcagggacagatgtgaacaaaggatcatcaaagaatgctttgtcctcaatggatcctgaagtgaggcttagtagccccccagggaagccagaagattcatccagtgttgatggtcagtcagtggggactccagttgggccagaaactggaggagagaagaatgggccagaagaagaggaagaagaggactttgatgacctcacccaagatgaggaagatgaaatgtcatcagcttctgaggaatctgtgctttctgtcccagaactccaggtgagagctggagaatattctcaagtatttcgtggactcagtaatatgtatcacttattgatatgccacctgcttgcttgctgcactatggatagtcctaaaatcatttgtatttgatttgtgaatgcattatgggacatgattgtggagttgaggtgaaatgagatggaaaggatgaaattttacttattatattaaactcgtttacacatt

SEQ ID NO: 430520 - DNA, 5045 bp, Homo sapiens
tcagaatggaacaaaagtgggacttttaaaatgttgccctgtaagaagagaagaactacagtgacagagtccctacagcataaaggcaatcaagaggaaaacaacgtagacctagaatcagccgttaaaccagaatctgaccaggttaaggacttgagttcggtgtcactatcctgggatccaagtcatggcagagtagctggcttcgaagtacagtctttgcaggatgcaggaaatcagcttggtatggaggatacatctctgagctctggaatgctcacccagaacacaaatgtaccaattctagaaggtgttgatgtggccatctctcagggaatcaccctaccttccttggagtcttttcacccccttaatatacacattggtaaaggaaaactccacgctactggctcaaagagagggaaaaaaatgacactcaggcctgggccagttacccaagaagacagatgtgatcatcttaccctaaaggagcctttttcaggagagcctagtgaagaagtcaaggaagaaggagggaaacctcaaatgaattctgaaggggagataccttccctgccatcaggcagccaatctgcaaaaccagtaagccagcccaggaaatcaacccagccagatgtttgtgcctctcctcaagaaaagccactcaggactctgtttcaccaacctgaggaagagatagaagatggtggactcttcattccaatggaagaacaagacaatgaagaaagtgagaaaaggagaaaaaagaaaaagggtaccaagaggaaacgagatggaaggggtcaagaagggaccttggcatatgacctgaaactggatgacatgcttgaccgtaccttggaggatggtgccaagcagcacaatctaacagcagtcaatgtccgaaacatccttcatgaagtaatcacaaatgaacacgtggtagctatgatgaaagcagccatcagtgagacggaagatatgccaatgtttgagcctaaaatgacacgctctaaactgaaggaagtagtggaaaaaggagtggtaattccaacatggaatatttcaccaattaagaaggccaatgaaattaagcctcctcagtttgtggatatccaccttgaagaagatgattcctcagatgaagaataccagccggatgatgaagaagaagatgatactgctgaagagagcttattggaaagtgatgttgaaagcactgcttcatctccacgtggggcaaagaaatccagattgaggcagtcttctgagatgactgaaacagatgaggagagtggcatattatcagaggctgagaaagtcaccacaccagccatcaggcacatcagtgctgaggtagtgcccatggggcccccgccccctccaaagccgaaacagaccagagatagtactttcatggagaagttacatgcggtagatgaggagctggcttccagtccagtctgcatggattctttccagcccatggatgacagtctcattgcatttcgaacgcgttctaagatgcccctgaaagatgttcccctgggccaattagaggcagagctccaagctccagacatcactccagatatgtatgaccccaatacggcagatgatgaggactggaagatgtggctggggggacttatgaatgatgatgtggggaatgaagatgaagcagatgatgatgatgatccagaatataatttcctggaagacctcgatgaaccagacacagaggatttccggactgaccgggcagtgagaatcaccaaaaaggaagtaaatgagctgatggaagagctgtttgaaactttccaagatgagatgggattctccaacatggaagatgatggcccagaagaggaggagtgtgtagctgagcctcgtcctaactttaacacccctcaagctctacggtttgaggaaccactggccaacctgttaaatgaacaacatcggacagtgaaggagctatttgaacagctgaagatgaagaaatcttcagccaaacagctgcaggaagtagagaaggttaaaccccagagtgagaaagttcatcagactctgattctggacccagcacagaggaagagactccagcagcagatgcagcagcacgttcagctcttgacccaaatccaccttcttgccacctgcaaccccaacctcaatccggaggccactaccaccaggatatttcttaaagagctgggaacctttgctcaaagctccatcgcccttcaccatcagtacaaccccaagtttcagaccctgttccaaccctgtaacttgatgggagctatgcagctgattgaagacttcagcacacatgtcagcattgactgcagccctcataaaactgtcaagaagactgcgaatgaatttccctgtttgccaaagcaagtggcttggattctggccacaagcaaggttttcatgtatccagagttacttccagtgtgttccctgaaggcaaagaatccccaggataagatcgtcttcaccaaggctgaggacaatttgttagctttaggactgaagcattttgaaggaactgagtttcctaatcctctaatcagcaagtaccttctaacctgcaaaactgcccaccaactgacagtgagaatcaagaacctcaacatgaacagagctcctgacaacatcattaaattttataagaagaccaaacagctgccagtcctaggaaaatgctgtgaagagatccagccacatcagtggaagccacctatagagagagaagaacaccggctcccattctggttaaaggccagtctgccatccatccaggaagaactgcggcacatggctgatggtgctagagaggtaggaaatatgactggaaccactgagatcaactcagatcgaagcctagaaaaagacaatttggagttggggagtgaatctcggtacccactgctattgcctaagggtgtagtcctgaaactgaagccagttgccacccgtttccccaggaaggcttggagacagaagcgttcatcagtcctgaagcccctccttatccaacccagcccctctctccagcccagcttcaaccctgggaaaacaccagcccgatcaactcattcagaagcccctccgagcaaaatggtgctccggattcctcacccaatacagccagccactgttttacagacagttccaggtgtccctccactgggggtcagtggaggtgagagttttgagtctcctgcagcactgcctgctgtgccccctgaggccaggacaagcttccctctgtctgagtcccagactttgctctcttctgcccctgtgcccaaggtaatgctgccctcccttgccccttctaagtttcgaaagccatatgtgagacggagaccctcaaagagaagaggagtcaaggcctctccctgtatgaaacctgcccctgttatccaccaccctgcatctgttatcttcactgttcctgctaccactgtgaagattgtgagccttggcggtggctgtaacatgatccagcctgtcaatgcggctgtggcccagagtccccagactattcccatcactaccctcttggttaaccctacttccttcccctgtccattgaaccagtcccttgtggcctcctctgtctcacccttaattgtttctggcaattctgtgaatcttcctataccatccacccctgaagataaggcccacgtgaatgtggacattgcttgtgctgtggctgatggggaaaatgcctttcagggcctagaacccaaattagagccccaggaactatctcctctctctgctactgttttcccgaaagtggaacatagcccagggcctccactagcagatgcagagtgccaagaaggattgtcagagaatagtgcctgtcgctggaccgttgtgaaaacagaggaggggaggcaagctctggagccgctccctcagggcatccaggagtctctaaacaaccctacccctggggatttagaggaaattgtcaagatggaacctgaagaagctagagaggaaatcagtggatcccctgagcgtgatatttgtgatgacatcaaagtggaacatgctgtggaattggacactggtgccccaagcgaggagttgagcagtgctggagaagtaacgaaacagacagtcttacagaaggaagaggagaggagtcagccaactaaaaccccttcatcttctcaagagccccctgatgaaggaacctcagggacagatgtgaacaaaggatcatcaaagaatgctttgtcctcaatggatcctgaagtgaggcttagtagccccccagggaagccagaagattcatccagtgttgatggtcagtcagtggggactccagttgggccagaaactggaggagagaagaatgggccagaagaagaggaagaagaggactttgatgacctcacccaagatgaggaagatgaaatgtcatcagcttctgaggaatctgtgctttctgtcccagaactccaggtgagagctggagaatattctcaagtatttcgtggactcagtaatatgtatcacttattgatatgccacctgcttgcttgctgcactatggatagtcctaaaatcatttgtatttgatttgtgaatgcattatgggacatgattgtggagttgaggtgaaatgagatggaaaggatgaaattttacttattatattaaactcgtttacacattaaattgaatcacctgaccatactttaaatgccttaaaaaatagtaataggctgggcttggtggctcactcctgtagtcccagcactttgggaggctgaggtgggtggatcacaaggccaggagtttcagactggcctggccgacgtggtaaaaccccatctatattaaaaataacaaaaattagccaggcatggtggcggacacctgtaatccctgctgcttgggaggcagaggcaggagaattgcttgagcccgagagacagaggttgcagtgagccgagatcacgtcattgctctccagcctgggcaacagagcaaggctctgtctc

SEQ ID NO: 430521 - DNA, 4834 bp, Homo sapiens
tcagaatggaacaaaagtgggacttttaaaatgttgccctgtaagaagagaagaactacagtgacagagtccctacagcataaaggcaatcaagaggaaaacaacgtagacctagaatcagccgttaaaccagaatctgaccaggttaaggacttgagttcggtgtcactatcctgggatccaagtcatggcagagtagctggcttcgaagtacagtctttgcaggatgcaggaaatcagcttggtatggaggatacatctctgagctctggaatgctcacccagaacacaaatgtaccaattctagaaggtgttgatgtggccatctctcagggaatcaccctaccttccttggagtcttttcacccccttaatatacacattggtaaaggaaaactccacgctactggctcaaagagagggaaaaaaatgacactcaggcctgggccagttacccaagaagacagatgtgatcatcttaccctaaaggagcctttttcaggagagcctagtgaagaagtcaaggaagaaggagggaaacctcaaatgaattctgaaggggagataccttccctgccatcaggcagccaatctgcaaaaccagtaagccagcccaggaaatcaacccagccagatgtttgtgcctctcctcaagaaaagccactcaggactctgtttcaccaacctgaggaagagatagaagatggtggactcttcattccaatggaagaacaagacaatgaagaaagtgagaaaaggagaaaaaagaaaaagggtaccaagaggaaacgagatggaaggggtcaagaagggaccttggcatatgacctgaaactggatgacatgcttgaccgtaccttggaggatggtgccaagcagcacaatctaacagcagtcaatgtccgaaacatccttcatgaagtaatcacaaatgaacacgtggtagctatgatgaaagcagccatcagtgagacggaagatatgccaatgtttgagcctaaaatgacacgctctaaactgaaggaagtagtggaaaaaggagtggtaattccaacatggaatatttcaccaattaagaaggccaatgaaattaagcctcctcagtttgtggatatccaccttgaagaagatgattcctcagatgaagaataccagccggatgatgaagaagaagatgatactgctgaagagagcttattggaaagtgatgttgaaagcactgcttcatctccacgtggggcaaagaaatccagattgaggcagtcttctgagatgactgaaacagatgaggagagtggcatattatcagaggctgagaaagtcaccacaccagccatcaggcacatcagtgctgaggtagtgcccatggggcccccgccccctccaaagccgaaacagaccagagatagtactttcatggagaagttacatgcggtagatgaggagctggcttccagtccagtctgcatggattctttccagcccatggatgacagtctcattgcatttcgaacgcgttctaagatgcccctgaaagatgttcccctgggccaattagaggcagagctccaagctccagacatcactccagatatgtatgaccccaatacggcagatgatgaggactggaagatgtggctggggggacttatgaatgatgatgtggggaatgaagatgaagcagatgatgatgatgatccagaatataatttcctggaagacctcgatgaaccagacacagaggatttccggactgaccgggcagtgagaatcaccaaaaaggaagtaaatgagctgatggaagagctgtttgaaactttccaagatgagatgggattctccaacatggaagatgatggcccagaagaggaggagtgtgtagctgagcctcgtcctaactttaacacccctcaagctctacggtttgaggaaccactggccaacctgttaaatgaacaacatcggacagtgaaggagctatttgaacagctgaagatgaagaaatcttcagccaaacagctgcaggaagtagagaaggttaaaccccagagtgagaaagttcatcagactctgattctggacccagcacagaggaagagactccagcagcagatgcagcagcacgttcagctcttgacccaaatccaccttcttgccacctgcaaccccaacctcaatccggaggccactaccaccaggatatttcttaaagagctgggaacctttgctcaaagctccatcgcccttcaccatcagtacaaccccaagtttcagaccctgttccaaccctgtaacttgatgggagctatgcagctgattgaagacttcagcacacatgtcagcattgactgcagccctcataaaactgtcaagaagactgcgaatgaatttccctgtttgccaaagcaagtggcttggattctggccacaagcaaggttttcatgtatccagagttacttccagtgtgttccctgaaggcaaagaatccccaggataagatcgtcttcaccaaggctgaggacaatttgttagctttaggactgaagcattttgaaggaactgagtttcctaatcctctaatcagcaagtaccttctaacctgcaaaactgcccaccaactgacagtgagaatcaagaacctcaacatgaacagagctcctgacaacatcattaaattttataagaagaccaaacagctgccagtcctaggaaaatgctgtgaagagatccagccacatcagtggaagccacctatagagagagaagaacaccggctcccattctggttaaaggccagtctgccatccatccaggaagaactgcggcacatggctgatggtgctagagaggtaggaaatatgactggaaccactgagatcaactcagatcgaagcctagaaaaagacaatttggagttggggagtgaatctcggtacccactgctattgcctaagggtgtagtcctgaaactgaagccagttgccacccgtttccccaggaaggcttggagacagaagcgttcatcagtcctgaagcccctccttatccaacccagcccctctctccagcccagcttcaaccctgggaaaacaccagcccgatcaactcattcagaagcccctccgagcaaaatggtgctccggattcctcacccaatacagccagccactgttttacagacagttccaggtgtccctccactgggggtcagtggaggtgagagttttgagtctcctgcagcactgcctgctgtgccccctgaggccaggacaagcttccctctgtctgagtcccagactttgctctcttctgcccctgtgcccaaggtaatgctgccctcccttgccccttctaagtttcgaaagccatatgtgagacggagaccctcaaagagaagaggagtcaaggcctctccctgtatgaaacctgcccctgttatccaccaccctgcatctgttatcttcactgttcctgctaccactgtgaagattgtgagccttggcggtggctgtaacatgatccagcctgtcaatgcggctgtggcccagagtccccagactattcccatcactaccctcttggttaaccctacttccttcccctgtccattgaaccagtcccttgtggcctcctctgtctcacccttaattgtttctggcaattctgtgaatcttcctataccatccacccctgaagataaggcccacgtgaatgtggacattgcttgtgctgtggctgatggggaaaatgcctttcagggcctagaacccaaattagagccccaggaactatctcctctctctgctactgttttcccgaaagtggaacatagcccagggcctccactagcagatgcagagtgccaagaaggattgtcagagaatagtgcctgtcgctggaccgttgtgaaaacagaggaggggaggcaagctctggagccgctccctcagggcatccaggagtctctaaacaaccctacccctggggatttagaggaaattgtcaagatggaacctgaagaagctagagaggaaatcagtggatcccctgagcgtgatatttgtgatgacatcaaagtggaacatgctgtggaattggacactggtgccccaagcgaggagttgagcagtgctggagaagtaacgaaacagacagtcttacagaaactggaggagagaagaatgggccagaagaagaggaagaagaggactttgatgacctcacccaagatgaggaagatgaaatgtcatcagcttctgaggaatctgtgctttctgtcccagaactccaggtgagagctggagaatattctcaagtatttcgtggactcagtaatatgtatcacttattgatatgccacctgcttgcttgctgcactatggatagtcctaaaatcatttgtatttgatttgtgaatgcattatgggacatgattgtggagttgaggtgaaatgagatggaaaggatgaaattttacttattatattaaactcgtttacacattaaattgaatcacctgaccatactttaaatgccttaaaaaatagtaataggctgggcttggtggctcactcctgtagtcccagcactttgggaggctgaggtgggtggatcacaaggccaggagtttcagactggcctggccgacgtggtaaaaccccatctatattaaaaataacaaaaattagccaggcatggtggcggacacctgtaatccctgctgcttgggaggcagaggcaggagaattgcttgagcccgagagacagaggttgcagtgagccgagatcacgtcattgctctccagcctgggcaacagagcaaggctctgtctc

SEQ ID NO: 430522 - DNA, 2620 bp, Homo sapiens
tcagaatggaacaaaagtgggacttttaaaatgttgccctgtaagaagagaagaactacagtgacagagtccctacagcataaaggcaatcaagaggaaaacaacgtagacctagaatcagccgttaaaccagaatctgaccaggttaaggacttgagttcggtgtcactatcctgggatccaagtcatggcagagtagctggcttcgaagtacagtctttgcaggatgcaggaaatcagcttggtatggaggatacatctctgagctctggaatgctcacccagaacacaaatgtaccaattctagaaggtgttgatgtggccatctctcagggaatcaccctaccttccttggagtcttttcacccccttaatatacacattggtaaaggaaaactccacgctactggctcaaagagagggaaaaaaatgacactcaggcctgggccagttacccaagaagacagatgtgatcatcttaccctaaaggagcctttttcaggagagcctagtgaagaagtcaaggaagaaggagggaaacctcaaatgaattctgaaggggagataccttccctgccatcaggcagccaatctgcaaaaccagtaagccagcccaggaaatcaacccagccagatgtttgtgcctctcctcaagaaaagccactcaggactctgtttcaccaacctgaggaagagatagaagatggtggactcttcattccaatggaagaacaagacaatgaagaaagtgagaaaaggagaaaaaagaaaaagggtaccaagaggaaacgagatggaaggggtcaagaagggaccttggcatatgacctgaaactggatgacatgcttgaccgtaccttggaggatggtgccaagcagcacaatctaacagcagtcaatgtccgaaacatccttcatgaagtaatcacaaatgaacacgtggtagctatgatgaaagcagccatcagtgagacggaagatatgccaatgtttgagcctaaaatgacacgctctaaactgaaggaagtagtggaaaaaggagtggtaattccaacatggaatatttcaccaattaagaaggccaatgaaattaagcctcctcagtttgtggatatccaccttgaagaagatgattcctcagatgaagaataccagccggatgatgaagaagaagatgatactgctgaagagagcttattggaaagtgatgttgaaagcactgcttcatctccacgtggggcaaagaaatccagattgaggcagtcttctgagatgactgaaacagatgaggagagtggcatattatcagaggctgagaaagtcaccacaccagccatcaggcacatcagtgctgaggtagtgcccatggggcccccgccccctccaaagccgaaacagaccagagatagtactttcatggagaagttacatgcggtagatgaggagctggcttccagtccagtctgcatggattctttccagcccatggatgacagtctcattgcatttcgaacgcgttctaagatgcccctgaaagatgttcccctgggccaattagaggcagagctccaagctccagacatcactccagatatgtatgaccccaatacggcagatgatgaggactggaagatgtggctggggggacttatgaatgatgatgtggggaatgaagatgaagcagatgatgatgatgatccagaatataatttcctggaagacctcgatgaaccagacacagaggatttccggactgaccgggcagtgagaatcaccaaaaaggaagtaaatgagctgatggaagagctgtttgaaactttccaagatgagatgggattctccaacatggaagatgatggcccagaagaggaggagtgtgtagctgagcctcgtcctaactttaacacccctcaagctctacggtttgaggaaccactggccaacctgttaaatgaacaacatcggacagtgaaggagctatttgaacagctgaagatgaagaaatcttcagccaaacagctgcaggaagtagagaaggttaaaccccagagtgagaaagttcatcagactctgattctggacccagcacagaggaagagactccagcagcagatgcagcagcacgttcagctcttgacccaaatccaccttcttgccacctgcaaccccaacctcaatccggaggccactaccaccaggatatttcttaaagagctgggaacctttgctcaaagctccatcgcccttcaccatcagtacaaccccaagtttcagaccctgttccaaccctgtaacttgatgggagctatgcagctgattgaagacttcagcacacatgtcagcattgactgcagccctcataaaactgtcaagaagactggtaggagacagatgtgtcagctttaagtttttacttgcggtgagaggtggtgggaatcttatcccatagataactaaggatacttgcctaggaatggaggacacaggacatttgtaatttcttccttctctcttttatcctccctttgtactcattatccaagttctagaattacatgataatctctgggcctgggtaaagtgtggaggcagtggacagtataggaatatgggaggtaga

SEQ ID NO: 430523 - DNA, 1867 bp, Homo sapiens
aaataaataaagaagaatttatttttccttttcaggtcatgaggctagttaatgattagtgaaatccacgtgggtgttttctgagaggctgggttatatgatctctttggctttagggaattactccacgagcggcacgaggatttccagctcagcgatgcccccaggtccctgggagagctgcttctgggtggggggcctcattttgtggctcagcgttggaagttcaggggatgcacctcctaccccacagccaaagtgcgctgacttccagagcgccaacctttttgaaggcaccgatctcaaagtccagtttctcctctttgtcccttcgaatcctagctgtgggcagctagtagaaggaagcagtgacctccaaaactctgggttcaatgccactctgggaaccaaactaattatccatggattcagggttttaggaacaaagccttcctggattgacacatttattagaacccttctgcgtgcaacgaatgctaatgtgattgccgtggactggatttatgggtctacaggagtctacttctcagctgtgaaaaatgtgattaagttgagcctcgagatctcccttttcctcaataaactcctggtgctgggtgtgtcggaatcctcaatccacatcattggtgttagcctgggggcccacgttgggggcatggtgggacagctcttcggaggccagctgggacagatcacaggcctggaccccgctggacctgagtacaccagggccagtgtggaagagcgcttggatgctggagatgccctcttcgtggaagccatccacacagacaccgacaatttgggtattcggattcccgttggacatgtggactacttcgtcaacggaggccaagaccaacctggctgccccaccttcttttacgcaggttatagttatctgatctgtgatcacatgagggctgtgcacctctacatcagcgccctggagaattcctgtccactgatggcctttccctgtgccagctacaaggccttccttgctggacgctgtctggattgctttaacccttttctgctttcctgcccaaggataggactggtggaacaaggtggtgtcaagatagagccgctccccaaggaagtgaaagtctacctcctgactacttccagtgctccgtactgcatgcatcacagcctcgtggagtttcacttgaaggaactgagaaacaaggacaccaacatcgaggttaccttccttagcagtaacatcacctcttcatctaagatcaccatacctaagcagcaacgctatgggaaaggaatcatagcccatgccaccccacaatgccagataaaccaagtgaaattcaagtttcagtcttccaaccgagtttggaaaaaagaccggactaccattattgggaagttctgcactgcccttttgcctgtcaatgacagagaaaagatggtctgcttacctgaaccagtgaacttacaagcaagtgtgactgtttcctgtgacctgaagatagcctgtgtgtagtttaacctgggcaggacacatctccctgcattttttttttttttttttgagagagaggtgtgatgagggatgtgtgtgtgcagcttattgtagaccattactactaaggagaaaagcaaagctctttcttattttcctcataatcagctaccctggaggggagggagaactcattttacagaacttggtttcctttgccgatcttatgtacatacccattttagctttcccatgcatacttaactgcacttgctttatctccttgggcattcgtacttaggattcaatagaaacatgtacagggtaaacaattttttaaaaataaaacttcatggagta

SEQ ID NO: 430524 - DNA, 372 bp, Homo sapiens
ctctactttgggttctcagaagttctcagaagactccttctcactatggggatgcacctcctaccccacagccaaagtgcgctgacttccagagcgccaacctttttgaaggcaccgatctcaaagtccagtttctcctctttgtcccttcgaatcctagctgtgggcagctagtagaaggaagcagtgacctccaaaactctgggttcaatgccactctgggaaccaaactaattatccatggattcaggtgggagttaaataaccaacaggacttctcaactaagaatgatcaagtaaccataataccataagaagttagtgggcaacaaggagaggaatgaatttaccaatggccacatgttccatccc

SEQ ID NO: 430525 - DNA, 259 bp, Homo sapiens
aaataaataaagaagaatttatttttccttttcaggtcatgaggctagttaatgattagtgaaatccacgtgggtgttttctgagaggctgggttatatgatctctttggctttagggaattactccacgagcggcacgaggatttccagctcagcgatgcccccaggtccctgggagagctgcttctgggtggggggcctcattttgtggctcagcgttggaagttcaggtaagccagggctcaggccttgggaggaa

SEQ ID NO: 430526 - DNA, 1287 bp, Homo sapiens
aaataaataaagaagaatttatttttccttttcaggtcatgaggctagttaatgattagtgaaatccacgtgggtgttttctgagaggctgggttatatgatctctttggctttagggaattactccacgagcggcacgaggatttccagctcagcgatgcccccaggtccctgggagagctgcttctgggtggggggcctcattttgtggctcagcgttggaagttcaggggatgcacctcctaccccacagccaaagtgcgctgacttccagagcgccaacctttttgaaggcaccgatctcaaagtccagtttctcctctttgtcccttcgaatcctagctgtgggcagctagtagaaggaagcagtgacctccaaaactctgggttcaatgccactctgggaaccaaactaattatccatggattcagggttttaggaacaaagccttcctggattgacacatttattagaacccttctgcgtgcaacgaatgctaatgtgattgccgtggactggatttatgggtctacaggagtctacttctcagctgtgaaaaatgtgattaagttgagcctcgagatctcccttttcctcaataaactcctggtgctgggtgtgtcggaatcctcaatccacatcattggtgttagcctgggggcccacgttgggggcatggtgggacagctcttcggaggccagctgggacagatcacaggcctggaccccgctggacctgagtacaccagggccagtgtggaagagcgcttggatgctggagatgccctcttcgtggaagccatccacacagacaccgacaatttgggtattcggattcccgttggacatgtggactacttcgtcaacggaggccaagaccaacctggctgccccaccttcttttacgcaggttatagttatctgatctgtgatcacatgagggctgtgcacctctacatcagcgccctggagaattcctgtccactgatggcctttccctgtgccagctacaaggccttccttgctggacgctgtctggattgctttaacccttttctgctttcctgcccaaggataggactggtggaacaaggtggtgtcaagatagagccgctccccaaggaagtgaaagtctacctcctgactacttccagtgctccgtactgcaatgcattccagcttctcactgttgctcctaaccgtggcatttccttgaagctaggatgctggtgattgtaacgatgttaaatgtgaaataaaaatgtgtccagaatccatgaaataca

SEQ ID NO: 430527 - DNA, 1765 bp, Homo sapiens
aaataaataaagaagaatttatttttccttttcaggtcatgaggctagttaatgattagtgaaatccacgtgggtgttttctgagaggctgggttatatgatctctttggctttagggaattactccacgagcggcacgaggatttccagctcagcgatgcccccaggtccctgggagagctgcttctgggtggggggcctcattttgtggctcagcgttggaagttcaggggatgcacctcctaccccacagccaaagtgcgctgacttccagagcgccaacctttttgaaggcaccgatctcaaagtccagtttctcctctttgtcccttcgaatcctagctgtgggcagctagtagaaggaagcagtgacctccaaaactctgggttcaatgccactctgggaaccaaactaattatccatggattcagggttttaggaacaaagccttcctggattgacacatttattagaacccttctgcgtgcaacgaatgctaatgtgattgccgtggactggatttatgggtctacaggagtctacttctcagctgtgaaaaatgtgattaagttgagcctcgagatctcccttttcctcaataaactcctggtgctgggtgtgtcggaatcctcaatccacatcattggtgttagcctgggggcccacgttgggggcatggtgggacagctcttcggaggccagctgggacagatcacagatttgggtattcggattcccgttggacatgtggactacttcgtcaacggaggccaagaccaacctggctgccccaccttcttttacgcaggttatagttatctgatctgtgatcacatgagggctgtgcacctctacatcagcgccctggagaattcctgtccactgatggcctttccctgtgccagctacaaggccttccttgctggacgctgtctggattgctttaacccttttctgctttcctgcccaaggataggactggtggaacaaggtggtgtcaagatagagccgctccccaaggaagtgaaagtctacctcctgactacttccagtgctccgtactgcatgcatcacagcctcgtggagtttcacttgaaggaactgagaaacaaggacaccaacatcgaggttaccttccttagcagtaacatcacctcttcatctaagatcaccatacctaagcagcaacgctatgggaaaggaatcatagcccatgccaccccacaatgccagataaaccaagtgaaattcaagtttcagtcttccaaccgagtttggaaaaaagaccggactaccattattgggaagttctgcactgcccttttgcctgtcaatgacagagaaaagatggtctgcttacctgaaccagtgaacttacaagcaagtgtgactgtttcctgtgacctgaagatagcctgtgtgtagtttaacctgggcaggacacatctccctgcattttttttttttttttttgagagagaggtgtgatgagggatgtgtgtgtgcagcttattgtagaccattactactaaggagaaaagcaaagctctttcttattttcctcataatcagctaccctggaggggagggagaactcattttacagaacttggtttcctttgccgatcttatgtacatacccattttagctttcccatgcatacttaactgcacttgctttatctccttgggcattcgtacttaggattcaatagaaacatgtacagggtaaacaattttttaaaaataaaacttcatggagta

SEQ ID NO: 430528 - DNA, 1814 bp, Homo sapiens
aaataaataaagaagaatttatttttccttttcaggtcatgaggctagttaatgattagtgaaatccacgtgggtgttttctgagaggctgggttatatgatctctttggctttagggaattactccacgagcggcacgaggatttccagctcagcgatgcccccaggtccctgggagagctgcttctgggtggggggcctcattttgtggctcagcgttggaagttcaggggatgcacctcctaccccacagccaaagtgcgctgacttccagagcgccaacctttttgaaggcaccgatctcaaagtccagtttctcctctttgtcccttcgaatcctagctgtgggcagctagtagaaggaagcagtgacctccaaaactctgggttcaatgccactctgggaaccaaactaattatccatggattcagggttttaggaacaaagccttcctggattgacacatttattagaacccttctgcgtgcaacgaatgctaatgtgattgccgtggactggatttatgggtctacaggagtctacttctcagctgtgagtgctgggtgtgtcggaatcctcaatccacatcattggtgttagcctgggggcccacgttgggggcatggtgggacagctcttcggaggccagctgggacagatcacaggcctggaccccgctggacctgagtacaccagggccagtgtggaagagcgcttggatgctggagatgccctcttcgtggaagccatccacacagacaccgacaatttgggtattcggattcccgttggacatgtggactacttcgtcaacggaggccaagaccaacctggctgccccaccttcttttacgcaggttatagttatctgatctgtgatcacatgagggctgtgcacctctacatcagcgccctggagaattcctgtccactgatggcctttccctgtgccagctacaaggccttccttgctggacgctgtctggattgctttaacccttttctgctttcctgcccaaggataggactggtggaacaaggtggtgtcaagatagagccgctccccaaggaagtgaaagtctacctcctgactacttccagtgctccgtactgcatgcatcacagcctcgtggagtttcacttgaaggaactgagaaacaaggacaccaacatcgaggttaccttccttagcagtaacatcacctcttcatctaagatcaccatacctaagcagcaacgctatgggaaaggaatcatagcccatgccaccccacaatgccagataaaccaagtgaaattcaagtttcagtcttccaaccgagtttggaaaaaagaccggactaccattattgggaagttctgcactgcccttttgcctgtcaatgacagagaaaagatggtctgcttacctgaaccagtgaacttacaagcaagtgtgactgtttcctgtgacctgaagatagcctgtgtgtagtttaacctgggcaggacacatctccctgcattttttttttttttttttgagagagaggtgtgatgagggatgtgtgtgtgcagcttattgtagaccattactactaaggagaaaagcaaagctctttcttattttcctcataatcagctaccctggaggggagggagaactcattttacagaacttggtttcctttgccgatcttatgtacatacccattttagctttcccatgcatacttaactgcacttgctttatctccttgggcattcgtacttaggattcaatagaaacatgtacagggtaaacaattttttaaaaataaaacttcatggagta

SEQ ID NO: 430529 - DNA, 563 bp, Homo sapiens
gtgcagtggcgcgatcttggcttactgcaacctctgtctcccgggttcacgccattcttctgcctcagcctcccgagtcgctggaactacaggcgcccgccactacgcccagctgattttttgtgtttttagtagagacggggttgcaccatgttagccaggatgatctcgatctcctgacctcgtgatccgcctgcctcggcctcccaaagtgctgggattacaggcgtgagtcaccgcgcccagcctcaagctcatcttagagccagagaaactgggtcattgagaggttacctctagagagacaacagagagtggggtttcctgaggaaggtggtcctcagctaattctcccaacccttgggtcttttctgggagggtctatgatctgcactggaagggtgggtgtgtggtgggtccatgaatgttcctgcagctgagaggaaagaggtccctcatatcagtctcttctcacaggcctggaccccgctggacctgagtacaccagggccagtgtggaagagcgcttggatgctggagatgccctcttcgtggaagccatc

SEQ ID NO: 430530 - DNA, 540 bp, Homo sapiens
gggggaaatgcatgagctcagctctgccagggcaccaccagaggagtccagcccagtgtggtagcctgggtgggagtgaatgataagagcaaaggcatcaccggaggtgtggcaacagcccctggtctgaaccaaaactttcagagtgagtccaaccgattgctcttcagatgaggacttgggggcttcttactgtctatctactgatcgtatttcctcttaccctcaaaatttaccctctagtgggtcttctctctcgagtgatgtttaggagtgtcctccggctgcctcctttctgcactctcatttcccacttcttggcgcccaccctatgtggttctcaccctggcagcctccaaggttggggtccctggggaatactgaacctttccctctggtctccttccccttcacagatgcattccagcttctcactgttgctcctaaccgtggcatttccttgaagctaggatgctggtgattgtaacgatgttaaatgtgaaataaaaatgtgtccagaatccatgaaatacattacaa

SEQ ID NO: 430531 - DNA, 2042 bp, Homo sapiens
agcggaagggacgtgagcgggttccggttgtctggagcccagcggcgggtgtgagagtccgtaaggagcagcttccaggatcctgagatccggagcagccggggtcggagcggctcctcaagagttactgatctatgaaatggcagagaatggaaaaaattgtgaccagagacgtgtagcaatgaacaaggaacatcataatggaaatttcacagacccctcttcagtgaatgaaaagaagaggagggagcgggaagaaaggcagaatattgtcctgtggagacagccgctcattaccttgcagtatttttctctggaaatccttgtaatcttgaaggaatggacctcaaaattatggcatcgtcaaagcattgtggtgtcttttttactgctgcttgctgtgcttatagctacgtattatgttgaaggagtgcatcaacagtatgtgcaacgtatagagaaacagtttcttttgtatgcctactggataggcttaggaattttgtcttctgttgggcttggaacagggctgcacacctttctgctttatctgggtccacatatagcctcagttacattagctgcttatgaatgcaattcagttaattttcccgaaccaccctatcctgatcagattatttgtccagatgaagagggcactgaaggaaccatttctttgtggagtatcatctcaaaagttaggattgaagcctgcatgtggggtatcggtacagcaatcggagagctgcctccatatttcatggccagagcagctcgcctctcaggtgctgaaccagatgatgaagagtatcaggaatttgaagagatgctggaacatgcagagtctgcacaagactttgcctcccgggccaaactggcagttcaaaaactagtacagaaagttggattttttggaattttggcctgtgcttcaattccaaatcctttatttgatctggctggaataacgtgtggacactttctggtacctttttggaccttctttggtgcaaccctaattggaaaagcaataataaaaatgcatatccagaaaatttttgttataataacattcagcaagcacatagtggagcaaatggtggctttcattggtgctgtccccggcataggtccatctctgcagaagccatttcaggagtacctggaggctcaacggcagaagcttcaccacaaaagcgaaatgggcacaccacagggagaaaactggttgtcctggatgtttgaaaagttggtcgttgtcatggtgtgttacttcatcctatctatcattaactccatggcacaaagttatgccaaacgaatccagcagcggttgaactcagaggagaaaactaaataagtagagaaagttttaaactgcagaaattggagtggatgggttctgccttaaattgggaggactccaagccgggaaggaaaattcccttttccaacctgtatcaatttttacaacttttttcctgaaagcagtttagtccatactttgcactgacatactttttccttctgtgctaaggtaaggtatccaccctcgatgcaatccaccttgtgttttcttagggtggaatgtgatgttcagcagcaaacttgcaacagactggccttctgtttgttactttcaaaaggcccacatgatacaattagagaattcccaccgcacaaaaaaagttcctaagtatgttaaatatgtcaagctttttaggcttgtcacaaatgattgctttgttttcctaagtcatcaaaatgtatataaattatctagattggataacagtcttgcatgtttatcatgttacaatttaatattccatcctgcccaacccttcctctcccatcctcaaaaaagggccattttatgatgcattgcacaccctctggggaaattgatctttaaattttgagacagtataaggaaaatctggttggtgtcttacaagtgagctgacaccattttttattctgtgtatttagaatgaagtcttgaaaaaaactttataaagacatctttaatcattccaaaa

SEQ ID NO: 430532 - DNA, 1809 bp, Homo sapiens
agcggaagggacgtgagcgggttccggttgtctggagcccagcggcgggtgtgagagtccgtaaggagcagcttccaggatcctgagatccggagcagccggggtcggagcggctcctcaagagttactgatctatgaaatggcagagaatggaaaaaattgtgaccagagacgtgtagcaatgaacaaggaacatcataatggaaatttcacagacccctcttcagtgaatgaaaagaagaggagggagcgggaagaaaggcagaatattgtcctgtggagacagccgctcattaccttgcagtatttttctctggaaatccttgtaatcttgaaggaatggacctcaaaattatggcatcgtcaaagcattgtggtgtcttttttactgctgcttgctgtgcttatagctacgtattatgttgaaggagtgcatcaacagtatgtgcaacgtatagagaaacagtttcttttgtatgcctactggataggcttaggaattttgtcttctgttgggcttggaacagggctgcacacctttctgctttatctgggtccacatatagcctcagttacattagctgcttatgaatgcaattcagttaattttcccgaaccaccctatcctgatcagattatttgtccagatgaagagggcactgaaggaaccatttctttgtggagtatcatctcaaaagttaggattgaagcctgcatgtggggtatcggtacagcaatcggagagctgcctccatatttcatggccagagcagctcgcctctcaggtgctgaaccagatgatgaagagtatcaggaatttgaagagatgctggaacatgcagagtctgcacaagactttgcctcccgggccaaactggcagttcaaaaactagtacagaaagttggattttttggaattttggcctgtgcttcaattccaaatcctttatttgatctggctggaataacgtgtggacactttctggtacctttttggaccttctttggtgcaaccctaattggaaaagcaataataaaaatgcatatccagaaaatttttgttataataacattcagcaagcacatagtggagcaaatggtggctttcattggtgctgtccccggcataggtccatctctgcagaagccatttcaggagtacctggaggctcaacggcagaagcttcaccacaaaagcgaaatgggcacaccacagggagaaaactggttgtcctggatgtttgaaaagttggtcgttgtcatggtgtgttacttcatcctatctatcattaactccatggcacaaagttatgccaaacgaatccagcagcggttgaactcagaggagaaaactaaataagtagagaaagttttaaactgcagaaattggagtggatgggttctgccttaaattgggaggactccaagccgggaaggaaaattcccttttccaacctgtatcaatttttacaacttttttcctgaaagcagtttagtccatactttgcactgacatactttttccttctgtgctaaggtaaggtatccaccctcgatgcaatccaccttgtgttttcttagggtggaatgtgatgttcagcagcaaacttgcaacagactggccttctgtttgttactttcaaaaggcccacatgatacaattagagaattcccaccgcacaaaaaaagttcctaagtatgttaaatatgtcaagctttttaggcttgtcacaaatgattgctttgttttcctaagtcatcaaaatgtatataaattatctagattggataacagtcttgcatgtttat

SEQ ID NO: 430533 - DNA, 744 bp, Homo sapiens
acaagcataagtcatttccttattaattggttcaaaccagttcttacaggaactagtggtgataaatgtgggacttctgagaagtcattcattttattctttgtgccataccagagtacagtatcagctgagctgaccttactctgaggactaactcttttgctggaagcggtttctgatttacagctcttggtttctcccagacatgttggtgggagagattttggtttttaaggggttgttagatggagtaaattttctttttttttttttttttttttaactaaaaaggggtcacagaatttcagcagttctctgatttttatattttattcctcttcctatccaatccctgccttttgagtccaggtggtaagtacattttctttaacgtttttcctgcttttcttcccaaatgtgtctttttctttgggctactgtaccctgcttccagtgctgctgtccccggcataggtccatctctgcagaagccatttcaggagtacctggaggctcaacggcagaagcttcaccacaaaagcgaaatgggcacaccacagggagaaaactggttgtcctggatgtttgaaaagttggtcgttgtcatggtgtgttacttcatcctatctatcattaactccatggcacaaagttatgccaaacgaatccagcagcggttgaactcagaggagctgccttaaattgggagacttcaagccgggaggttcctttttcccttatttt

SEQ ID NO: 430534 - DNA, 729 bp, Homo sapiens
acaagcataagtcatttccttattaattggttcaaaccagttcttacaggaactagtggtgataaatgtgggacttctgagaagtcattcattttattctttgtgccataccagagtacagtatcagctgagctgaccttactctgaggactaactcttttgctggaagcggtttctgatttacagctcttggtttctcccagacatgttggtgggagagattttggtttttaaggggttgttagatggagtaaattttctttttttttttttttttttttaactaaaaaggggtcacagaatttcagcagttctctgatttttatattttattcctcttcctatccaatccctgccttttgagtccaggtggtaagtacattttctttaacgtttttcctgcttttcttcccaaatgtgtctttttctttgggctactgtaccctgcttccagtgctgctgtccccggcataggtccatctctgcagaagccatttcaggagtacctggaggctcaacggcagaagcttcaccacaaaagcgaaatgggcacaccacagggagaaaactggttgtcctggatgtttgaaaagttggtcgttgtcatggtgtgttacttcatcctatctatcattaactccatggcacaaagttatgccaaacgaatccagcagcggttgaactcagaggagcttaaatagtggagattccaacccgggttttcttttt

SEQ ID NO: 430535 - DNA, 286 bp, Homo sapiens
tgaaaatgatttggacccatttggaaaaccaacaacctgtaatgtcaggtaatccaggtccatgacctgaatttgaagaaaaaaacccttcctctcccatcctcaaaaaagggccattttatgatgcattgcacaccctctggggaaattgatctttaaattttgagacagtataaggaaaatctggttggtgtcttacaagtgagctgacaccattttttattctgtgtatttagaatgaagtcttgaaaaaaactttataaagacatctttaatcattccaaaa

SEQ ID NO: 430536 - DNA, 537 bp, Homo sapiens
agcggaagggacgtgagcgggttccggttgtctggagcccagcggcgggtgtgagagtccgtaaggagcagcttccaggatcctgagatccggagcagccggggtcggagcggctcctcaagagttactgatctatgaaatggcagagaatggaaaaaattgtgaccagagacgtgtagcaatgaacaaggaacatcataatggaaatttcacagacccctcttcagtgaatgaaaagaagaggagggagcgggaagaaaggcagaatattgtcctgtggagacagccgctcattaccttgcagtatttttctctggaaatccttgtaatcttgaaggaatggacctcaaagtaaagagtcttctcccactaccttttacatacacctcatttactcatttaaaaaatcctcagtaatctcttactttctgccctctactccatcaaaatggattaattacctttagaatattaccataggaacatatttattctcctttctttaggttgaagaaaaatagattagggaaagacatt

SEQ ID NO: 430537 - DNA, 3412 bp, Homo sapiens
agcggaagggacgtgagcgggttccggttgtctggagcccagcggcgggtgtgagagtccgtaaggagcagcttccaggatcctgagatccggagcagccggggtcggagcggctcctcaagagttactgatctatgaaatggcagagaatggaaaaaattgtgaccagagacgtgtagcaatgaacaaggaacatcataatggaaatttcacagacccctcttcagtgaatgaaaagaagaggagggagcgggaagaaaggcagaatattgtcctgtggagacagccgctcattaccttgcagtatttttctctggaaatccttgtaatcttgaaggaatggacctcaaaattatggcatcgtcaaagcattgtggtgtcttttttactgctgcttgctgtgcttatagctacgtattatgttgaaggagtgcatcaacagtatgtgcaacgtatagagaaacagtttcttttgtatgcctactggataggcttaggaattttgtcttctgttgggcttggaacagggctgcacacctttctgctttatctgggtccacatatagcctcagttacattagctgcttatgaatgcaattcagttaattttcccgaaccaccctatcctgatcagattatttgtccagatgaagagggcactgaaggaaccatttctttgtggagtatcatctcaaaagttaggattgaagcctgcatgtggggtatcggtacagcaatcggagagctgcctccatatttcatggccagagcagctcgcctctcaggtgctgaaccagatgatgaagagtatcaggaatttgaagagatgctggaacatgcagagtctgcacaagactttgcctcccgggccaaactggcagttcaaaaactagtacagaaagttggattttttggaattttggcctgtgcttcaattccaaatcctttatttgatctggctggaataacgtgtggacactttctggtacctttttggaccttctttggtgcaaccctaattggaaaagcaataataaaaatgcatatccagaaaatttttgttataataacattcagcaagcacatagtggagcaaatggtggctttcattggtgctgtccccggcataggtccatctctgcagaagccatttcaggagtacctggaggctcaacggcagaagcttcaccacaaaagcgaaatgggcacaccacaggtaagactttaatccggtttcttctcccctctgggaagtttcgggctgaaattacattcacagctctcactcacatttttaggcaaataagtgaagttggtttgccagtgttccttgacagaagttgagcgtctgtgtatgctctactgggaaatttgtctttgtcttagactagaaagtgtaacttctgtacatcttctcctaaaaacaagggtagagccaatggaaagtaatggttctgttacatagaatgagttgttgccttgatcttaaatgatgtattggtagatatacttcccaagtggattaaaaagttaaaacttacagcataacaaagtattagacttactgaggtgacttgaatatctccttttgattttcactctatttttcttttcacccatgggaaaatgataattttttaataaaccaaggctcttaccatagctgaactttaaaacttagactgtcttttctgtaaacgattctgaggcaaagggaaatgactagaagaggatgagtaaacaataacctgaaatgggaaactcgagggaagcacaggttttttttgttttgttttgtttggttcgttttttgttctttggggtttttttgagacagaatttcgctctcgttgcccaagttggagtgcaatggcgcgatcttggctcactgcaacctccgcctcccgggttcaagcgattctcctgcctcagcctcccaagtagctgtgattccaggcacgtgccaccacaccagctaattttttgtattttaatagaaacagggtttcaccgtgttagccaggctggtctcaaactgacctcagatgatccgcccgccttggcctcccaaagtgctgggattacagatgtgagccaccgcgcccggccagagcactgttttttttaatggccttgcactcttcttatggacctttgctgccctcagttgaccaaacatgacatcagaaacagatacatttgtgtgttttaaaaacagctcctaatactggaacaaaaatatttaactgtcttgacaatactcatgagtatctgcatggcgacttcagagttgagtttaatcaaagagtttattcttaggtcctagtagaagagctaacctcacactcatcccattctaaactatgtgattcaacactgattttacatccaacaaagtgaaatcttgatagttgggtgtaaaaaggagagtaatggagatttcagagtagttggggttgcttacttttcatttttaattctttaggttttgtaagttacacacttcaagcattatagatgatcctctttttactactgaactaatgaagcctttttcattgcattgttctgcatttatttctacagggagaaaactggttgtcctggatgtttgaaaagttggtcgttgtcatggtgtgttacttcatcctatctatcattaactccatggcacaaagttatgccaaacgaatccagcagcggttgaactcagaggagaaaactaaataagtagagaaagttttaaactgcagaaattggagtggatgggttctgccttaaattgggaggactccaagccgggaaggaaaattcccttttccaacctgtatcaatttttacaacttttttcctgaaagcagtttagtccatactttgcactgacatactttttccttctgtgctaaggtaaggtatccaccctcgatgcaatccaccttgtgttttcttagggtggaatgtgatgttcagcagcaaacttgcaacagactggccttctgtttgttactttcaaaaggcccacatgatacaattagagaattcccaccgcacaaaaaaagttcctaagtatgttaaatatgtcaagctttttaggcttgtcacaaatgattgctttgttttcctaagtcatcaaaatgtatataaattatctagattggataacagtcttgcatgtttatcatgttacaatttaatattccatcctgcccaacccttcctctcccatcctcaaaaaagggccattttatgatgcattgcacaccctctggggaaattgatctttaaattttgagacagtataaggaaaatctggttggtgtcttacaagtgagctgacaccattttttattctgtgtatttagaatgaagtcttgaaaaaaactttataaagacatctttaatcattccaaaa

SEQ ID NO: 430538 - DNA, 3358 bp, Homo sapiens
agcggaagggacgtgagcgggttccggttgtctggagcccagcggcgggtgtgagagtccgtaaggagcagcttccaggatcctgagatccggagcagccggggtcggagcggctcctcaagagttactgatctatgaaatggcagagaatggaaaaaattgtgaccagagacgtgtagcaatgaacaaggaacatcataatggaaatttcacagacccctcttcagtgaatgaaaagaagaggagggagcgggaagaaaggcagaatattgtcctgtggagacagccgctcattaccttgcagtatttttctctggaaatccttgtaatcttgaaggaatggacctcaaaattatggcatcgtcaaagcattgtggtgtcttttttactgctgcttgctgtgcttatagctacgtattatgttgaaggagtgcatcaacagtatgtgcaacgtatagagaaacagtttcttttgtatgcctactggataggcttaggaattttgtcttctgttgggcttggaacagggctgcacacctttctgctttatctgggtccacatatagcctcagttacattagctgcttatgaatgcaattcagttaattttcccgaaccaccctatcctgatcagattatttgtccagatgaagagggcactgaaggaaccatttctttgtggagtatcatctcaaaagttaggattgaagcctgcatgtggggtatcggtacagcaatcggagagctgcctccatatttcatggccagagcagctcgcctctcaggtgctgaaccagatgatgaagagtatcaggaatttgaagagatgctggaacatgcagagtctgcacaagactttgcctcccgggccaaactggcagttcaaaaactagtacagaaagttggattttttggaattttggcctgtgcttcaattccaaatcctttatttgatctggctggaataacgtgtggacactttctggtacctttttggaccttctttggtgcaaccctaattggaaaagcaataataaaaatgcatatccagaaaatttttgttataataacattcagcaagcacatagtggagcaaatggtggctttcattggtgctgtccccggcataggtccatctctgcagaagccatttcaggagtacctggaggctcaacggcagaagcttcaccacaaaagcgaaatgggcacaccacaggtaagactttaatccggtttcttctcccctctgggaagtttcgggctgaaattacattcacagctctcactcacatttttaggcaaataagtgaagttggtttgccagtgttccttgacagaagttgagcgtctgtgtatgctctactgggaaatttgtctttgtcttagactagaaagtgtaacttctgtacatcttctcctaaaaacaagggtagagccaatggaaagtaatggttctgttacatagaatgagttgttgccttgatcttaaatgatgtattggtagatatacttcccaagtggattaaaaagttaaaacttacagcataacaaagtattagacttactgaggtgacttgaatatctccttttgattttcactctatttttcttttcacccatgggaaaatgataattttttaataaaccaaggctcttaccatagctgaactttaaaacttagactgtcttttctgtaaacgattctgaggcaaagggaaatgactagaagaggatgagtaaacaataacctgaaatgggaaactcgagggaagcacaggttttttttgttttgttttgtttggttcgttttttgttctttggggtttttttgagacagaatttcgctctcgttgcccaagttggagtgcaatggcgcgatcttggctcactgcaacctccgcctcccgggttcaagcgattctcctgcctcagcctcccaagtagctgtgattccaggcacgtgccaccacaccagctaattttttgtattttaatagaaacagggtttcaccgtgttagccaggctggtctcaaactgacctcagatgatccgcccgccttggcctcccaaagtgctgggattacagatgtgagccaccgcgcccggccagagcactgttttttttaatggccttgcactcttcttatggacctttgctgccctcagttgaccaaacatgacatcagaaacagatacatttgtgtgttttaaaaacagctcctaatactggaacaaaaatatttaactgtcttgacaatactcatgagtatctgcatggcgacttcagagttgagtttaatcaaagagtttattcttaggtcctagtagaagagctaacctcacactcatcccattctaaactatgtgattcaacactgattttacatccaacaaagtgaaatcttgatagttgggtgtataattctttaggttttgtaagttacacacttcaagcattatagatgatcctctttttactactgaactaatgaagcctttttcattgcattgttctgcatttatttctacagggagaaaactggttgtcctggatgtttgaaaagttggtcgttgtcatggtgtgttacttcatcctatctatcattaactccatggcacaaagttatgccaaacgaatccagcagcggttgaactcagaggagaaaactaaataagtagagaaagttttaaactgcagaaattggagtggatgggttctgccttaaattgggaggactccaagccgggaaggaaaattcccttttccaacctgtatcaatttttacaacttttttcctgaaagcagtttagtccatactttgcactgacatactttttccttctgtgctaaggtaaggtatccaccctcgatgcaatccaccttgtgttttcttagggtggaatgtgatgttcagcagcaaacttgcaacagactggccttctgtttgttactttcaaaaggcccacatgatacaattagagaattcccaccgcacaaaaaaagttcctaagtatgttaaatatgtcaagctttttaggcttgtcacaaatgattgctttgttttcctaagtcatcaaaatgtatataaattatctagattggataacagtcttgcatgtttatcatgttacaatttaatattccatcctgcccaacccttcctctcccatcctcaaaaaagggccattttatgatgcattgcacaccctctggggaaattgatctttaaattttgagacagtataaggaaaatctggttggtgtcttacaagtgagctgacaccattttttattctgtgtatttagaatgaagtcttgaaaaaaactttataaagacatctttaatcattccaaaa

SEQ ID NO: 430539 - DNA, 2371 bp, Homo sapiens
agcggaagggacgtgagcgggttccggttgtctggagcccagcggcgggtgtgagagtccgtaaggagcagcttccaggatcctgagatccggagcagccggggtcggagcgggtaggtaaactaactcagggaattggggaccgaagcctgaggctgtcctcagagcttggcgtcttccggagctctcccacttaggcattgcggatctggggcactgtgattccgacttccagcagtgttttaggacgctgctgactggatgtctcaccctggatgtctcacgctggcggtagccaggttatttgggacaccttctcatggttggtcacccggacattgaacccagacaccgggctgttcgttctcctctccgcgtacttggaagccttgctaggcttctttagagaacctcttagtcccgggatgtccaggaccttggactcctcaagagttactgatctatgaaatggcagagaatggaaaaaattgtgaccagagacgtgtagcaatgaacaaggaacatcataatggaaatttcacagacccctcttcagtgaatgaaaagaagaggagggagcgggaagaaaggcagaatattgtcctgtggagacagccgctcattaccttgcagtatttttctctggaaatccttgtaatcttgaaggaatggacctcaaaattatggcatcgtcaaagcattgtggtgtcttttttactgctgcttgctgtgcttatagctacgtattatgttgaaggagtgcatcaacagtatgtgcaacgtatagagaaacagtttcttttgtatgcctactggataggcttaggaattttgtcttctgttgggcttggaacagggctgcacacctttctgctttatctgggtccacatatagcctcagttacattagctgcttatgaatgcaattcagttaattttcccgaaccaccctatcctgatcagattatttgtccagatgaagagggcactgaaggaaccatttctttgtggagtatcatctcaaaagttaggattgaagcctgcatgtggggtatcggtacagcaatcggagagctgcctccatatttcatggccagagcagctcgcctctcaggtgctgaaccagatgatgaagagtatcaggaatttgaagagatgctggaacatgcagagtctgcacaagactttgcctcccgggccaaactggcagttcaaaaactagtacagaaagttggattttttggaattttggcctgtgcttcaattccaaatcctttatttgatctggctggaataacgtgtggacactttctggtacctttttggaccttctttggtgcaaccctaattggaaaagcaataataaaaatgcatatccagaaaatttttgttataataacattcagcaagcacatagtggagcaaatggtggctttcattggtgctgtccccggcataggtccatctctgcagaagccatttcaggagtacctggaggctcaacggcagaagcttcaccacaaaagcgaaatgggcacaccacagggagaaaactggttgtcctggatgtttgaaaagttggtcgttgtcatggtgtgttacttcatcctatctatcattaactccatggcacaaagttatgccaaacgaatccagcagcggttgaactcagaggagaaaactaaataagtagagaaagttttaaactgcagaaattggagtggatgggttctgccttaaattgggaggactccaagccgggaaggaaaattcccttttccaacctgtatcaatttttacaacttttttcctgaaagcagtttagtccatactttgcactgacatactttttccttctgtgctaaggtaaggtatccaccctcgatgcaatccaccttgtgttttcttagggtggaatgtgatgttcagcagcaaacttgcaacagactggccttctgtttgttactttcaaaaggcccacatgatacaattagagaattcccaccgcacaaaaaaagttcctaagtatgttaaatatgtcaagctttttaggcttgtcacaaatgattgctttgttttcctaagtcatcaaaatgtatataaattatctagattggataacagtcttgcatgtttatcatgttacaatttaatattccatcctgcccaacccttcctctcccatcctcaaaaaagggccattttatgatgcattgcacaccctctggggaaattgatctttaaattttgagacagtataaggaaaatctggttggtgtcttacaagtgagctgacaccattttttattctgtgtatttagaatgaagtcttgaaaaaaactttataaagacatctttaatcattccaaaa

SEQ ID NO: 430540 - DNA, 2010 bp, Homo sapiens
  misc_feature (15)..(15): n is a, c, g, or t
  misc_feature (35)..(35): n is a, c, g, or t
  misc_feature (57)..(57): n is a, c, g, or t
gcttccaggatcctnagatccggagcagccggggncggagcggtttgtaatgtattnctggattttattttgctgtattagctcctcaagagttactgatctatgaaatggcagagaatggaaaaaattgtgaccagagacgtgtagcaatgaacaaggaacatcataatggaaatttcacagacccctcttcagtgaatgaaaagaagaggagggagcgggaagaaaggcagaatattgtcctgtggagacagccgctcattaccttgcagtatttttctctggaaatccttgtaatcttgaaggaatggacctcaaaattatggcatcgtcaaagcattgtggtgtcttttttactgctgcttgctgtgcttatagctacgtattatgttgaaggagtgcatcaacagtatgtgcaacgtatagagaaacagtttcttttgtatgcctactggataggcttaggaattttgtcttctgttgggcttggaacagggctgcacacctttctgctttatctgggtccacatatagcctcagttacattagctgcttatgaatgcaattcagttaattttcccgaaccaccctatcctgatcagattatttgtccagatgaagagggcactgaaggaaccatttctttgtggagtatcatctcaaaagttaggattgaagcctgcatgtggggtatcggtacagcaatcggagagctgcctccatatttcatggccagagcagctcgcctctcaggtgctgaaccagatgatgaagagtatcaggaatttgaagagatgctggaacatgcagagtctgcacaagactttgcctcccgggccaaactggcagttcaaaaactagtacagaaagttggattttttggaattttggcctgtgcttcaattccaaatcctttatttgatctggctggaataacgtgtggacactttctggtacctttttggaccttctttggtgcaaccctaattggaaaagcaataataaaaatgcatatccagaaaatttttgttataataacattcagcaagcacatagtggagcaaatggtggctttcattggtgctgtccccggcataggtccatctctgcagaagccatttcaggagtacctggaggctcaacggcagaagcttcaccacaaaagcgaaatgggcacaccacagggagaaaactggttgtcctggatgtttgaaaagttggtcgttgtcatggtgtgttacttcatcctatctatcattaactccatggcacaaagttatgccaaacgaatccagcagcggttgaactcagaggagaaaactaaataagtagagaaagttttaaactgcagaaattggagtggatgggttctgccttaaattgggaggactccaagccgggaaggaaaattcccttttccaacctgtatcaatttttacaacttttttcctgaaagcagtttagtccatactttgcactgacatactttttccttctgtgctaaggtaaggtatccaccctcgatgcaatccaccttgtgttttcttagggtggaatgtgatgttcagcagcaaacttgcaacagactggccttctgtttgttactttcaaaaggcccacatgatacaattagagaattcccaccgcacaaaaaaagttcctaagtatgttaaatatgtcaagctttttaggcttgtcacaaatgattgctttgttttcctaagtcatcaaaatgtatataaattatctagattggataacagtcttgcatgtttatcatgttacaatttaatattccatcctgcccaacccttcctctcccatcctcaaaaaagggccattttatgatgcattgcacaccctctggggaaattgatctttaaattttgagacagtataaggaaaatctggttggtgtcttacaagtgagctgacaccattttttattctgtgtatttagaatgaagtcttgaaaaaaactttataaagacatctttaatcattccaaaa

SEQ ID NO: 430541 - DNA, 2081 bp, Homo sapiens
agcggaagggacgtgagcgggttccggttgtctggagcccagcggcgggtgtgagagtccgtaaggagcagcttccaggatcctgagatccggagcagccggggtcggagcggctcctcaagagttactgatctatgaaatggcagagaatggaaaaaattgtgaccagagacgtgtagcaatgaacaaggaacatcataatggaaatttcacagacccctcttcagtgaatgaaaagaagaggagggagcgggaagaaaggcagaatattgtcctgtggagacagccgctcattaccttgcagtatttttctctggaaatccttgtaatcttgaaggaatggacctcaaaattatggcatcgtcaaagcattgtggtgtcttttttactgctgcttgctgtgcttatagctacgtattatgttgaaggagtgcatcaacagtatgtgcaacgtatagagaaacagtttcttttgtatgcctactggataggcttaggaattttgtcttctgttgggcttggaacagggctgcacacctttctgctttatctgggtccacatatagcctcagttacattagctgcttatgaatgcaattcagttaattttcccgaaccaccctatcctgatcagattatttgtccagatgaagagggcactgaaggaaccatttctttgtggagtatcatctcaaaagttaggattgaagcctgcatgtggggtatcggtacagcaatcggagagctgcctccatatttcatggccagagcagctcgcctctcaggtgctgaaccagatgatgaagagtatcaggaatttgaagagatgctggaacatgcagagtctgcacaagactttgcctcccgggccaaactggcagttcaaaaactagtacagaaagttggattttttggaattttggcctgtgcttcaattccaaatcctttatttgatctggctggaataacgtgtggacactttctggtacctttttggaccttctttggtgcaaccctaattggaaaagcaataataaaaatgcatatccagaaaatttttgttataataacattcagcaagcacatagtggagcaaatggtggctttcattgggctggaggacaatggcgcactgcaacctccacctcccagtgctgtccccggcataggtccatctctgcagaagccatttcaggagtacctggaggctcaacggcagaagcttcaccacaaaagcgaaatgggcacaccacagggagaaaactggttgtcctggatgtttgaaaagttggtcgttgtcatggtgtgttacttcatcctatctatcattaactccatggcacaaagttatgccaaacgaatccagcagcggttgaactcagaggagaaaactaaataagtagagaaagttttaaactgcagaaattggagtggatgggttctgccttaaattgggaggactccaagccgggaaggaaaattcccttttccaacctgtatcaatttttacaacttttttcctgaaagcagtttagtccatactttgcactgacatactttttccttctgtgctaaggtaaggtatccaccctcgatgcaatccaccttgtgttttcttagggtggaatgtgatgttcagcagcaaacttgcaacagactggccttctgtttgttactttcaaaaggcccacatgatacaattagagaattcccaccgcacaaaaaaagttcctaagtatgttaaatatgtcaagctttttaggcttgtcacaaatgattgctttgttttcctaagtcatcaaaatgtatataaattatctagattggataacagtcttgcatgtttatcatgttacaatttaatattccatcctgcccaacccttcctctcccatcctcaaaaaagggccattttatgatgcattgcacaccctctggggaaattgatctttaaattttgagacagtataaggaaaatctggttggtgtcttacaagtgagctgacaccattttttattctgtgtatttagaatgaagtcttgaaaaaaactttataaagacatctttaatcattccaaaa

SEQ ID NO: 430542 - DNA, 1700 bp, Homo sapiens
tcagaggattcccttattcgtgttgcacattgtggtgtcttttttactgctgcttgctgtgcttatagctacgtattatgttgaaggagtgcatcaacagtatgtgcaacgtatagagaaacagtttcttttgtatgcctactggataggcttaggaattttgtcttctgttgggcttggaacagggctgcacacctttctgctttatctgggtccacatatagcctcagttacattagctgcttatgaatgcaattcagttaattttcccgaaccaccctatcctgatcagattatttgtccagatgaagagggcactgaaggaaccatttctttgtggagtatcatctcaaaagttaggattgaagcctgcatgtggggtatcggtacagcaatcggagagctgcctccatatttcatggccagagcagctcgcctctcaggtgctgaaccagatgatgaagagtatcaggaatttgaagagatgctggaacatgcagagtctgcacaagactttgcctcccgggccaaactggcagttcaaaaactagtacagaaagttggattttttggaattttggcctgtgcttcaattccaaatcctttatttgatctggctggaataacgtgtggacactttctggtacctttttggaccttctttggtgcaaccctaattggaaaagcaataataaaaatgcatatccagaaaatttttgttataataacattcagcaagcacatagtggagcaaatggtggctttcattggtgctgtccccggcataggtccatctctgcagaagccatttcaggagtacctggaggctcaacggcagaagcttcaccacaaaagcgaaatgggcacaccacagggagaaaactggttgtcctggatgtttgaaaagttggtcgttgtcatggtgtgttacttcatcctatctatcattaactccatggcacaaagttatgccaaacgaatccagcagcggttgaactcagaggagaaaactaaataagtagagaaagttttaaactgcagaaattggagtggatgggttctgccttaaattgggaggactccaagccgggaaggaaaattcccttttccaacctgtatcaatttttacaacttttttcctgaaagcagtttagtccatactttgcactgacatactttttccttctgtgctaaggtaaggtatccaccctcgatgcaatccaccttgtgttttcttagggtggaatgtgatgttcagcagcaaacttgcaacagactggccttctgtttgttactttcaaaaggcccacatgatacaattagagaattcccaccgcacaaaaaaagttcctaagtatgttaaatatgtcaagctttttaggcttgtcacaaatgattgctttgttttcctaagtcatcaaaatgtatataaattatctagattggataacagtcttgcatgtttatcatgttacaatttaatattccatcctgcccaacccttcctctcccatcctcaaaaaagggccattttatgatgcattgcacaccctctggggaaattgatctttaaattttgagacagtataaggaaaatctggttggtgtcttacaagtgagctgacaccattttttattctgtgtatttagaatgaagtcttgaaaaaaactttataaagacatctttaatcattccaaaa

SEQ ID NO: 430543 - DNA, 1951 bp, Homo sapiens
agcggaagggacgtgagcgggttccggttgtctggagcccagcggcgggtgtgagagtccgtaaggagcagcttccaggatcctgagatccggagcagccggggtcggagcggctcctcaagagttactgatctatgaaatggcagagaatggaaaaaattgtgaccagagacgtgtagcaatgaacaaggaacatcataatggaaatttcacagacccctcttcagtgaatgaaaagaagaggagggagcgggaagaaaggcagaatattgtcctgtggagacagccgctcattaccttgcagtatttttctctggaaatccttgtaatcttgaaggaatggacctcaaatatgtgcaacgtatagagaaacagtttcttttgtatgcctactggataggcttaggaattttgtcttctgttgggcttggaacagggctgcacacctttctgctttatctgggtccacatatagcctcagttacattagctgcttatgaatgcaattcagttaattttcccgaaccaccctatcctgatcagattatttgtccagatgaagagggcactgaaggaaccatttctttgtggagtatcatctcaaaagttaggattgaagcctgcatgtggggtatcggtacagcaatcggagagctgcctccatatttcatggccagagcagctcgcctctcaggtgctgaaccagatgatgaagagtatcaggaatttgaagagatgctggaacatgcagagtctgcacaagactttgcctcccgggccaaactggcagttcaaaaactagtacagaaagttggattttttggaattttggcctgtgcttcaattccaaatcctttatttgatctggctggaataacgtgtggacactttctggtacctttttggaccttctttggtgcaaccctaattggaaaagcaataataaaaatgcatatccagaaaatttttgttataataacattcagcaagcacatagtggagcaaatggtggctttcattggtgctgtccccggcataggtccatctctgcagaagccatttcaggagtacctggaggctcaacggcagaagcttcaccacaaaagcgaaatgggcacaccacagggagaaaactggttgtcctggatgtttgaaaagttggtcgttgtcatggtgtgttacttcatcctatctatcattaactccatggcacaaagttatgccaaacgaatccagcagcggttgaactcagaggagaaaactaaataagtagagaaagttttaaactgcagaaattggagtggatgggttctgccttaaattgggaggactccaagccgggaaggaaaattcccttttccaacctgtatcaatttttacaacttttttcctgaaagcagtttagtccatactttgcactgacatactttttccttctgtgctaaggtaaggtatccaccctcgatgcaatccaccttgtgttttcttagggtggaatgtgatgttcagcagcaaacttgcaacagactggccttctgtttgttactttcaaaaggcccacatgatacaattagagaattcccaccgcacaaaaaaagttcctaagtatgttaaatatgtcaagctttttaggcttgtcacaaatgattgctttgttttcctaagtcatcaaaatgtatataaattatctagattggataacagtcttgcatgtttatcatgttacaatttaatattccatcctgcccaacccttcctctcccatcctcaaaaaagggccattttatgatgcattgcacaccctctggggaaattgatctttaaattttgagacagtataaggaaaatctggttggtgtcttacaagtgagctgacaccattttttattctgtgtatttagaatgaagtcttgaaaaaaactttataaagacatctttaatcattccaaaa

SEQ ID NO: 430544 - DNA, 2764 bp, Homo sapiens
agcggaagggacgtgagcgggttccggttgtctggagcccagcggcgggtgtgagagtccgtaaggagcagcttccaggatcctgagatccggagcagccggggtcggagcggctcctcaagagttactgatctatgaaatggcagagaatggaaaaaattgtgaccagagacgtgtagcaatgaacaaggaacatcataatggaaatttcacagacccctcttcagtgaatgaaaagaagaggagggagcgggaagaaaggcagaatattgtcctgtggagacagccgctcattaccttgcagtatttttctctggaaatccttgtaatcttgaaggaatggacctcaaaattatggcatcgtcaaagcattgtggtgtcttttttactgctgcttgctgtgcttatagctacgtattatgttgaaggagtgcatcaacagtatgtgcaacgtatagagaaacagtttcttttgtatgcctactggataggcttaggaattttgtcttctgttgggcttggaacagggctgcacacctttctgctttatctgggtccacatatagcctcagttacattagctgcttatgaatgcaattcagttaattttcccgaaccaccctatcctgatcagattatttgtccagatgaagagggcactgaaggaaccatttctttgtggagtatcatctcaaaagttaggattgaagcctgcatgtggggtatcggtacagcaatcggagagctgcctccatatttcatggccagagcagctcgcctctcaggtgctgaaccagatgatgaagagtatcaggaatttgaagagatgctggaacatgcagagtctgcacaagactttgcctcccgggccaaactggcagttcaaaaactagtacagaaagttggattttttggaattttggcctgtgcttcaattccaaatcctttatttgatctggctggaataacgtgtggacactttctggtacctttttggaccttctttggtgcaaccctaattggaaaagcaataataaaaatgcatatccagaaaatttttgttataataacattcagcaagcacatagtggagcaaatggtggctttcattggtgctgtccccggcataggtccatctctgcagaagccatttcaggagtacctggaggctcaacggcagaagcttcaccacaaaagcgaaatgggcacaccacagggagaaaactggttgtcctggatgtttgaaaagttggtcgttgtcatggtgtgttacttcatcctatctatcattaactccatggcacaaagttatgccaaacgaatccagcagcggttgaactcagaggagaaaactaaataagtagagaaagttttaaactgcagaaattggagtggatgggttctgccttaaattgggaggactccaagccgggaaggaaaattcccttttccaacctgtatcaatttttacaacttttttcctgaaagcagtttagtccatactttgcactgacatactttttccttctgtgctaaggtaaggtatccaccctcgatgcaatccaccttgtgttttcttagggtggaatgtgatgttcagcagcaaacttgcaacagactggccttctgtttgttactttcaaaaggcccacatgatacaattagagaattcccaccgcacaaaaaaagttcctaagtatgttaaatatgtcaagctttttaggcttgtcacaaatgattgctttgttttcctaagtcatcaaaatgtatataaattatctagattggataacagtcttgcatgtttatcatgttacaatttaatattccatcctgcccaacccttcctctcccatcctcaaaaaagggccattttatgatgcattgcacaccctctggggaaattgatctttaaattttgagacagtataaggaaaatctggttggtgtcttacaagtgagctgacaccattttttattctgtgtatttagaatgaagtcttgaaaaaaactttataaagacatctttaatcattccaaaattgtgtccgttttcttgagcgttttgattttttacttttagcttataccagctgaatggcagccttgcctaatccacctacaacaagaatttcttaagctttcttttatttgcatgagagagccactaccaaggcatgttttgttatgctgaaactgggctgctgcatactgctaaatggcacctctgggattggcctacctggggatttcttggtttgtgaaaacaggagaggagaaatatctcatacaagtgaaaggatactggagagagaaattacccatttctaaaaaaaaaccacactctgtcgtatctgtgttaatgttttctagcatgtactctggtttcaacagacacaaatttatatgttaacccagttttcttgccgttctgtaagtgttttattcttagtgtgatttttttccattgggatgtttttgattgaacttgttcattttgttttgcttgggaggaaaataaacaattttacttttttcctttaggagcattatgagcattatgtcagaatagaatagaattggggttcgatcttaacaggccagaaatgcctgggtttttttggtttgtttttgtttttgtttttttatcaaatcctgcctgactgtctgcttgttttgcctaccatcgtgacatctccatggctgtaccaccttgtcgggtagcttatcagactgatgttgactgttgaatctcatggcaaca

SEQ ID NO: 430545 - DNA, 2169 bp, Homo sapiens
agcggaagggacgtgagcgggttccggttgtctggagcccagcggcgggtgtgagagtccgtaaggagcagcttccaggatcctgagatccggagcagccggggtcggagcgggtaggtaaactaactcagggaattggggaccgaagcctgaggctgtcctcagagcttggcgtcttccggagctctcccacttaggcattgcggatctggggcactgtgattccgacttccagcagtgttttaggacgctgctgactggatgtctcaccctggatgtctcacgctggcggtagccaggttatttgggacaccttctcatggttggtcacccggacattgaacccagacaccgggctgttcgttctcctctccgcgtacttggaagccttgctaggcttctttagagaacctcttagtcccgggatgtccaggaccttggactcctcaagagttactgatctatgaaatggcagagaatggaaaaaattgtgaccagagacgtgtagcaatgaacaaggaacatcataatggaaatttcacagacccctcttcagtgaatgaaaagaagaggagggagcgggaagaaaggcagaatattgtcctgtggagacagccgctcattaccttgcagtatttttctctggaaatccttgtaatcttgaaggaatggacctcaaaggtccacatatagcctcagttacattagctgcttatgaatgcaattcagttaattttcccgaaccaccctatcctgatcagattatttgtccagatgaagagggcactgaaggaaccatttctttgtggagtatcatctcaaaagttaggattgaagcctgcatgtggggtatcggtacagcaatcggagagctgcctccatatttcatggccagagcagctcgcctctcaggtgctgaaccagatgatgaagagtatcaggaatttgaagagatgctggaacatgcagagtctgcacaagactttgcctcccgggccaaactggcagttcaaaaactagtacagaaagttggattttttggaattttggcctgtgcttcaattccaaatcctttatttgatctggctggaataacgtgtggacactttctggtacctttttggaccttctttggtgcaaccctaattggaaaagcaataataaaaatgcatatccagaaaatttttgttataataacattcagcaagcacatagtggagcaaatggtggctttcattggtgctgtccccggcataggtccatctctgcagaagccatttcaggagtacctggaggctcaacggcagaagcttcaccacaaaagcgaaatgggcacaccacagggagaaaactggttgtcctggatgtttgaaaagttggtcgttgtcatggtgtgttacttcatcctatctatcattaactccatggcacaaagttatgccaaacgaatccagcagcggttgaactcagaggagaaaactaaataagtagagaaagttttaaactgcagaaattggagtggatgggttctgccttaaattgggaggactccaagccgggaaggaaaattcccttttccaacctgtatcaatttttacaacttttttcctgaaagcagtttagtccatactttgcactgacatactttttccttctgtgctaaggtaaggtatccaccctcgatgcaatccaccttgtgttttcttagggtggaatgtgatgttcagcagcaaacttgcaacagactggccttctgtttgttactttcaaaaggcccacatgatacaattagagaattcccaccgcacaaaaaaagttcctaagtatgttaaatatgtcaagctttttaggcttgtcacaaatgattgctttgttttcctaagtcatcaaaatgtatataaattatctagattggataacagtcttgcatgtttatcatgttacaatttaatattccatcctgcccaacccttcctctcccatcctcaaaaaagggccattttatgatgcattgcacaccctctggggaaattgatctttaaattttgagacagtataaggaaaatctggttggtgtcttacaagtgagctgacaccattttttattctgtgtatttagaatgaagtcttgaaaaaaactttataaagacatctttaatcattccaaaa

SEQ ID NO: 430546 - DNA, 1438 bp, Homo sapiens
agcggaagggacgtgagcgggttccggttgtctggagcccagcggcgggtgtgagagtccgtaaggagcagcttccaggatcctgagatccggagcagccggggtcggagcggacccctcttcagtgaatgaaaagaagaggagggagcgggaagaaaggcagaatattgtcctgtggagacagccgctcattaccttgcagtatttttctctggaaatccttgtaatcttgaaggaatggacctcaaagactttgcctcccgggccaaactggcagttcaaaaactagtacagaaagttggattttttggaattttggcctgtgcttcaattccaaatcctttatttgatctggctggaataacgtgtggacactttctggtacctttttggaccttctttggtgcaaccctaattggaaaagcaataataaaaatgcatatccagaaaatttttgttataataacattcagcaagcacatagtggagcaaatggtggctttcattggtgctgtccccggcataggtccatctctgcagaagccatttcaggagtacctggaggctcaacggcagaagcttcaccacaaaagcgaaatgggcacaccacagggagaaaactggttgtcctggatgtttgaaaagttggtcgttgtcatggtgtgttacttcatcctatctatcattaactccatggcacaaagttatgccaaacgaatccagcagcggttgaactcagaggagaaaactaaataagtagagaaagttttaaactgcagaaattggagtggatgggttctgccttaaattgggaggactccaagccgggaaggaaaattcccttttccaacctgtatcaatttttacaacttttttcctgaaagcagtttagtccatactttgcactgacatactttttccttctgtgctaaggtaaggtatccaccctcgatgcaatccaccttgtgttttcttagggtggaatgtgatgttcagcagcaaacttgcaacagactggccttctgtttgttactttcaaaaggcccacatgatacaattagagaattcccaccgcacaaaaaaagttcctaagtatgttaaatatgtcaagctttttaggcttgtcacaaatgattgctttgttttcctaagtcatcaaaatgtatataaattatctagattggataacagtcttgcatgtttatcatgttacaatttaatattccatcctgcccaacccttcctctcccatcctcaaaaaagggccattttatgatgcattgcacaccctctggggaaattgatctttaaattttgagacagtataaggaaaatctggttggtgtcttacaagtgagctgacaccattttttattctgtgtatttagaatgaagtcttgaaaaaaactttataaagacatctttaatcattccaaaa

SEQ ID NO: 430547 - DNA, 2260 bp, Homo sapiens
  misc_feature (2049)..(2049): n is a, c, g, or t
  misc_feature (2058)..(2058): n is a, c, g, or t
agcggaagggacgtgagcgggttccggttgtctggagcccagcggcgggtgtgagagtccgtaaggagcagcttccaggatcctgagatccggagcagccggggtcggagcggctcctcaagagttactgatctatgaaatggcagagaatggaaaaaattgtgaccagagacgtgtagcaatgaacaaggaacatcataatggaaatttcacagacccctcttcagtgaatgaaaagaagaggagggagcgggaagaaaggcagaatattgtcctgtggagacagccgctcattaccttgcagtatttttctctggaaatccttgtaatcttgaaggaatggacctcaaaattatggcatcgtcaaagcattgtggtgtcttttttactgctgcttgctgtgcttatagctacgtattatgttgaaggagtgcatcaacagtatgtgcaacgtatagagaaacagtttcttttgtatgcctactggataggcttaggaattttgtcttctgttgggcttggaacagggctgcacacctttctgctttatctgggtccacatatagcctcagttacattagctgcttatgaatgcaattcagttaattttcccgaaccaccctatcctgatcagattatttgtccagatgaagagggcactgaaggaaccatttctttgtggagtatcatctcaaaagttaggattgaagcctgcatgtggggtatcggtacagcaatcggagagctgcctccatatttcatggccagagcagctcgcctctcaggtgctgaaccagatgatgaagagtatcaggaatttgaagagatgctggaacatgcagagtctgcacaagactttgcctcccgggccaaactggcagttcaaaaactagtacagaaagttggattttttggaattttggcctgtgcttcaattccaaatcctttatttgatctggctggaataacgtgtggacactttctggtacctttttggaccttctttggtgcaaccctaattggaaaagcaataataaaaatgcatatccagaaaatttttgttataataacattcagcaagcacatagtggagcaaatggtggctttcattggtgctgtccccggcataggtccatctctgcagaagccatttcaggagtacctggaggctcaacggcagaagcttcaccacaaaagcgaaatgggcacaccacagggagaaaactggttgtcctggatgtttgaaaagttggtcgttgtcatggtgtgttacttcatcctatctatcattaactccatggcacaaagttatgccaaacgaatccagcagcggttgaactcagaggagaaaactaaataagtagagaaagttttaaactgcagaaattggagtggatgggttctgccttaaattgggaggactccaagccgggaaggaaaattcccttttccaacctgtatcaatttttacaacttttttcctgaaagcagtttagtccatactttgcactgacatactttttccttctgtgctaaggtaaggtatccaccctcgatgcaatccaccttgtgttttcttagggtggaatgtgatgttcagcagcaaacttgcaacagactggccttctgtttgttactttcaaaaggcccacatgatacaattagagaattcccaccgcacaaaaaaagttcctaagtatgttaaatatgtcaagctttttaggcttgtcacaaatgattgctttgttttcctaagtcatcaaaatgtatataaattatctagattggataacagtcttgcatgtttatcatgttacaatttaatattccatcctgcccaacccttcctctcccatcctcaaaaaagggccattttatgatgcattgcacaccctctggggaaattgatctttaaattttgagacagtataaggaaaatctggttggtgtcttacaagtgagctgacaccattttttattctgtgtatttagaatgaagtcttgaaaaaaactttataaagacatctttaatcattccaaaaaaaaaanaaacaaaanaaaaaaaacaaaaaacaaaaagagaagacatcaaaaaaagaaagaggacacagaaaaacgaagaagaaaaacacgaagaagagagaactaagaacttacaaagcacaacgacaattagaggggcgggcgcgccgacaaacaaacatacccgaggggaactacactcatcccgacgccccgtttttcaagaggggagaccctc

SEQ ID NO: 430548 - DNA, 1386 bp, Homo sapiens
acaagcataagtcatttccttattaattggttcaaaccagttcttacaggaactagtggtgataaatgtgggacttctgagaagtcattcattttattctttgtgccataccagagtacagtatcagctgagctgaccttactctgaggactaactcttttgctggaagcggtttctgatttacagctcttggtttctcccagacatgttggtgggagagattttggtttttaaggggttgttagatggagtaaattttctttttttttttttttttttttaactaaaaaggggtcacagaatttcagcagttctctgatttttatattttattcctcttcctatccaatccctgccttttgagtccaggtggtaagtacattttctttaacgtttttcctgcttttcttcccaaatgtgtctttttctttgggctactgtaccctgcttccagtgctgctgtccccggcataggtccatctctgcagaagccatttcaggagtacctggaggctcaacggcagaagcttcaccacaaaagcgaaatgggcacaccacagggagaaaactggttgtcctggatgtttgaaaagttggtcgttgtcatggtgtgttacttcatcctatctatcattaactccatggcacaaagttatgccaaacgaatccagcagcggttgaactcagaggagaaaactaaataagtagagaaagttttaaactgcagaaattggagtggatgggttctgccttaaattgggaggactccaagccgggaaggaaaattcccttttccaacctgtatcaatttttacaacttttttcctgaaagcagtttagtccatactttgcactgacatactttttccttctgtgctaaggtaaggtatccaccctcgatgcaatccaccttgtgttttcttagggtggaatgtgatgttcagcagcaaacttgcaacagactggccttctgtttgttactttcaaaaggcccacatgatacaattagagaattcccaccgcacaaaaaaagttcctaagtatgttaaatatgtcaagctttttaggcttgtcacaaatgattgctttgttttcctaagtcatcaaaatgtatataaattatctagattggataacagtcttgcatgtttatcatgttacaatttaatattccatcctgcccaacccttcctctcccatcctcaaaaaagggccattttatgatgcattgcacaccctctggggaaattgatctttaaattttgagacagtataaggaaaatctggttggtgtcttacaagtgagctgacaccattttttattctgtgtatttagaatgaagtcttgaaaaaaactttataaagacatctttaatcattccaaaa

SEQ ID NO: 430549 - DNA, 2756 bp, Homo sapiens
acaagcataagtcatttccttattaattggttcaaaccagttcttacaggaactagtggtgataaatgtgggacttctgagaagtcattcattttattctttgtgccataccagagtacagtatcagctgagctgaccttactctgaggactaactcttttgctggaagcggtttctgatttacagctcttggtttctcccagacatgttggtgggagagattttggtttttaaggggttgttagatggagtaaattttctttttttttttttttttttttaactaaaaaggggtcacagaatttcagcagttctctgatttttatattttattcctcttcctatccaatccctgccttttgagtccaggtggtaagtacattttctttaacgtttttcctgcttttcttcccaaatgtgtctttttctttgggctactgtaccctgcttccagtgctgctgtccccggcataggtccatctctgcagaagccatttcaggagtacctggaggctcaacggcagaagcttcaccacaaaagcgaaatgggcacaccacaggtaagactttaatccggtttcttctcccctctgggaagtttcgggctgaaattacattcacagctctcactcacatttttaggcaaataagtgaagttggtttgccagtgttccttgacagaagttgagcgtctgtgtatgctctactgggaaatttgtctttgtcttagactagaaagtgtaacttctgtacatcttctcctaaaaacaagggtagagccaatggaaagtaatggttctgttacatagaatgagttgttgccttgatcttaaatgatgtattggtagatatacttcccaagtggattaaaaagttaaaacttacagcataacaaagtattagacttactgaggtgacttgaatatctccttttgattttcactctatttttcttttcacccatgggaaaatgataattttttaataaaccaaggctcttaccatagctgaactttaaaacttagactgtcttttctgtaaacgattctgaggcaaagggaaatgactagaagaggatgagtaaacaataacctgaaatgggaaactcgagggaagcacaggttttttttgttttgttttgtttggttcgttttttgttctttggggtttttttgagacagaatttcgctctcgttgcccaagttggagtgcaatggcgcgatcttggctcactgcaacctccgcctcccgggttcaagcgattctcctgcctcagcctcccaagtagctgtgattccaggcacgtgccaccacaccagctaattttttgtattttaatagaaacagggtttcaccgtgttagccaggctggtctcaaactgacctcagatgatccgcccgccttggcctcccaaagtgctgggattacagatgtgagccaccgcgcccggccagagcactgttttttttaatggccttgcactcttcttatggacctttgctgccctcagttgaccaaacatgacatcagaaacagatacatttgtgtgttttaaaaacagctcctaatactggaacaaaaatatttaactgtcttgacaatactcatgagtatctgcatggcgacttcagagttgagtttaatcaaagagtttattcttaggtcctagtagaagagctaacctcacactcatcccattctaaactatgtgattcaacactgattttacatccaacaaagtgaaatcttgatagttgggtgtaaaaaggagagtaatggagatttcagagtagttggggttgcttacttttcatttttaattctttaggttttgtaagttacacacttcaagcattatagatgatcctctttttactactgaactaatgaagcctttttcattgcattgttctgcatttatttctacagggagaaaactggttgtcctggatgtttgaaaagttggtcgttgtcatggtgtgttacttcatcctatctatcattaactccatggcacaaagttatgccaaacgaatccagcagcggttgaactcagaggagaaaactaaataagtagagaaagttttaaactgcagaaattggagtggatgggttctgccttaaattgggaggactccaagccgggaaggaaaattcccttttccaacctgtatcaatttttacaacttttttcctgaaagcagtttagtccatactttgcactgacatactttttccttctgtgctaaggtaaggtatccaccctcgatgcaatccaccttgtgttttcttagggtggaatgtgatgttcagcagcaaacttgcaacagactggccttctgtttgttactttcaaaaggcccacatgatacaattagagaattcccaccgcacaaaaaaagttcctaagtatgttaaatatgtcaagctttttaggcttgtcacaaatgattgctttgttttcctaagtcatcaaaatgtatataaattatctagattggataacagtcttgcatgtttatcatgttacaatttaatattccatcctgcccaacccttcctctcccatcctcaaaaaagggccattttatgatgcattgcacaccctctggggaaattgatctttaaattttgagacagtataaggaaaatctggttggtgtcttacaagtgagctgacaccattttttattctgtgtatttagaatgaagtcttgaaaaaaactttataaagacatctttaatcattccaaaa

SEQ ID NO: 430550 - DNA, 2702 bp, Homo sapiens
acaagcataagtcatttccttattaattggttcaaaccagttcttacaggaactagtggtgataaatgtgggacttctgagaagtcattcattttattctttgtgccataccagagtacagtatcagctgagctgaccttactctgaggactaactcttttgctggaagcggtttctgatttacagctcttggtttctcccagacatgttggtgggagagattttggtttttaaggggttgttagatggagtaaattttctttttttttttttttttttttaacttcctatccaatccctgccttttgagtccaggtggtaagtacattttctttaacgtttttcctgcttttcttcccaaatgtgtctttttctttgggctactgtaccctgcttccagtgctgctgtccccggcataggtccatctctgcagaagccatttcaggagtacctggaggctcaacggcagaagcttcaccacaaaagcgaaatgggcacaccacaggtaagactttaatccggtttcttctcccctctgggaagtttcgggctgaaattacattcacagctctcactcacatttttaggcaaataagtgaagttggtttgccagtgttccttgacagaagttgagcgtctgtgtatgctctactgggaaatttgtctttgtcttagactagaaagtgtaacttctgtacatcttctcctaaaaacaagggtagagccaatggaaagtaatggttctgttacatagaatgagttgttgccttgatcttaaatgatgtattggtagatatacttcccaagtggattaaaaagttaaaacttacagcataacaaagtattagacttactgaggtgacttgaatatctccttttgattttcactctatttttcttttcacccatgggaaaatgataattttttaataaaccaaggctcttaccatagctgaactttaaaacttagactgtcttttctgtaaacgattctgaggcaaagggaaatgactagaagaggatgagtaaacaataacctgaaatgggaaactcgagggaagcacaggttttttttgttttgttttgtttggttcgttttttgttctttggggtttttttgagacagaatttcgctctcgttgcccaagttggagtgcaatggcgcgatcttggctcactgcaacctccgcctcccgggttcaagcgattctcctgcctcagcctcccaagtagctgtgattccaggcacgtgccaccacaccagctaattttttgtattttaatagaaacagggtttcaccgtgttagccaggctggtctcaaactgacctcagatgatccgcccgccttggcctcccaaagtgctgggattacagatgtgagccaccgcgcccggccagagcactgttttttttaatggccttgcactcttcttatggacctttgctgccctcagttgaccaaacatgacatcagaaacagatacatttgtgtgttttaaaaacagctcctaatactggaacaaaaatatttaactgtcttgacaatactcatgagtatctgcatggcgacttcagagttgagtttaatcaaagagtttattcttaggtcctagtagaagagctaacctcacactcatcccattctaaactatgtgattcaacactgattttacatccaacaaagtgaaatcttgatagttgggtgtaaaaaggagagtaatggagatttcagagtagttggggttgcttacttttcatttttaattctttaggttttgtaagttacacacttcaagcattatagatgatcctctttttactactgaactaatgaagcctttttcattgcattgttctgcatttatttctacagggagaaaactggttgtcctggatgtttgaaaagttggtcgttgtcatggtgtgttacttcatcctatctatcattaactccatggcacaaagttatgccaaacgaatccagcagcggttgaactcagaggagaaaactaaataagtagagaaagttttaaactgcagaaattggagtggatgggttctgccttaaattgggaggactccaagccgggaaggaaaattcccttttccaacctgtatcaatttttacaacttttttcctgaaagcagtttagtccatactttgcactgacatactttttccttctgtgctaaggtaaggtatccaccctcgatgcaatccaccttgtgttttcttagggtggaatgtgatgttcagcagcaaacttgcaacagactggccttctgtttgttactttcaaaaggcccacatgatacaattagagaattcccaccgcacaaaaaaagttcctaagtatgttaaatatgtcaagctttttaggcttgtcacaaatgattgctttgttttcctaagtcatcaaaatgtatataaattatctagattggataacagtcttgcatgtttatcatgttacaatttaatattccatcctgcccaacccttcctctcccatcctcaaaaaagggccattttatgatgcattgcacaccctctggggaaattgatctttaaattttgagacagtataaggaaaatctggttggtgtcttacaagtgagctgacaccattttttattctgtgtatttagaatgaagtcttgaaaaaaactttataaagacatctttaatcattccaaaa

SEQ ID NO: 430551 - DNA, 1468 bp, Homo sapiens
atccaggaatcaactgaacgggattaaattcctgcaggtccacttactttatccagttctcatgtgatgggcacacacacatacacacacacagtgccttagccatgagtaatataagctaaaggacaccttggttttctgtgagcagattgtacacctaaggtgaatatgagacccagcttctagacacattaggatgtttgcctaacctccttttgaacaatccagtagtgatcaaggaacccatatattgctttgcagtgtaagcaggctgaaagcagaataccacatatcaatgggtgataaaattaaattgttctttggattataatatggaagtccttctttttctctctatagattccaaatcctttatttgatctggctggaataacgtgtggacactttctggtacctttttggaccttctttggtgcaaccctaattggaaaagcaataataaaaatgcatatccagaaaatttttgttataataacattcagcaagcacatagtggagcaaatggtggctttcattggtgctgtccccggcataggtccatctctgcagaagccatttcaggagtacctggaggctcaacggcagaagcttcaccacaaaagcgaaatgggcacaccacagggagaaaactggttgtcctggatgtttgaaaagttggtcgttgtcatggtgtgttacttcatcctatctatcattaactccatggcacaaagttatgccaaacgaatccagcagcggttgaactcagaggagaaaactaaataagtagagaaagttttaaactgcagaaattggagtggatgggttctgccttaaattgggaggactccaagccgggaaggaaaattcccttttccaacctgtatcaatttttacaacttttttcctgaaagcagtttagtccatactttgcactgacatactttttccttctgtgctaaggtaaggtatccaccctcgatgcaatccaccttgtgttttcttagggtggaatgtgatgttcagcagcaaacttgcaacagactggccttctgtttgttactttcaaaaggcccacatgatacaattagagaattcccaccgcacaaaaaaagttcctaagtatgttaaatatgtcaagctttttaggcttgtcacaaatgattgctttgttttcctaagtcatcaaaatgtatataaattatctagattggataacagtcttgcatgtttatcatgttacaatttaatattccatcctgcccaacccttcctctcccatcctcaaaaaagggccattttatgatgcattgcacaccctctggggaaattgatctttaaattttgagacagtataaggaaaatctggttggtgtcttacaagtgagctgacaccattttttattctgtgtatttagaatgaagtcttgaaaaaaactttataaagacatctttaatcattccaaaa

SEQ ID NO: 430552 - DNA, 1301 bp, Homo sapiens
acaagcataagtcatttccttattaattggttcaaaccagttcttacaggaactagtggtgataaatgtgggacttctgagaagtcattcattttattctttgtgccataccagagtacagtatcagctgagctgaccttactctgaggactaactcttttgctggaagcggtttctgatttacagctcttggtttctcccagacatgttggtgggagagattttggtttttaaggggttgttagatggagtaaattttctttttttttttttttttttttaactaaaaaggggtcacagaatttcagcagttctctgatttttatattttattcctcttcctatccaatccctgccttttgagtccaggtgtgctgtccccggcataggtccatctctgcagaagccatttcaggagtacctggaggctcaacggcagaagcttcaccacaaaagcgaaatgggcacaccacagggagaaaactggttgtcctggatgtttgaaaagttggtcgttgtcatggtgtgttacttcatcctatctatcattaactccatggcacaaagttatgccaaacgaatccagcagcggttgaactcagaggagaaaactaaataagtagagaaagttttaaactgcagaaattggagtggatgggttctgccttaaattgggaggactccaagccgggaaggaaaattcccttttccaacctgtatcaatttttacaacttttttcctgaaagcagtttagtccatactttgcactgacatactttttccttctgtgctaaggtaaggtatccaccctcgatgcaatccaccttgtgttttcttagggtggaatgtgatgttcagcagcaaacttgcaacagactggccttctgtttgttactttcaaaaggcccacatgatacaattagagaattcccaccgcacaaaaaaagttcctaagtatgttaaatatgtcaagctttttaggcttgtcacaaatgattgctttgttttcctaagtcatcaaaatgtatataaattatctagattggataacagtcttgcatgtttatcatgttacaatttaatattccatcctgcccaacccttcctctcccatcctcaaaaaagggccattttatgatgcattgcacaccctctggggaaattgatctttaaattttgagacagtataaggaaaatctggttggtgtcttacaagtgagctgacaccattttttattctgtgtatttagaatgaagtcttgaaaaaaactttataaagacatctttaatcattccaaaa

SEQ ID NO: 430553 - DNA, 1029 bp, Homo sapiens
gatttttaccaaccactcgctttccctgtggccttggcacactggcatgctggtctaggatcctctacgcacaacgcctgctcgcctcctccgtgtggttgccaagccaagccgcctgctaccttcatcaccaaattgcactcgctccttcctggaatcctttttcctagcttcaccaccaaatcgaaatgggcacaccacagggagaaaactggttgtcctggatgtttgaaaagttggtcgttgtcatggtgtgttacttcatcctatctatcattaactccatggcacaaagttatgccaaacgaatccagcagcggttgaactcagaggagaaaactaaataagtagagaaagttttaaactgcagaaattggagtggatgggttctgccttaaattgggaggactccaagccgggaaggaaaattcccttttccaacctgtatcaatttttacaacttttttcctgaaagcagtttagtccatactttgcactgacatactttttccttctgtgctaaggtaaggtatccaccctcgatgcaatccaccttgtgttttcttagggtggaatgtgatgttcagcagcaaacttgcaacagactggccttctgtttgttactttcaaaaggcccacatgatacaattagagaattcccaccgcacaaaaaaagttcctaagtatgttaaatatgtcaagctttttaggcttgtcacaaatgattgctttgttttcctaagtcatcaaaatgtatataaattatctagattggataacagtcttgcatgtttatcatgttacaatttaatattccatcctgcccaacccttcctctcccatcctcaaaaaagggccattttatgatgcattgcacaccctctggggaaattgatctttaaattttgagacagtataaggaaaatctggttggtgtcttacaagtgagctgacaccattttttattctgtgtatttagaatgaagtcttgaaaaaaactttataaagacatctttaatcattccaaaa

SEQ ID NO: 430554 - DNA, 1709 bp, Homo sapiens
agcggaagggacgtgagcgggttccggttgtctggagcccagcggcgggtgtgagagtccgtaaggagcagcttccaggatcctgagatccggagcagccggggtcggagcggctcctcaagagttactgatctatgaaatggcagagaatggaaaaaattgtgaccagagacgtgtagcaatgaacaaggaacatcataatggaaatttcacagacccctcttcagtgaatgaaaagaagaggagggagcgggaagaaaggcagaatattgtcctgtggagacagccgctcattaccttgcagtatttttctctggaaatccttgtaatcttgaaggaatggacctcaaaattatggcatcgtcaaagcattgtggtgtcttttttactgctgcttgctgtgcttatagctacgtattatgttgaaggagtgcatcaacagtatgtgcaacgtatagagaaacagtttcttttgtatgcctactggataggcttaggaattttgtcttctgttgggcttggaacagggctgcacacctttctgctttatctgggtccacatatagcctcagttacattagctgcttatgaatgcaattcagttaattttcccgaaccaccctatcctgatcagattatttgtccagatgaagagggcactgaaggaaccatttctttgtggagtatcatctcaaaagttaggattgaagcctgcatgtggggtatcggtacagcaatcggagagctgcctccatatttcatggccagagcagctcgcctctcaggtgctgaaccagatgatgaagagtatcaggaatttgaagagatgctggaacatgcagagtctgcacaagactttgcctcccgggccaaactggcagttcaaaaactagtacagaaagttggattttttggaattttggcctgtgcttcaattccaaatcctttatttgatctggctggaataacgtgtggacactttctggtacctttttggaccttctttggtgcaaccctaattggaaaagcaataataaaaatgcatatccagaaaatttttgttataataacattcagcaagcacatagtggagcaaatggtggctttcattggtgctgtccccggcataggtccatctctgcagaagccatttcaggagtacctggaggctcaacggcagaagcttcaccacaaaagcgaaatgggcacaccacagggagaaaactggttgtcctggatgtttgaaaagttggtcgttgtcatggtgtgttacttcatcctatctatcattaactccatggcacaaagttatgccaaacgaatccagcagcggttgaactcagaggagaaaactaaataagtagagaaagttttaaactgcagaaattggagtggatgggttctgccttaaattgggaggactccaagccgggaaggaaaattcccttttccaacctgtatcaatttttacaacttttttcctgaaagcagtttagtccatactttgcactgacatactttttccttctgtgctaaggtaaggtatccaccctcgatgcaatccaccttgtgttttcttagggtggaatgtgatgttcagcagcaaacttgcaacagactggccttctgtttgttactttcaaaaggcccacatgatacaattagagaattcccaccgcagttgaaagacgctgcgtctttcaagcgcg

SEQ ID NO: 430555 - DNA, 1006 bp, Homo sapiens
gcggattacgtaggtttgtggcctgatcagtccactgaaactacaaattgtttaccttctcctcatccgtgggggagacctgcgccacatacgcggtggtggcaacattctcctgggagtggctgaattctcctggggggtggcctaggccaggtggccagcacggcgtgtggcagtgatctcccggccatcaatttgtcctgttgaaaatagacagcaatgctcataccttttctgtgaagcatctaccctagacaatgcatgccacagtgaaagacgcgcgtctttcaactgcggttgaactcagaggagaaaactaaataagtagagaaagttttaaactgcagaaattggagtggatgggttctgccttaaattgggaggactccaagccgggaaggaaaattcccttttccaacctgtatcaatttttacaacttttttcctgaaagcagtttagtccatactttgcactgacatactttttccttctgtgctaaggtaaggtatccaccctcgatgcaatccaccttgtgttttcttagggtggaatgtgatgttcagcagcaaacttgcaacagactggccttctgtttgttactttcaaaaggcccacatgatacaattagagaattcccaccgcacaaaaaaagttcctaagtatgttaaatatgtcaagctttttaggcttgtcacaaatgattgctttgttttcctaagtcatcaaaatgtatataaattatctagattggataacagtcttgcatgtttatcatgttacaatttaatattccatcctgcccaacccttcctctcccatcctcaaaaaagggccattttatgatgcattgcacaccctctggggaaattgatctttaaattttgagacagtataaggaaaatctggttggtgtcttacaagtgagctgacaccattttttattctgtgtatttagaatgaagtcttgaaaaaaactttataaagacatctttaatcattccaaaa

SEQ ID NO: 430556 - DNA, 1692 bp, Homo sapiens
agcggaagggacgtgagcgggttccggttgtctggagcccagcggcgggtgtgagagtccgtaaggagcagcttccaggatcctgagatccggagcagccggggtcggagcggctcctcaagagttactgatctatgaaatggcagagaatggaaaaaattgtgaccagagacgtgtagcaatgaacaaggaacatcataatggaaatttcacagacccctcttcagtgaatgaaaagaagaggagggagcgggaagaaaggcagaatattgtcctgtggagacagccgctcattaccttgcagtatttttctctggaaatccttgtaatcttgaaggaatggacctcaaaattatggcatcgtcaaagcattgtggtgtcttttttactgctgcttgctgtgcttatagctacgtattatgttgaaggagtgcatcaacagtatgtgcaacgtatagagaaacagtttcttttgtatgcctactggataggcttaggaattttgtcttctgttgggcttggaacagggctgcacacctttctgctttatctgggtccacatatagcctcagttacattagctgcttatgaatgcaattcagttaattttcccgaaccaccctatcctgatcagattatttgtccagatgaagagggcactgaaggaaccatttctttgtggagtatcatctcaaaagttaggattgaagcctgcatgtggggtatcggtacagcaatcggagagctgcctccatatttcatggccagagcagctcgcctctcaggtgctgaaccagatgatgaagagtatcaggaatttgaagagatgctggaacatgcagagtctgcacaagactttgcctcccgggccaaactggcagttcaaaaactagtacagaaagttggattttttggaattttggcctgtgcttcaattccaaatcctttatttgatctggctggaataacgtgtggacactttctggtacctttttggaccttctttggtgcaaccctaattggaaaagcaataataaaaatgcatatccagaaaatttttgttataataacattcagcaagcacatagtggagcaaatggtggctttcattggtgctgtccccggcataggtccatctctgcagaagccatttcaggagtacctggaggctcaacggcagaagcttcaccacaaaagcgaaatgggcacaccacagggagaaaactggttgtcctggatgtttgaaaagttggtcgttgtcatggtgtgttacttcatcctatctatcattaactccatggcacaaagttatgccaaacgaatccagcagcggttgaactcagaggagaaaactaaataagtagagaaagttttaaactgcagaaattggagtggatgggttctgccttaaattgggaggactccaagccgggaaggaaaattcccttttccaacctgtatcaatttttacaacttttttcctgaaagcagtttagtccatactttgcactgacatactttttccttctgtgctaaggtaaggtatccaccctcgatgcaatccaccttgtgttttcttagggtggaatgtgatgtctcaacggcggtctagatactgatggccatttaattgtgttgtttatttagtactgagttataagggttataggaatatttttgtatgtcagttct

SEQ ID NO: 430557 - DNA, 3022 bp, Homo sapiens
agcggaagggacgtgagcgggttccggttgtctggagcccagcggcgggtgtgagagtccgtaaggagcagcttccaggatcctgagatccggagcagccggggtcggagcggctcctcaagagttactgatctatgaaatggcagagaatggaaaaaattgtgaccagagacgtgtagcaatgaacaaggaacatcataatggaaatttcacagacccctcttcagtgaatgaaaagaagaggagggagcgggaagaaaggcagaatattgtcctgtggagacagccgctcattaccttgcagtatttttctctggaaatccttgtaatcttgaaggaatggacctcaaaattatggcatcgtcaaagcattgtggtgtcttttttactgctgcttgctgtgcttatagctacgtattatgttgaaggagtgcatcaacagtatgtgcaacgtatagagaaacagtttcttttgtatgcctactggataggcttaggaattttgtcttctgttgggcttggaacagggctgcacacctttctgctttatctgggtccacatatagcctcagttacattagctgcttatgaatgcaattcagttaattttcccgaaccaccctatcctgatcagattatttgtccagatgaagagggcactgaaggaaccatttctttgtggagtatcatctcaaaagttaggattgaagcctgcatgtggggtatcggtacagcaatcggagagctgcctccatatttcatggccagagcagctcgcctctcaggtgctgaaccagatgatgaagagtatcaggaatttgaagagatgctggaacatgcagagtctgcacaagactttgcctcccgggccaaactggcagttcaaaaactagtacagaaagttggattttttggaattttggcctgtgcttcaattccaaatcctttatttgatctggctggaataacgtgtggacactttctggtacctttttggaccttctttggtgcaaccctaattggaaaagcaataataaaaatgcatatccagaaaatttttgttataataacattcagcaagcacatagtggagcaaatggtggctttcattggtgctgtccccggcataggtccatctctgcagaagccatttcaggagtacctggaggctcaacggcagaagcttcaccacaaaagcgaaatgggcacaccacaggtaagactttaatccggtttcttctcccctctgggaagtttcgggctgaaattacattcacagctctcactcacatttttaggcaaataagtgaagttggtttgccagtgttccttgacagaagttgagcgtctgtgtatgctctactgggaaatttgtctttgtcttagactagaaagtgtaacttctgtacatcttctcctaaaaacaagggtagagccaatggaaagtaatggttctgttacatagaatgagttgttgccttgatcttaaatgatgtattggtagatatacttcccaagtggattaaaaagttaaaacttacagcataacaaagtattagacttactgaggtgacttgaatatctccttttgattttcactctatttttcttttcacccatgggaaaatgataattttttaataaaccaaggctcttaccatagctgaactttaaaacttagactgtcttttctgtaaacgattctgaggcaaagggaaatgactagaagaggatgagtaaacaataacctgaaatgggaaactcgagggaagcacaggttttttttgttttgttttgtttggttcgttttttgttctttggggtttttttgagacagaatttcgctctcgttgcccaagttggagtgcaatggcgcgatcttggctcactgcaacctccgcctcccgggttcaagcgattctcctgcctcagcctcccaagtagctgtgattccaggcacgtgccaccacaccagctaattttttgtattttaatagaaacagggtttcaccgtgttagccaggctggtctcaaactgacctcagatgatccgcccgccttggcctcccaaagtgctgggattacagatgtgagccaccgcgcccggccagagcactgttttttttaatggccttgcactcttcttatggacctttgctgccctcagttgaccaaacatgacatcagaaacagatacatttgtgtgttttaaaaacagctcctaatactggaacaaaaatatttaactgtcttgacaatactcatgagtatctgcatggcgacttcagagttgagtttaatcaaagagtttattcttaggtcctagtagaagagctaacctcacactcatcccattctaaactatgtgattcaacactgattttacatccaacaaagtgaaatcttgatagttgggtgtaaaaaggagagtaatggagatttcagagtagttggggttgcttacttttcatttttaattctttaggttttgtaagttacacacttcaagcattatagatgatcctctttttactactgaactaatgaagcctttttcattgcattgttctgcatttatttctacagggagaaaactggttgtcctggatgtttgaaaagttggtcgttgtcatggtgtgttacttcatcctatctatcattaactccatggcacaaagttatgccaaacgaatccagcagcggttgaactcagaggagaaaactaaataagtagagaaagttttaaactgcagaaattggagtggatgggttctgccttaaattgggaggactccaagccgggaaggaaaattcccttttccaacctgtatcaatttttacaacttttttcctgaaagcagttttctccctgtggtgtgcccatttcgcttttgtggtgaagcttctgccgttgagcctccaggtactcctgaaatggcttctgcagagatggacctatgccggggacagcaccaatgaaagccaccatttgctccactatgtgcttgctgaatgttatgtc

SEQ ID NO: 430558 - DNA, 2964 bp, Homo sapiens
agcggaagggacgtgagcgggttccggttgtctggagcccagcggcgggtgtgagagtccgtaaggagcagcttccaggatcctgagatccggagcagccggggtcggagcggctcctcaagagttactgatctatgaaatggcagagaatggaaaaaattgtgaccagagacgtgtagcaatgaacaaggaacatcataatggaaatttcacagacccctcttcagtgaatgaaaagaagaggagggagcgggaagaaaggcagaatattgtcctgtggagacagccgctcattaccttgcagtatttttctctggaaatccttgtaatcttgaaggaatggacctcaaaattatggcatcgtcaaagcattgtggtgtcttttttactgctgcttgctgtgcttatagctacgtattatgttgaaggagtgcatcaacagtatgtgcaacgtatagagaaacagtttcttttgtatgcctactggataggcttaggaattttgtcttctgttgggcttggaacagggctgcacacctttctgctttatctgggtccacatatagcctcagttacattagctgcttatgaatgcaattcagttaattttcccgaaccaccctatcctgatcagattatttgtccagatgaagagggcactgaaggaaccatttctttgtggagtatcatctcaaaagttaggattgaagcctgcatgtggggtatcggtacagcaatcggagagctgcctccatatttcatggccagagcagctcgcctctcaggtgctgaaccagatgatgaagagtatcaggaatttgaagagatgctggaacatgcagagtctgcacaagactttgcctcccgggccaaactggcagttcaaaaactagtacagaaagttggattttttggaattttggcctgtgcttcaattccaaatcctttatttgatctggctggaataacgtgtggacactttctggtacctttttggaccttctttggtgcaaccctaattggaaaagcaataataaaaatgcatatccagaaaatttttgttataataacattcagcaagcacatagtggagcaaatggtggctttcattggtgctgtccccggcataggtccatctctgcagaagccatttcaggagtacctggaggctcaacggcagaagcttcaccacaaaagcgaaatgggcacaccacaggtaagactttaatccggtttcttctcccctctgggaagtttcgggctgaaattacattcacagctctcactcacatttttaggcaaataagtgaagttggtttgccagtgttccttgacagaagttgagcgtctgtgtatgctctactgggaaatttgtctttgtcttagactagaaagtgtaacttctgtacatcttctcctaaaaacaagggtagagccaatggaaagtaatggttctgttacatagaatgagttgttgccttgatcttaaatgatgtattggtagatatacttcccaagtggattaaaaagttaaaacttacagcataacaaagtattagacttactgaggtgacttgaatatctccttttgattttcactctatttttcttttcacccatgggaaaatgataattttttaataaaccaaggctcttaccatagctgaactttaaaacttagactgtcttttctgtaaacgattctgaggcaaagggaaatgactagaagaggatgagtaaacaataacctgaaatgggaaactcgagggaagcacaggttttttttgttttgttttgtttggttcgttttttgttctttggggtttttttgagacagaatttcgctctcgttgcccaagttggagtgcaatggcgcgatcttggctcactgcaacctccgcctcccgggttcaagcgattctcctgcctcagcctcccaagtagctgtgattccaggcacgtgccaccacaccagctaattttttgtattttaatagaaacagggtttcaccgtgttagccaggctggtctcaaactgacctcagatgatccgcccgccttggcctcccaaagtgctgggattacagatgtgagccaccgcgcccggccagagcactgttttttttaatggccttgcactcttcttatggacctttgctgccctcagttgaccaaacatgacatcagaaacagatacatttgtgtgttttaaaaacagctcctaatactggaacaaaaatatttaactgtcttgacaatactcatgagtatctgcatggcgacttcagagttgagtttaatcaaagagtttattcttaggtcctagtagaagagctaacctcacactcatcccattctaaactatgtgattcaacactgattttacatccaacaaagtgaaatcttgatagttgggtgtaaaaaggagagtaatggagatttcagagtagttggggttgcttacttttcatttttaattctttaggttttgtaagttacacacttcaagcattatagatgatcctctttttactactgaactaatgaagcctttttcattgcattgttctgcatttatttctacagggagaaaactggttgtcctggatgtttgaaaagttggtcgttgtcatggtgtgttacttcatcctatctatcattaactccatggcacaaagttatgccaaacgaatccagcagcggttgaactcagaggagaaaactaaataagtagagaaagttttaaactgcagaaattggagtggatgggttctgccttaaataggaagaatcagcgggacgaactcccttgcaccggaccatcaaacacgaaactgaagagtagccaactgcccgaacatacctcggcaaggaggacaccgagcaccacgggcaccaggcgaggagccccacgtaaaaggaccttgacatgccgagatcccaaccacgaccgcggcccggccc

SEQ ID NO: 430559 - DNA, 1921 bp, Homo sapiens
agcggaagggacgtgagcgggttccggttgtctggagcccagcggcgggtgtgagagtccgtaaggagcagcttccaggatcctgagatccggagcagccggggtcggagcggctcctcaagagttactgatctatgaaatggcagagaatggaaaaaattgtgaccagagacgtgtagcaatgaacaaggaacatcataatggaaatttcacagacccctcttcagtgaatgaaaagaagaggagggagcgggaagaaaggcagaatattgtcctgtggagacagccgctcattaccttgcagtatttttctctggaaatccttgtaatcttgaaggaatggacctcaaaattatggcatcgtcaaagcattgtggtgtcttttttactgctgcttgctgtgcttatagctacgtattatgttgaaggagtgcatcaacagtatgtgcaacgtatagagaaacagtttcttttgtatgcctactggataggcttaggaattttgtcttctgttgggcttggaacagggctgcacacctttctgctttatctgggtccacatatagcctcagttacattagctgcttatgaatgcaattcagttaattttcccgaaccaccctatcctgatcagattatttgtccagatgaagagggcactgaaggaaccatttctttgtggagtatcatctcaaaagttaggattgaagcctgcatgtggggtatcggtacagcaatcggagagctgcctccatatttcatggccagagcagctcgcctctcaggtgctgaaccagatgatgaagagtatcaggaatttgaagagatgctggaacatgcagagtctgcacaagactttgcctcccgggccaaactggcagttcaaaaactagtacagaaagttggattttttggaattttggcctgtgcttcaattccaaatcctttatttgatctggctggaataacgtgtggacactttctggtacctttttggaccttctttggtgcaaccctaattggaaaagcaataataaaaatgcatatccagaaaatttttgttataataacattcagcaagcacatagtggagcaaatggtggctttcattggtgctgtccccggcataggtccatctctgcagaagccatttcaggagtacctggaggctcaacggcagaagcttcaccacaaaagcgaaatgggcacaccacaggtaagactttaatccggtttcttctcccctctgggaagtttcgggctgaaattacattcacagctctcactcacatttttaggcaaataagtgaagttggtttgccagtgttccttgacagaagttgagcgtctgtgtatgctctactgggaaatttgtctttgtcttagactagaaagtgtaacttctgtacatcttctcctaaaaacaagggtagagccaatggaaagtaatggttctgttacatagaatgagttgttgccttgatcttaaatgatgtattggtagatatacttcccaagtggattaaaaagttaaaacttacagcataacaaagtattagacttactgaggtgacttgaatatctccttttgattttcactctatttttcttttcacccatgggaaaatgataattttttaataaaccaaggctcttaccatagctgaactttaaaacttagactgtcttttctgtaaacgattctgaggcaaagggaaatgactagaagaggatgagtaaacaataacctgaaatgggaaactcgagggaagcacaggttttttttgttttgttttgtttggttcgttttttgttctttggggtttttttgagacagaatttcgctctcgttgcccaagttggagtgagccaagactgtgccactgcactctagcctgggcaacagaacaagactcctcca

SEQ ID NO: 430560 - DNA, 1924 bp, Homo sapiens
agcggaagggacgtgagcgggttccggttgtctggagcccagcggcgggtgtgagagtccgtaaggagcagcttccaggatcctgagatccggagcagccggggtcggagcggctcctcaagagttactgatctatgaaatggcagagaatggaaaaaattgtgaccagagacgtgtagcaatgaacaaggaacatcataatggaaatttcacagacccctcttcagtgaatgaaaagaagaggagggagcgggaagaaaggcagaatattgtcctgtggagacagccgctcattaccttgcagtatttttctctggaaatccttgtaatcttgaaggaatggacctcaaaattatggcatcgtcaaagcattgtggtgtcttttttactgctgcttgctgtgcttatagctacgtattatgttgaaggagtgcatcaacagtatgtgcaacgtatagagaaacagtttcttttgtatgcctactggataggcttaggaattttgtcttctgttgggcttggaacagggctgcacacctttctgctttatctgggtccacatatagcctcagttacattagctgcttatgaatgcaattcagttaattttcccgaaccaccctatcctgatcagattatttgtccagatgaagagggcactgaaggaaccatttctttgtggagtatcatctcaaaagttaggattgaagcctgcatgtggggtatcggtacagcaatcggagagctgcctccatatttcatggccagagcagctcgcctctcaggtgctgaaccagatgatgaagagtatcaggaatttgaagagatgctggaacatgcagagtctgcacaagactttgcctcccgggccaaactggcagttcaaaaactagtacagaaagttggattttttggaattttggcctgtgcttcaattccaaatcctttatttgatctggctggaataacgtgtggacactttctggtacctttttggaccttctttggtgcaaccctaattggaaaagcaataataaaaatgcatatccagaaaatttttgttataataacattcagcaagcacatagtggagcaaatggtggctttcattggtgctgtccccggcataggtccatctctgcagaagccatttcaggagtacctggaggctcaacggcagaagcttcaccacaaaagcgaaatgggcacaccacaggtaagactttaatccggtttcttctcccctctgggaagtttcgggctgaaattacattcacagctctcactcacatttttaggcaaataagtgaagttggtttgccagtgttccttgacagaagttgagcgtctgtgtatgctctactgggaaatttgtctttgtcttagactagaaagtgtaacttctgtacatcttctcctaaaaacaagggtagagccaatggaaagtaatggttctgttacatagaatgagttgttgccttgatcttaaatgatgtattggtagatatacttcccaagtggattaaaaagttaaaacttacagcataacaaagtattagacttactgaggtgacttgaatatctccttttgattttcactctatttttcttttcacccatgggaaaatgataattttttaataaaccaaggctcttaccatagctgaactttaaaacttagactgtcttttctgtaaacgattctgaggcaaagggaaatgactagaagaggatgagtaaacaataacctgaaatgggaaactcgagggaagcacaggttttttttgttttgttttgtttggttcgttttttgttctttggggtttttttgagacagaatttcgctctcgttgcccaagttggagtgagccaaaatcacaccattgctctctaacctgggagacaagagcgaaactccatctca

SEQ ID NO: 430561 - DNA, 864 bp, Homo sapiens
tcgaaagcagcctgcggaggactgatgcaactttcagacacaccagaccagaatgtttgcagcacagcgtgcaaagagtttgggcttcccttcgaagggctgaggaatgactgaaaggagagcgagccccgggctctgctggcacctgtctgtccggctctgaaagaccgcagtgattagcttggagattcacctggcccttttctaaggccatagtgtatcatgtcaaccctcgttcacgtgcaggttttaggtgatgaaaattcccttttccaacctgtatcaatttttacaacttttttcctgaaagcagtttagtccatactttgcactgacatactttttccttctgtgctaaggtaaggtatccaccctcgatgcaatccaccttgtgttttcttagggtggaatgtgatgttcagcagcaaacttgcaacagactggccttctgtttgttactttcaaaaggcccacatgatacaattagagaattcccaccgcacaaaaaaagttcctaagtatgttaaatatgtcaagctttttaggcttgtcacaaatgattgctttgttttcctaagtcatcaaaatgtatataaattatctagattggataacagtcttgcatgtttatcatgttacaatttaatattccatcctgcccaacccttcctctcccatcctcaaaaaagggccattttatgatgcattgcacaccctctggggaaattgatctttaaattttgagacagtataaggaaaatctggttggtgtcttacaagtgagctgacaccattttttattctgtgtatttagaatgaagtcttgaaaaaaactttataaagacatctttaatcattccaaaa

SEQ ID NO: 430562 - DNA, 1153 bp, Homo sapiens
acaagcataagtcatttccttattaattggttcaaaccagttcttacaggaactagtggtgataaatgtgggacttctgagaagtcattcattttattctttgtgccataccagagtacagtatcagctgagctgaccttactctgaggactaactcttttgctggaagcggtttctgatttacagctcttggtttctcccagacatgttggtgggagagattttggtttttaaggggttgttagatggagtaaattttctttttttttttttttttttttaactaaaaaggggtcacagaatttcagcagttctctgatttttatattttattcctcttcctatccaatccctgccttttgagtccaggtggtaagtacattttctttaacgtttttcctgcttttcttcccaaatgtgtctttttctttgggctactgtaccctgcttccagtgctgctgtccccggcataggtccatctctgcagaagccatttcaggagtacctggaggctcaacggcagaagcttcaccacaaaagcgaaatgggcacaccacagggagaaaactggttgtcctggatgtttgaaaagttggtcgttgtcatggtgtgttacttcatcctatctatcattaactccatggcacaaagttatgccaaacgaatccagcagcggttgaactcagaggagaaaactaaataagtagagaaagttttaaactgcagaaattggagtggatgggttctgccttaaattgggaggactccaagccgggaaggaaaattcccttttccaacctgtatcaatttttacaacttttttcctgaaagcagtttagtccatactttgcactgacatactttttccttctgtgctaaggtaaggtatccaccctcgatgcaatccaccttgtgttttcttagggtggaatgtgatgttcagcagcaaacttgcaacagactggccttctgtttgttactttcaaaaggcccacatgatacaattagagaattcccaccgcacaaaaaaagttcctaagtatgttaaatatgtcaagctttttaggcttgtcacaaatgattgctttgttttcctaagtcatcaaaatgtatataaattatctagattggataacagtcttgcatgtttat

SEQ ID NO: 430563 - DNA, 917 bp, Homo sapiens
acaagcataagtcatttccttattaattggttcaaaccagttcttacaggaactagtggtgataaatgtgggacttctgagaagtcattcattttattctttgtgccataccagagtacagtatcagctgagctgaccttactctgaggactaactcttttgctggaagcggtttctgatttacagctcttggtttctcccagacatgttggtgggagagattttggtttttaaggggttgttagatggagtaaattttctttttttttttttttttttttaactaaaaaggggtcacagaatttcagcagttctctgatttttatattttattcctcttcctatccaatccctgccttttgagtccaggtgtgctgtccccggcataggtccatctctgcagaagccatttcaggagtacctggaggctcaacggcagaagcttcaccacaaaagcgaaatgggcacaccacagggagaaaactggttgtcctggatgtttgaaaagttggtcgttgtcatggtgtgttacttcatcctatctatcattaactccatggcacaaagttatgccaaacgaatccagcagcggttgaactcagaggagaaaactaaataagtagagaaagttttaaactgcagaaattggagtggatgggttctgccttaaattgggaggactccaagccgggaaggaaaattcccttttccaacctgtatcaatttttacaacttttttcctgaaagcagttttgccattttgtgccggaaatttttttctttgggggaagggaggggtcccccttggaaacaccacctgttttttttagggggaatgtggtgtcaaaaaaaattttaaaaaaaggctttttttggttttttaaagagcccctattaattttatatttcccccccca

SEQ ID NO: 430564 - DNA, 183 bp, Homo sapiens
aagcttaacgaggagtttctgtgatgtgaagaggagtttttgtttttttgttttttggtctgtttttgttcatgtagatgtccccagaatcctgcctttaccactccatatcatacttcttacattgctctttttttctcacagtgctattcaccttctgacattccatataacttacttatt

SEQ ID NO: 430565 - DNA, 4048 bp, Homo sapiens
tttgaagtgctagaatagtttagaaagaaatgttacagatgtatgtttatagttttaatcattgcctcagtgctttcttgtggcagcgtgacaggtataaggagaggggcactggagattgtatttctgatgtcttgaatgtcaagtgtgaaaagtaaccaagattgctttgcagctttgtgagatcaacatcatgaatttgttttcatttcctctggttggaagtttcctaggttagaagctgaggtttcagttactttaaatatggaatttgggaacagggattgaggctttctagcacagtaaatgtgactgaataccctttctaaactaagtggggcacaatgattttttttccttccattttttttttacatgacactttatttctttcacatgttgacatggcttgtattacattctaaatttcatctgtttctgtaactttagctgtgtctataacagatagagcatcagtcaaactagagtggacagggagaaaatgctctactggggaagcactctggaatcttctgattaagtcatttgcaaaagattaatagccataagccttactcttaatggatctgccatttcagtttcaatggcttttgaggaaaaaggagtcatttaaggaaggagataggaagtgtaggccgatccatccacttttcttagtctcccaattttaagagaccctttcttgcacaaaattttttgtaactttccataagtaaagaggaaggtaatggagccgtagaaatgtcaacccatcaaagactagtttgtcgtgtcattacaacaaggcatttagggaacatctttccttaattttactaatagaccaaccaaggaagccttctgaatcgctagtaagattcagctctgggtgattcttcatttctaatggctcatagtgattacagtttatgttaataatcactcctacttctgtcaacctccagcaagagtaaattgatagcaggataaattaaaagtctgatcttaatgtcataaatgtgactagaatatggtactaactttttcgggtctagatagctggaatgaggcttgcaaacagtgttatctggagagagcttgctggtctaacaactttgtgtgataatttggcatctgattagagagcatgagtctgataaattttataatccacacagagatcatgctgtggttggacacatcatttaataatatttagcatgatataatattccattttctctacaggagcacagactctttctcatactggattattttacctttgacagtcatttttcaatgacagtaattttaaataaagcatcgtgtgcttatagaacctgtgcttgagtaaaaatagtcttcaaataaaaataatgaagtaaatttttacttaggccatgcttaattggaagcatagaacttaaattgagaaaaaaatccatatgatagattttgtttttctcatgcttcccttttgaataatagcaaataatgcagagtaatggttctaagagttcagggtagatgaagtctgtaggttttagaagtatagagttgaaaagaacctccaagaggacttatttaatgagtgaaataaatgtccttagatagatattgtccctaaactcttttctattgaaagtttatagtattgaaaatttgatgattattagtacctagtataaatcaacattcatctgatgttctctttttagatagccaagttataacttttttgaaaagacattattggactaagttagtaggtcagccttttcctttgatagtgtgtactcttatctgtcacccaaccttctccacaccctcttctcttcattcagttgtggacagcagtaattttttcaggacctttgcttcttagaggaaatacatttttccttatttatatttttaaaagatgtttctattacattatatatagcaagagatctattaaggatccagaaaatcttaacctgtagaggatatgagttcctcatcataagaattagtttccttgagggttctttagtatattctatttacacagtttatgcataagtaaactctgtggccgatgtacataaaaaaacctatcacttttatgctcattcatcctcctaattcagtgtctgggtcatgagatgtttggttcatagcttcaaaaactgttcaagaagactgatttcagttctctctatgttgatcttccagttgaatctggagtcttctgattgtggaaaggagtagcagatcacattatactgaaaattgtccttttcattgagaaataaaggttgactgagctacctaaagtcactttcctttggactgtaagccttagagagaacaataatacctttgcttttcttgaggtagtattagaaaactctagttcccattgataggataaacttgttttctcgtttcatggtctttttatagaaaacagtcacaaaatcttgacatttggcatccctgaaaagctcaagtggccttttcaagtagggtatcatgtagtattctgcaggtttacagtcagtatcctgcaaggaaaggtgacaaacttcctgtgaagttaggaagaaatattagtaacccacacacttgaagtgagttttccattttaccttgtagaaattgtactagagatagaacaaatgaaattagttttcttttccaggtatatcctgtgagataccagcacagagtattttctctgagttctctcagggttaaagctcagtgagcttttcttttctctttggtagtgtggaaccatttgtaccgtagaaagaatagctggaaatatggaactccaatgtggcaatacagtaataaacagaaggaatgagtcagtaggataatatattcgagtgatttctgtatatttcagttataatgttttttatatagtgtatatttcagttatttcagttataatgtgttttagaatgtggatttaagccaccttctcaccctttgcaccagtagctttgttaaaacattttattatgatcaaataacaagcctgttgcttttaagtaatctaagtattaacagaaggtaagtcttcaacttctccctgttctcacctgggccaagatcaattttctaaataaaaaatagctttgtaatttgtctccaacaaagaatgggaaatggaagggaacacaaaactgtggtcctgacaatactaattctacccgttttcaaataagaataattaaacttataaagtgatatactgattatttttgtgttactctcccttttttttgtttaaagtcaaattccagaagtaaaaatctttatcatactgttttcctcttactaaaactggaagggtaaaatagaaagttcagcaacatcagaaaatgttgtatttaaaataatatggagaataggggttttaagtacataaaccatattggcttccttgtaggtttacttttagtatataacatgaatatgtagtgcttctttttacaataatcaaagtcatagctccaagatattgacctctttctcaatctataacctttgtaggcatgcatttataccagcatgttttataaattatgagtttctatctgtgtccatgaagtcttactagttttcacttaaacttttgtgggttgttaagaagaattaaagtgattcataacttcacgcttgaacctgggaggtggaggttgcagtgagccgagatcatgccattgcactccagcctgggcaacaagagtgaaactctgtcttaaataaataaataaagtggttcataacatcagatgaagaaggaggtgagtgatatgttaaatgatcagaaacttggcattacattatttccaggaccatttccctaccaaagctgtgtatttttcatttcttcatggcactgtgctgttaatttctgttaacatttgtgctaaaatggagtgtaatttttacatataagtgttagaattttagctatcttagttgaaacacaaaaagttgttactgatccaataaaattatcaaaggccaacaaaaactattt

SEQ ID NO: 430566 - DNA, 2197 bp, Homo sapiens
cgctcgcattctacgtaacggacggcggaggctacgtgaagagaggcgcggcgtgactgagctacggttctggctgcgtcctagaggcatccggggcagtaaaaccgctgcgatcgcggaggcggcggccaggccgagaggcaggccgggcaggggtgtcggacgcagggcgctgggccgggtttcggcttcggccacagctttttttctcaaggtgcaatgaaagccttccacactttctgtgttgtccttctggtgtttgggagtgtctctgaagccaagtttgatgattttgaggatgaggaggacatagtagagtatgatgataatgacttcgctgaatttgaggatgtcatggaagactctgttactgaatctcctcaacgggtcataatcactgaagatgatgaagatgagaccactgtggagttggaagggcaggatgaaaaccaagaaggagattttgaagatgcagatacccaggagggagatactgagagtgaaccatatgatgatgaagaatttgaaggttatgaagacaaaccagatacttcttctagcaaaaataaagacccaataacgattgttgatgttcctgcacacctccagaacagctgggagagttattatctagaaattttgatggtgactggtctgcttgcttatatcatgaattacatcattgggaagaataaaaacagtcgccttgcacaggcctggtttaacactcatagggagcttttggagagcaactttactttagtgggggatgatggaactaacaaagaagccacaagcacaggaaagttgaaccaggagaatgagcacatctataacctgtggtgttctggtcgagtgtgctgtgagggcatgcttatccagctgaggttcctcaagagacaagacttactgaatgtcctggcccggatgatgaggccagtgagtgatcaagtgcaaataaaagtaaccatgaatgatgaagacatggatacctacgtatttgctgttggcacacggaaagccttggtgcgactacagaaagagatgcaggatttgagtgagttttgtagtgataaacctaagtctggagcaaagtatggactgccggactctttggccatcctgtcagagatgggagaagtcacagacggaatgatggatacaaagatggttcactttcttacacactatgctgacaagattgaatctgttcatttttcagaccagttctctggtccaaaaattatgcaagaggaaggtcagcctttaaagctacctgacactaagaggacactgttgtttacatttaatgtgcctggctcaggtaacacttacccaaaggatatggaggcactgctacccctgatgaacatggtgatttattctattgataaagccaaaaagttccgactcaacagagaaggcaaacaaaaagcagataagaaccgtgcccgagtagaagagaacttcttgaaactgacacatgtgcaaagacaggaagcagcacagtctcggcgggaggagaaaaaaagagcagagaaggagcgaatcatgaatgaggaagatcctgagaaacagcgcaggctggaggaggctgcattgaggcgtgagcaaaagaagttggaaaagaagcaaatgaaaatgaaacaaatcaaagtgaaagccatgtaaagccatcccagagatttgagttctgatgccacctgtaagctctgaattcacaggaaacatgaaaaacgccagtccatttctcaaccttaaatttcagacagtcttgggcaactgagaaatccttatttcatcatctactctgtttggggtttggggttttacagagattgaagatacctggaaagggctctgtttcaagaatttttttttccagataatcaaattattttgattattttataaaaggaatgatctatgaaatctgtgtaggttttaaatattttaaaaattataatacaaatcatcagtgcttttagtacttcagtgtttaaagaaataccatgaaatttataggtagataaccagattgttgctttttgtttaaaccaagcagttgaaatggctataaagactgactctaaaccaagattctgcaaataatgattggaattgcacaataaacattgcttgatgttttcttgtatgtctacattaaacttgagaaaaagtaaaaattagaacactg

SEQ ID NO: 430567 - DNA, 1760 bp, Homo sapiens
  misc_feature (1670)..(1670): n is a, c, g, or t
cgctcgcattctacgtaacggacggcggaggctacgtgaagagaggcgcggcgtgactgagctacggttctggctgcgtcctagaggcatccggggcagtaaaaccgctgcgatcgcggaggcggcggccaggccgagaggcaggccgggcaggggtgtcggacgcagggcgctgggccgggtttcggcttcggccacagctttttttctcaaggtgcaatgaaagccttccacactttctgtgttgtccttctggtgtttgggagtgtctctgaagccaagtttgatgattttgaggatgaggaggacatagtagagtatgatgataatgacttcgctgaatttgaggatgtcatggaagactctgttactgaatctcctcaacgggtcataatcactgaagatgatgaagatgagaccactgtggagttggaagggcaggatgaaaaccaagaaggagattttgaagatgcagatacccaggagggagatactgagagtgaaccatatgatgatgaagaatttgaaggttatgaagacaaaccagatacttcttctagcaaaaataaagacccaataacgattgttgatgttcctgcacacctccagaacagctgggagagttattatctagaaattttgatggtgactggtctgcttgcttatatcatgaattacatcattgggaagaataaaaacagtcgccttgcacaggcctggtttaacactcatagggagcttttggagagcaactttactttagtgggggatgatggaactaacaaagaagccacaagcacaggaaagttgaaccaggagaatgagcacatctataacctgtggtgttctggtcgagtgtgctgtgagggcatgcttatccagctgaggttcctcaagagacaagacttactgaatgtcctggcccggatgatgaggccagtgagtgatcaagtgcaaataaaagtaaccatgaatgatgaagacatggatacctacgtatttgctgttggcacacggaaagccttggtgcgactacagaaagagatgcaggatttgagtgagttttgtagtgataaacctaagtctggagcaaagtatggactgccggactctttggccatcctgtcagagatgggagaagtcacagacggaatgatggatacaaagatggttcactttcttacacactatgctgacaagattgaatctgttcatttttcagaccagttctctggtccaaaaattatgcaagaggaaggtcagcctttaaagctacctgacactaagaggacactgttgtttacatttaatgtgcctggctcaggtaacacttacccaaaggatatggaggcactgctacccctgatgaacatggtgatttattctattgataaagccaaaaagttccgactcaacagagaaggcaaacaaaaagcagataagaaccgtgcccgagtagaagagaacttcttgaaactgacacatgtgcaaagacaggaagcagcacagtctcggcgggaggagaaaaaaagagcagagaaggagcgaatcatgaatgaggaagatcctgagaaacagcgcaggctggaggttagacaaacttatcactggggtaaaactacgatttgtaaggatgactgcttgtgttctgttggttgttaaggtaatcnttgtaggctaaaagtttagcattttctcaacatttgggacattgtatcaattgataacactataaagaagaataaataatccttcctgtt

SEQ ID NO: 430568 - DNA, 3240 bp, Homo sapiens
cgctcgcattctacgtaacggacggcggaggctacgtgaagagaggcgcggcgtgactgagctacggttctggctgcgtcctagaggcatccggggcagtaaaaccgctgcgatcgcggaggcggcggccaggccgagaggcaggccgggcaggggtgtcggacgcagggcgctgggccgggtttcggcttcggccacagctttttttctcaaggtgcaatgaaagccttccacactttctgtgttgtccttctggtgtttgggagtgtctctgaagccaagtttgatgattttgaggatgaggaggacatagtagagtatgatgataatgacttcgctgaatttgaggatgtcatggaagactctgttactgaatctcctcaacgggtcataatcactgaagatgatgaagatgagaccactgtggagttggaagggcaggatgaaaaccaagaaggagattttgaagatgcagatacccaggagggagatactgagagtgaaccatatgatgatgaagaatttgaaggttatgaagacaaaccagatacttcttctagcaaaaataaagacccaataacgattgttgatgttcctgcacacctccagaacagctgggagagttattatctagaaattttgatggtgactggtctgcttgcttatatcatgaattacatcattgggaagaataaaaacagtcgccttgcacaggcctggtttaacactcatagggagcttttggagagcaactttactttagtgggggatgatggaactaacaaagaagccacaagcacaggaaagttgaaccaggagaatgagcacatctataacctgtggtgttctggtcgagtgtgctgtgagggcatgcttatccagctgaggttcctcaagagacaagacttactgaatgtcctggcccggatgatgaggccagtgagtgatcaagtgcaaataaaagtaaccatgaatgatgaagacatggatacctacgtatttgctgttggcacacggaaagccttggtgcgactacagaaagagatgcaggatttgagtgagttttgtagtgataaacctaagtctggagcaaagtatggactgccggactctttggccatcctgtcagagatgggagaagtcacagacggaatgatggatacaaagatggttcactttcttacacactatgctgacaagattgaatctgttcatttttcagaccagttctctggtccaaaaattatgcaagaggaaggtcagcctttaaagctacctgacactaagaggacactgttgtttacatttaatgtgcctggctcaggtaacacttacccaaaggatatggaggcactgctacccctgatgaacatggtgatttattctattgataaagccaaaaagttccgactcaacagagaaggcaaacaaaaagcagataagaaccgtgcccgagtagaagagaacttcttgaaactgacacatgtgcaaagacaggaagcagcacagtctcggcgggaggagaaaaaaagagcagagaaggagcgaatcatgaatgaggaagatcctgagaaacagcgcaggctggaggaggctgcattgaggcgtgagcaaaagaagttggaaaagaagcaaatgaaaatgaaacaaatcaaagtgaaagccatgtaaagccatcccagagatttgagttctgatgccacctgtaagctctgaattcacaggaaacatgaaaaacgccagtccatttctcaaccttaaatttcagacagtcttgggcaactgagaaatccttatttcatcatctactctgtttggggtttggggttttacagagattgaagatacctggaaagggctctgtttcaagaatttttttttccagataatcaaattattttgattattttataaaaggaatgatctatgaaatctgtgtaggttttaaatattttaaaaattataatacaaatcatcagtgcttttagtacttcagtgtttaaagaaataccatgaaatttataggtagataaccagattgttgctttttgtttaaaccaagcagttgaaatggctataaagactgactctaaaccaagattctgcaaataatgattggaattgcacaataaacattgcttgatgttttcttgtatgtctacattaaacttgagaaaaagtaaaaattagaacactgtatgtagtaatgaaatttcagggacccagaacataatgtagtatatgtttttaggtgggagatgctgataacaaaattaataggaagtctgtaggcattaggatactgacatgtacatggaaaattctagggacaggagcatcattttttccttacctgataccacgaaccagtgacaacgtgaatgctgtattttaagtggttgtatgtttattttcttgagtaacaaaatgttttttccttcttggttgctgcagcctggtggatgttcatggagaagctctgttctctatattatggctgtgtgccgttgcttctccctctgcttttatcttttccacagttgaggctgggtatgttctttcaaagaaatggccatgaatatgtgtaagtatacttttgaaaatgagctttcctaaactattgagagttctttccacctcttgcggaaccaactcttggaggagaggcccatgtatctgcacgagcacttagcttgttcagatctctgcattttataaatgcttcttaccaagaaagcatttttaggtcattgcttgtaccaggtaatttttgccggggatgggtaagggttgggttttctggtgggagtggggtggtgggtattttttgttgatgctttagtgcaggcctgttctgaggcaataacaagttgctgtgaaaacagcatgtgctgctgcctttgtaactgcatggaaacttttcacatgggtttttctccaagttaatacagaaatatgtaaactgagagatgcaaatgtaatatttttaacagttcatgaagttgttattaaaataactaacataaaacttaattactttaatattatataattatagtagtggccttgttttacaaacctttaaattacattttagaaatcaaagttgatagtcttagttatcttttgagtaagaaaagctttcctaaagtcccatacatttggaccatggcagctaattttgtaacttaagcattcatatgaactacctatggacatctattaaagtgattgacaaaa

SEQ ID NO: 430569 - DNA, 3184 bp, Homo sapiens
tatacctctacatacaatatgaagtgcttaccacaatcaagctaattaacatagttgcctccgtgtgtgtgtgtgtgtgtgtgtgtgtgtgagtgtggtgagaatacttacaatatattctcttagcagatttcaagtctacaatacattattattaactgtagtcaccatgctgcacattaggtcttcagaactttctcagtttaagctgaaatttgtacccaatcgttttgttaaaaacatgtaacatctgttttctgtgcttgctgcttacacgttcttgttttccccaacaaatgttgccaacaaaatgagacacagctgctggtgacatttgtagaggaaaacggatgatgcctcatttttgtaggagggagatactgagagtgaaccatatgatgatgaagaatttgaaggttatgaagacaaaccagatacttcttctagcaaaaataaagacccaataacgattgttgatgttcctgcacacctccagaacagctgggagagttattatctagaaattttgatggtgactggtctgcttgcttatatcatgaattacatcattgggaagaataaaaacagtcgccttgcacaggcctggtttaacactcatagggagcttttggagagcaactttactttagtgggggatgatggaactaacaaagaagccacaagcacaggaaagttgaaccaggagaatgagcacatctataacctgtggtgttctggtcgagtgtgctgtgagggcatgcttatccagctgaggttcctcaagagacaagacttactgaatgtcctggcccggatgatgaggccagtgagtgatcaagtgcaaataaaagtaaccatgaatgatgaagacatggatacctacgtatttgctgttggcacacggaaagccttggtgcgactacagaaagagatgcaggatttgagtgagttttgtagtgataaacctaagtctggagcaaagtatggactgccggactctttggccatcctgtcagagatgggagaagtcacagacggaatgatggatacaaagatggttcactttcttacacactatgctgacaagattgaatctgttcatttttcagaccagttctctggtccaaaaattatgcaagaggaaggtcagcctttaaagctacctgacactaagaggacactgttgtttacatttaatgtgcctggctcaggtaacacttacccaaaggatatggaggcactgctacccctgatgaacatggtgatttattctattgataaagccaaaaagttccgactcaacagagaaggcaaacaaaaagcagataagaaccgtgcccgagtagaagagaacttcttgaaactgacacatgtgcaaagacaggaagcagcacagtctcggcgggaggagaaaaaaagagcagagaaggagcgaatcatgaatgaggaagatcctgagaaacagcgcaggctggaggaggctgcattgaggcgtgagcaaaagaagttggaaaagaagcaaatgaaaatgaaacaaatcaaagtgaaagccatgtaaagccatcccagagatttgagttctgatgccacctgtaagctctgaattcacaggaaacatgaaaaacgccagtccatttctcaaccttaaatttcagacagtcttgggcaactgagaaatccttatttcatcatctactctgtttggggtttggggttttacagagattgaagatacctggaaagggctctgtttcaagaatttttttttccagataatcaaattattttgattattttataaaaggaatgatctatgaaatctgtgtaggttttaaatattttaaaaattataatacaaatcatcagtgcttttagtacttcagtgtttaaagaaataccatgaaatttataggtagataaccagattgttgctttttgtttaaaccaagcagttgaaatggctataaagactgactctaaaccaagattctgcaaataatgattggaattgcacaataaacattgcttgatgttttcttgtatgtctacattaaacttgagaaaaagtaaaaattagaacactgtatgtagtaatgaaatttcagggacccagaacataatgtagtatatgtttttaggtgggagatgctgataacaaaattaataggaagtctgtaggcattaggatactgacatgtacatggaaaattctagggacaggagcatcattttttccttacctgataccacgaaccagtgacaacgtgaatgctgtattttaagtggttgtatgtttattttcttgagtaacaaatgcatgaaaaattaatgcttcacctaggtaagatcattggtctgtgtgaaatcacaaatgttttttccttcttggttgctgcagcctggtggatgttcatggagaagctctgttctctatattatggctgtgtgccgttgcttctccctctgcttttatcttttccacagttgaggctgggtatgttctttcaaagaaatggccatgaatatgtgtaagtatacttttgaaaatgagctttcctaaactattgagagttctttccacctcttgcggaaccaactcttggaggagaggcccatgtatctgcacgagcacttagcttgttcagatctctgcattttataaatgcttcttaccaagaaagcatttttaggtcattgcttgtaccaggtaatttttgccggggatgggtaagggttgggttttctggtgggagtggggtggtgggtattttttgttgatgctttagtgcaggcctgttctgaggcaataacaagttgctgtgaaaacagcatgtgctgctgcctttgtaactgcatggaaacttttcacatgggtttttctccaagttaatacagaaatatgtaaactgagagatgcaaatgtaatatttttaacagttcatgaagttgttattaaaataactaacataaaacttaattactttaatattatataattatagtagtggccttgttttacaaacctttaaattacattttagaaatcaaagttgatagtcttagttatcttttgagtaagaaaagctttcctaaagtcccatacatttggaccatggcagctaattttgtaacttaagcattcatatgaactacctatggacatctattaaagtgattgacaaaa

SEQ ID NO: 430570 - DNA, 4362 bp, Homo sapiens
  misc_feature (3638)..(3638): n is a, c, g, or t
cgctcgcattctacgtaacggacggcggaggctacgtgaagagaggcgcggcgtgactgagctacggttctggctgcgtcctagaggcatccggggcagtaaaaccgctgcgatcgcggaggcggcggccaggccgagaggcaggccgggcaggggtgtcggacgcagggcgctgggccgggtttcggcttcggccacagctttttttctcaaggtgcaatgaaagccttccacactttctgtgttgtccttctggtgtttgggagtgtctctgaagccaagtttgatgattttgaggatgaggaggacatagtagagtatgatgataatgacttcgctgaatttgaggatgtcatggaagactctgttactgaatctcctcaacgggtcataatcactgaagatgatgaagatgagaccactgtggagttggaagggcaggatgaaaaccaagaaggagattttgaagatgcagatacccaggagggagatactgagagtgaaccatatgatgatgaagaatttgaaggttatgaagacaaaccagatacttcttctagcaaaaataaagacccaataacgattgttgatgttcctgcacacctccagaacagctgggagagttattatctagaaattttgatggtgactggtctgcttgcttatatcatgaattacatcattgggaagaataaaaacagtcgccttgcacaggcctggtttaacactcatagggagcttttggagagcaactttactttagtgggggatgatggaactaacaaagaagccacaagcacaggaaagttgaaccaggagaatgagcacatctataacctgtggtgttctggtcgagtgtgctgtgagggcatgcttatccagctgaggttcctcaagagacaagacttactgaatgtcctggcccggatgatgaggccagtgagtgatcaagtgcaaataaaagtaaccatgaatgatgaagacatggatacctacgtatttgctgttggcacacggaaagccttggtgcgactacagaaagagatgcaggatttgagtgagttttgtagtgataaacctaagtctggagcaaagtatggactgccggactctttggccatcctgtcagagatgggagaagtcacagacggaatgatggatacaaagatggttcactttcttacacactatgctgacaagattgaatctgttcatttttcagaccagttctctggtccaaaaattatgcaagaggaaggtcagcctttaaagctacctgacactaagaggacactgttgtttacatttaatgtgcctggctcaggtaacacttacccaaaggatatggaggcactgctacccctgatgaacatggtgatttattctattgataaagccaaaaagttccgactcaacagagaaggcaaacaaaaagcagataagaaccgtgcccgagtagaagagaacttcttgaaactgacacatgtgcaaagacaggaagcagcacagtctcggcgggaggagaaaaaaagagcagagaaggagcgaatcatgaatgaggaagatcctgagaaacagcgcaggctggaggaggctgcattgaggcgtgagcaaaagaagttggaaaagaagcaaatgaaaatgaaacaaatcaaagtgaaagccatgtaaagccatcccagagatttgagttctgatgccacctgtaagctctgaattcacaggaaacatgaaaaacgccagtccatttctcaaccttaaatttcagacagtcttgggcaactgagaaatccttatttcatcatctactctgtttggggtttggggttttacagagattgaagatacctggaaagggctctgtttcaagaatttttttttccagataatcaaattattttgattattttataaaaggaatgatctatgaaatctgtgtaggttttaaatattttaaaaattataatacaaatcatcagtgcttttagtacttcagtgtttaaagaaataccatgaaatttataggtagataaccagattgttgctttttgtttaaaccaagcagttgaaatggctataaagactgactctaaaccaagattctgcaaataatgattggaattgcacaataaacattgcttgatgttttcttgtatgtctacattaaacttgagaaaaagtaaaaattagaacactgtatgtagtaatgaaatttcagggacccagaacataatgtagtatatgtttttaggtgggagatgctgataacaaaattaataggaagtctgtaggcattaggatactgacatgtacatggaaaattctagggacaggagcatcattttttccttacctgataccacgaaccagtgacaacgtgaatgctgtattttaagtggttgtatgtttattttcttgagtaacaaatgcatgaaaaattaatgcttcacctaggtaagatcattggtctgtgtgaaatcacaaatgttttttccttcttggttgctgcagcctggtggatgttcatggagaagctctgttctctatattatggctgtgtgccgttgcttctccctctgcttttatcttttccacagttgaggctgggtatgttctttcaaagaaatggccatgaatatgtgtaagtatacttttgaaaatgagctttcctaaactattgagagttctttccacctcttgcggaaccaactcttggaggagaggcccatgtatctgcacgagcacttagcttgttcagatctctgcattttataaatgcttcttaccaagaaagcatttttaggtcattgcttgtaccaggtaatttttgccggggatgggtaagggttgggttttctggtgggagtggggtggtgggtattttttgttgatgctttagtgcaggcctgttctgaggcaataacaagttgctgtgaaaacagcatgtgctgctgcctttgtaactgcatggaaacttttcacatgggtttttctccaagttaatacagaaatatgtaaactgagagatgcaaatgtaatatttttaacagttcatgaagttgttattaaaataactaacataaaacttaattactttaatattatataattatagtagtggccttgttttacaaacctttaaattacattttagaaatcaaagttgatagtcttagttatcttttgagtaagaaaagctttcctaaagtcccatacatttggaccatggcagctaattttgtaacttaagcattcatatgaactacctatggacatctattaaagtgattgacaaaaaaaaaaaaaaaaaaaaaaaaaaaaaaaaaaaaaaaaaaaaaaaaaaaaaaaaaaaaaaaaaaaaaaaaaaaaggggggggggctttttttccccggggggggccatacccccccttttttttaagggggcccaaggagggaggttatattatattgaacgcaggagggagcggggcgcttttaaaaaaagcgctgtggtgatggggaagaaacacgaatgcagtggggaacatttttggaggaggagaaaccacactattcggtgagggatgggtgacacacaatggtggagcaaacacctactcccgagagaagtatatgaagacgcatgcggagagagnaaatataaaacaattatgaggtgtgtattgaagtcgggtgtcaacacaccagggtcaatatatgtatgggggtacagaaaaatgtggcacactgggggaagagatgttcgtgagaaaaattatctttttgagcgcgcggcggcttcctcttgctcataccatacacgtgagagaagaagaaacgaaagacaagaaagagcagaaaaagacaagtcagagaacagttaaggaaaacgagagaaagaggaagagaagagagtaatagaaaagaagacgaaaagaaacgaaaagcagagagaaaagaaaagaaagagaagaaagaagagaaacaataaaaaagagaaagaagagcgaaaaaagaagaaaaaaagaaaagaaacagacgagaagaggcgaaaaggaaaagaagcaagaaagaaaaagaaacacaagaagagagcgaacgaagtacgaaacagacagaaccacaagagaaagaacaacaagagacgagaagaaaaaagaagaagaagagagaaaacaaaaaagaagagaaagaaagaaagaaagaagagagacaaaagagaagatagaaagaaatagaagcagacaaaaacagaaagaagaacagaagaagaaagacataaagaaaaccgagaaggaaacaaacggtaacagataagaatgaaaaaacagagagaacgaacaagaaggaacagacaaacgagaacagaaaaacaataac

SEQ ID NO: 430571 - DNA, 4169 bp, Homo sapiens
  misc_feature (3445)..(3445): n is a, c, g, or t
cgctcgcattctacgtaacggacggcggaggctacgtgaagagaggcgcggcgtgactgagctacggttctggctgcgtcctagaggcatccggggcagtaaaaccgctgcgatcgcggaggcggcggccaggccgagaggcaggccgggcaggggtgtcggacgcagggcgctgggccgggtttcggcttcggccacagctttttttctcaaggtgcaatgaaagccttccacactttctgtgttgtccttctggtgtttgggagtgtctctgaagccaagtttgatgattttgaggatgaggaggacatagtagagtatgatgataatgacttcgctgaatttgaggatgtcatggaagactctgttactgaatctcctcaacgggtcataatcactgaagatgatgaagatgagaccactgtggagttggaagggcaggatgaaaaccaagaaggagattttgaagatgcagatacccaggagggagatactgagagtgaaccatatgatgatgaagaatttgaaggttatgaagacaaaccagatacttcttctagcaaaaataaagacccaataacgattgttgatgttcctgcacacctccagaacagctgggagagttattatctagaaattttgatggtgactggtctgcttgcttatatcatgaattacatcattgggaagaataaaaacagtcgccttgcacaggcctggtttaacactcatagggagcttttggagagcaactttactttagtgggggatgatggaactaacaaagaagccacaagcacaggaaagttgaaccaggagaatgagcacatctataacctgtggtgttctggtcgagtgtgctgtgagggcatgcttatccagctgaggttcctcaagagacaagacttactgaatgtcctggcccggatgatgaggccagtgagtgatcaagtgcaaataaaagtaaccatgaatgatgaagacatggatacctacgtatttgctgttggcacacggaaagccttggtgcgactacagaaagagatgcaggatttgagtgagttttgtagtgataaacctaagtctggagcaaagtatggactgccggactctttggccatcctgtcagagatgggagaagtcacagacggaatgatggatacaaagatggttcactttcttacacactatgctgacaagattgaatctgttcatttttcagaccagttctctggtccaaaaattatgcaagaggaaggtcagcctttaaagctacctgacactaagaggacactgttgtttacatttaatgtgcctggctcaggtaacacttacccaaaggatatggaggcactgctacccctgatgaacatggtgatttattctattgataaagccaaaaagttccgactcaacagagaaggcaaacaaaaagcagataagaaccgtgcccgagtagaagagaacttcttgaaactgacacatgtgcaaagacaggaagcagcacagtctcggcgggaggagaaaaaaagagcagagaaggagcgaatcatgaatgaggaagatcctgagaaacagcgcaggctggaggaggctgcattgaggcgtgagcaaaagaagttggaaaagaagcaaatgaaaatgaaacaaatcaaagtgaaagccatgtaaagccatcccagagatttgagttctgatgccacctgtaagctctgaattcacaggaaacatgaaaaacgccagtccatttctcaaccttaaatttcagacagtcttgggcaactgagaaatccttatttcatcatctactctgtttggggtttggggttttacagagattgaagatacctggaaagggctctgtttcaagaatttttttttccagataatcaaattattttgattattttataaaaggaatgatctatgaaatctgtgtaggttttaaatattttaaaaattataatacaaatcatcagtgcttttagtacttcagtgtttaaagaaataccatgaaatttataggtagataaccagattgttgctttttgtttaaaccaagcagttgaaatggctataaagactgactctaaaccaagattctgcaaataatgattggaattgcacaataaacattgcttgatgttttcttgtatgtctacattaaacttgagaaaaagtaaaaattagaacactgtatgtagtaatgaaatttcagggacccagaacataatgtagtatatgtttttaggtgggagatgctgataacaaaattaataggaagtctgtaggcattaggatactgacatgtacatggaaaattctagggacaggagcatcattttttccttacctgataccacgaaccagtgacaacgtgaatgctgtattttaagtggttgtatgtttattttcttgagtaacaaatgcatgaaaaattaatgcttcacctaggtaagatcattggtctgtgtgaaatcacaaatgttttttccttcttggttgctgcagcctggtggatgttcatggagaagctctgttctctatattatggctgtgtgccgttgcttctccctctgcttttatcttttccacagttgaggctgggtatgttctttcaaagaaatggccatgaatatgtgtaagtatacttttgaaaatgagctttcctaaactattgagagttctttccacctcttgcggaaccaactcttggaggagaggcccatgtatctgcacgagcacttagcttgttcagatctctgcattttataaatgcttcttaccaagaaagcatttttaggtcattgcttgtaccaggtaatttttgccggggatgggtaagggttgggttttctggtgggagtggggtggtgggtattttttgttgatgctttagtgcaggcctgttctgaggcaataacaagttgctgtgaaaacagcatgtgctgctgcctttgtaactgcatggaaacttttcacatgggtttttctccaagttaatacagaaatatgtaaactgagagatgcaaatgtaatatttttaacagttcatgaagttgttattaaaataactaacataaaacttaattactttaatattaaaaaaaaaaaaaaaaaaaaaaaaaaaaaaaaaaaaaaaaaaaaaaaaaaaaaaaaaaaaaaaaaaaaaaaaaggggggggggctttttttccccggggggggccatacccccccttttttttaagggggcccaaggagggaggttatattatattgaacgcaggagggagcggggcgcttttaaaaaaagcgctgtggtgatggggaagaaacacgaatgcagtggggaacatttttggaggaggagaaaccacactattcggtgagggatgggtgacacacaatggtggagcaaacacctactcccgagagaagtatatgaagacgcatgcggagagagnaaatataaaacaattatgaggtgtgtattgaagtcgggtgtcaacacaccagggtcaatatatgtatgggggtacagaaaaatgtggcacactgggggaagagatgttcgtgagaaaaattatctttttgagcgcgcggcggcttcctcttgctcataccatacacgtgagagaagaagaaacgaaagacaagaaagagcagaaaaagacaagtcagagaacagttaaggaaaacgagagaaagaggaagagaagagagtaatagaaaagaagacgaaaagaaacgaaaagcagagagaaaagaaaagaaagagaagaaagaagagaaacaataaaaaagagaaagaagagcgaaaaaagaagaaaaaaagaaaagaaacagacgagaagaggcgaaaaggaaaagaagcaagaaagaaaaagaaacacaagaagagagcgaacgaagtacgaaacagacagaaccacaagagaaagaacaacaagagacgagaagaaaaaagaagaagaagagagaaaacaaaaaagaagagaaagaaagaaagaaagaagagagacaaaagagaagatagaaagaaatagaagcagacaaaaacagaaagaagaacagaagaagaaagacataaagaaaaccgagaaggaaacaaacggtaacagataagaatgaaaaaacagagagaacgaacaagaaggaacagacaaacgagaacagaaaaacaataac

SEQ ID NO: 430572 - DNA, 1936 bp, Homo sapiens
cgctcgcattctacgtaacggacggcggaggctacgtgaagagaggcgcggcgtgactgagctacggttctggctgcgtcctagaggcatccggggcagtaaaaccgctgcgatcgcggaggcggcggccaggccgagaggcaggccgggcaggggtgtcggacgcagggcgctgggccgggtttcggcttcggccacagctttttttctcaaggtgcaatgaaagccttccacactttctgtgttgtccttctggtgtttgggagtgtctctgaagccaagtttgatgattttgaggatgaggaggacatagtagagtatgatgataatgacttcgctgaatttgaggatgtcatggaagactctgttactgaatctcctcaacgggtcataatcactgaagatgatgaagatgagaccactgtggagttggaagggcaggatgaaaaccaagaaggagattttgaagatgcagatacccaggagggagatactgagagtgaaccatatgatgatgaagaatttgaaggttatgaagacaaaccagatacttcttctagcaaaaataaagacccaataacgattgttgatgttcctgcacacctccagaacagctgggagagttattatctagaaattttgatggtgactggtctgcttgcttatatcatgaattacatcattgggaagaataaaaacagtcgccttgcacaggcctggtttaacactcatagggagcttttggagagcaactttactttagtgggggatgatggaactaacaaagaagccacaagcacaggaaagttgaaccaggagaatgagcacatctataacctgtggtgttctggtcgagtgtgctgtgagggcatgcttatccagctgaggttcctcaagagacaagacttactgaatgtcctggcccggatgatgaggccagtgagtgatcaagtgcaaataaaagtaaccatgaatgatgaagacatggatacctacgtatttgctgttggcacacggaaagccttggtgcgactacagaaagagatgcaggatttgagtgagttttgtagtgataaacctaagtctggagcaaagtatggactgccggactctttggccatcctgtcagagatgggagaagtcacagacggaatgatggatacaaagatggttcactttcttacacactatgctgacaagattgaatctgttcatttttcagaccagttctctggtccaaaaattatgcaagaggaaggtcagcctttaaagctacctgacactaagaggacactgttgtttacatttaatgtgcctggctcaggtaacacttacccaaaggatatggaggcactgctacccctgatgaacatggtgatttattctattgataaagccaaaaagttccgactcaacagagaaggcaaacaaaaagcagataagaaccgtgcccgagtagaagagaacttcttgaaactgacacatgtgcaaagacaggaagcagcacagtctcggcgggaggagaaaaaaagagcagagaaggagcgaatcatgaatgaggaagatcctgagaaacagcgcaggctggaggaggctgcattgaggcggtaaaagcttaagcttttaccgcatttatattaaaaattcacacacaaatgaaaatggaaaaactgccaatacctgatttctgtcccctatttttccactcgcaatcatatacttaggtaccttttgaccccatggaaaaaaaatatctaacgttcagaactaccaataacaggaagaagagaaattttattatttttggagaatgaattgtttcccatcatagtgaattcttaagcacgtactccacgtatgcggagtgctagctggatgtctttgggcataattgttccacgttgggcatgggcggtaaaagctggggtaccgagct

SEQ ID NO: 430573 - DNA, 1393 bp, Homo sapiens
  misc_feature (1326)..(1326): n is a, c, g, or t
  misc_feature (1342)..(1342): n is a, c, g, or t
  misc_feature (1361)..(1361): n is a, c, g, or t
  misc_feature (1376)..(1376): n is a, c, g, or t
cgctcgcattctacgtaacggacggcggaggctacgtgaagagaggcgcggcgtgactgagctacggttctggctgcgtcctagaggcatccggggcagtaaaaccgctgcgatcgcggaggcggcggccaggccgagaggcaggccgggcaggggtgtcggacgcagggcgctgggccgggtttcggcttcggccacagctttttttctcaaggtgcaatgaaagccttccacactttctgtgttgtccttctggtgtttgggagtgtctctgaagccaagtttgatgattttgaggatgaggaggacatagtagagtatgatgataatgacttcgctgaatttgaggatgtcatggaagactctgttactgaatctcctcaacgggtcataatcactgaagatgatgaagatgagaccactgtggagttggaagggcaggatgaaaaccaagaaggagattttgaagatgcagatacccaggagggagatactgagagtgaaccatatgatgatgaagaatttgaaggttatgaagacaaaccagatacttcttctagcaaaaataaagacccaataacgattgttgatgttcctgcacacctccagaacagctgggagagttattatctagaaattttgatggtgactggtctgcttgcttatatcatgaattacatcattgggaagaataaaaacagtcgccttgcacaggcctggtttaacactcatagggagcttttggagagcaactttactttagtgggggatgatggaactaacaaagaagccacaagcacaggaaagttgaaccaggagaatgagcacatctataacctgtggtgttctggtcgagtgtgctgtgagggcatgcttatccagctgaggttcctcaagagacaagacttactgaatgtcctggcccggatgatgaggccagtgagtgatcaagtgcaaataaaagtaaccatgaatgatgaagacatggatacctacgtatttgctgttggcacacggaaagccttggtgcgactacagaaagagatgcaggatttgagtgagttttgtagtgataaacctaagtctggagcaaagtatggactgccggactctttggccatcctgtcagagatgggagaagtcacagacggaatgatggatacaaagatggttcactttcttacacactatgctgacaagattgaatctgttcatttttcagaccagttctctggtccaaaaattatgcaagaggaaggtcagcctttaaagctacctgacactaagaggacactgttgtttacatttaatggtgcctgggcttangtaaccactttacccnggatatgggaggcacttgntacccccctggatgnaacaatgggtggatttt

SEQ ID NO: 430574 - DNA, 700 bp, Homo sapiens
cgctcgcattctacgtaacggacggcggaggctacgtgaagagaggcgcggcgtgactgagctacggttctggctgcgtcctagaggcatccggggcagtaaaaccgctgcgatcgcggaggcggcggccaggccgagaggcaggccgggcaggggtgtcggacgcagggcgctgggccgggtttcggcttcggccacagctttttttctcaaggtgcaatgaaagccttccacactttctgtgttgtccttctggtgtttgggagtgtctctgaagccaagtttgatgattttgaggatgaggaggacatagtagagtatgatgataatgacttcgctgaatttgaggatgtcatggaagactctgttactgaatctcctcaacgggtcataatcactgaagatgatgaagatgagaccactgtggagttggaagggcaggatgaaaaccaagaaggagattttgaagatgcagatacccaggagggagatactgagagtgaaccatatgatgatgaagaatttgaaggttatgaagacaaaccagatacttcttctagcaaaaataaagacccaataacgattgttgatgtaggtatccaggattctgaattcccaactaaacaacaaaatgtcttgtcatcaatcccggaaataaaatgaatgatgtatagctggtgttaatgcatatagtgggagc

SEQ ID NO: 430575 - DNA, 185 bp, Homo sapiens
tgctgggattataggcgtgagccaccacccccggcccggccttgacattttctgttgagtcacattaagtggttttacccctaggggatgatggaactaacaaagaagccacaagcacaggaaagttgaaccaggagaatgagcacatctataacctgtggtgttctggtcgagtgtgctgtgag

SEQ ID NO: 430576 - DNA, 762 bp, Homo sapiens
cacattgtagcattcatcatgccttttaaatatgagatggagggcaattgatagtcaaaggattcatataggcagagattacaaaggaatcttcaatgacagaactaaattatatatgctgtagtagattatccctaaatttactctgagcctaactcaaaaataagataataagatgccttgttataggaagatagaataggagttggaaataaaacataaaaatgcatcaaaataagcaaaaatgtatctaaaatatgggcctcatacttaaatataggctcatttctggctccccaggtgagatggaatatacccttgcctggagggaacatcactggaggtgttcaaatataggataaagatcacttgagaatgcatccatcagatagacgagtggaccagatgacctgtaaagctccttcattatatttgacttgggtatgccaagccaaatactgtgctgattatgtgcaggtatctgttcatctaagtgtattgggtgacttgtgtacatggaaaacatctttcttgtattccttcttaattgccttttcttttatgacagggaaggtcagcctttaaagctacctgacactaagaggacactgttgtttacatttaatggtaagtattctgggtcctttctgggttcttagtcttctctgagatgaccttaaggagagtattgtttcctcctaaatgatagctttaaaactacgtcaaaactataagcctgtgcttgcttactgatttccagat

SEQ ID NO: 430577 - DNA, 3297 bp, Homo sapiens
cgctcgcattctacgtaacggacggcggaggctacgtgaagagaggcgcggcgtgactgagctacggttctggctgcgtcctagaggcatccggggcagtaaaaccgctgcgatcgcggaggcggcggccaggccgagaggcaggccgggcaggggtgtcggacgcagggcgctgggccgggtttcggcttcggccacagctttttttctcaaggtgcaatgaaagccttccacactttctgtgttgtccttctggtgtttgggagtgtctctgaagccaagtttgatgattttgaggatgaggaggacatagtagagtatgatgataatgacttcgctgaatttgaggatgtcatggaagactctgttactgaatctcctcaacgggtcataatcactgaagatgatgaagatgagaccactgtggagttggaagggcaggatgaaaaccaagaaggagattttgaagatgcagatacccaggagggagatactgagagtgaaccatatgatgatgaagaatttgaaggttatgaagacaaaccagatacttcttctagcaaaaataaagacccaataacgattgttgatgttcctgcacacctccagaacagctgggagagttattatctagaaattttgatggtgactggtctgcttgcttatatcatgaattacatcattgggaagaataaaaacagtcgccttgcacaggcctggtttaacactcatagggagcttttggagagcaactttactttagtgggggatgatggaactaacaaagaagccacaagcacaggaaagttgaaccaggagaatgagcacatctataacctgtggtgttctggtcgagtgtgctgtgagggcatgcttatccagctgaggttcctcaagagacaagacttactgaatgtcctggcccggatgatgaggccagtgagtgatcaagtgcaaataaaagtaaccatgaatgatgaagacatggatacctacgtatttgctgttggcacacggaaagccttggtgcgactacagaaagagatgcaggatttgagtgagttttgtagtgataaacctaagtctggagcaaagtatggactgccggactctttggccatcctgtcagagatgggagaagtcacagacggaatgatggatacaaagatggttcactttcttacacactatgctgacaagattgaatctgttcatttttcagaccagttctctggtccaaaaattatgcaagaggaaggtcagcctttaaagctacctgacactaagaggacactgttgtttacatttaatgtgcctggctcaggtaacacttacccaaaggatatggaggcactgctacccctgatgaacatggtgatttattctattgataaagccaaaaagttccgactcaacagagaaggcaaacaaaaagcagataagaaccgtgcccgagtagaagagaacttcttgaaactgacacatgtgcaaagacaggaagcagcacagtctcggcgggaggagaaaaaaagagcagagaaggagcgaatcatgaatgaggaagatcctgagaaacagcgcaggctggaggaggctgcattgaggcgtgagcaaaagaagttggaaaagaagcaaatgaaaatgaaacaaatcaaagtgaaagccatgtaaagccatcccagagatttgagttctgatgccacctgtaagctctgaattcacaggaaacatgaaaaacgccagtccatttctcaaccttaaatttcagacagtcttgggcaactgagaaatccttatttcatcatctactctgtttggggtttggggttttacagagattgaagatacctggaaagggctctgtttcaagaatttttttttccagataatcaaattattttgattattttataaaaggaatgatctatgaaatctgtgtaggttttaaatattttaaaaattataatacaaatcatcagtgcttttagtacttcagtgtttaaagaaataccatgaaatttataggtagataaccagattgttgctttttgtttaaaccaagcagttgaaatggctataaagactgactctaaaccaagattctgcaaataatgattggaattgcacaataaacattgcttgatgttttcttgtatgtctacattaaacttgagaaaaagtaaaaattagaacactgtatgtagtaatgaaatttcagggacccagaacataatgtagtatatgtttttaggtgggagatgctgataacaaaattaataggaagtctgtaggcattaggatactgacatgtacatggaaaattctagggacaggagcatcattttttccttacctgataccacgaaccagtgacaacgtgaatgctgtattttaagtggttgtatgtttattttcttgagtaacaaatgcatgaaaaattaatgcttcacctaggtaagatcattggtctgtgtgaaatcacaaatgttttttccttcttggttgctgcagcctggtggatgttcatggagaagctctgttctctatattatggctgtgtgccgttgcttctccctctgcttttatcttttccacagttgaggctgggtatgttctttcaaagaaatggccatgaatatgtgtaagtatacttttgaaaatgagctttcctaaactattgagagttctttccacctcttgcggaaccaactcttggaggagaggcccatgtatctgcacgagcacttagcttgttcagatctctgcattttataaatgcttcttaccaagaaagcatttttaggtcattgcttgtaccaggtaatttttgccggggatgggtaagggttgggttttctggtgggagtggggtggtgggtattttttgttgatgctttagtgcaggcctgttctgaggcaataacaagttgctgtgaaaacagcatgtgctgctgcctttgtaactgcatggaaacttttcacatgggtttttctccaagttaatacagaaatatgtaaactgagagatgcaaatgtaatatttttaacagttcatgaagttgttattaaaataactaacataaaacttaattactttaatattatataattatagtagtggccttgttttacaaacctttaaattacattttagaaatcaaagttgatagtcttagttatcttttgagtaagaaaagctttcctaaagtcccatacatttggaccatggcagctaattttgtaacttaagcattcatatgaactacctatggacatctattaaagtgattgacaaaa

SEQ ID NO: 430578 - DNA, 2145 bp, Homo sapiens
cgctcgcattctacgtaacggacggcggaggctacgtgaagagaggcgcggcgtgactgagctacggttctggctgcgtcctagaggcatccggggcagtaaaaccgctgcgatcgcggaggcggcggccaggccgagaggcaggccgggcaggggtgtcggacgcagggcgctgggccgggtttcggcttcggccacagctttttttctcaaggtgcaatgaaagccttccacactttctgtgttgtccttctggtgtttgggagtgtctctgaagccaagtttgatgattttgaggatgaggaggacatagtagagtatgatgataatgacttcgctgaatttgaggatgtcatggaagactctgttactgaatctcctcaacgggtcataatcactgaagatgatgaagatgagaccactgtggagttggaagggcaggatgaaaaccaagaaggagattttgaagatgcagatacccaggagggagatactgagagtgaaccatatgatgatgaagaatttgaaggttatgaagacaaaccagatacttcttctagcaaaaataaagacccaataacgattgttgatgttcctgcacacctccagaacagctgggagagttattatctagaaattttgatggtgactggtctgcttgcttatatcatgaattacatcattgggaagaataaaaacagtcgccttgcacaggcctggtttaacactcatagggagcttttggagagcaactttactttagtgggggatgatggaactaacaaagaagccacaagcacaggaaagttgaaccaggagaatgagcacatctataacctgtggtgttctggtcgagtgtgctgtgagggcatgcttatccagctgaggttcctcaagagacaagacttactgaatgtcctggcccggatgatgaggccagtgagtgatcaagtgcaaataaaagtaaccatgaatgatgaagacatggatacctacgtatttgctgttggcacacggaaagccttggtgcgactacagaaagagatgcaggatttgagtgagttttgtagtgataaacctaagtctggagcaaagtatggactgccggactctttggccatcctgtcagagatgggagaagtcacagacggaatgatggatacaaagatggttcactttcttacacactatgctgacaagattgaatctgttcatttttcagaccagttctctggtccaaaaattatgcaagaggaaggtcagcctttaaagctacctgacactaagaggacactgttgtttacatttaatgtgcctggctcaggtaacacttacccaaaggatatggaggcactgctacccctgatgaacatggtgatttattctattgataaagccaaaaagttccgactcaacagagaaggcaaacaaaaagcagataagaaccgtgcccgagtagaagagaacttcttgaaactgacacatgtgcaaagacaggaagcagcacagtctcggcgggaggagaaaaaaagagcagagaaggagcgaatcatgaatgaggaagatcctgagaaacagcgcaggctggaggaggctgcattgaggcgtgagcaaaagaagttggaaaagaagcaaatgaaaatgaaacaaatcaaagtgaaagccatgtaaagccatcccagagatttgagttctgatgccacctgtaagctctgaattcacaggaaacatgaaaaacgccagtccatttctcaaccttaaatttcagacagtcttgggcaactgagaaatccttatttcatcatctactctgtttggggtttggggttttacagagattgaagatacctggaaagggctctgtttcaagaatttttttttccagataatcaaattattttgattattttataaaaggaatgatctatgaaatctgtgtaggttttaaatattttaaaaattataatacaaatcatcagtgcttttagtacttcagtgtttaaagaaataccatgaaatttataggtagataaccagattgttgctttttgtttaaaccaagcagttgaaatggctataaagactgactctaaaccaagattctgcaaataatgattggaattgcacaataaacattgcttgatg

SEQ ID NO: 430579 - DNA, 3243 bp, Homo sapiens
cgctcgcattctacgtaacggacggcggaggctacgtgaagagaggcgcggcgtgactgagctacggttctggctgcgtcctagaggcatccggggcagtaaaaccgctgcgatcgcggaggcggcggccaggccgagaggcaggccgggcaggggtgtcggacgcagggcgctgggccgggtttcggcttcggccacagctttttttctcaaggtgcaatgaaagccttccacactttctgtgttgtccttctggtgtttgggagtgtctctgaagccaagtttgatgattttgaggatgaggaggacatagtagagtatgatgataatgacttcgctgaatttgaggatgtcatggaagactctgttactgaatctcctcaacgggtcataatcactgaagatgatgaagatgagaccactgtggagttggaagggcaggatgaaaaccaagaaggagattttgaagatgcagatacccaggagggagatactgagagtgaaccatatgatgatgaagaatttgaaggttatgaagacaaaccagatacttcttctagcaaaaataaagacccaataacgattgttgatgttcctgcacacctccagaacagctgggagagttattatctagaaattttgatggtgactggtctgcttgcttatatcatgaattacatcattgggaagaataaaaacagtcgccttgcacaggcctggtttaacactcatagggagcttttggagagcaactttactttagtgggggatgatggaactaacaaagaagccacaagcacaggaaagttgaaccaggagaatgagcacatctataacctgtggtgttctggtcgagtgtgctgtgagggcatgcttatccagctgaggttcctcaagagacaagacttactgaatgtcctggcccggatgatgaggccagtgagtgatcaagtgcaaataaaagtaaccatgaatgatgaagacatggatacctacgtatttgctgttggcacacggaaagccttggtgcgactacagaaagagatgcaggatttgagtgagttttgtagtgataaacctaagtctggagcaaagtatggactgccggactctttggccatcctgtcagagatgggagaagtcacagacggaatgatggatacaaagatggttcactttcttacacactatgctgacaagattgaatctgttcatttttcagaccagttctctggtccaaaaattatgcaagaggaaggtcagcctttaaagctacctgacactaagaggacactgttgtttacatttaatgtgcctggctcaggtaacacttacccaaaggatatggaggcactgctacccctgatgaacatggtgatttattctattgataaagccaaaaagttccgactcaacagagaaggcaaacaaaaagcagataagaaccgtgcccgagtagaagagaacttcttgaaactgacacatgtgcaaagacaggaagcagcacagtctcggcgggaggagaaaaaaagagcagagaaggagcgaatcatgaatgaggaagatcctgagaaacagcgcaggctggaggaggctgcattgaggcgtgagcaaaagaagttggaaaagaagcaaatgaaaatgaaacaaatcaaagtgaaagccatgtaaagccatcccagagatttgagttctgatgccacctgtaagctctgaattcacaggaaacatgaaaaacgccagtccatttctcaaccttaaatttcagacagtcttgggcaactgagaaatccttatttcatcatctactctgtttggggtttggggttttacagagattgaagatacctggaaagggctctgtttcaagaatttttttttccagataatcaaattattttgattattttattacaaatcatcagtgcttttagtacttcagtgtttaaagaaataccatgaaatttataggtagataaccagattgttgctttttgtttaaaccaagcagttgaaatggctataaagactgactctaaaccaagattctgcaaataatgattggaattgcacaataaacattgcttgatgttttcttgtatgtctacattaaacttgagaaaaagtaaaaattagaacactgtatgtagtaatgaaatttcagggacccagaacataatgtagtatatgtttttaggtgggagatgctgataacaaaattaataggaagtctgtaggcattaggatactgacatgtacatggaaaattctagggacaggagcatcattttttccttacctgataccacgaaccagtgacaacgtgaatgctgtattttaagtggttgtatgtttattttcttgagtaacaaatgcatgaaaaattaatgcttcacctaggtaagatcattggtctgtgtgaaatcacaaatgttttttccttcttggttgctgcagcctggtggatgttcatggagaagctctgttctctatattatggctgtgtgccgttgcttctccctctgcttttatcttttccacagttgaggctgggtatgttctttcaaagaaatggccatgaatatgtgtaagtatacttttgaaaatgagctttcctaaactattgagagttctttccacctcttgcggaaccaactcttggaggagaggcccatgtatctgcacgagcacttagcttgttcagatctctgcattttataaatgcttcttaccaagaaagcatttttaggtcattgcttgtaccaggtaatttttgccggggatgggtaagggttgggttttctggtgggagtggggtggtgggtattttttgttgatgctttagtgcaggcctgttctgaggcaataacaagttgctgtgaaaacagcatgtgctgctgcctttgtaactgcatggaaacttttcacatgggtttttctccaagttaatacagaaatatgtaaactgagagatgcaaatgtaatatttttaacagttcatgaagttgttattaaaataactaacataaaacttaattactttaatattatataattatagtagtggccttgttttacaaacctttaaattacattttagaaatcaaagttgatagtcttagttatcttttgagtaagaaaagctttcctaaagtcccatacatttggaccatggcagctaattttgtaacttaagcattcatatgaactacctatggacatctattaaagtgattgacaaaa

SEQ ID NO: 430580 - DNA, 3016 bp, Homo sapiens
cgctcgcattctacgtaacggacggcggaggctacgtgaagagaggcgcggcgtgactgagctacggttctggctgcgtcctagaggcatccggggcagtaaaaccgctgcgatcgcggaggcggcggccaggccgagaggcaggccgggcaggggtgtcggacgcagggcgctgggccgggtttcggcttcggccacagctttttttctcaaggtgcaatgaaagccttccacactttctgtgttgtccttctggtgtttgggagtgtctctgaagccaagtttgatgattttgaggatgaggaggacatagtagagtatgatgataatgacttcgctgaatttgaggatgtcatggaagactctgttactgaatctcctcaacgggtcataatcactgaagatgatgaagatgagaccactgtggagttggaagggcaggatgaaaaccaagaaggagattttgaagatgcagatacccaggagggagatactgagagtgaaccatatgatgatgaagaatttgaaggttatgaagacaaaccagatacttcttctagcaaaaataaagacccaataacgattgttgatgttcctgcacacctccagaacagctgggagagttattatctagaaattttgatggtgactggtctgcttgcttatatcatgaattacatcattgggaagaataaaaacagtcgccttgcacaggcctggtttaacactcatagggagcttttggagagcaactttactttagtgggggatgatggaactaacaaagaagccacaagcacaggaaagttgaaccaggagaatgagcacatctataacctgtggtgttctggtcgagtgtgctgtgagggcatgcttatccagctgaggttcctcaagagacaagacttactgaatgtcctggcccggatgatgaggccagtgagtgatcaagtgcaaataaaagtaaccatgaatgatgaagacatggatacctacgtatttgctgttggcacacggaaagccttggtgcgactacagaaagagatgcaggatttgagtgagttttgtagtgataaacctaagtctggagcaaagtatggactgccggactctttggccatcctgtcagagatgggagaagtcacagacggaatgatggatacaaagatggttcactttcttacacactatgctgacaagattgaatctgttcatttttcagaccagttctctggtccaaaaattatgcaagaggaaggtcagcctttaaagctacctgacactaagaggacactgttgtttacatttaatgtgcctggctcaggtaacacttacccaaaggatatggaggcactgctacccctgatgaacatggtgatttattctattgataaagccaaaaagttccgactcaacagagaactgtaagctctgaattcacaggaaacatgaaaaacgccagtccatttctcaaccttaaatttcagacagtcttgggcaactgagaaatccttatttcatcatctactctgtttggggtttggggttttacagagattgaagatacctggaaagggctctgtttcaagaatttttttttccagataatcaaattattttgattattttataaaaggaatgatctatgaaatctgtgtaggttttaaatattttaaaaattataatacaaatcatcagtgcttttagtacttcagtgtttaaagaaataccatgaaatttataggtagataaccagattgttgctttttgtttaaaccaagcagttgaaatggctataaagactgactctaaaccaagattctgcaaataatgattggaattgcacaataaacattgcttgatgttttcttgtatgtctacattaaacttgagaaaaagtaaaaattagaacactgtatgtagtaatgaaatttcagggacccagaacataatgtagtatatgtttttaggtgggagatgctgataacaaaattaataggaagtctgtaggcattaggatactgacatgtacatggaaaattctagggacaggagcatcattttttccttacctgataccacgaaccagtgacaacgtgaatgctgtattttaagtggttgtatgtttattttcttgagtaacaaatgcatgaaaaattaatgcttcacctaggtaagatcattggtctgtgtgaaatcacaaatgttttttccttcttggttgctgcagcctggtggatgttcatggagaagctctgttctctatattatggctgtgtgccgttgcttctccctctgcttttatcttttccacagttgaggctgggtatgttctttcaaagaaatggccatgaatatgtgtaagtatacttttgaaaatgagctttcctaaactattgagagttctttccacctcttgcggaaccaactcttggaggagaggcccatgtatctgcacgagcacttagcttgttcagatctctgcattttataaatgcttcttaccaagaaagcatttttaggtcattgcttgtaccaggtaatttttgccggggatgggtaagggttgggttttctggtgggagtggggtggtgggtattttttgttgatgctttagtgcaggcctgttctgaggcaataacaagttgctgtgaaaacagcatgtgctgctgcctttgtaactgcatggaaacttttcacatgggtttttctccaagttaatacagaaatatgtaaactgagagatgcaaatgtaatatttttaacagttcatgaagttgttattaaaataactaacataaaacttaattactttaatattatataattatagtagtggccttgttttacaaacctttaaattacattttagaaatcaaagttgatagtcttagttatcttttgagtaagaaaagctttcctaaagtcccatacatttggaccatggcagctaattttgtaacttaagcattcatatgaactacctatggacatctattaaagtgattgacaaaa

SEQ ID NO: 430581 - DNA, 2487 bp, Homo sapiens
  misc_feature (132)..(132): n is a, c, g, or t
ccggaagatggacctctcagcttaccaccatatcctagcctccctatagctcccattcctattaatgataatcttcctctaatctcccctgcctcaaggaaatctgccaacaatattgaaagtaggccagtnagtgatcaagtgcaaataaaagtaaccatgaatgatgaagacatggatacctacgtatttgctgttggcacacggaaagccttggtgcgactacagaaagagatgcaggatttgagtgagttttgtagtgataaacctaagtctggagcaaagtatggactgccggactctttggccatcctgtcagagatgggagaagtcacagacggaatgatggatacaaagatggttcactttcttacacactatgctgacaagattgaatctgttcatttttcagaccagttctctggtccaaaaattatgcaagaggaaggtcagcctttaaagctacctgacactaagaggacactgttgtttacatttaatgtgcctggctcaggtaacacttacccaaaggatatggaggcactgctacccctgatgaacatggtgatttattctattgataaagccaaaaagttccgactcaacagagaaggcaaacaaaaagcagataagaaccgtgcccgagtagaagagaacttcttgaaactgacacatgtgcaaagacaggaagcagcacagtctcggcgggaggagaaaaaaagagcagagaaggagcgaatcatgaatgaggaagatcctgagaaacagcgcaggctggaggaggctgcattgaggcgtgagcaaaagaagttggaaaagaagcaaatgaaaatgaaacaaatcaaagtgaaagccatgtaaagccatcccagagatttgagttctgatgccacctgtaagctctgaattcacaggaaacatgaaaaacgccagtccatttctcaaccttaaatttcagacagtcttgggcaactgagaaatccttatttcatcatctactctgtttggggtttggggttttacagagattgaagatacctggaaagggctctgtttcaagaatttttttttccagataatcaaattattttgattattttataaaaggaatgatctatgaaatctgtgtaggttttaaatattttaaaaattataatacaaatcatcagtgcttttagtacttcagtgtttaaagaaataccatgaaatttataggtagataaccagattgttgctttttgtttaaaccaagcagttgaaatggctataaagactgactctaaaccaagattctgcaaataatgattggaattgcacaataaacattgcttgatgttttcttgtatgtctacattaaacttgagaaaaagtaaaaattagaacactgtatgtagtaatgaaatttcagggacccagaacataatgtagtatatgtttttaggtgggagatgctgataacaaaattaataggaagtctgtaggcattaggatactgacatgtacatggaaaattctagggacaggagcatcattttttccttacctgataccacgaaccagtgacaacgtgaatgctgtattttaagtggttgtatgtttattttcttgagtaacaaatgcatgaaaaattaatgcttcacctaggtaagatcattggtctgtgtgaaatcacaaatgttttttccttcttggttgctgcagcctggtggatgttcatggagaagctctgttctctatattatggctgtgtgccgttgcttctccctctgcttttatcttttccacagttgaggctgggtatgttctttcaaagaaatggccatgaatatgtgtaagtatacttttgaaaatgagctttcctaaactattgagagttctttccacctcttgcggaaccaactcttggaggagaggcccatgtatctgcacgagcacttagcttgttcagatctctgcattttataaatgcttcttaccaagaaagcatttttaggtcattgcttgtaccaggtaatttttgccggggatgggtaagggttgggttttctggtgggagtggggtggtgggtattttttgttgatgctttagtgcaggcctgttctgaggcaataacaagttgctgtgaaaacagcatgtgctgctgcctttgtaactgcatggaaacttttcacatgggtttttctccaagttaatacagaaatatgtaaactgagagatgcaaatgtaatatttttaacagttcatgaagttgttattaaaataactaacataaaacttaattactttaatattatataattatagtagtggccttgttttacaaacctttaaattacattttagaaatcaaagttgatagtcttagttatcttttgagtaagaaaagctttcctaaagtcccatacatttggaccatggcagctaattttgtaacttaagcattcatatgaactacctatggacatctattaaagtgattgacaaaa

SEQ ID NO: 430582 - DNA, 3069 bp, Homo sapiens
cgctcgcattctacgtaacggacggcggaggctacgtgaagagaggcgcggcgtgactgagctacggttctggctgcgtcctagaggcatccggggcagtaaaaccgctgcgatcgcggaggcggcggccaggccgagaggcaggccgggcaggggtgtcggacgcagggcgctgggccgggtttcggcttcggccacagctttttttctcaaggtgcaatgaaagccttccacactttctgtgttgtccttctggtgtttgggagtgtctctgaagccaagtttgatgattttgaggatgaggaggacatagtagagtatgatgataatgacttcgctgaatttgaggatgtcatggaagactctgttactgaatctcctcaacgggtcataatcactgaagatgatgaagatgagaccactgtggagttggaagggcaggatgaaaaccaagaaggagattttgaagatgcagatacccaggagggagatactgagagtgaaccatatgatgatgaagaatttgaaggttatgaagacaaaccagatacttcttctagcaaaaataaagacccaataacgattgttgatgttcctgcacacctccagaacagctgggagagttattatctagaaattttgatggtgactggtctgcttgcttatatcatgaattacatcattgggaagaataaaaacagtcgccttgcacaggcctggtttaacactcatagggagcttttggagagcaactttactttagtgggggatgatggaactaacaaagaagccacaagcacaggaaagttgaaccaggagaatgagcacatctataacctgtggtgttctggtcgagtgtgctgtgagggcatgcttatccagctgaggttcctcaagagacaagacttactgaatgtcctggcccggatgatgaggccagtgagtgatcaagtgcaaataaaagtaaccatgaatgatgaagacatggatacctacgtatttgctgttggcacacggaaagccttggtgcgactacagaaagagatgcaggatttgagtgagttttgtagtgataaacctaagtctggagcaaagtatggactgccggactctttggccatcctgtcagagatgggagaagtcacagacggaatgatggatacaaagatggttcactttcttacacactatgctgacaagattgaatctgttcatttttcagaccagttctctggtccaaaaattatgcaagaggaaggtcagcctttaaagctacctgacactaagaggacactgttgtttacatttaatgtgcctggctcaggtaacacttacccaaaggatatggaggcactgctacccctgatgaacatggtgatttattctattgataaagccaaaaagttccgactcaacagagaaggcaaacaaaaagcagataagaaccgtgcccgagtagaagagaacttcttgaaactgacacatgtgcaaagacaggaagcagcacagtctcggcgggaggagaaaaaaagagcagagaaggagcgaatcatgaatgaggaagatcctgagaaacagcgcaggctggaggaggctgcattgaggcgtgagcaaaagaagttggaaaagaagcaaatgaaaatgaaacaaatcaaagtgaaagccatgtaaagccatcccagagatttgagttctgatgccacctgtaagctctgaattcacaggaaacatgaaaaacgccagtccatttctcaaccttaaatttcagacagtcttgggcaactgagaaatccttatttcatcatctactctgtttggggtttggggttttacagagattgaagatacctggaaagggctctgtttcaagaatttttttttccagataatcaaattattttgattattttataaaaggaatgatctatgaaatctgtgtaggttttaaatattttaaaaattataatacaaatcatcagtgcttttagtacttcagtgtttaaagaaataccatgaaatttataggtagataaccagattgttgctttttgtttaaaccaagcagttgaaatggctataaagactgactctaaaccaagattctgcaaataatgattggaattgcacaataaacattgcttgatgttttcttgtatgtctacattaaacttgagaaaaagtaaaaattagaacactgtatgtagtaatgaaatttcagggacccagaacataatgtagtatatgtttttaggtgggagatgctgataacaaaattaataggaagtctgtaggcattaggatactgacatgtacatggaaaattctagggacaggagcatcattttttccttacctgataccacgaaccagtgacaacgtgaatgctgtattttaagtggttgtatgtttattttcttgagtaacaaatgcatgaaaaattaatgcttcacctaggtaagatcattggtctgtgtgaaatcacaaatgttttttccttcttggttgctgcagcctggtggatgttcatggagaagctctgttctctatattatggctgtgtgccgttgcttctccctctgcttttatcttttccacagttgaggctgggtatgttctttcaaagaaatggccatgaatatgtgtaagtatacttttgaaaatgagctttcctaaactattgagagttctttccacctcttgcggaaccaactcttggaggagaggcccatgtatctgcacgagcacttagcttgttcagatctctgcattttataaatgcttcttaccaagaaagcatttttaggtcattgcttgtaccaggtaatttttgccggatggtaccggtgggtccggggagtgggggggggatcgtggagcttagtgccggcgtcggggcataccagtgctctgaaccgcctgtgtgtgcctgtatgcgcgggaccttcccctggttccccctctcccatttccgggagccgtcgttcttccgccgcggcttcaccacccccctcttttttgggggcgcccccttacacggttttcttgagccccccggggttcccctctgaa

SEQ ID NO: 430583 - DNA, 1115 bp, Homo sapiens
cgctcgcattctacgtaacggacggcggaggctacgtgaagagaggcgcggcgtgactgagctacggttctggctgcgtcctagaggcatccggggcagtaaaaccgctgcgatcgcggaggcggcggccaggccgagaggcaggccgggcaggggtgtcggacgcagggcgctgggccgggtttcggcttcggccacagctttttttctcaaggtgcaatgaaagccttccacactttctgtgttgtccttctggtgtttgggagtgtctctgaagccaagtttgatgattttgaggatgaggaggacatagtagagtatgatgataatgacttcgctgaatttgaggatgtcatggaagactctgttactgaatctcctcaacgggtcataatcactgaagatgatgaagatgagaccactgtggagttggaagggcaggatgaaaaccaagaaggagattttgaagatgcagatacccaggagggagatactgagagtgaaccatatgatgatgaagaatttgaaggttatgaagacaaaccagatacttcttctagcaaaaataaagacccaataacgattgttgatgttcctgcacacctccagaacagctgggagagttattatctagaaattttgatggtgactggtctgcttgcttatatcatgaattacatcattgggaagaataaaaacagtcgccttgcacaggcctggtttaacactcatagggagcttttggagagcaactttactttagtgggggatgatggaactaacaaagaagccacaagcacaggaaagttgaaccaggagaatgagcacatctataacctgtggtgttctggtcgagtgtgctgtgagggcatgcttatccagctgaggttcctcaagagacaagacttactgaatgtcctggcccggatgatgaggccagtgagtgatcaagtgcaaataaaagtaaccatgaatgatgaagacatggatacctacgtatttgctgttggcacacggaaagccttggtgcgactacagaaagagatgcaggatttgagtaagtcttgtctcttgaggaacctcagctggataagcatgccctcacagaacactcg

SEQ ID NO: 430584 - DNA, 303 bp, Homo sapiens
agatttttactgtttataaaatctgatcagtatgtatagaatggcaatccattttggggttctctttttttttaagctttttttctcaaggtgcaatgaaagccttccacactttctgtgttgtccttctggtgtttgggagtgtctctgaagccaagtttgatgattttgaggatgaggaggacatagtagagtatgatgataatgacttcgctgaatttgaggatgtcatggaagactctgttactgaatctcctcaacgggtcataatcactgaagatgatgaagatgagaccactgtgg

SEQ ID NO: 430585 - DNA, 6933 bp, Homo sapiens
tgcggccgccgcccccggctgcgcgctgagccgccggccccccgagcgccacggccggagctgcggcggcggcatcatggccccgaccctgctccagaagctcttcaacaaaaggggcagcagcggcagctccgcggcggcgtctgcccagggcagggctcctaaggaaggacccgcctttagttggtcatgttcggagtttgacctgaatgagattcgcctgatagtttaccaggactgtgacaggagaggcagacaagtcttgtttgactctaaagctgttcaaaagattgaggaggtgacagctcagaaaacagaggatgttcctattaaaatatcagccaagtgctgccagggaagcagcagtgtcagcagcagtagcagcagcagcatctcttcccacagttcttctgggggatcttcacatcatgctaaggaacagcttccaaagtaccagtacacaagaccagcttccgatgtcaacatgttaggggaaatgatgtttggctcagttgccatgagttacaaaggctccaccttaaagatacactacatacgttctcctccacaactgatgattagtaaagtcttctctgctagaatgggcagcttctgtggaagtacaaataacttgcaagacagctttgagtacatcaaccaagatcctaatttgggaaaactgaacacaaatcaaaatagtttgggtccttgtcgtactggaagtaacctagcacacagcacaccagttgatatgccaagcagaggacagaatgaagacagggacagtggcattgctcgatcagcctcactaagcagtcttttgatcacacctttcccatctccaagctcctctacatcttcttccagcagttaccagcgccgctggcttcgaagtcagacaacaagtttggaaaatggcatcatcccaagaaggtcaactgatgagacattcagcttggctgaagaaacctgtagctctaatccagctatggttaggaggaagaaaattgccataagcatcatcttttccctatgtgagaaagaagaagcacaaaggaatttccaggacttcttcttttctcattttcccctgtttgaatctcacatgaacaggctgaagagtgcaattgaaaaggctatgatctcctgtaggaaaatagcagaatcaagtctccgagtccagttttatgtcagccgtttgatggaagctctgggagaattcagaggaactatctggaacttatattctgttccaaggatagctgaacctgtatggcttactatgatgtccggcactttggaaaaaaaccagctctgccagcgctttctcaaggagtttacacttctgatagaacagataaataaaaaccagttttttgctgccttactgactgcggtgttaacctaccacctggcctgggtcccaactgtcatgcctgtggatcaccctcccatcaaagccttctcagagaaacgtacctcccagtcagtgaacatgctggccaaaacacatccgtataatcctctttgggcacagctgggtgatctttacggagccataggctctccagtgagactgactcgcaccgtagtggtagggaagcagaaggacttagtccagcgaatactttatgtcctgacctactttctccgttgctctgagctacaagagaaccagctgacctggagtggcaatcatggtgaaggtgaccaagttttaaatgggagcaagatcataacagccttggagaaaggagaggtggaggagtctgagtatgtggtcattacggtgaggaacgagcccgctcttgtaccccccatcctaccaccaacagcagcagagagacacaacccctggccgacagggtttcctgagtgcccagagggcactgacagtagagacctgggtcttaaacctgacaaagaagctaacaggaggccagagcagggttctgaggcttgcagcgcagggtgcctggggccagcatcagacgcttcctggaaacctcagaatgcattttgtggggatgagaaaaataaagaggcaccgcaagatggctcttcaagacttcccagctgtgaagttttgggggcaggaatgaagatggaccagcaagctgtctgtgagctgttgaaagtggagatgcctacaagactgccagaccggtcagtggcctggccttgccctgacagacatctccgggagaaaccttccttagaaaaggtcactttccagattggaagctttgcatctccagagtctgactttgaaagccgcatgaaaaaaatggaggaacgggtgaaggcctgtggcccctccttggaggccagtgaggctgctgatgtggctcaggacccgcaggtttctaggagcccttttaaacctggctttcaggagaatgtttgctgtcctcagaatcggctttcagagggggatgaaggcgagtctgacaagggttttgcagaggacagaggcagcagaaacgacatggcagcagatattgctgggcagctcagccacgctgctgacttgggcacagcctcccacggtgcaggaggaacgggagggaggaggctggaggccactagaggtttgtatgtgaaggctgcggaaggacctgtgctggagcctgttgcccccaggtgtgtccagcggggccctggcctcgtggctggtgcgaatatcccctgtggggatgacaacaagaaggccaacttcaggactgaaggagacattccccgaaatgaaagctcagatagcgccctgggagacagtgacgacgaagcctgcgcttcagccatgctagatctgggtcacggtggtgacaggactggagggtccttggaagtggagctgcctctgccaaggtctcagagcatcagcacccagaatgtaaggaactttggccgctcacttctggcgggctactgccccacatacatgcctgatcttgtgcttcatgggaccggcagtgatgagaagctgaagcagtgcctggtggccgaccttgtccacacagtccatcatccagtcctggatgagccaatagctgaagctgtctgtattatcgcagacacggataaatggagtgtgcaggtagctacaagtcagaggaaagtgacggacaacatgaaactaggccaggatgtcctggtctctagtcaggtgtccagtttgcttcagtccattttacagctctataagcttcacctccctgctgatttttgcatcatgcatcttgaagatagactacaggagatgtaccttaaaagtaaaatgctatctgaatatctccggggacacacacgagtccatgtgaaagaattaggtgtcgtactggggattgaatccaacgacctgcctctgttgactgctattgccagtactcattctccttatgtggctcaaatactcttataagctaaagctcaggacagttcttccttggaagaaaaaaatcaaattctcaactgaaggagaaaggaataagctctctgtgatgtcaaaagcatgagaagagcaaacagaaacagtcattccacctttttgttttgtgtttttgctgtcaagctgatgcttcattgaagacttaggtttacttgacataatagcatttgtgattgtcgtgaacactttaggccatttgttacccatgaatcaacaaagaaactgacctttttggtaggaggaaacataagcactaaacactaagctgttgcaacagattgccttgtgctgtttgggcagaataaagacaagtgacttgagcggggtggtcagcagtgtacataatattccagtaggaaactgcttccaagtttaagcatgagctccccaaactggagaaaacatattttgctattctgagacaacaatcagaatacagactttggattccaggtcacagtttgctttttagacaaggtaaagcaaagaaagccacattgtgccatcttcagctccagtggctttagcagtgactgtttgacataaaacatgtaagaattgcttgttgggaagagtgctttagggacccactgttttcatttcttcttggagtttaccttgtttcagatgcagccatgggtaggtcagagatggattgttggtgcaataaacccaagaatcaatgtagcctcttaatcccatcaagatgtagtttgtagcagcaaagtgtacagtctgaaaccgtatgttttatccttatattttagagctttcagcagcctttttaagagaggccacttaccaaagttatttctataagctcaagagtgtttcggttggtaagttcttccagctgaagccactttttccttatagttaatacaaatgactatttttactttaaaaggcacagctgtcctggtgggaaatgaaacctgcagcagttcaggatgactaatgaaagcaattagcttgaacatttagaaaaaattcatatatgatctaaatttttatattatcatttctgtgccttctaattcctgcatcctgttcaaaacatctttccagacattaacttacacattgtataaaaccgaccaaaatgatttcctaaagttcatgcaaaaaaaaaaaaaaacaacctaattttctgttaatataaaagaaacttcagtttactgaccgtgaaacagactatgtactgacatccagggtaaagtaaaagacttttaaatattggtcattaaaggacaggagctaagctagcaaagcaaaacatctttagcactttgcagatctcaagcagttaaccaggctctgattcccttccactgttttatgaattaattccagttcttttcatgtatctttgaacctaagattatgaagtaatttccctattagggactagaatgacttcagttttttcatttgataaaaatcagaactgctacctttcccttttttaatgatgcaaaatgtagatgagtgcattaaggtttgtaagatctttatcattttatgtcattcattgaaaattgaaatgttcattctttttaatgttttcctatttccttttgcctagcatttgactttggtgttttaagttctgtagttccatgacatcattgtttgctgttgtgttacagagagagaaggaacctcacctgtggctcagctcaccccacatccgtttctcattacgtgtaaataaactgtcagagctgatgttacagcttttacagtttaaagcattcccctcgtctctagttccttttttcttgtttacatgttttgggcactttccctcattcaccaccttccagggtttcatagaaaataacttgttacaaaatcagttcaattctaatgtggacatagtggcatgttcataattagacccatataggggacactgagctttaaatcgttgattctaaactctatacattaaaaaaattcagcccaggcccctcaaagcctgagaaaatttaatttgctcttaatttaatgttccaaaactcactcttggaaaaatgcctgttggaaaactacaggtgggtcacatgtgggggctgtctccgtgacactcaggattccagtcagaacctaatcctcatatctattgcctacaaaaatagaccaagaatgttgctgctcttttataatcctttaaatatttaacattcaagttttctttgtcttaaattcagcctcttcctaaaagcaaaaaagaaaaaaaaaacctcacagaattgtgttgagatccaccgctcacacgccgtacaccacccagtggcttcattctggcttagccgcagaggcaagaaagggaccccacttgctcccatgcccacctcaagaaaaaacataaaacaattttttttaaaaaagaaaagaaatctacctcagttgacaggattccacctttagggtttcttcaacttttaagtcttacctgttgagtgtaacttttgtagcatcttgcttttccaagcaagctagtgaggcatgacagagcagaagtctgtaaatgtccctgtgatggacctctttctagcatgttgcagttttatttttaataaattggtaagtgaaatgaatgtaaaggtaattgtgtacgttttagacatgacaatgaaaatttaaaatgtagcttccatacttgtgcataattccaaagtattttattttttatcaatcagtgttaaatagctttttgtacaggcttcaatccatttttcgaagtgtgctgttttttaatgaaagtaactataatcttttcacatcccatggaactgccgtttacacattgcaactttttaaacttaaccatatttttcaaaattaacgtttttggagggagaaaaatccccgcttgctaaatgatactaaaccgttgtttgggctcttataattaggtcctgagattttataaaaatttagtctgtagctttttaggttcttcactagagttggttgtacataaaaataataaagaatataaagtatcccaaaattcttttaaagtctggatttttccgctaatatgtactttagagaatattttgttcatgcatacttccacgttaaattgaaaatgtcttcagcttctcttggtaaatgtgaaccatttgttttttattgtgcttgggggagagggtattttaatataatttttgcctaaatcaagaagtcccctctgaatgttaatttttaaatgtcaaaatatgatgaacgatatatcttgaaagtgagattgcaatatgcttaaacttaagtggtatttcaaaaacgagaaaattctggaatttgtcatttgaagctccataagagaaattgataggacttcgtttttgatcagtctgaatagataccaatgtcattgtgtgggaattttttttaacttgtttatgtattattttgatccatttttctgtggcatttggtgcaataaaacttttgaatttatcttgaacattttc

SEQ ID NO: 430586 - DNA, 7078 bp, Homo sapiens
gcttttctcacatactgtatagggagtgaaatgatgtttagaactgctggtcattacagaatgttcctcacataacaaaggaacttcaggattgtctccaagtccatgtttatggtcaggataaaccagaagaacattaaaccgttcaggagatgtgcggcggcacagcgaacaccacaaaccagccagagagctggcaagactctgccagatgtgtgagtgatgctgttcctggtgctgggaggatttacagggcgcttttatgcacaaagattaaaaaacacaccggagtagacaggagcactgaccacacggaactcgacaacagttggtcatgttcggagtttgacctgaatgagattcgcctgatagtttaccaggactgtgacaggagaggcagacaagtcttgtttgactctaaagctgttcaaaagattgaggaggtgacagctcagaaaacagaggatgttcctattaaaatatcagccaagtgctgccagggaagcagcagtgtcagcagcagtagcagcagcagcatctcttcccacagttcttctgggggatcttcacatcatgctaaggaacagcttccaaagtaccagtacacaagaccagcttccgatgtcaacatgttaggggaaatgatgtttggctcagttgccatgagttacaaaggctccaccttaaagatacactacatacgttctcctccacaactgatgattagtaaagtcttctctgctagaatgggcagcttctgtggaagtacaaataacttgcaagacagctttgagtacatcaaccaagatcctaatttgggaaaactgaacacaaatcaaaatagtttgggtccttgtcgtactggaagtaacctagcacacagcacaccagttgatatgccaagcagaggacagaatgaagacagggacagtggcattgctcgatcagcctcactaagcagtcttttgatcacacctttcccatctccaagctcctctacatcttcttccagcagttaccagcgccgctggcttcgaagtcagacaacaagtttggaaaatggcatcatcccaagaaggtcaactgatgagacattcagcttggctgaagaaacctgtagctctaatccagctatggttaggaggaagaaaattgccataagcatcatcttttccctatgtgagaaagaagaagcacaaaggaatttccaggacttcttcttttctcattttcccctgtttgaatctcacatgaacaggctgaagagtgcaattgaaaaggctatgatctcctgtaggaaaatagcagaatcaagtctccgagtccagttttatgtcagccgtttgatggaagctctgggagaattcagaggaactatctggaacttatattctgttccaaggatagctgaacctgtatggcttactatgatgtccggcactttggaaaaaaaccagctctgccagcgctttctcaaggagtttacacttctgatagaacagataaataaaaaccagttttttgctgccttactgactgcggtgttaacctaccacctggcctgggtcccaactgtcatgcctgtggatcaccctcccatcaaagccttctcagagaaacgtacctcccagtcagtgaacatgctggccaaaacacatccgtataatcctctttgggcacagctgggtgatctttacggagccataggctctccagtgagactgactcgcaccgtagtggtagggaagcagaaggacttagtccagcgaatactttatgtcctgacctactttctccgttgctctgagctacaagagaaccagctgacctggagtggcaatcatggtgaaggtgaccaagttttaaatgggagcaagatcataacagccttggagaaaggagaggtggaggagtctgagtatgtggtcattacggtgaggaacgagcccgctcttgtaccccccatcctaccaccaacagcagcagagagacacaacccctggccgacagggtttcctgagtgcccagagggcactgacagtagagacctgggtcttaaacctgacaaagaagctaacaggaggccagagcagggttctgaggcttgcagcgcagggtgcctggggccagcatcagacgcttcctggaaacctcagaatgcattttgtggggatgagaaaaataaagaggcaccgcaagatggctcttcaagacttcccagctgtgaagttttgggggcaggaatgaagatggaccagcaagctgtctgtgagctgttgaaagtggagatgcctacaagactgccagaccggtcagtggcctggccttgccctgacagacatctccgggagaaaccttccttagaaaaggtcactttccagattggaagctttgcatctccagagtctgactttgaaagccgcatgaaaaaaatggaggaacgggtgaaggcctgtggcccctccttggaggccagtgaggctgctgatgtggctcaggacccgcaggtttctaggagcccttttaaacctggctttcaggagaatgtttgctgtcctcagaatcggctttcagagggggatgaaggcgagtctgacaagggttttgcagaggacagaggcagcagaaacgacatggcagcagatattgctgggcagctcagccacgctgctgacttgggcacagcctcccacggtgcaggaggaacgggagggaggaggctggaggccactagaggtttgtatgtgaaggctgcggaaggacctgtgctggagcctgttgcccccaggtgtgtccagcggggccctggcctcgtggctggtgcgaatatcccctgtggggatgacaacaagaaggccaacttcaggactgaaggagacattccccgaaatgaaagctcagatagcgccctgggagacagtgacgacgaagcctgcgcttcagccatgctagatctgggtcacggtggtgacaggactggagggtccttggaagtggagctgcctctgccaaggtctcagagcatcagcacccagaatgtaaggaactttggccgctcacttctggcgggctactgccccacatacatgcctgatcttgtgcttcatgggaccggcagtgatgagaagctgaagcagtgcctggtggccgaccttgtccacacagtccatcatccagtcctggatgagccaatagctgaagctgtctgtattatcgcagacacggataaatggagtgtgcaggtagctacaagtcagaggaaagtgacggacaacatgaaactaggccaggatgtcctggtctctagtcaggtgtccagtttgcttcagtccattttacagctctataagcttcacctccctgctgatttttgcatcatgcatcttgaagatagactacaggagatgtaccttaaaagtaaaatgctatctgaatatctccggggacacacacgagtccatgtgaaagaattaggtgtcgtactggggattgaatccaacgacctgcctctgttgactgctattgccagtactcattctccttatgtggctcaaatactcttataagctaaagctcaggacagttcttccttggaagaaaaaaatcaaattctcaactgaaggagaaaggaataagctctctgtgatgtcaaaagcatgagaagagcaaacagaaacagtcattccacctttttgttttgtgtttttgctgtcaagctgatgcttcattgaagacttaggtttacttgacataatagcatttgtgattgtcgtgaacactttaggccatttgttacccatgaatcaacaaagaaactgacctttttggtaggaggaaacataagcactaaacactaagctgttgcaacagattgccttgtgctgtttgggcagaataaagacaagtgacttgagcggggtggtcagcagtgtacataatattccagtaggaaactgcttccaagtttaagcatgagctccccaaactggagaaaacatattttgctattctgagacaacaatcagaatacagactttggattccaggtcacagtttgctttttagacaaggtaaagcaaagaaagccacattgtgccatcttcagctccagtggctttagcagtgactgtttgacataaaacatgtaagaattgcttgttgggaagagtgctttagggacccactgttttcatttcttcttggagtttaccttgtttcagatgcagccatgggtaggtcagagatggattgttggtgcaataaacccaagaatcaatgtagcctcttaatcccatcaagatgtagtttgtagcagcaaagtgtacagtctgaaaccgtatgttttatccttatattttagagctttcagcagcctttttaagagaggccacttaccaaagttatttctataagctcaagagtgtttcggttggtaagttcttccagctgaagccactttttccttatagttaatacaaatgactatttttactttaaaaggcacagctgtcctggtgggaaatgaaacctgcagcagttcaggatgactaatgaaagcaattagcttgaacatttagaaaaaattcatatatgatctaaatttttatattatcatttctgtgccttctaattcctgcatcctgttcaaaacatctttccagacattaacttacacattgtataaaaccgaccaaaatgatttcctaaagttcatgcaaaaaaaaaaaaaaacaacctaattttctgttaatataaaagaaacttcagtttactgaccgtgaaacagactatgtactgacatccagggtaaagtaaaagacttttaaatattggtcattaaaggacaggagctaagctagcaaagcaaaacatctttagcactttgcagatctcaagcagttaaccaggctctgattcccttccactgttttatgaattaattccagttcttttcatgtatctttgaacctaagattatgaagtaatttccctattagggactagaatgacttcagttttttcatttgataaaaatcagaactgctacctttcccttttttaatgatgcaaaatgtagatgagtgcattaaggtttgtaagatctttatcattttatgtcattcattgaaaattgaaatgttcattctttttaatgttttcctatttccttttgcctagcatttgactttggtgttttaagttctgtagttccatgacatcattgtttgctgttgtgttacagagagagaaggaacctcacctgtggctcagctcaccccacatccgtttctcattacgtgtaaataaactgtcagagctgatgttacagcttttacagtttaaagcattcccctcgtctctagttccttttttcttgtttacatgttttgggcactttccctcattcaccaccttccagggtttcatagaaaataacttgttacaaaatcagttcaattctaatgtggacatagtggcatgttcataattagacccatataggggacactgagctttaaatcgttgattctaaactctatacattaaaaaaattcagcccaggcccctcaaagcctgagaaaatttaatttgctcttaatttaatgttccaaaactcactcttggaaaaatgcctgttggaaaactacaggtgggtcacatgtgggggctgtctccgtgacactcaggattccagtcagaacctaatcctcatatctattgcctacaaaaatagaccaagaatgttgctgctcttttataatcctttaaatatttaacattcaagttttctttgtcttaaattcagcctcttcctaaaagcaaaaaagaaaaaaaaaacctcacagaattgtgttgagatccaccgctcacacgccgtacaccacccagtggcttcattctggcttagccgcagaggcaagaaagggaccccacttgctcccatgcccacctcaagaaaaaacataaaacaattttttttaaaaaagaaaagaaatctacctcagttgacaggattccacctttagggtttcttcaacttttaagtcttacctgttgagtgtaacttttgtagcatcttgcttttccaagcaagctagtgaggcatgacagagcagaagtctgtaaatgtccctgtgatggacctctttctagcatgttgcagttttatttttaataaattggtaagtgaaatgaatgtaaaggtaattgtgtacgttttagacatgacaatgaaaatttaaaatgtagcttccatacttgtgcataattccaaagtattttattttttatcaatcagtgttaaatagctttttgtacaggcttcaatccatttttcgaagtgtgctgttttttaatgaaagtaactataatcttttcacatcccatggaactgccgtttacacattgcaactttttaaacttaaccatatttttcaaaattaacgtttttggagggagaaaaatccccgcttgctaaatgatactaaaccgttgtttgggctcttataattaggtcctgagattttataaaaatttagtctgtagctttttaggttcttcactagagttggttgtacataaaaataataaagaatataaagtatcccaaaattcttttaaagtctggatttttccgctaatatgtactttagagaatattttgttcatgcatacttccacgttaaattgaaaatgtcttcagcttctcttggtaaatgtgaaccatttgttttttattgtgcttgggggagagggtattttaatataatttttgcctaaatcaagaagtcccctctgaatgttaatttttaaatgtcaaaatatgatgaacgatatatcttgaaagtgagattgcaatatgcttaaacttaagtggtatttcaaaaacgagaaaattctggaatttgtcatttgaagctccataagagaaattgataggacttcgtttttgatcagtctgaatagataccaatgtcattgtgtgggaattttttttaacttgtttatgtattattttgatccatttttctgtggcatttggtgcaataaaacttttgaatttatcttgaacattttc

SEQ ID NO: 430587 - DNA, 245 bp, Homo sapiens
gttttgctttttcattagttttaaatgataatctatcaaacttagtacctagaaataatactttctcataaaaagaaataatactttctcataaaaccatgctcttttaaagtaatattcttttcttttctcaatattcaggattgaatccaacgacctgcctctgttgactgctattgccagtactcattctccttatgtggctcaaatactcttataagctaaagctcaggacagttcttcct

SEQ ID NO: 430588 - DNA, 755 bp, Homo sapiens
tacatttttagctgtgcattttaatgggccacatgttgttttaggtctcagagcatcagcacccagaatgtaaggaactttggccgctcacttctggcgggctactgccccacatacatgcctgatcttgtgcttcatgggaccggcagtgatgagaagctgaagcagtgcctggtggccgaccttgtccacacagtccatgtaagtgatcccagtgtggagcctctggctgctgacagtgtgtcagtcaaggtcttggctgacaacaggtgtttagactgaagagagactagttaaggggttgtttatggagatgtgggcagggttatgggaaccagctagggctagtgaggcacctggggcctagcagcagctggaagctagaaagcacacctgggcctgacagagtaaggggagggtgcgtgacatcagagccctggagaacctaagccaggacgaggggcggcctggctgcaggagcagtgaggagggggtgacttcctgccatccctcctcccattctctggtctctttctggtgcctctcattggctgagcccggctgaaagccagagagcaggggcacagctgatgcagacacacagccttgtggtgcatagaggtcagcctcctggggcccagaacagaacacagaagggcaaggagctgctctgggggtggtgggttagcagataggctgggcaaatggaataaacagcacagatggtgacaattatatgccgtcacggtgaggac

SEQ ID NO: 430589 - DNA, 7023 bp, Homo sapiens
tgcggccgccgcccccggctgcgcgctgagccgccggccccccgagcgccacggccggagctgcggcggcggcatcatggccccgaccctgctccagaagctcttcaacaaaaggggcagcagcggcagctccgcggcggcgtctgcccagggcagggctcctaaggaaggacccgcctttagttggtcatgttcggagtttgacctgaatgagattcgcctgatagtttaccaggactgtgacaggagaggcagacaagtcttgtttgactctaaagctgttcaaaagattgaggaggtgacagctcagaaaacagaggatgttcctattaaaatatcagccaagtgctgccagggaagcagcagtgtcagcagcagtagcagcagcagcatctcttcccacagttcttctgggggatcttcacatcatgctaaggaacagcttccaaagtaccagtacacaagaccagcttccgatgtcaacatgttaggggaaatgatgtttggctcagttgccatgagttacaaaggctccaccttaaagatacactacatacgttctcctccacaactgatgattagtaaagtcttctctgctagaatgggcagcttctgtggaagtacaaataacttgcaagacagctttgagtacatcaaccaagatcctaatttgggaaaactgaacacaaatcaaaatagtttgggtccttgtcgtactggaagtaacctaggtctgctgcaagcatgcagcagcaaactgctgcagggggtagctgaaggaggacctctccggctcacccggagtgcttctttctttgcagcacacagcacaccagttgatatgccaagcagaggacagaatgaagacagggacagtggcattgctcgatcagcctcactaagcagtcttttgatcacacctttcccatctccaagctcctctacatcttcttccagcagttaccagcgccgctggcttcgaagtcagacaacaagtttggaaaatggcatcatcccaagaaggtcaactgatgagacattcagcttggctgaagaaacctgtagctctaatccagctatggttaggaggaagaaaattgccataagcatcatcttttccctatgtgagaaagaagaagcacaaaggaatttccaggacttcttcttttctcattttcccctgtttgaatctcacatgaacaggctgaagagtgcaattgaaaaggctatgatctcctgtaggaaaatagcagaatcaagtctccgagtccagttttatgtcagccgtttgatggaagctctgggagaattcagaggaactatctggaacttatattctgttccaaggatagctgaacctgtatggcttactatgatgtccggcactttggaaaaaaaccagctctgccagcgctttctcaaggagtttacacttctgatagaacagataaataaaaaccagttttttgctgccttactgactgcggtgttaacctaccacctggcctgggtcccaactgtcatgcctgtggatcaccctcccatcaaagccttctcagagaaacgtacctcccagtcagtgaacatgctggccaaaacacatccgtataatcctctttgggcacagctgggtgatctttacggagccataggctctccagtgagactgactcgcaccgtagtggtagggaagcagaaggacttagtccagcgaatactttatgtcctgacctactttctccgttgctctgagctacaagagaaccagctgacctggagtggcaatcatggtgaaggtgaccaagttttaaatgggagcaagatcataacagccttggagaaaggagaggtggaggagtctgagtatgtggtcattacggtgaggaacgagcccgctcttgtaccccccatcctaccaccaacagcagcagagagacacaacccctggccgacagggtttcctgagtgcccagagggcactgacagtagagacctgggtcttaaacctgacaaagaagctaacaggaggccagagcagggttctgaggcttgcagcgcagggtgcctggggccagcatcagacgcttcctggaaacctcagaatgcattttgtggggatgagaaaaataaagaggcaccgcaagatggctcttcaagacttcccagctgtgaagttttgggggcaggaatgaagatggaccagcaagctgtctgtgagctgttgaaagtggagatgcctacaagactgccagaccggtcagtggcctggccttgccctgacagacatctccgggagaaaccttccttagaaaaggtcactttccagattggaagctttgcatctccagagtctgactttgaaagccgcatgaaaaaaatggaggaacgggtgaaggcctgtggcccctccttggaggccagtgaggctgctgatgtggctcaggacccgcaggtttctaggagcccttttaaacctggctttcaggagaatgtttgctgtcctcagaatcggctttcagagggggatgaaggcgagtctgacaagggttttgcagaggacagaggcagcagaaacgacatggcagcagatattgctgggcagctcagccacgctgctgacttgggcacagcctcccacggtgcaggaggaacgggagggaggaggctggaggccactagaggtttgtatgtgaaggctgcggaaggacctgtgctggagcctgttgcccccaggtgtgtccagcggggccctggcctcgtggctggtgcgaatatcccctgtggggatgacaacaagaaggccaacttcaggactgaaggagacattccccgaaatgaaagctcagatagcgccctgggagacagtgacgacgaagcctgcgcttcagccatgctagatctgggtcacggtggtgacaggactggagggtccttggaagtggagctgcctctgccaaggtctcagagcatcagcacccagaatgtaaggaactttggccgctcacttctggcgggctactgccccacatacatgcctgatcttgtgcttcatgggaccggcagtgatgagaagctgaagcagtgcctggtggccgaccttgtccacacagtccatcatccagtcctggatgagccaatagctgaagctgtctgtattatcgcagacacggataaatggagtgtgcaggtagctacaagtcagaggaaagtgacggacaacatgaaactaggccaggatgtcctggtctctagtcaggtgtccagtttgcttcagtccattttacagctctataagcttcacctccctgctgatttttgcatcatgcatcttgaagatagactacaggagatgtaccttaaaagtaaaatgctatctgaatatctccggggacacacacgagtccatgtgaaagaattaggtgtcgtactggggattgaatccaacgacctgcctctgttgactgctattgccagtactcattctccttatgtggctcaaatactcttataagctaaagctcaggacagttcttccttggaagaaaaaaatcaaattctcaactgaaggagaaaggaataagctctctgtgatgtcaaaagcatgagaagagcaaacagaaacagtcattccacctttttgttttgtgtttttgctgtcaagctgatgcttcattgaagacttaggtttacttgacataatagcatttgtgattgtcgtgaacactttaggccatttgttacccatgaatcaacaaagaaactgacctttttggtaggaggaaacataagcactaaacactaagctgttgcaacagattgccttgtgctgtttgggcagaataaagacaagtgacttgagcggggtggtcagcagtgtacataatattccagtaggaaactgcttccaagtttaagcatgagctccccaaactggagaaaacatattttgctattctgagacaacaatcagaatacagactttggattccaggtcacagtttgctttttagacaaggtaaagcaaagaaagccacattgtgccatcttcagctccagtggctttagcagtgactgtttgacataaaacatgtaagaattgcttgttgggaagagtgctttagggacccactgttttcatttcttcttggagtttaccttgtttcagatgcagccatgggtaggtcagagatggattgttggtgcaataaacccaagaatcaatgtagcctcttaatcccatcaagatgtagtttgtagcagcaaagtgtacagtctgaaaccgtatgttttatccttatattttagagctttcagcagcctttttaagagaggccacttaccaaagttatttctataagctcaagagtgtttcggttggtaagttcttccagctgaagccactttttccttatagttaatacaaatgactatttttactttaaaaggcacagctgtcctggtgggaaatgaaacctgcagcagttcaggatgactaatgaaagcaattagcttgaacatttagaaaaaattcatatatgatctaaatttttatattatcatttctgtgccttctaattcctgcatcctgttcaaaacatctttccagacattaacttacacattgtataaaaccgaccaaaatgatttcctaaagttcatgcaaaaaaaaaaaaaaacaacctaattttctgttaatataaaagaaacttcagtttactgaccgtgaaacagactatgtactgacatccagggtaaagtaaaagacttttaaatattggtcattaaaggacaggagctaagctagcaaagcaaaacatctttagcactttgcagatctcaagcagttaaccaggctctgattcccttccactgttttatgaattaattccagttcttttcatgtatctttgaacctaagattatgaagtaatttccctattagggactagaatgacttcagttttttcatttgataaaaatcagaactgctacctttcccttttttaatgatgcaaaatgtagatgagtgcattaaggtttgtaagatctttatcattttatgtcattcattgaaaattgaaatgttcattctttttaatgttttcctatttccttttgcctagcatttgactttggtgttttaagttctgtagttccatgacatcattgtttgctgttgtgttacagagagagaaggaacctcacctgtggctcagctcaccccacatccgtttctcattacgtgtaaataaactgtcagagctgatgttacagcttttacagtttaaagcattcccctcgtctctagttccttttttcttgtttacatgttttgggcactttccctcattcaccaccttccagggtttcatagaaaataacttgttacaaaatcagttcaattctaatgtggacatagtggcatgttcataattagacccatataggggacactgagctttaaatcgttgattctaaactctatacattaaaaaaattcagcccaggcccctcaaagcctgagaaaatttaatttgctcttaatttaatgttccaaaactcactcttggaaaaatgcctgttggaaaactacaggtgggtcacatgtgggggctgtctccgtgacactcaggattccagtcagaacctaatcctcatatctattgcctacaaaaatagaccaagaatgttgctgctcttttataatcctttaaatatttaacattcaagttttctttgtcttaaattcagcctcttcctaaaagcaaaaaagaaaaaaaaaacctcacagaattgtgttgagatccaccgctcacacgccgtacaccacccagtggcttcattctggcttagccgcagaggcaagaaagggaccccacttgctcccatgcccacctcaagaaaaaacataaaacaattttttttaaaaaagaaaagaaatctacctcagttgacaggattccacctttagggtttcttcaacttttaagtcttacctgttgagtgtaacttttgtagcatcttgcttttccaagcaagctagtgaggcatgacagagcagaagtctgtaaatgtccctgtgatggacctctttctagcatgttgcagttttatttttaataaattggtaagtgaaatgaatgtaaaggtaattgtgtacgttttagacatgacaatgaaaatttaaaatgtagcttccatacttgtgcataattccaaagtattttattttttatcaatcagtgttaaatagctttttgtacaggcttcaatccatttttcgaagtgtgctgttttttaatgaaagtaactataatcttttcacatcccatggaactgccgtttacacattgcaactttttaaacttaaccatatttttcaaaattaacgtttttggagggagaaaaatccccgcttgctaaatgatactaaaccgttgtttgggctcttataattaggtcctgagattttataaaaatttagtctgtagctttttaggttcttcactagagttggttgtacataaaaataataaagaatataaagtatcccaaaattcttttaaagtctggatttttccgctaatatgtactttagagaatattttgttcatgcatacttccacgttaaattgaaaatgtcttcagcttctcttggtaaatgtgaaccatttgttttttattgtgcttgggggagagggtattttaatataatttttgcctaaatcaagaagtcccctctgaatgttaatttttaaatgtcaaaatatgatgaacgatatatcttgaaagtgagattgcaatatgcttaaacttaagtggtatttcaaaaacgagaaaattctggaatttgtcatttgaagctccataagagaaattgataggacttcgtttttgatcagtctgaatagataccaatgtcattgtgtgggaattttttttaacttgtttatgtattattttgatccatttttctgtggcatttggtgcaataaaacttttgaatttatcttgaacattttc

SEQ ID NO: 430590 - DNA, 3939 bp, Homo sapiens
tgcggccgccgcccccggctgcgcgctgagccgccggccccccgagcgccacggccggagctgcggcggcggcatcatggccccgaccctgctccagaagctcttcaacaaaaggggcagcagcggcagctccgcggcggcgtctgcccagggcagggctcctaaggaaggacccgcctttagttggtcatgttcggagtttgacctgaatgagattcgcctgatagtttaccaggactgtgacaggagaggcagacaagtcttgtttgactctaaagctgttcaaaagattgaggaggtgacagctcagaaaacagaggatgttcctattaaaatatcagccaagtgctgccagggaagcagcagtgtcagcagcagtagcagcagcagcatctcttcccacagttcttctgggggatcttcacatcatgctaaggaacagcttccaaagtaccagtacacaagaccagcttccgatgtcaacatgttaggggaaatgatgtttggctcagttgccatgagttacaaaggctccaccttaaagatacactacatacgttctcctccacaactgatgattagtaaagtcttctctgctagaatgggcagcttctgtggaagtacaaataacttgcaagacagctttgagtacatcaaccaagatcctaatttgggaaaactgaacacaaatcaaaatagtttgggtccttgtcgtactggaagtaacctagcacacagcacaccagttgatatgccaagcagaggacagaatgaagacagggacagtggcattgctcgatcagcctcactaagcagtcttttgatcacacctttcccatctccaagctcctctacatcttcttccagcagttaccagcgccgctggcttcgaagtcagacaacaagtttggaaaatggcatcatcccaagaaggtcaactgatgagacattcagcttggctgaagaaacctgtagctctaatccagctatggttaggaggaagaaaattgccataagcatcatcttttccctatgtgagaaagaagaagcacaaaggaatttccaggacttcttcttttctcattttcccctgtttgaatctcacatgaacaggctgaagagtgcaattgaaaaggctatgatctcctgtaggaaaatagcagaatcaagtctccgagtccagttttatgtcagccgtttgatggaagctctgggagaattcagaggaactatctggaacttatattctgttccaaggatagctgaacctgtatggcttactatgatgtccggcactttggaaaaaaaccagctctgccagcgctttctcaaggagtttacacttctgatagaacagataaataaaaaccagttttttgctgccttactgactgcggtgttaacctaccacctggcctgggtcccaactgtcatgcctgtggatcaccctcccatcaaagccttctcagagaaacgtacctcccagtcagtgaacatgctggccaaaacacatccgtataatcctctttgggcacagctgggtgatctttacggagccataggctctccagtgagactgactcgcaccgtagtggtagggaagcagaaggacttagtccagcgaatactttatgtcctgacctactttctccgttgctctgagctacaagagaaccagctgacctggagtggcaatcatggtgaaggtgaccaagttttaaatgggagcaagatcataacagccttggagaaaggagaggtggaggagtctgagtatgtggtcattacggtgaggaacgagcccgctcttgtaccccccatcctaccaccaacagcagcagagagacacaacccctggccgacagggtttcctgagtgcccagagggcactgacagtagagacctgggtcttaaacctgacaaagaagctaacaggaggccagagcagggttctgaggcttgcagcgcagggtgcctggggccagcatcagacgcttcctggaaacctcagaatgcattttgtggggatgagaaaaataaagaggcaccgcaagatggctcttcaagacttcccagctgtgaagttttgggggcaggaatgaagatggaccagcaagctgtctgtgagctgttgaaagtggagatgcctacaagactgccagaccggtcagtggcctggccttgccctgacagacatctccgggagaaaccttccttagaaaaggtcactttccagattggaagctttgcatctccagagtctgactttgaaagccgcatgaaaaaaatggaggaacgggtgaaggcctgtggcccctccttggaggccagtgaggctgctgatgtggctcaggacccgcaggtttctaggagcccttttaaacctggctttcaggagaatgtttgctgtcctcagaatcggctttcagagggggatgaaggcgagtctgacaagggttttgcagaggacagaggcagcagaaacgacatggcagcagatattgctgggcagctcagccacgctgctgacttgggcacagcctcccacggtgcaggaggaacgggagggaggaggctggaggccactagaggtttgtatgtgaaggctgcggaaggacctgtgctggagcctgttgcccccaggtgtgtccagcggggccctggcctcgtggctggtgcgaatatcccctgtggggatgacaacaagaaggccaacttcaggactgaaggagacattccccgaaatgaaagctcagatagcgccctgggagacagtgacgacgaagcctgcgcttcagccatgctagatctgggtcacggtggtgacaggactggagggtccttggaagtggagctgcctctgccaaggtctcagagcatcagcacccagaatgtaaggaactttggccgctcacttctggcgggctactgccccacatacatgcctgatcttgtgcttcatgggaccggcagtgatgagaagctgaagcagtgcctggtggccgaccttgtccacacagtccattaaaactgctgtcaggaatgtctactcaacatgggatctaattaaagagcttctgcatggcaaaagaaactaccatcagagtgaacaggcaacctacagaatgggagaaaatttttgcaatctacccatctgacaaagggctaatatccaaatctacaaagaacttaaacagatttacaagaaaaaagctaacaaccccatcaaaaagtgggcaaaggatatgaacagacacttcacaaaagaagacatttatgcagccaacagacacatgaaaaaatgctcaccatcactggccatcagagaaatgcaaatcaaaactacagtgagataccatctcacaccagttagaatggcaataattaaaaagtcaggaaacaacaggtgctggagaggatgtggagaaataggaacacttttacactgttggtgggactgtaaactagttcaaccattgtggaagacagtgtggcgattcctcaaggatctagaactagaaataccatttgacccagccatcgcattactgggcatatacccaaaggattataaatcatgctgctataaagacacatgcacacgtatgtttattgtggcactattcacaatagcaaagacttggaaccaacccaaatgcccatcaataatagactggattaagaaaatgtggcacatatacactacggaatacaatgcagccataaaaaatgatgagttcatgtcctttgtagggacatggatgaagctggaaaccatcattctcagcaaactatcgcaaggacagaaaaccaaacaccgcatgctcactcataggtgggaattgaacaatgagaacacatggacacaggagggggagcatcacacactggaggtggcagtgcctgtttatgaactaaataaataaatattaaacacct

SEQ ID NO: 430591 - DNA, 3844 bp, Homo sapiens
gagatagtggtcttggagaggcgttggtttaaaatgcacttatgtaagtttgagctgttttcttttcttcagcttaattgggaactagaagatacgtggttgcaaaaaaagcagaaccagacacaccatgggcatcattctgtcccaggacaatgggaagggtcccaggggcaggtgtgccaaggtggccctgcccacccatccagcgtacccgtaaacacataccaggtgccatgggccctgctgggtaccacatggagagcttctcagtctaaaccaccataaaagtcaaggctgatgtttgtggcacagagtgggtaggtccatccagggacgtcatggggaaaccactgccatgcagctcagcacccacaagtgccggtctcaggccagccctagatgacactgttcaatttgtcaagtccacagatagggttggggtttttgttgtttttcttttctgatcttacctagtagtgcaataccacatttaaagtttaattctcttcccagaatgtcttgtggaaactttacatttcattcctgttcacattgtaagatctctgatgtttgcctggatggatttactgtgattgcacagggaccacgtggctcaggtgtctgagccattgagggcatcttgcaagggctggttttccttttctcatcagtgttggctggatgccagcaggggttttgtggctaaccacatcaggcagtttcccatttttgtagctttgttatacctaaaccgcagtctcatcattttgcttatgcagctagaagtttcagtctgtatagttgttattcattctgtccctggtaattttagacctgccttcttgatgctttaggggccattggggcacagctttctacattggctaacaaatacctgtgaaaatgttaacagacagaagcgcagcagtgaacctgaggtcaggacaggactgtttgggaggttcttcttttcttactgtcactccaaaaataaaccttggatttgtgtgctggggagaaatgagtatagataacatttaaaacgttttcctaaaccttagtattcatatggtagctgatggttcctctccccttcattactgttgcctgacgacggtccttgctgatgctgtgaactaacaaagttgtctttttgtttttaagggaacccaccctggcgtctggacagcaggttaggtttgggtggttttgagctagcactgctgtggggcaggggtggccgctccctggtgaagctaatgctgtggaagctggaatgttccttcctaaggagtgggatcatgcccctaccccagcagaggtatctcatcactcgctcatgtgcgagattctaaataaattttgttcttgggcatcttctactaggcctcctataaaatagatcttgctgtttttggtttgtgttaatggaacctcactttctagagataattctttagttttttatttaggaagttttcaaaatatacaaagcaggaatgtaaggaacccgcatcacctcaaattcagtgttacccacacttgaccatgcttgccccagctgtgccttttttctttccttgggtattttgttgctaaagtattttattattactgttttagagacagggcctcactcctgtcacccaggctggagtatggtggcacagtcacatctcactgcagcctcaacctcctgggctcaagccatccccccaccccagcctcctgagtagctgggactacaggcacacatcactgcgcccagctaatttttaaaaaatttttgtggagacaggttctcttcatgttgcccaggatggtcttgaattcctgggctcaagcagtcctcctgtctcagcctcccaaagtgccagaattgcaggcatgagcctgggtgctagagcgaggccctgtctcaaaaaaaaaaaaaaaaaaaatcaatcaaggctttcttccgagttactgctcacagccctcttacccctttctcttgtgagtgggttgtaatgtccacccagaggggatttagacacggaagggaaggcaagcgtgggcaccatggctttagaaccataaggaagacatttccctctacagattctgtctttccacttgtaacagttaatgaggcactgacgttgctcttttccaccttaacaagacagtttacagtggttaaatagcaaaactccaggagcaattcagcctgaggccatagtgccctgcagcagcattgggctctgcttttgtttctgctttgtgctttgtggctcttcttcaagccagtgttgggtagtgcacagcctgagaggtgtggcctgataaaccctgaaattgaaagaagtatgcagatttgactcagcactcctggaagtgtctggatacagctcactgagagtgtggaggtgaaagtgcctgcaaaatattaacagttctctctcaatctattgatctcctcagttacatccagaaccttaaagccgcacagttgtcatcctccgcccgcagtctcaggcagggcgcatcaggggctgcactggtagctcccaggaggacttacccatgggtcaccgtcatagccaggtgtgtctactcagaggggacgcaatcctgcagcagtccccgtcaatgagaggccaccagcagacagtgcctgttggacccatgaagtccaccactaattatatactctgctttaggtagaatatttttattagctgtcaaactgtttttgtatttaagtttccaaaagtccaggtactttatgtaggccaatgtataaatatttcaagtctaacagtagcacagttatatgttaatacaactgactacacgaaaaatatgtaatagcatatgctatgtaatttttcaaatcactaggtattgatatgtgccttttttatattaccaagagattctctaaatatggaattagattaggattctctgctccacttaacacacatttttaaattagtactgatgattgagggatggacaatagcacaccaaaaaaaaaagagtttagtatgaaaaatttaaacctgttggttaagtcattcccattaatgtcattttgctgagggtgacttggtccttttgaattgctttggtgtacgggtatgttctgatttttcatgcaagctcctctgccattccaccgctctgaggagtaattgtagcacttcacatgtgctgtggttgtgatcacatggtgacatacatagcatgtgtgttcccagctgttgtgtgtttatgtgacatttgatgccaatacatatgtcttcaaggtatgcttgttccctcccagctcgtggaatatcaaaaaaattcattgctggaaaaattatttcatagacaaaaatgttaatgttctcttggggacttagagttgaaaatatttgtatagatttggttctcaagtccacagaatcgtatctgctgtggtctccctttggtgctcatctgggagccatgtgtatggaagattctgtcacaggcggctgggatgtgggcagatgctgttagcctccctctccacgtggtggtccatgcctgacgtgtcccctagttcaaggaagcgccatctttagcatgaaaacaattgcgttcccctaggaaatgaagaaaaaatgagctgaaatttccttatacatttgaatttgttcattttttaaagagacatttttgttgtctgctttgtggtacttataaaatttgttttccattgaaattgccatttataaatttgcagatatgtactaatttagatttttttaagtgttcaataaaataaggatatatttactgtgaatttttaaatgggctttttagctttctt

SEQ ID NO: 430592 - DNA, 356 bp, Homo sapiens
ctagttcaaggaagcgccatctttagcatgaaaacaattgcgttcccctaggaaatgaagaaaaaatgagctgaaatttccttatacatttgaatttgttcattttttaaagagacatttttgttgtctgctttgtggtacttataaaatttgttttccattgaaattgccatttataaatttgcagatatgtactaatttagatttttttaagtgttcaataaaataaggatatatttactgtgaatttttaaatgggctttttagctttctttccctctacttttagttttgatttatataagttaaagattcttttgcatattaatccctgaagcagctgcatattttttata

SEQ ID NO: 430593 - DNA, 751 bp, Homo sapiens
gccgacgcaaggctgctgctatggggccgggcggccgtgtggcgcggctgctcgccccactaatgtggcgcagggcggtttcctcggtggcggggtccgcggttggagccgagcccgggcttcggctgctggccgtgcagcggcttcccgtaggagcagcgttctgccgggcttgccagaccccaaactttgtccgcggcctgcacagcgagcctgggctggaggagcgggcggaggggacggtcaacgagggacgcccagaatcggacgcggcagatcatactggtcccaagtttgacatcgatatgatggtttcacttctgaggcaagaaaatgcaagagacatttgtgtgatccaggttcctccagaaatgagatatacagattactttgtgattgttagtggaacttctacccgacacttacatgccatggccttctacgttgtgaaaatgtacaaacacctgaaatgtaaacgtgaccctcatgttaagatagaagggaaggacactgatgactggctgtgcgtggattttggcagcatggtgattcatttgatgcttccagaaaccagagaaatctatgaattagagaaattatggaccctacgttcttatgatgaccagttagctcagatagcacctgagacagtacctgaagacttcattcttggaatagaagatgatacttcatctgtgactccagtggagttaaaatgtgaataaaatattttatgcactgcgttagtcat

SEQ ID NO: 430594 - DNA, 1121 bp, Homo sapiens
ctaattatcatttcctttgattttggggtgatgtatatgagatgtcctttgtctcttgtaacagtttttacttaattgccatcttgtttgatattagtatatctgttttaacaaaagaactgagcacatttataggatgacggggtcccattaacatgtcataaaggcagatgagatgaaatcagtggcactgaaacaacctggctttataaacagaaggtagtatctgcagcccctaaaggtgaaggaaagctgggatgaacacaagtgatggatgtaggtgggtaccaaatgctgactgagcttagctttttcagcctcagaggcaccttggtgaatgaatggggtgaccctctcagaagggctggggcaggagaattcaggagagaggtgaaagtgaataagatttagagggagaaatagtttccctaagttattcatcacagggcaaagtatagcaatgagaaatgagtaagaaagattaaaaaaaacaaacaaacaaacaaaaaaaaaagaccttcagcaagaacaggcttcccccatcccctctccctttaataaaccacctggctttttgcagtacaaacacctgaaatgtaaacgtgaccctcatgttaagatagaagggaaggacactgatgactggctgtgcgtggattttggtaagttattctggcgtattttacaggtaactgttggtactacgctaatcttgaattgttttcagttgcaaaaggattgagatcaaattgatgaatgtatttccaggtaagatttttgaagtgtgtttaaggtaacaaaagtttttttagttataatccaggtgctcttattcacatgtagaattttcacctaaccaaaccaaagtaccctagatgatgccctcctggaggaagatatatactacatggtgtgtatctactagccacacagatcaggaaggtggtggacaacaggataacatagtagaggcgggagagattccttattggggattagagaacggccgggggaaactcggacctgtagtgaggtcccaatcttctaatttcttcggggcgagacctggccctgcctggacaggggcctcggggtgattttttaattgtgactaggcaccc

SEQ ID NO: 430595 - DNA, 929 bp, Homo sapiens
ctaattatcatttcctttgattttggggtgatgtatatgagatgtcctttgtctcttgtaacagtttttacttaattgccatcttgtttgatattagtatatctgttttaacaaaagaactgagcacatttataggatgacggggtcccattaacatgtcataaaggcagatgagatgaaatcagtggcactgaaacaacctggctttataaacagaaggtagtatctgcagcccctaaaggtgaaggaaagctgggatgaacacaagtgatggatgtaggtgggtaccaaatgctgactgagcttagctttttcagcctcagaggcaccttggtgaatgaatggggtgaccctctcagaagggctggggcaggagaattcaggagagaggtgaaagtgaataagatttagagggagaaatagtttccctaagttattcatcacagggcaaagtatagcaatgagaaatgagtaagaaagattaaaaaaaacaaacaaacaaacaaaaaaaaaagaccttcagcaagaacaggcttcccccatcccctctccctttaataaaccacctggctttttgcagtacaaacacctgaaatgtaaacgtgaccctcatgttaagatagaagggaaacacctgtctatcatggggttgacaccgaagaacagttcaggtcagtccttgaaggtccctccatctgtgtttgtctgacgtttcctccagggaccggaatgctacagaagcaatgctgtgttctcagtgtatcacatcaagagacacttggcacccatttgtcctattcctggtgttgttaactttgttcagctcattaagggaggacctgctgggtttctctactgttaagttaccactttttctctttgcaattaatcaaccatatgattggaactgctatgagacaaagggaaca

SEQ ID NO: 430596 - DNA, 271 bp, Homo sapiens
  misc_feature (40)..(42): n is a, c, g, or t
  misc_feature (52)..(52): n is a, c, g, or t
atcccaccgagccgatccaattaaaaaaaaaaaaaaaaannncctggcgggntcgccgcagcatggtgattcatttgatgcttccagaaaccagagaaatctatgaattagagaaattatggaccctacgttcttatgatgaccagttagctcagatagcacctgagacagtacctgaagacttcattcttggaatagaagatgatacttcatctgtgactccagtggagttaaaatgtgaataaaatattttatgcactgcgttagtcat

SEQ ID NO: 430597 - DNA, 2283 bp, Homo sapiens
ctaattatcatttcctttgattttggggtgatgtatatgagatgtcctttgtctcttgtaacagtttttacttaattgccatcttgtttgatattagtatatctgttttaacaaaagaactgagcacatttataggatgacggggtcccattaacatgtcataaaggcagatgagatgaaatcagtggcactgaaacaacctggctttataaacagaaggtagtatctgcagcccctaaaggtgaaggaaagctgggatgaacacaagtgatggatgtaggtgggtaccaaatgctgactgagcttagctttttcagcctcagaggcaccttggtgaatgaatggggtgaccctctcagaagggctggggcaggagaattcaggagagaggtgaaagtgaataagatttagagggagaaatagtttccctaagttattcatcacagggcaaagtatagcaatgagaaatgagtaagaaagattaaaaaaaacaaacaaacaaacaaaaaaaaaagaccttcagcaagaacaggcttcccccatcccctctccctttaataaaccacctggctttttgcagtacaaacacctgaaatgtaaacgtgaccctcatgttaagatagaagggaaggacactgatgactggctgtgcgtggattttggtaagttattctggcgtattttacaggtaactgttggtactacgctaatcttgaattgttttcagttgcaaaaggattgagatcaaattgatgaatgtatttccaggtaagatttttgaagtgtgtttaaggtaacaaaagtttttttagttataatccaggtgctcttattcacatgtagaattttcacctaaccaaaccaaagtaccctagatgatgccctcctggaggaagatatatactacatggtgtgtatctactagccacacagatcaggaaggtggtggacaacaggataacatagtagaggcgggagagattccttagtagtggtagaggaaggtttgggggctgtggtgcataaatgagatgaggatgaggttattccaggcacaaaaaaggacaagagcagaagactagaattttgaaaagatctaacaactttgggtattaatgtgtacatagtttcaaagcacctcccaacaagataatatttacaaaggggaaacataactgtatgtcaagaactgaggagtctgagattttattctgcttgtaagctaatacattgtcccgccagttttcatggacactggtaaaagacaagactattagagggttagagacaaagaacagtttattactcacagcagtagccagcatccattttgcactggtttcctgagctctggattccatagggcaacatgggccagatgacaccagcacacacagttgtaaaactggaactcagatgagggtgtctaggttttttataactggcaggaagcaggcctacttttgctctgatggtttctcacttttgtcgctattaacgttttggaccaggtaattttgcatgtgggggaggggtgtctcttgtgcacggtacgatgtttagcagtatcctcccttctccaattgtgacaatcaaaaatgactctaaacattaccattattacctaattgagaaatgctgctgtaagcaaagctgccctttgccctggagggaggcagtatctttctgttaagaatattcacgatacaaacattcttggatagtcaaaacaaaaggcagtcagtgtttttgcacaaaagatgtgcagaagtgtgttacccatggagaattgtcaccgaagagaatcctgacaccattagtctctttgataaagttactatcaccagcaatgttatatattgacatatgcctcctgtaggtacactgagaaaggcatagcatcacttctgtggtatttttgctgggatggagtccacagtgatgctaatctgggaaccacacttgagaaccactgctttattcctagagttagccagtgtgtgttgtaaggtaagaataaaagcaaatgaactattccttcattgtatctcttatctgtccctgacagggcagcatggtgattcatttgatgcttccagaaaccagagaaatctatgaattagagaaattatggaccctacgttcttatgatgaccagttagctcagatagcacctgagacagtacctgaagacttcattcttggaatagaagatgatacttcatctgtgactccagtggagttaaaatgtgaataaaatattttatgcactgcgttagtcat

SEQ ID NO: 430598 - DNA, 2811 bp, Homo sapiens
ctaattatcatttcctttgattttggggtgatgtatatgagatgtcctttgtctcttgtaacagtttttacttaattgccatcttgtttgatattagtatatctgttttaacaaaagaactgagcacatttataggatgacggggtcccattaacatgtcataaaggcagatgagatgaaatcagtggcactgaaacaacctggctttataaacagaaggtagtatctgcagcccctaaaggtgaaggaaagctgggatgaacacaagtgatggatgtaggtgggtaccaaatgctgactgagcttagctttttcagcctcagaggcaccttggtgaatgaatggggtgaccctctcagaagggctggggcaggagaattcaggagagaggtgaaagtgaataagatttagagggagaaatagtttccctaagttattcatcacagggcaaagtatagcaatgagaaatgagtaagaaagattaaaaaaaacaaacaaacaaacaaaaaaaaaagaccttcagcaagaacaggcttcccccatcccctctccctttaataaaccacctggctttttgcagtacaaacacctgaaatgtaaacgtgaccctcatgttaagatagaagggaaggacactgatgactggctgtgcgtggattttggtaagttattctggcgtattttacaggtaactgttggtactacgctaatcttgaattgttttcagttgcaaaaggattgagatcaaattgatgaatgtatttccaggtaagatttttgaagtgtgtttaaggtaacaaaagtttttttagttataatccaggtgctcttattcacatgtagaattttcacctaaccaaaccaaagtaccctagatgatgccctcctggaggaagatatatactacatggtgtgtatctactagccacacagatcaggaaggtggtggacaacaggataacatagtagaggcgggagagattccttagtagtggtagaggaaggtttgggggctgtggtgcataaatgagatgaggatgaggttattccaggcacaaaaaaggacaagagcagaagactagaattttgaaaagatctaacaactttgggtattaatgtgtacatagtttcaaagcacctcccaacaagataatatttacaaaggggaaacataactgtatgtcaagaactgaggagtctgagattttattctgcttgtaagctaatacattgtcccgccagttttcatggacactggtaaaagacaagactattagagggttagagacaaagaacagtttattactcacagcagtagccagcatccattttgcactggtttcctgagctctggattccatagggcaacatgggccagatgacaccagcacacacagttgtaaaactggaactcagatgagggtgtctaggttttttataactggcaggaagcaggcctacttttgctctgatggtttctcacttttgtcgctattaacgttttggaccaggtaattttgcatgtgggggaggggtgtctcttgtgcacggtacgatgtttagcagtatcctcccttctccaattgtgacaatcaaaaatgactctaaacattaccattattacctaattgagaaatgctgctgtaagcaaagctgccctttgccctggagggaggcagtatctttctgttaagaatattcacgatacaaacattcttggatagtcaaaacaaaaggcagtcagtgtttttgcacaaaagatgtgcagaagtgtgttacccatggagaattgtcaccgaagagaatcctgacaccattagtctctttgataaagttactatcaccagcaatgttatatattgacatatgcctcctgtaggtacactgagaaaggcatagcatcacttctgtggtatttttgctggggcaggagaattcaggagagaggtgaaagtgaataagatttagagggagaaatagtttccctaagttattcatcacagggcaaagtatagcaatgagaaatgagtaagaaagattaaaaaaaacaaacaaacaaacaaaaaaaaaagaccttcagcaagaacaggcttcccccatcccctctccctttaataaaccacctggctttttgcagtacaaacacctgaaatgtaaacgtgaccctcatgttaagatagaagggaaggacactgatgactggctgtgcgtggattttggcagcatggtgattcatttgatgcttccagaaaccagagaaatctatgaattagagaaattatggaccctacgttcttatgatgaccagttagctcagatagcacctgagacagtacctgaagacttcattcttggaatagaagatgatacttcatctgtgactccagtggagttaaaatgtgaataaaatattttatgcactgcgttagtcatttcagatttggattgagtcacttattggaaaatacagctcctaaagtccgtctccttggttaggctgctcttaggacaaggcttgtgtacctcatgggcactcctgctaactggcatgcagagactgtcgataagtgagctatacctgcaaccaaaaatcagtacattctacccaaaacttatgacacgctgcctttatcctggaaatgtcatcagaatttcctggagttagcactggctcctgtgcttgacttctctgctcagatttttattaatttaatttagcttaaatgtaaatcttaaccctgtttgtttaatggaatggcaaaaattttaaaaaataatataaaacatagcccactggtcttatttttatac

SEQ ID NO: 430599 - DNA, 2433 bp, Homo sapiens
ctaattatcatttcctttgattttggggtgatgtatatgagatgtcctttgtctcttgtaacagtttttacttaattgccatcttgtttgatattagtatatctgttttaacaaaagaactgagcacatttataggatgacggggtcccattaacatgtcataaaggcagatgagatgaaatcagtggcactgaaacaacctggctttataaacagaaggtagtatctgcagcccctaaaggtgaaggaaagctgggatgaacacaagtgatggatgtaggtgggtaccaaatgctgactgagcttagctttttcagcctcagaggcaccttggtgaatgaatggggtgaccctctcagaagggctggggcaggagaattcaggagagaggtgaaagtgaataagatttagagggagaaatagtttccctaagttattcatcacagggcaaagtatagcaatgagaaatgagtaagaaagattaaaaaaaacaaacaaacaaacaaaaaaaaaagaccttcagcaagaacaggcttcccccatcccctctccctttaataaaccacctggctttttgcagtacaaacacctgaaatgtaaacgtgaccctcatgttaagatagaagggaaggacactgatgactggctgtgcgtggattttggtaagttattctggcgtattttacaggtaactgttggtactacgctaatcttgaattgttttcagttgcaaaaggattgagatcaaattgatgaatgtatttccaggtaagatttttgaagtgtgtttaaggtaacaaaagtttttttagttataatccaggtgctcttattcacatgtagaattttcacctaaccaaaccaaagtaccctagatgatgccctcctggaggaagatatatactacatggtgtgtatctactagccacacagatcaggaaggtggtggacaacaggataacatagtagaggcgggagagattccttagtagtggtagaggaaggtttgggggctgtggtgcataaatgagatgaggatgaggttattccaggcacaaaaaaggacaagagcagaagactagaattttgaaaagatctaacaactttgggtattaatgtgtacatagtttcaaagcacctcccaacaagataatatttacaaaggggaaacataactgtatgtcaagaactgaggagtctgagattttattctgcttgtaagctaatacattgtcccgccagttttcatggacactggtaaaagacaagactattagagggttagagacaaagaacagtttattactcacagcagtagccagcatccattttgcactggtttcctgagctctggattccatagggcaacatgggccagatgacaccagcacacacagttgtaaaactggaactcagatgagggtgtctaggttttttataactggcaggaagcaggcctacttttgctctgatggtttctcacttttgtcgctattaacgttttggaccaggtaattttgcatgtgggggaggggtgtctcttgtgcacggtacgatgtttagcagtatcctcccttctccaattgtgacaatcaaaaatgactctaaacattaccattattacctaattgagaaatgctgctgtaagcaaagctgccctttgccctggagggaggcagtatctttctgttaagaatattcacgatacaaacattcttggatagtcaaaacaaaaggcagtcagtgtttttgcacaaaagatgtgcagaagtgtgttacccatggagaattgtcaccgaagagaatcctgacaccattagtctctttgataaagttactatcaccagcaatgttatatattgacatatgcctcctgtaggtacactgagaaaggcatagcatcacttctgtggtatttttgctggggcaggagaattcaggagagaggtgaaagtgaataagatttagagggagaaatagtttccctaagttattcatcacagggcaaagtatagcaatgagaaatgagtaagaaagattaaaaaaaacaaacaaacaaacaaaaaaaaaagaccttcagcaagaacaggcttcccccatcccctctccctttaataaaccacctggctttttgcagtacaaacacctgaaatgtaaacgtgaccctcatgttaagatagaagggaaggacactgatgactggctgtgcgtggattttggcagcatggtgattcatttgatgcttccagaaaccagagaaatctatgaattagagaaattatggaccctacgttcttatgatgaccagttagctcagatagcacctgagacagtacctgaagacttcattcttggaatagaagatgatacttcatctgtgactccagtggagttaaaatgtgaataaaatattttatgcactgcgttagtcat

SEQ ID NO: 430600 - DNA, 995 bp, Homo sapiens
gccgacgcaaggctgctgctatggggccgggcggccgtgtggcgcggctgctcgccccactaatgtggcgcagggcggtttcctcggtggcggggtccgcggttggagccgagcccgggcttcggctgctggccgtgcagcggcttcccgtaggagcagcgttctgccgggcttgccagaccccaaactttgtccgcggcctgcacagcgagcctgggctggaggagcgggcggaggggacggtcaacgagggacgcccagaatcggacgcggcagatcatactggtcccaagtttgacatcgatatgatggtttcacttctgaggcaagaaaatgcaagagacatttgtgtgatccaggttcctccagaaatgagatatacagattactttgtgattgttagtggaacttctacccgacacttacatgccatggccttctacgttgtgaaaatgtacaaacacctgaaatgtaaacgtgaccctcatgttaagatagaagggaaggacactgatgactggctgtgcgtggattttggcagcatggtgattcatttgatgcttccagaaaccagagaaatctatgaattagagaaattatggaccctacgttcttatgatgaccagttagctcagatagcacctgagacagtacctgaagacttcattcttggaatagaagatgatacttcatctgtgactccagtggagttaaaatgtgaataaaatattttatgcactgcgttagtcataaaaaaaaacaaggggggcgcaaaatacccgcaagggcccaggttagcttcccagttttggcaagggcccaaagggagcggattaagcagcatggcgggttcaacgcggaaggaaacggctggactgggaggaccccttgggggcaaatgcacccccgcatacagccggaaatggtaaggacaccttcggggatttgttatacatcagaaaagacacacagacagagggaacacaaacagaacc

SEQ ID NO: 430601 - DNA, 982 bp, Homo sapiens
ctaattatcatttcctttgattttggggtgatgtatatgagatgtcctttgtctcttgtaacagtttttacttaattgccatcttgtttgatattagtatatctgttttaacaaaagaactgagcacatttataggatgacggggtcccattaacatgtcataaaggcagatgagatgaaatcagtggcactgaaacaacctggctttataaacagaaggtagtatctgcagcccctaaaggtgaaggaaagctgggatgaacacaagtgatggatgtaggtgggtaccaaatgctgactgagcttagctttttcagcctcagaggcaccttggtgaatgaatggggtgaccctctcagaagggctggggcaggagaattcaggagagaggtgaaagtgaataagatttagagggagaaatagtttccctaagttattcatcacagggcaaagtatagcaatgagaaatgagtaagaaagattaaaaaaaacaaacaaacaaacaaaaaaaaaagaccttcagcaagaacaggcttcccccatcccctctccctttaataaaccacctggctttttgcagtacaaacacctgaaatgtaaacgtgaccctcatgttaagatagaagggaaggacactgatgactggctgtgcgtggattttggtaagttattctggcgtattttacaggtaactgttggtactacgctaatcttgaattgttttcagttgcaaaaggattgagatcaaattgatgaatgtatttccaggcagcatggtgattcatttgatgcttccagaaaccagagaaatctatgaattagagaaattatggaccctacgttcttatgatgaccagttagctcagatagcacctgagacagtacctgaagacttcattcttggaatagaagatgatacttcatctgtgactccagtggagttaaaatgtgaataaaatattttatgcactgcgttagtcat

SEQ ID NO: 430602 - DNA, 924 bp, Homo sapiens
gccgacgcaaggctgctgctatggggccgggcggccgtgtggcgcggctgctcgccccactaatgtggcgcagggcggtttcctcggtggcggggtccgcggttggagccgagcccgggcttcggctgctggccgtgcagcggcttcccgtaggagcagcgttctgccgggcttgccagaccccaaactttgtccgcggcctgcacagcgagcctgggctggaggagcgggcggaggggacggtcaacgagggacgcccagaatcggacgcggcagatcatactggtcccaagtttgacatcgatatgatggtttcacttctgaggcaagaaaatgcaagagacatttgtgtgatccaggttcctccagaaatgagatatacagattactttgtgattgttagtggaacttctacccgacacttacatgccatggccttctacgttgtgaaaatgtacaaacacctgaaatgtaaacgtgaccctcatgttaagatagaagggaaggacactgatgactggctgtgcgtggattttggcagcatggtgattcatttgatgcttccagaaaccagagaaatctatgaattagagaaattatggaccctacgttcttatgatgaccagttagctcagatagcacctgagacagtacctgaagacttcattcttggaatagaagatgatacttcatctgtgactccagtggagttaaaatgtgaataaaatattttatgcactgcgttagtcataaaaaaaaaagcaaaaaaacacacaaaaacccggcgacatttcgggggcacaaaggatcaaaacgcactggcaaggtcccgccctttgaaagggaaccgggccccaaaggaaacaacgacctaaaaaacaaaccccaccaccgcaacataacacacacacacaccccacacaa

SEQ ID NO: 430603 - DNA, 286 bp, Homo sapiens
  misc_feature (71)..(72): n is a, c, g, or t
  misc_feature (82)..(82): n is a, c, g, or t
  misc_feature (84)..(84): n is a, c, g, or t
  misc_feature (88)..(88): n is a, c, g, or t
gctttttggacacttctctatgtaaaaggggtaagtcaccttttaaatgtaaaccactgggaaatatttgnncagccttgantnatanaaaaatgccgcagaatgatgcctggggaacacccaatttcccggttttatggaaaaaaaaaaaaaaaaaaaaaaaaaagcttgtttcgtcaccatagaggcagctgccagagtctacacagcagaattttaaacttaagatatagtaaaatcttaccccaccaataggatatttaccaagaagaaactaaaaaaaaaa

SEQ ID NO: 430604 - DNA, 464 bp, Homo sapiens
  misc_feature (311)..(311): n is a, c, g, or t
  misc_feature (315)..(315): n is a, c, g, or t
  misc_feature (318)..(318): n is a, c, g, or t
  misc_feature (324)..(324): n is a, c, g, or t
  misc_feature (333)..(333): n is a, c, g, or t
  misc_feature (344)..(344): n is a, c, g, or t
  misc_feature (346)..(346): n is a, c, g, or t
  misc_feature (350)..(350): n is a, c, g, or t
  misc_feature (352)..(352): n is a, c, g, or t
  misc_feature (357)..(358): n is a, c, g, or t
  misc_feature (362)..(362): n is a, c, g, or t
  misc_feature (426)..(426): n is a, c, g, or t
  misc_feature (432)..(432): n is a, c, g, or t
  misc_feature (434)..(434): n is a, c, g, or t
  misc_feature (437)..(437): n is a, c, g, or t
  misc_feature (446)..(446): n is a, c, g, or t
gcgatctagaggaccctgctgctgactatttgttgtgtttttcaatttttaagtgtttgtattttatgtcaacctcctcagtgaaggtcatacagtataaacagccatactatacagccatatatctgaaaactttcttggcttaattgtgcttctagaacattctaaatgaaaagggttaatgtcatttaaaaagtaaagcaatggaaattattagcatgctttgatttatagataatggctaagattgatgcttggtaaaaccctaattttcctgttttaatgaaaaaaaaaaaaaaaaaaaaaggttngttncgnccccanaggggcggntgccaagtctncncggnanatttnnaacntaaggttttggtaaatttttccccaaaaattgggtttttcccaaggaagaaccttaaaaaacanaacaananttncgggggggnttccactttccaccaatt

SEQ ID NO: 430605 - DNA, 237 bp, Homo sapiens
ccactggggaattattttcaacgctcgtggtttatataaaaaaaggcctaaaatgatagcctgggggaaccctaatttcccgtttttatatgaaaaaaaaaaaaaaaaaaaaaaaaagcttgtttcgtcaccatagaggcagctgccagagtctacacagcagaattttaaacttaagatatagtaaaatcttaccccaccaataggatatttaccaagaagaaactaaaaaaaaaa

SEQ ID NO: 430606 - DNA, 1222 bp, Homo sapiens
  misc_feature (1184)..(1184): n is a, c, g, or t
  misc_feature (1190)..(1190): n is a, c, g, or t
  misc_feature (1192)..(1192): n is a, c, g, or t
  misc_feature (1195)..(1195): n is a, c, g, or t
  misc_feature (1204)..(1204): n is a, c, g, or t
tactctttttaggctaaaaacctgaaaggaaaccatttctattacagcgagaataattcacccttagaagtccagttttcttccttttttgaaataatattgtttgtattaaggtaactgtgttactcctactgcatccaaagctcactaatctctgaggttttaggagatttatctactctcctctaattggtagggttgactttcccaggacattgctaaggttagcccctgaaggcaataatatttaaaaaaataaaaaataaaggattccacatagctccaaaagtcaggtaaaagctggagggaattagagatagcaaggaaagatcaaggattaacttgcaagctctattttctctaatatctggatctaggaaaattgtctaccgccttgtctgctggatcactcatcacctacgcattttataaaaggctacccaaaaagaaattgttaacaaggaatgttaacaagcctttaaaagctaataaacaacagactgtggtgtttgctttcagttactcctggcaagcagaagtaagagcgtaggtcatcaacttcctaggtggctgtagggaacacctcctacagtaagcctatagggacaaaaactggtatgggaatcacaagtgtgagcaccattatcattaccttcctccacatgctctcatttgtggaaaaattaatctaggcctctcgaaaaccctatggaatctgccttttcatgtccaggaaccctgtgggctttttctgattgctgcttgatagtgctaacctatttgttgtgtttttcaatttttaagtgtttgtattttatgtcaacctcctcagtgaaggtcatacagtataaacagccatactatacagccatatatctgaaaactttcttggcttaattgtgcttctagaacattctaaatgaaaagggttaatgtcatttaaaaagtaaagcaatggaaattattagcatgctttgatttatagataatggctaagattgatgcttggtaaaaccctaattttcctgttttaatgaaaaaaaaaaaaaaaaaaaaaaaaaaagcttgtttcgtcaccatagaggcagctgccagagtctacacagcagaattttaaacttaaggttttggtaaatttttccccaaaaattgggtttttcccaaggaagaaccttaaaaaacanaacaananttncgggggggnttccactttccaccaatt

SEQ ID NO: 430607 - DNA, 471 bp, Homo sapiens
  misc_feature (433)..(433): n is a, c, g, or t
  misc_feature (439)..(439): n is a, c, g, or t
  misc_feature (441)..(441): n is a, c, g, or t
  misc_feature (444)..(444): n is a, c, g, or t
  misc_feature (453)..(453): n is a, c, g, or t
gcgatctagaggaccctgctgctgactatttgttgtgtttttcaatttttaagtgtttgtattttatgtcaacctcctcagtgaaggtcatacagtataaacagccatactatacagccatatatctgaaaactttcttggcttaattgtgcttctagaacattctaaatgaaaagggttaatgtcatttaaaaagtaaagcaatggaaattattagcatgctttgatttatagataatggctaagattgatgcttggtaaaaccctaattttcctgttttaatgaaaaaaaaaaaaaaaaaaaaaaaaaaagcttgtttcgtcaccatagaggcagctgccagagtctacacagcagaattttaaacttaaggttttggtaaatttttccccaaaaattgggtttttcccaaggaagaaccttaaaaaacanaacaananttncgggggggnttccactttccaccaatt

SEQ ID NO: 430608 - DNA, 1183 bp, Homo sapiens
tactctttttaggctaaaaacctgaaaggaaaccatttctattacagcgagaataattcacccttagaagtccagttttcttccttttttgaaataatattgtttgtattaaggtaactgtgttactcctactgcatccaaagctcactaatctctgaggttttaggagatttatctactctcctctaattggtagggttgactttcccaggacattgctaaggttagcccctgaaggcaataatatttaaaaaaataaaaaataaaggattccacatagctccaaaagtcaggtaaaagctggagggaattagagatagcaaggaaagatcaaggattaacttgcaagctctattttctctaatatctggatctaggaaaattgtctaccgccttgtctgctggatcactcatcacctacgcattttataaaaggctacccaaaaagaaattgttaacaaggaatgttaacaagcctttaaaagctaataaacaacagactgtggtgtttgctttcagttactcctggcaagcagaagtaagagcgtaggtcatcaacttcctaggtggctgtagggaacacctcctacagtaagcctatagggacaaaaactggtatgggaatcacaagtgtgagcaccattatcattaccttcctccacatgctctcatttgtggaaaaattaatctaggcctctcgaaaaccctatggaatctgccttttcatgtccaggaaccctgtgggctttttctgattgctgcttgatagtgctaacctatttgttgtgtttttcaatttttaagtgtttgtattttatgtcaacctcctcagtgaaggtcatacagtataaacagccatactatacagccatatatctgaaaactttcttggcttaattgtgcttctagaacattctaaatgaaaagggttaatgtcatttaaaaagtaaagcaatggaaattattagcatgctttgatttatagataatggctaagattgatgcttggtaaaaccctaattttcctgttttaatgaaaaaaaaaaaaaaaaaaaaaaaaaaagcttgtttcgtcaccatagaggcagctgccagagtctacacagcagaattttaaacttaagatatagtaaaatcttaccccaccaataggatatttaccaagaagaaactaaaaaaaaaa

SEQ ID NO: 430609 - DNA, 807 bp, Homo sapiens
tcccagagaacctagcggttacgccaacgcgcgcgtgcgcccttgcgcgtttctctcttcccactcgggtttgacctacagccgcccgggagaagatggctgccccagcagtgtccgggctctcccggcaggtgcgatgcttcagtacctctgtggtcagaccatttgccaagcttgtgaggcctcctgttcaggtatacggtattgaaggtcgctatgccacagctctttattctgctgcatcaaaacagaataagctggagcaagtagaaaaggagttgttgagagtagcacaaatcctgaaggaacccaaagtggctgcttctgttttgaatccctatgtgaagcgttccattaaagtgaaaagcctaaatgacatcacagcaaaagagaggttctctcccctcactaccaacctgatcaatttgcttgctgaaaatggtcgattaagcaatacccaaggagtcgtttctgccttttctaccatgatgagtgtccatcgcggagaggtaccttgcacagtgacctctgcatctcctttagaagaagccacactctctgaattaaaaactgtcctcaagagcttcctaagtcaaggccaagtattgaaattggaggctaagactgatccgtcaatcttgggtggaatgattgtgcgcattggcgagaaatatgttgacatgtctgtcaagaccaagattcagaagctgggcagggctatgcgggagattgtctaaaagtgttggttttctgccatcagtgaaaattcttaaacttggagcaacaataaaaagcttccagaacaga

SEQ ID NO: 430610 - DNA, 608 bp, Homo sapiens
  misc_feature (550)..(550): n is a, c, g, or t
tcccagagaacctagcggttacgccaacgcgcgcgtgcgcccttgcgcgtttctctcttcccactcgggtttgacctacagccgcccgggagaagatggctgccccagcagtgtccgggctctcccggcaggtgcgatgcttcagtacctctgtggtcagaccatttgccaagcttgtgaggcctcctgttcaggtatacggtattgaaggtcgctatgccacagctctttattctgctgcatcaaaacagaataagctggagcaagtagaaaaggagttgttgagagtagcacaaatcctgaaggaacccaaagtggctgcttctgttttgaatccctatgtgaagcgttccattaaagtgaaaagcctaaatgacatcacagcaaaagagaggttctctcccctcactaccaacctgatcaatttgcttgctgaaaatggtcgattaagcaatacccaaggagtcgtttctgccttttctaccatgatgagtgtccatcgcggagaggtaccttgcacagtgacctctgcatctcctttagaagaagncacacttttctgattaaacgactgatccgtccttgggtggtggatgcgcccctggcct

SEQ ID NO: 430611 - DNA, 989 bp, Homo sapiens
taacagccttcttcattttcaccattagaacacttaacactataacataactaaccaggagtaagagttggggccgagaggagagtgcagtctggacatttgaggtgcttgctctaaagtaggttatggagctgagctgacttcaggaaaagccaactgctccaggttctctcactggggttcagagagtggagtggcctgccagagctccaggtagctgtggatgcggggagatgaacagccagcagagctaggcaaacatgaagatgtaaaaccaggttaaaatggcaacttttcagccaaggacatgatagatgcatgtcgtgtccccagggctgcacccaggagaggcctgtgtcctcctgcattgatggggctgcatcttcaggcattagaaacttgaaggcctttccttgttagttccaagttgtactgctagcacacagagcagaggcagggagggagtggcatttacaggccgtccttgaacggctgagtgggagctgcccgggtgatgctgtgaggcagggccttcctgtgctccctgaacctccagcgtgaacaaggagtgaatgctgcagagcagctccatgatgggcccaggtagcaaagggaggagctcacaaggcctgtcttggtgatgtgggcctggggtattttaactctggaagtttctgttttgctttatctaaattgaaaggatggttttgcctttcagcctttagaagaagccacactctctgaattaaaaactgtcctcaagagcttcctaagtcaaggccaagtattgaaattggaggctaagactgatccgtcaatcttgggtggaatgattgtgcgcattggcgagaaatatgttgacatgtctgtcaagaccaagattcagaagctgggcagggctatgcgggagattgtctaaaagtgttggttttctgccatcagtgaaaattcttaaacttggagcaacaataaaaagcttccagaacaga

SEQ ID NO: 430612 - DNA, 332 bp, Homo sapiens
agggagatgaagtcgcttgcccaaagtcatacgagcctttagaagaagccacactctctgaattaaaaactgtcctcaagagcttcctaagtcaaggccaagtattgaaattggaggctaagactgatccgtcaatcttgggtggaatgattgtgcgcattggcgagaaatatgttgacatgtctgtcaagaccaagattcagaagctgggcagggctatgcgggagattgtctaaaagtgttggttttctgccatcagtgaaaattcttaaacttggagcaacaataaaaagcttccagaacagagatcatattatgttcactgtctttta

SEQ ID NO: 430613 - DNA, 159 bp, Homo sapiens
tcgaattcaagcttctaacgatgtacggggacatgtctgtcaagaccaagattcagaagctgggcagggctatgcgggagattgtctaaaagtgttggttttctgccatcagtgaaaattcttaaacttggagcaacaataaaaagcttccagaacaga

SEQ ID NO: 430614 - DNA, 945 bp, Homo sapiens
  misc_feature (818)..(818): n is a, c, g, or t
  misc_feature (824)..(824): n is a, c, g, or t
tcccagagaacctagcggttacgccaacgcgcgcgtgcgcccttgcgcgtttctctcttcccactcgggtttgacctacagccgcccgggagaagatggctgccccagcagtgtccgggctctcccggcaggtgcgatgcttcagtacctctgtggtcagaccatttgccaagcttgtgaggcctcctgttcaggtatacggtattgaaggtcgctatgccacagctctttattctgctgcatcaaaacagaataagctggagcaagtagaaaaggagttgttgagagtagcacaaatcctgaaggaacccaaagtggctgcttctgttttgaatccctatgtgaagcgttccattaaagtgaaaagcctaaatgacatcacagcaaaagagaggttctctcccctcactaccaacctgatcaatttgcttgctgaaaatggtcgattaagcaatacccaaggagtcgtttctgccttttctaccatgatgagtgtccatcgcggagaggtaccttgcacagtgacctctgcatctcctttagaagaagccacactctctgaattaaaaactgtcctcaagagcttcctaagtcaaggccaagtattgaaattggaggctaagactgatccgtcaatcttgggtggaatgattgtgcgcattggcgagaaatatgttgacatgtctgtcaagaccaagattcagaagctgggcagggctatgcgggagattgtctaaaagtgttggttttctgccatcagtgaaaattcttaaacttggagcaacaataaaaagcttccagaacagacagaaaaaaancaacanaaacaaaacaaacacacacaaaccagaagaggacacaaagtccggggacggcacaaaaaagggaaagaaaggagccaatgagacaaaaggaagcaccacggacccaagtcgcgggcaaccg

SEQ ID NO: 430615 - DNA, 1399 bp, Homo sapiens
tcccagagaacctagcggttacgccaacgcgcgcgtgcgcccttgcgcgtttctctcttcccactcgggtttgacctacagccgcccgggagaagatggctgccccagcagtgtccgggctctcccggcaggtgagagaaaggtggtcctgagagccagtgggaggatccctcctgggatgaccggtaccaaacctcgagcaccagggtgcgatgcttcggctggggaagtctggcagtcttcaaggttatgggacctggcgagtgggagcgactcaggacgacccagcgtttgtcccccgggatgcctacggggcagtaggcgcggggctgcgcgtgccgtaaccttggcgtcttccgagcacagcccctggaagctgctagcctgaggggcgcaggagagggggtctgcccttcgctgaattccggggaaggggcatggactagcccccaaatcagcttcctttgccattgtggtaaaacctgtcagagatcacttactagtaatgctaaggaatatttgtaaaacacatttcacagttttataaataaaatgaggccgaaaagtttaaatgagtctttggctgctcagtcagtaagtggtagaattgagatttgaacccacggaatcacccagaagatcgagtttgaaaaaatgttatgctgtttgtgctgcatctcaccatggtgctttacatatcatgaccccttcctggcatcttaggtgcgatgcttcagtacctctgtggtcagaccatttgccaagcttgtgaggcctcctgttcaggtatacggtattgaaggtcgctatgccacagctctttattctgctgcatcaaaacagaataagctggagcaagtagaaaaggagttgttgagagtagcacaaatcctgaaggaacccaaagtggctgcttctgttttgaatccctatgtgaagcgttccattaaagtgaaaagcctaaatgacatcacagcaaaagagaggttctctcccctcactaccaacctgatcaatttgcttgctgaaaatggtcgattaagcaatacccaaggagtcgtttctgccttttctaccatgatgagtgtccatcgcggagaggtaccttgcacagtgacctctgcatctcctttagaagaagccacactctctgaattaaaaactgtcctcaagagcttcctaagtcaaggccaagtattgaaattggaggctaagactgatccgtcaatcttgggtggaatgattgtgcgcattggcgagaaatatgttgacatgtctgtcaagaccaagattcagaagctgggcagggctatgcgggagattgtctaaaagtgttggttttctgccatcagtgaaaattcttaaacttggagcaacaataaaaagcttccagaacaga

SEQ ID NO: 430616 - DNA, 761 bp, Homo sapiens
gagagagagagagagagagagagagagagagagagagagagagagagagagagagagagcagcagtgtccgggctctcccggcaggtgcgatgcttcagtacctctgtggtcagaccatttgccaagcttgtgaggcctcctgttcaggtatacggtattgaaggtcgctatgccacagctctttattctgctgcatcaaaacagaataagctggagcaagtagaaaaggagttgttgagagtagcacaaatcctgaaggaacccaaagtggctgcttctgttttgaatccctatgtgaagcgttccattaaagtgaaaagcctaaatgacatcacagcaaaagagaggttctctcccctcactaccaacctgatcaatttgcttgctgaaaatggtcgattaagcaatacccaaggagtcgtttctgccttttctaccatgatgagtgtccatcgcggagaggtaccttgcacagtgacctctgcatctcctttagaagaagccacactctctgaattaaaaactgtcctcaagagcttcctaagtcaaggccaagtattgaaattggaggctaagactgatccgtcaatcttgggtggaatgattgtgcgcattggcgagaaatatgttgacatgtctgtcaagaccaagattcagaagctgggcagggctatgcgggagattgtctaaaagtgttggttttctgccatcagtgaaaattcttaaacttggagcaacaataaaaagcttccagaacaga

SEQ ID NO: 430617 - DNA, 926 bp, Homo sapiens
tcccagagaacctagcggttacgccaacgcgcgcgtgcgcccttgcgcgtttctctcttcccactcgggtttgacctacagccgcccgggagaagatggctgccccagcagtgtccgggctctcccggcaggtgcgatgcttcagtacctctgtggtcagaccatttgccaagcttgtgaggcctcctgttcaggtatacggtattgaaggtcgctatgccacagctctttattctgctgcatcaaaacagaataagctggagcaagtagaaaaggagttgttgagagtagcacaaatcctgaaggaacccaaagtggctgcttctgttttgaatccctatgtgaagcgttccattaaagtgaaaagcctaaatgacatcacagcaaaagagaggttctctcccctcactaccaacctgatcaatttgcttgctgaaaatggtcgattaagcaatacccaaggagtcgtttctgccttttctaccatgatgagtgtccatcgcggagaggtaccttgcacagtgacctctgcatctcctttagaagaagccacactctctgaattaaaaactgtcctcaagagcttcctaagtcaaggccaagtattgaaattggaggctaagactgatccgtcaatcttgggtggaatgattgtgcgcattggcgagaaatatgttgacatgtctgtcaagaccaagattcagaagctgggcagggctatgcgggagattgtctaaaagtgttggttttctgccatcagtgaaaattcttaaacttggagcaacaataaaaagcttccagaacagaaaaaaaaaaaaaaaaaaagcggggggtttttgggggggggaaaagggtttaaggggctgggaattttcctgccactttttgaagggggactgccggccccaaggaggaattaaaccgtc

SEQ ID NO: 430618 - DNA, 863 bp, Homo sapiens
tcccagagaacctagcggttacgccaacgcgcgcgtgcgcccttgcgcgtttctctcttcccactcgggtttgacctacagccgcccgggagaagatggctgccccagcagtgtccgggctctcccggcaggtgcgatgcttcagtacctctgtggtcagaccatttgccaagcttgtgaggcctcctgttcaggtatacggtattgaaggtcgctatgccacagctctttattctgctgcatcaaaacagaataagctggagcaagtagaaaaggagttgttgagagtagcacaaatcctgaaggaacccaaagtggctgcttctgttttgaatccctatgtgaagcgttccattaaagtgaaaagcctaaatgacatcacagcaaaagagaggttctctcccctcactaccaacctgatcaatttgcttgctgaaaatggtcgattaagcaatacccaaggagtcgtttctgccttttctaccatgatgagtgtccatcgcggagaggtaccttgcacagtgacctctgcatctcctttagaagaagccacactctctgaattaaaaactgtcctcaagagcttcctaagtcaaggccaagtattgaaattggaggctaagactgatccgtcaatcttgggtggaatgattgtgcgcattggcgagaaatatgttgacatgtctgtcaagaccaagattcagaagctgggcagggctatgcgggagattgtctaaaagtgttggttttctgccatcagtgaaaattcttaaacttggagcaacaataaaaagcttccagaacagagttttataaagtggggaatagcaatggagtgcaaatgagatacaaagggggtacaa

SEQ ID NO: 430619 - DNA, 1510 bp, Homo sapiens
  misc_feature (858)..(858): n is a, c, g, or t
  misc_feature (1510)..(1510): n is a, c, g, or t
tcccagagaacctagcggttacgccaacgcgcgcgtgcgcccttgcgcgtttctctcttcccactcgggtttgacctacagccgcccgggagaagatggctgccccagcagtgtccgggctctcccggcaggtgcgatgcttcagtacctctgtggtcagaccatttgccaagcttgtgaggcctcctgttcaggtatacggtattgaaggtcgctatgccacagctctttattctgctgcatcaaaacagaataagctggagcaagtagaaaaggagttgttgagagtagcacaaatcctgaaggaacccaaagtggctgcttctgttttgaatccctatgtgaagcgttccattaaagtgaaaagcctaaatgacatcacagcaaaagagaggttctctcccctcactaccaacctgatcaatttgcttgctgaaaatggtcgattaagcaatacccaaggagtcgtttctgccttttctaccatgatgagtgtccatcgcggagaggtaccttgcacagtgacctctgcatctcctttagaagaagccacactctctgaattaaaaactgtcctcaagagcttcctaagtcaaggccaagtattgaaattggaggctaagactgatccgtcaatcttgggtggaatgattgtgcgcattggcgagaaatatgttgacatgtctgtcaagaccaagattcagaagctgggcagggctatgcgggagattgtctaaaagtgttggttttctgccatcagtgaaaattcttaaacttggagcaacaataaaaagcttccagaacagaaaaaaaaaaaaaaaaaaagaaaaaaacaacactgtgtgtgtgggcgcgcgnctggggccctggagaaaagagagtttcatagaaaccacattgcgcgtgtgtgggcgcgcgcgggggggcccccatgtggtgtgtataggtggaaccccgtgtggccatagagcggggttcccacaaagaggagaagaccgcggggcgccaatggagccaagagcggcgcgggggggttctcttacacgaatatatatagaaaagcgcgccgggggggggggacaccccgagagcggggcttccggggaccaaattctccgagagaggggcgagtgctccggggagggggccaacataacgggcggagaggcgctctatatactacagacggaggggagcgcgctccaacacggcgagagagcgctcggcagatgtatcttgtcaaaaaaaatttaacaggcccccgcgagccgagccccgcgcgggtggggggggtgacacaccaggcagtacagcagtacctgcagaaaaaagagaataccagatgagaacacgacgcaccaaacggtatgacgagccgagcgagcaagcagcagtcgagaggcatacgacagagaagacgacagataaggtatgcataggcgcacacaggatcgcgaggcacaatggggaaaaagcaacacaatacacggcaaaacaacgcgcaagaaan

SEQ ID NO: 430620 - DNA, 1309 bp, Homo sapiens
tcccagagaacctagcggttacgccaacgcgcgcgtgcgcccttgcgcgtttctctcttcccactcgggtttgacctacagccgcccgggagaagatggctgccccagcagtgtccgggctctcccggcaggtgcgatgcttcagtacctctgtggtcagaccatttgccaagcttgtgaggcctcctgttcaggtatacggtattgaaggtcgctatgccacagctctttattctgctgcatcaaaacagaataagctggagcaagtagaaaaggagttgttgagagtagcacaaatcctgaaggaacccaaagtggctgcttctgttttgaatccctatgtgaagcgttccattaaagtgaaaagcctaaatgacatcacagcaaaagagaggttctctcccctcactaccaacctgatcaatttgcttgctgaaaatggtcgattaagcaatacccaaggagtcgtttctgccttttctaccatgatgagtgtccatcgcggagaggtaccttgcacagtgacctctgcatctcctttagaagaagccacactctctgaattaaaaactgtcctcaagagcttcctaagtcaaggccaagtattgaaattggaggctaagactgatccgtcaatcttgggtggaatgattgtgcgcattggcgagaaatatgttgacatgtctgtcaagaccaagattcagaagctgggcagggctatgcgggagattgtctaaaagtgttggttttctgccatcagtgaaaattcttaaacttggagcaacaataaaaagcttccagaacagataaaaaacaacacaaaaaacaccaaacaaaacaacaaattggtgggggcgggcttggggccctcgggagaaggtttttcttaacaacccacttctcggtctggggcggggggggcccccagttggttttcgtgcgcaccccggggccccaaggggtggctccctacaggagaagacccgtggcccaagcgaccatggcggctgtggtatttctctccaccatatagaaaacggccggggggggccacaggggcggggtccggcaccaaatctcccagagggcgggttcggaggcaccaacgatgggccctataccacgggggggcccaagcgcgaagcccgatataaaaattagccgcggcgctggggcagaaatgactaaacgacacgaaccgacgtccagcaacacagaccctcaccagtcgagcaagacagaccgcccaccagagaatcgacatatcacccacagacacgaccggcaccagacaacgtaaccactaccc

SEQ ID NO: 430621 - DNA, 1537 bp, Homo sapiens
  misc_feature (1410)..(1410): n is a, c, g, or t
  misc_feature (1416)..(1416): n is a, c, g, or t
tcccagagaacctagcggttacgccaacgcgcgcgtgcgcccttgcgcgtttctctcttcccactcgggtttgacctacagccgcccgggagaagatggctgccccagcagtgtccgggctctcccggcaggtgagagaaaggtggtcctgagagccagtgggaggatccctcctgggatgaccggtaccaaacctcgagcaccagggtgcgatgcttcggctggggaagtctggcagtcttcaaggttatgggacctggcgagtgggagcgactcaggacgacccagcgtttgtcccccgggatgcctacggggcagtaggcgcggggctgcgcgtgccgtaaccttggcgtcttccgagcacagcccctggaagctgctagcctgaggggcgcaggagagggggtctgcccttcgctgaattccggggaaggggcatggactagcccccaaatcagcttcctttgccattgtggtaaaacctgtcagagatcacttactagtaatgctaaggaatatttgtaaaacacatttcacagttttataaataaaatgaggccgaaaagtttaaatgagtctttggctgctcagtcagtaagtggtagaattgagatttgaacccacggaatcacccagaagatcgagtttgaaaaaatgttatgctgtttgtgctgcatctcaccatggtgctttacatatcatgaccccttcctggcatcttaggtgcgatgcttcagtacctctgtggtcagaccatttgccaagcttgtgaggcctcctgttcaggtatacggtattgaaggtcgctatgccacagctctttattctgctgcatcaaaacagaataagctggagcaagtagaaaaggagttgttgagagtagcacaaatcctgaaggaacccaaagtggctgcttctgttttgaatccctatgtgaagcgttccattaaagtgaaaagcctaaatgacatcacagcaaaagagaggttctctcccctcactaccaacctgatcaatttgcttgctgaaaatggtcgattaagcaatacccaaggagtcgtttctgccttttctaccatgatgagtgtccatcgcggagaggtaccttgcacagtgacctctgcatctcctttagaagaagccacactctctgaattaaaaactgtcctcaagagcttcctaagtcaaggccaagtattgaaattggaggctaagactgatccgtcaatcttgggtggaatgattgtgcgcattggcgagaaatatgttgacatgtctgtcaagaccaagattcagaagctgggcagggctatgcgggagattgtctaaaagtgttggttttctgccatcagtgaaaattcttaaacttggagcaacaataaaaagcttccagaacagacagaaaaaaancaacanaaacaaaacaaacacacacaaaccagaagaggacacaaagtccggggacggcacaaaaaagggaaagaaaggagccaatgagacaaaaggaagcaccacggacccaagtcgcgggcaaccg

SEQ ID NO: 430622 - DNA, 839 bp, Homo sapiens
  misc_feature (711)..(711): n is a, c, g, or t
  misc_feature (727)..(727): n is a, c, g, or t
  misc_feature (778)..(778): n is a, c, g, or t
  misc_feature (789)..(789): n is a, c, g, or t
tcccagagaacctagcggttacgccaacgcgcgcgtgcgcccttgcgcgtttctctcttcccactcgggtttgacctacagccgcccgggagaagatggctgccccagcagtgtccgggctctcccggcaggtgcgatgcttcagtacctctgtggtcagaccatttgccaagcttgtgaggcctcctgttcaggtatacggtattgaaggtcgctatgccacagctctttattctgctgcatcaaaacagaataagctggagcaagtagaaaaggagttgttgagagtagcacaaatcctgaaggaacccaaagtggctgcttctgttttgaatccctatgtgaagcgttccattaaagtgaaaagcctaaatgacatcacagcaaaagagaggttctctcccctcactaccaacctgatcaatttgcttgctgaaaatggtcgattaagcaatacccaaggagtcgtttctgccttttctaccatgatgagtgtccatcgcggagaggtaccttgcacagtgacctctgcatctcctttagaagaagccacactctctgaattaaaaactgtcctcaagagcttcctaagtcaaggccaagtattgaaattggaggctaagactgatccgtcaatcttgggtggaatgattgtgcgcattggcgagaaatatgttgacatgtctgtcaagaccaagattccacaaaacntggggcaaggggtatnccggggaaaattgtctaaaaaaattgtttgggtttttcctgcccatccaanttgaaaaattnccttaaaacttggggagccaaccaaattaaaaaaagctttcccaaaaaaa

SEQ ID NO: 430623 - DNA, 1101 bp, Homo sapiens
tcccagagaacctagcggttacgccaacgcgcgcgtgcgcccttgcgcgtttctctcttcccactcgggtttgacctacagccgcccgggagaagatggctgccccagcagtgtccgggctctcccggcaggtgcgatgcttcagtacctctgtggtcagaccatttgccaagcttgtgaggcctcctgttcaggtatacggtattgaaggtcgctatgccacagctctttattctgctgcatcaaaacagaataagctggagcaagtagaaaaggagttgttgagagtagcacaaatcctgaaggaacccaaagtggctgcttctgttttgaatccctatgtgaagcgttccattaaagtgaaaagcctaaatgacatcacagcaaaagagaggttctctcccctcactaccaacctgatcaatttgcttgctgaaaatggtcgattaagcaatacccaaggagtcgtttctgccttttctaccatgatgagtgtccatcgcggagaggtaccttgcacagtgacctctgcatctcctttagaagaagccacactctctgaattaaaaactgtcctcaagagcttcctaagtcaaggccaagtattgaaattggaggctaagggtaggttttaaattatttatggtacgttttctcgggttattttaagcttaaaatggctacagaaagtactagtgaaatattagatctaactctatactaatttttctgtagttaaaattttgtatttattttaaatttaaatgattatctgactgtgcagttttacttttgcctttttctaggtgtaattataacctcttacatttgtgcaacacatttagcctttcaaaacacttttttgtgtgtcccatttgattagcgcgttttcacatttccagtcttacttcttttgtactgatccgtcaatcttgggtggaatgattgtgcgcattggcgagaaatatgttgacatgtctgtcaagaccaagattcagaagctgggcagggctatgcgggagattgtctaaaagtgttggttttctgccatcagtgaaaattcttaaacttggagcaacaataaaaagcttccagaacaga

SEQ ID NO: 430624 - DNA, 676 bp, Homo sapiens
tcccagagaacctagcggttacgccaacgcgcgcgtgcgcccttgcgcgtttctctcttcccactcgggtttgacctacagccgcccgggagaagatggctgccccagcagtgtccgggctctcccggcaggtgcgatgcttcagtacctctgtggtcagaccatttgccaagcttgtgaggcctcctgttcaggtatacggtattgaaggtcgctatgccacagctctttattctgctgcatcaaaacagaataagctggagcaagtagaaaaggagttgttgagagtagcacaaatcctgaaggaacccaaagtggctgcttctgttttgaatccctatgtgaagcgttccattaaagtgaaaagcctaaatgacatcacagcaaaagagaggttctctcccctcactaccaacctgatcaatttgcttgctgaaaatggtcgattaagcaatacccaaggagtcgtttctgccttttctaccatgatgagtgtccatcgcggagaggtaccttgcacagtgacctctgcatctcctttagaagaagccacactctctgaattaaaaactgtcctcaagagcttcctaagtcaaggccaagtattgaaattggaggctaaggctaagactgatccgtcaatcttggtactacgcttgacagtaccgagtcgatt

SEQ ID NO: 430625 - DNA, 617 bp, Homo sapiens
  misc_feature (550)..(550): n is a, c, g, or t
tcccagagaacctagcggttacgccaacgcgcgcgtgcgcccttgcgcgtttctctcttcccactcgggtttgacctacagccgcccgggagaagatggctgccccagcagtgtccgggctctcccggcaggtgcgatgcttcagtacctctgtggtcagaccatttgccaagcttgtgaggcctcctgttcaggtatacggtattgaaggtcgctatgccacagctctttattctgctgcatcaaaacagaataagctggagcaagtagaaaaggagttgttgagagtagcacaaatcctgaaggaacccaaagtggctgcttctgttttgaatccctatgtgaagcgttccattaaagtgaaaagcctaaatgacatcacagcaaaagagaggttctctcccctcactaccaacctgatcaatttgcttgctgaaaatggtcgattaagcaatacccaaggagtcgtttctgccttttctaccatgatgagtgtccatcgcggagaggtaccttgcacagtgacctctgcatctcctttagaagaagncacactcatcatggtagaaaaggcagaaacgagtccttgggtactgcgccatggaagattatcgaga

SEQ ID NO: 430626 - DNA, 755 bp, Homo sapiens
tcccagagaacctagcggttacgccaacgcgcgcgtgcgcccttgcgcgtttctctcttcccactcgggtttgacctacagccgcccgggagaagatggctgccccagcagtgtccgggctctcccggcaggtgcgatgcttcagtacctctgtggtcagaccatttgccaagcttgtgaggcctcctgttcaggtatacggtattgaaggtcgctatgccacagctctttattctgctgcatcaaaacagaataagctggagcaagtagaaaaggagttgttgagagtagcacaaatcctgaaggaacccaaagtggctgcttctgttttgaatccctatgtgaagcgttccattaaagtgaaaagcctaaatgacatcacagcaaaagagaggttctctcccctcactaccaacctgatcacttttctaccatgatgagtgtccatcgcggagaggtaccttgcacagtgacctctgcatctcctttagaagaagccacactctctgaattaaaaactgtcctcaagagcttcctaagtcaaggccaagtattgaaattggaggctaagactgatccgtcaatcttgggtggaatgattgtgcgcattggcgagaaatatgttgacatgtctgtcaagaccaagattcagaagctgggcagggctatgcgggagattgtctaaaagtgttggttttctgccatcagtgaaaattcttaaacttggagcaacaataaaaagcttccagaacaga

SEQ ID NO: 430627 - DNA, 1283 bp, Homo sapiens
taacagccttcttcattttcaccattagaacacttaacactataacataactaaccaggagtaagagttggggccgagaggagagtgcagtctggacatttgaggtgcttgctctaaagtaggttatggagctgagctgacttcaggaaaagccaactgctccaggttctctcactggggttcagagagtggagtggcctgccagagctccaggtagctgtggatgcggggagatgaacagccagcagagctaggcaaacatgaagatgtaaaaccaggttaaaatggcaacttttcagccaaggacatgatagatgcatgtcgtgtccccagggctgcacccaggagaggcctgtgtcctcctgcattgatggggctgcatcttcaggcattagaaacttgaaggcctttccttgttagttccaagttgtactgctagcacacagagcagaggcagggagggagtggcatttacaggccgtccttgaacggctgagtgggagctgcccgggtgatgctgtgaggcagggccttcctgtgctccctgaacctccagcgtgaacaaggagtgaatgctgcagagcagctccatgatgggcccaggtagcaaagggaggagctcacaaggcctgtcttggtgatgtgggcctggggtattttaactctggaagtttctgttttgctttatctaaattgaaaggatggttttgcctttcagcctttagaagaagccacactctctgaattaaaaactgtcctcaagagcttcctaagtcaaggccaagtattgaaattggaggctaagggtaggttttaaattatttatggtacgttttctcgggttattttaagcttaaaatggctacagaaagtactagtgaaatattagatctaactctatactaatttttctgtagttaaaattttgtatttattttaaatttaaatgattatctgactgtgcagttttacttttgcctttttctaggtgtaattataacctcttacatttgtgcaacacatttagcctttcaaaacacttttttgtgtgtcccatttgattagcgcgttttcacatttccagtcttacttcttttgtactgatccgtcaatcttgggtggaatgattgtgcgcattggcgagaaatatgttgacatgtctgtcaagaccaagattcagaagctgggcagggctatgcgggagattgtctaaaagtgttggttttctgccatcagtgaaaattcttaaacttggagcaacaataaaaagcttccagaacaga

SEQ ID NO: 430628 - DNA, 681 bp, Homo sapiens
tcccagagaacctagcggttacgccaacgcgcgcgtgcgcccttgcgcgtttctctcttcccactcgggtttgacctacagccgcccgggagaagatggctgccccagcagtgtccgggctctcccggcaggtgcgatgcttcagtacctctgtggtcagaccatttgccaagcttgtgaggcctcctgttcaggtatacggtattgaaggtcgctatgccacagctctttattctgctgcatcaaaacagaataagctggagcaagtagaaaaggagttgttgagagtagcagtaagtagctttcctattcattacatatgaagttcctgtttgtatattttttcctttggttgtttgtgcattcctaatgaggtgtatcctacaagaaaaaactgggaaaaagccattgtctgtaaacacatttttagtaataatattgggtttttattataagacatataaaaagaacaaacagatacatataaggatattaatattaggaaccaagattaggggctaagaaaaggtagaaatataagattaaaatggatggtaatttaggaaaattgctatttcagaagagaatttaaaagctacctttaaaaatctatgcttataactgggcacagtgctcacgcctgtaatcccagtactttgggaggctgaggcaggcagatca

SEQ ID NO: 430629 - DNA, 833 bp, Homo sapiens
tcccagagaacctagcggttacgccaacgcgcgcgtgcgcccttgcgcgtttctctcttcccactcgggtttgacctacagccgcccgggagaagatggctgccccagcagtgtccgggctctcccggcaggtgcgatgcttcagtacctctgtggtcagaccatttgccaagcttgtgaggcctcctgttcaggtatacggtattgaaggtcgctatgccacagctctttattctgctgcatcaaaacagaataagctggagcaagtagaaaaggagttgttgagagtagcacaaatcctgaaggaacccaaagtggctgcttctgttttgaatccctatgtgaagcgttccattaaagtgaaaagcctaaatgacatcacagcaaaagagaggttctctcccctcactaccaacctgatcaatttgcttgctgaaaatggtcgattaagcaatacccaaggagtcgtttctgccttttctaccatgatgagtgtccatcgcggagaggtaccttgcacagtgacctctgcatctcctttagaagaagccacactctctgaattaaaaactgtcctcaagagcttcctaagtcaaggccaagtattgaaattggaggctaagactgatccgtcaatcttgggtggaatgattgtgcgcattggcgagaaatatgttgacatgtctgtcaagaccaagattcagaagctgggcagggctatgcgggagattgtctaaaagtgttggttttctgccatcagtgaaaattcttaaacttggagcaacaataaaaagcttccagaacagagatcatattatgttcactgtctttta

SEQ ID NO: 430630 - DNA, 717 bp, Homo sapiens
tcccagagaacctagcggttacgccaacgcgcgcgtgcgcccttgcgcgtttctctcttcccactcgggtttgacctacagccgcccgggagaagatggctgccccagcagtgtccgggctctcccggcaggtgcgatgcttcagtacctctgtggtcagaccatttgccaagcttgtgaggcctcctgttcaggtatacggtattgaaggtcgctatgccacagctctttattctgttttgaatccctatgtgaagcgttccattaaagtgaaaagcctaaatgacatcacagcaaaagagaggttctctcccctcactaccaacctgatcaatttgcttgctgaaaatggtcgattaagcaatacccaaggagtcgtttctgccttttctaccatgatgagtgtccatcgcggagaggtaccttgcacagtgacctctgcatctcctttagaagaagccacactctctgaattaaaaactgtcctcaagagcttcctaagtcaaggccaagtattgaaattggaggctaagactgatccgtcaatcttgggtggaatgattgtgcgcattggcgagaaatatgttgacatgtctgtcaagaccaagattcagaagctgggcagggctatgcgggagattgtctaaaagtgttggttttctgccatcagtgaaaattcttaaacttggagcaacaataaaaagcttccagaacaga

SEQ ID NO: 430631 - DNA, 931 bp, Homo sapiens
tcccagagaacctagcggttacgccaacgcgcgcgtgcgcccttgcgcgtttctctcttcccactcgggtttgacctacagccgcccgggagaagatggctgccccagcagtgtccgggctctcccggcaggtgcgatgcttcagtacctctgtggtcagaccatttgccaagcttgtgaggcctcctgttcaggtatacggtattgaaggtcgctatgccacagctctttattctgctgcatcaaaacagaataagctggagcaagtagaaaaggagttgttgagagtagcacaaatcctgaaggaacccaaagtggctgcttctgttttgaatccctatgtgaagcgttccattaaagtgaaaagcctaaatgacatcacagcaaaagagaggttctctcccctcactaccaacctgatcaatttgcttgctgaaaatggtcgattaagcaatacccaaggagtcgtttctgccttttctaccatgatgagtgtccatcgcggagaggtaccttgcacagtgacctctgcatctcctttagaagaagccacactctctgaattaaaaactgtcctcaagagcttcctaagtcaaggccaagtattgaaattggaggctaagactgatccgtcaatcttgggtggagtgattgtgcgcaccgccgtgtgacagtggccgggctccctgcgtcccgctggtgacctgcccaccgtccctgtccatgccccgcccttccagctgaggacaggctggcgcctccacccaccctcctgcctcacccctgcggagagcaccgtggcggggcgacagcgcatgcaggaacgggggtctcctctcctgcccgtcctggccggggtgcctctgcgcacgggcgacgctgctgtgtgtggtctcagaggctctgcttccttaggttacaaagcaaaaca

SEQ ID NO: 430632 - DNA, 754 bp, Homo sapiens
tcccagagaacctagcggttacgccaacgcgcgcgtgcgcccttgcgcgtttctctcttcccactcgggtttgacctacagccgcccgggagaagatggctgccccagcagtgtccgggctctcccggcaggtgcgatgcttcagtacctctgtggtcagaccatttgccaagcttgtgaggcctcctgttcaggtatacggtattgaaggtcgctatgccacagctctttattctgctgcatcaaaacagaataagctggagcaagtagaaaaggagttgttgagagtagcacaaatcctgaaggaacccaaagtggctgcttctgttttgaatccctatgtgaagcgttccattaaagtgaaaagcctaaatgacatcacagcaaaagagaggttctctcccctcactaccaacctgatcaatttgcttgctgaaaatggtcgattaagcaatacccaaggagtcgtttctgccttttctaccatgatgagtgtccatcgcggagaggtaccttgcacagtgacctctgcatctcctttagaagaagccacactctctgaattaaaaaactgatccgtcaatcttgggtggaatgattgtgcgcattggcgagaaatatgttgacatgtctgtcaagaccaagattcagaagctgggcagggctatgcgggagattgtctaaaagtgttggttttctgccatcagtgaaaattcttaaacttggagcaacaataaaaagcttccagaacaga

SEQ ID NO: 430633 - DNA, 677 bp, Homo sapiens
tcccagagaacctagcggttacgccaacgcgcgcgtgcgcccttgcgcgtttctctcttcccactcgggtttgacctacagccgcccgggagaagatggctgccccagcagtgtccgggctctcccggcaggtgcgatgcttcagtacctctgtggtcagaccatttgccaagcttgtgaggcctcctgttcaggtatacggtattgaaggtcgctatgccacagctctttattctgctgcatcaaaacagaataagctggagcaagtagaaaaggagttgttgagagtagcaatttgcttgctgaaaatggtcgattaagcaatacccaaggagtcgtttctgccttttctaccatgatgagtgtccatcgcggagaggtaccttgcacagtgacctctgcatctcctttagaagaagccacactctctgaattaaaaactgtcctcaagagcttcctaagtcaaggccaagtattgaaattggaggctaagactgatccgtcaatcttgggtggaatgattgtgcgcattggcgagaaatatgttgacatgtctgtcaagaccaagattcagaagctgggcagggctatgcgggagattgtctaaaagtgttggttttctgccatcagtgaaaattcttaaacttggagcaacaataaaaagcttccagaacaga

SEQ ID NO: 430634 - DNA, 784 bp, Homo sapiens
cagccgcccgggagaagatggctgccccagcagtgtccgggctctcccggcaggtgagagaaaggtggtcctgagagccagtgggaggatccctcctgggatgaccggtaccaaacctcgagcaccagggtgcgatgcttcggctggggaagtctggcagtcttcaaggttatgggacctggcgagtgggagcgactcaggacgacccagcgtttgtcccccgggatgcctacggggcagtaggcgcggggctgcgcgtgccgtaaccttggcgtcttccgagcacagcccctggaagctgctagcctgaggggcgcaggagagggggtctgcccttcgctgaattccggggaaggggcatggactagcccccaaatcagcttcctttgccattgtggtaaaacctgtcagagatcacttactagtaatgctaaggaatatttgtaaaacacatttcacagttttataaataaaatgaggccgaaaagtttaaatgagtctttggctgctcagtcagtaagtggtagaattgagatttgaacccacggaatcacccagaagatcgagtttgaaaaaatgttatgctgtttgtgctgcatctcaccatggtgctttacatatcatgaccccttcctggcatcttaggtaattttttcataagcattaaaaagtcttaatcctcacaagcagttttgataaaacacgttccatagctggagtatttgaaggtgacctgtgatctgtgacctgtgcgcttgcaggtgatttttaaactgtgtattcc

SEQ ID NO: 430635 - DNA, 3572 bp, Homo sapiens
aagtggccagtcggcaggtctgaggcggcgctgtgtgtgtgaagcgtacctagggcgggaggcgacatggagacaggggcggccgagctgtatgaccaggcccttttgggcatcctgcagcacgtgggcaacgtccaggatttcctgcgcgttctctttggcttcctctaccgcaagacagacttctatcgcttgctgcgccacccatcggaccgcatgggcttcccgcccggggccgcgcaggccttggtgctgcaggtattcaaaacctttgaccacatggcccgtcaggatgatgagaagagaaggcaggaacttgaagagaaaatcagaagaaaggaagaggaagaggccaagactgtgtcagctgctgcagctgagaaggagccagtcccagttccagtccaggaaatagagattgactccaccacagaattggatgggcatcaggaagtagagaaagtgcagcctccaggccctgtgaaggaaatggcccatggttcacaggaggcagaagctccaggagcagttgctggtgctgctgaagtccctagggaaccaccaattcttcccaggattcaggagcagttccagaaaaatcccgacagttacaatggtgctgtccgagagaactacacctggtcacaggactatactgacctggaggtcagggtgccagtacccaagcacgtggtgaagggaaagcaggtctcagtggcccttagcagcagctccattcgtgtggccatgctggaggaaaatggggagcgcgtcctcatggaagggaagctcacccacaagatcaacactgagagttctctctggagtctcgagcccgggaagtgcgttttggtgaacctgagcaaggtgggcgagtattggtggaacgccatcctggagggagaagagcccatcgacattgacaagatcaacaaggagcgctccatggccaccgtggatgaggaggaacaggcggtgttggacaggcttacctttgactaccaccagaagctgcagggcaagccacagagccatgagctgaaagtccatgagatgctgaagaaggggtgggatgctgaaggttctcccttccgaggccagcgattcgaccctgccatgttcaacatctccccgggggctgtgcagttttaatgaccagaaggaaaggaaaccctcgccggtggggaggcagagccttatcctcggctgcccttcttggctccctgcattccagggacttgctcgtcttgtttacccctagccatcctttctttcaagggtgaaccaggccttccaccctgaccttgcatctccagactgttccagagaaggtgcggggccagctgctatgtggtggccgctgtggctgacactgagtgaaggtgtttgaaatgcaggagaggatatcccagcaaattgggatcacatgcttttgtctccacagcaaccagccactgcaggcagcatgtctttcctcccctgctctctgcttgctgttgttttgacgctattctgcttgcatgtcttctggttgggatgtggagttgttgctggactctcaggcgaagctgaagtcattgaagtgtgtgaagctctgtgcttgcatgagggcaagcaaggaatggctgtgcctgaggctgctctgggaaactccttgccccttgacctcttttgagagcattcacgtggtcttcttgctcatccccttataaatgtgctttgcctgcctcagcctcatggtcagagcagtggagactggagccctgtttgcacgttctagttgttcggagaaagcctaggttctgggctcaggtccagatgcagcggggattctgttctctgactgtggcgaccttgctttggttcttgttgaagtgaaccaagcccggccaccacgcatggcatgctgtgcttggctccccataagacgtcctctttgggtgcacggtgtcaaagtgtgggcaggagtggagagctggtgccctcaggaggagaccacagcatgtccatcagctcagcagagctcgacagccacaagtcctgagaagctttgaccttgaagggcttctgggagaggaggaatttctgcatggggcgtgaaggcacactgtcccaccacaactgaaccagaagagagtgaagactcccctcttcccatcctctgtgccaggtgccagactgtgctccttggaacttatggcccaatcttacctgttctccagggactggtcactgcctcaggacccccaagcctatgccctgagccatggctgctgactgactccagccaaggtgcaaagacgagattatgagacaggtcctcaggcctgtgttccaagtactcacaggggctctgggtgcccatcgccgggagtatggttcagctgccaccggcactgtccatttgcctgtctgtcaagctcagagcatggataagccacacagcagggcagtgcaccctggcaccatgcacggccagcaagaatcaaggcccgcagatgctaagagggcctattgtcaggggaaggtccccgctcctgcacactctctatggatacttgggttgtgggggctctcttggagagtaagtttgtggtttgtttctggtttacagtggtggctgacaccccttgtaagaaagcattcctgggaagtcttctgtgggtccaaacatgttgctccgatcatcacaggagagcaaaaggccctagataccccctttggaatgtgagagtcttgttgtctgatatttgccactgagctggtgaagcccctctaaagagatctcgaccctggggagcagaattcttgtcatctatgaggggtcctgagaaagacttgtcattttttttcctggagttcttcccattgaggtcctaggatttgcacaccactgtcccacaagagctttcctgcctaatgaaaggaggtcttgtggtgtgtgtctcctctcttctctatagttcccgagttggcccccattgcagcccccaccctgtgggtagtcttccagaagtgatgcagtggtgtgagatgccctacaccttgttatttgggagactttgagagtcattcacttccatggtgactagtgtttgttttgcctgattttatattctgtgttgcatttctccccactccctgccctgctttaataaacagcaaaccaatatctaggaagaatgactgagggatagtattgggtattggccccatggcaggaacagccacttgcatctggtcccggtgccacactgcggtgcttggtgtggttgtggagcctgtccctgcgcgccttgctcccgttgagccacgctgtctggtgggtgattctctgccctgagccaccaccctggactggcccagtctccagagctggcacaccctgcctgttttctctttttagacacaacagccgcagtttggccagccactaagtcccaccagctgaggtccgaggaaagcggggtgactcatttcccttgtccagggcccgaggagagtgaggtgtccagcctgcaaagctattccagctccttggtgttggtttgcaataaattggtatttaagca

SEQ ID NO: 430636 - DNA, 4879 bp, Homo sapiens
aagtggccagtcggcaggtctgaggcggcgctgtgtgtgtgaagcgtacctagggcgggaggcgacatggagacaggggcggccgagctgtatgaccaggcccttttgggcatcctgcagcacgtgggcaacgtccaggatttcctgcgcgttctctttggcttcctctaccgcaagacagacttctatcgcttgctgcgccacccatcggaccgcatgggcttcccgcccggggccgcgcaggccttggtgctgcaggtattcaaaacctttgaccacatggcccgtcaggatgatgagaagagaaggcaggaacttgaagagaaaatcagaagaaaggaagaggaagaggccaagactgtgtcagctgctgcagctgagaaggagccagtcccagttccagtccaggaaatagagattgactccaccacagaattggatgggcatcaggaagtagagaaagtgcagcctccaggccctgtgaaggaaatggcccatggttcacaggaggcagaagctccaggagcagttgctggtgctgctgaagtccctagggaaccaccaattcttcccaggattcaggagcagttccagaaaaatcccgacagttacaatggtgctgtccgagagaactacacctggtcacaggactatactgacctggaggtcagggtgccagtacccaagcacgtggtgaagggaaagcaggtctcagtggcccttagcagcagctccattcgtgtggccatgctggaggaaaatggggagcgcgtcctcatggaagggaagctcacccacaagatcaacactgagagttctctctggagtctcgagcccgggaagtgcgttttggtgaacctgagcaaggtgggcgagtattggtggaacgccatcctggagggagaagagcccatcgacattgacaagatcaacaaggagcgctccatggccaccgtggatgaggaggaacaggcggtgttggacaggcttacctttgactaccaccagaagctgcagggcaagccacagagccatgagctgaaagtccatgagatgctgaagaaggggtgggatgctgaaggttctcccttccgaggccagcgattcgaccctgccatgttcaacatctccccgggggctgtgcagttttaatgaccagaaggaaaggaaaccctcgccggtggggaggcagagccttatcctcggctgcccttcttggctccctgcattccagggacttgctcgtcttgtttacccctagccatcctttctttcaagggtgaaccaggccttccaccctgaccttgcatctccagactgttccagagaaggtgcggggccagctgctatgtggtggccgctgtggctgacactgagtgaaggtgtttgaaatgcaggagaggatatcccagcaaattgggatcacatgcttttgtctccacagcaaccagccactgcaggcagcatgtctttcctcccctgctctctgcttgctgttgttttgacgctattctgcttgcatgtcttctggttgggatgtggagttgttgctggactctcaggcgaagctgaagtcattgaagtgtgtgaagctctgtgcttgcatgagggcaagcaaggaatggctgtgcctgaggctgctctgggaaactccttgccccttgacctcttttgagagcattcacgtggtcttcttgctcatccccttataaatgtgctttgcctgcctcagcctcatggtcagagcagtggagactggagccctgtttgcacgttctagttgttcggagaaagcctaggttctgggctcaggtccagatgcagcggggattctgttctctgactgtggcgaccttgctttggttcttgttgaagtgaaccaagcccggccaccacgcatggcatgctgtgcttggctccccataagacgtcctctttgggtgcacggtgtcaaagtgtgggcaggagtggagagctggtgccctcaggaggagaccacagcatgtccatcagctcagcagagctcgacagccacaagtcctgagaagctttgaccttgaagggcttctgggagaggaggaatttctgcatggggcgtgaaggcacactgtcccaccacaactgaaccagaagagagtgaagactcccctcttcccatcctctgtgccaggtgccagactgtgctccttggaacttatggcccaatcttacctgttctccagggactggtcactgcctcaggacccccaagcctatgccctgagccatggctgctgactgactccagccaaggtgcaaagacgagattatgagacaggtcctcaggcctgtgttccaagtactcacaggggctctgggtgcccatcgccgggagtatggttcagctgccaccggcactgtccatttgcctgtctgtcaagctcagagcatggataagccacacagcagggcagtgcaccctggcaccatgcacggccagcaagaatcaaggcccgcagatgctaagagggcctattgtcaggggaaggtccccgctcctgcacactctctatggatacttgggttgtgggggctctcttggagagtaagtttgtggtttgtttctggtttacagtggtggctgacaccccttgtaagaaagcattcctgggaagtcttctgtgggtccaaacatgttgctccgatcatcacaggagagcaaaaggccctagataccccctttggaatgtgagagtcttgttgtctgatatttgccactgagctggtgaagcccctctaaagagatctcgaccctggggagcagaattcttgtcatctatgaggggtcctgagaaagacttgtcattttttttcctggagttcttcccattgaggtcctaggatttgcacaccactgtcccacaagagctttcctgcctaatgaaaggaggtcttgtggtgtgtgtctcctctcttctctatagttcccgagttggcccccattgcagcccccaccctgtgggtagtcttccagaagtgatgcagtggtgtgagatgccctacaccttgttatttgggagactttgagagtcattcacttccatggtgactagtgtttgttttgcctgattttatattctgtgttgcatttctccccactccctgccctgctttaataaacagcaaaccaatatctaggaagaatgactgagggatagtattgggtattggccccatggcaggaacagccacttgcatctggtcccggtgccacactgcggtgcttggtgtggttgtggagcctgtccctgcgcgccttgctcccgttgagccacgctgtctggtgggtgattctctgccctgagccaccaccctggactggcccagtctccagagctggcacaccctgcctgttttctctttttagacacaacagccgcagtttggccagccactaagtcccaccagctgaggtccgaggaaagcggggtgactcatttcccttgtccagggcccgaggagagtgaggtgtccagcctgcaaagctattccagctccttggtgttggtttgcaataaattggtatttaagcagttctgggtctgcgtgtgacatttgctgctgagacagttctgtctgtgcatggtcattattgttgcattctagccttgaggtcccaggccaacgtacacagcaaacaccagcatggggaattcttaggggttgtttcccatctggtctgaatgcactgggcaagatctcaatacagctttagaaatcctgtaagattttgaccagtggggagaaaaagaatgtagctatagatcttacatcctttcaaacaggttctggaattctgtagttactggaaagcttagggtgagtgcagagttgggaatgattccactgaagggccacctttgcccaccaggctccaaggccctccttggtctccaggtgcatacctgctgttaactttgctgagccctcgcaatgggcttcctccaggacataacgccgtgtctgacacagaagtctcccaggtggctggccacctgcttcttcctcagtcagatctttgactctccttctctgtgcccaccccatctccagcctcctctgaccctgctcacccctggggacaggacctaggggtgtgagaagtacttggctgaataaagactgtttcaaaggcaatccttagaattgcctagcatactcccagggccagaaataacccgccagaaaggagaggcgtatttgcccctgaagagtgcaggagggagaacagttgagaagtgttttgtgtggaaatgtgtccaagaggcgtcagctgctgcacagagaactcactgcccagaacactgcgcttggggaacagacctcacccccacctcaaatctgctctccactgggcctgttggcagccagctcagctggggaagggacagcatgactcgctttgtcgatgaaaagcacgaagttgtcagcacagaacctggccagtccttgagaaactccctccttggtggtcagaggtcaagcagcccatgtggcccacggtcctgaagaactgggctatgtccctgaggctcctctctaccgtctgactgtggggtctggggaacaggcatttaaaccaggctgctgccctggggagtgcccactggacgccagggtgccccatagggacagggtcacaaagccctggggcttcccctgccagtcctggtgaggacagtgtggtcactatctcagagagacgaaaaatgaatattctgtcatttcagactaaactactcacccagctcacactaatatggatttgttaattttacctttttttttctttccaactttaggttcaagggttgttacatgggtaaattggatcataggg

SEQ ID NO: 430637 - DNA, 498 bp, Homo sapiens
tgggtgcctagaggatcccagttcgacggagactctcacattcctgggaagtcttctgtgggtccaaacatgttgctccgatcatcacaggagagcaaaaggccctagataccccctttggaatgtgagagtcttgttgtctgatatttgccactgagctggtgaagcccctctaaagagatctcgaccctggggagcagaattcttgtcatctatgaggggtcctgagaaagacttgtcattttttttcctggagttcttcccattgaggtcctaggatttgcacaccactgtcccacaagagctttcctgcctaatgaaaggaggtcttgtggtgtgtgtctcctctcttctctatagttcccgagttggcccccattgcagcccccaccctgtgggtagtcttccagaagtgatgcagtggtgtgagatgccctacaccttgttatttgggagactttgagagtctccgtcgaactgggacctctagatcgacct

SEQ ID NO: 430638 - DNA, 912 bp, Homo sapiens
  misc_feature (871)..(871): n is a, c, g, or t
aagtggccagtcggcaggtctgaggcggcgctgtgtgtgtgaagcgtacctagggcgggaggcgacatggagacaggggcggccgagctgtatgaccaggcccttttgggcatcctgcagcacgtgggcaacgtccaggatttcctgcgcgttctctttggcttcctctaccgcaagacagacttctatcgcttgctgcgccacccatcggaccgcatgggcttcccgcccggggccgcgcaggccttggtgctgcaggtattcaaaacctttgaccacatggcccgtcaggatgatgagaagagaaggcaggaacttgaagagaaaatcagaagaaaggaagaggaagaggccaagactgtgtcagctgctgcagctgagaaggagccagtcccagttccagtccaggaaatagagattgactccaccacagaattggatgggcatcaggaagtagagaaagtgcagcctccaggccctgtgaaggaaatggcccatggttcacaggaggcagaagctccaggagcagttgctggtgctgctgaagtccctagggaaccaccaattcttcccagatatatttatcaattcctggaaaaaatagtggagacaacactgagaaacttactcaacatttccacaagctactcgttcatggaagtcgcataacagcttaggagtttgctttaaccagagtatgtgtgcataaaaaatacatcttcctgaggtagttggcagcgtaatggcagcataaaggcaagctggattctctctctgctgactcacacaagaaacaaaaagaaatatacaacatggagatcttcagcaacagtccagagctcaagtatgaagatgaaacaattcctggggncacaaagatgtggaagcagatggtaggggaacagacttcca

SEQ ID NO: 430639 - DNA, 4797 bp, Homo sapiens
aagtggccagtcggcaggtctgaggcggcgctgtgtgtgtgaagcgtacctagggcgggaggcgacatggagacaggggcggccgagctgtatgaccaggcccttttgggcatcctgcagcacgtgggcaacgtccaggatttcctgcgcgttctctttggcttcctctaccgcaagacagacttctatcgcttgctgcgccacccatcggaccgcatgggcttcccgcccggggccgcgcaggccttggtgctgcaggtattcaaaacctttgaccacatggcccgtcaggatgatgagaagagaaggcaggaacttgaagagaaaatcagaagaaaggaagaggaagaggccaagactgtgtcagctgctgcagctgagaaggagccagtcccagttccagtccaggaaatagagattgactccaccacagaattggatgggcatcaggaagtagagaaagtgcagcctccaggccctgtgaaggaaatggcccatggttcacaggaggcagaagctccaggagcagttgctggtgctgctgaagtccctagggaaccaccaattcttcccaggattcaggagcagttccagaaaaatcccgacagttacaatggtgctgtccgagagaactacacctggtcacaggactatactgacctggaggtcagggtgccagtacccaagcacgtggtgaagggaaagcaggtctcagtggcccttagcagcagctccattcgtgtggccatgctggaggaaaatggggagcgcgtcctcatggaagggaagctcacccacaagatcaacactgagagttctctctggagtctcgagcccgggaagtgcgttttggtgaacctgagcaaggtgggcgagtattggtggaacgccatcctggagggagaagagcccatcgacattgacaagatcaacaaggagcgctccatggccaccgtggatgaggaggaacaggcggtgttggacaggcttacctttgactaccaccagaagctgcagggcaagccacagagccatgagctgaaagtccatgagatgctgaagaaggggtgggatgctgaaggttctcccttccgaggccagcgattcgaccctgccatgttcaacatctccccgggggctgtgcagttttaatgaccagaaggaaaggaaaccctcgccggtggggaggcagagccttatcctcggctgcccttcttggctccctgcattccagggacttgctcgtcttgtttacccctagccatcctttctttcaagggtgaaccaggccttccaccctgaccttgcatctccagactgttccagagaaggtgcggggccagctgctatgtggtggccgctgtggctgacactgagtgaaggtgtttgaaatgcaggagaggatatcccagcaaattgggatcacatgcttttgtctccacagcaaccagccactgcaggcagcatgtctttcctcccctgctctctgcttgctgttgttttgacgctattctgcttgcatgtcttctggttgggatgtggagttgttgctggactctcaggcgaagctgaagtcattgaagtgtgtgaagctctgtgcttgcatgagggcaagcaaggaatggctgtgcctgaggctgctctgggaaactccttgccccttgacctcttttgagagcattcacgtggtcttcttgctcatccccttataaatgtgctttgcctgcctcagcctcatggtcagagcagtggagactggagccctgtttgcacgttctagttgttcggagaaagcctaggttctgggctcaggtccagatgcagcggggattctgttctctgactgtggcgaccttgctttggttcttgttgaagtgaaccaagcccggccaccacgcatggcatgctgtgcttggctccccataagacgtcctctttgggtgcacggtgtcaaagtgtgggcaggagtggagagctggtgccctcaggaggagaccacagcatgtccatcagctcagcagagctcgacagccacaagtcctgagaagctttgaccttgaagggcttctgggagaggaggaatttctgcatggggcgtgaaggcacactgtcccaccacaactgaaccagaagagagtgaagactcccctcttcccatcctctgtgccaggtgccagactgtgctccttggaacttatggcccaatcttacctgttctccagggactggtcactgcctcaggacccccaagcctatgccctgagccatggctgctgactgactccagccaaggtgcaaagacgagattatgagacaggtcctcaggcctgtgttccaagtactcacaggggctctgggtgcccatcgccgggagtatggttcagctgccaccggcactgtccatttgcctgtctgtcaagctcagagcatggataagccacacagcagggcagtgcaccctggcaccatgcacggccagcaagaatcaaggcccgcagatgctaagagggcctattgtcaggggaaggtccccgctcctgcacactctctatggatacttgggttgtgggggctctcttggagagtaagtttgtggtttgtttctggtttacagtggtggctgacaccccttgtaagaaagcattcctgggaagtcttctgtgggtccaaacatgttgctccgatcatcacaggagagcaaaaggccctagataccccctttggaatgtgagagtcttgttgtctgatatttgccactgagctggtgaagcccctctaaagagatctcgaccctggggagcagaattcttgtcatctatgaggggtcctgagaaagacttgtcattttttttcctggagttcttcccattgaggtcctaggatttgcacaccactgtcccacaagagctttcctgcctaatgaaaggaggtcttgtggtgtgtgtctcctctcttctctatagttcccgagttggcccccattgcagcccccaccctgtgggtagtcttccagaagtgatgcagtggtgtgagatgccctacaccttgttatttgggagactttgagagtcattcacttccatggtgactagtgtttgttttgcctgattttatattctgtgttgcatttctccccactccctgccctgctttaataaacagcaaaccaatatctaggaagaatgactgagggatagtattgggtattggccccatggcaggaacagccacttgcatctggtcccggtgccacactgcggtgcttggtgtggttgtggagcctgtccctgcgcgccttgctcccgttgagccacgctgtctggtgggtgattctctgccctgagccaccaccctggactggcccagtctccagagctggcacaccctgcctgttttctctttttagacacaacagccgcagtttggccagccactaagtcccaccagctgaggtccgaggaaagcggggtgactcatttcccttgtccagggcccgaggagagtgaggtgtccagcctgcaaagctattccagctccttggtgttggtttgcaataaattggtatttaagcagttctgggtctgcgtgtgacatttgctgctgagacagttctgtctgtgcatggtcattattgttgcattctagccttgaggtcccaggccaacgtacacagcaaacaccagcatggggaattcttaggggttgtttcccatctggtctgaatgcactgggcaagatctcaatacagctttagaaatcctgtaagattttgaccagtggggagaaaaagaatgtagctatagatcttacatcctttcaaacaggttctggaattctgtagttactggaaagcttagggtgagtgcagagttgggaatgattccactgaagggccacctttgcccaccaggctccaaggccctccttggtctccaggtgcatacctgctgttaactttgctgagccctcgcaatgggcttcctccaggacataacgccgtgtctgacacagaagtctcccaggtggctggccacctgcttcttcctcagtcagatctttgactctccttctctgtgcccaccccatctccagcctcctctgaccctgctcacccctggggacaggacctaggggtgtgagaagtacttggctgaataaagactgtttcaaaggcaatccttagaattgcctagcatactcccagggccagaaataacccgccagaaaggagaggcgtatttgcccctgaagagtgcaggagggagaacagttgagaagtgttttgtgtggaaatgtgtccaagaggcgtcagctgctgcacagagaactcactgcccagaacactgcgcttggggaacagacctcacccccacctcaaatctgctctccactgggcctgttggcagccagctcagctggggaagggacagcatgactcgctttgtcgatgaaaagcacgaagttgtcagcacagaacctggccagtccttgagaaactccctccttggtggtcagaggtcaagcagcccatgtggcccacggtcctgaagaactgggctatgtccctgaggctcctctctaccgtctgactgtggggtctggggaacaggcatttaaaccaggctgctgccctggggagtgcccactggacgccagggtgccccatagggacagggtcacaaagccctggggcttcccctgccagtcctggtgaggacagtgtggtcactatctcagagagacgaaaaatgaatattctgtcatttcagactaaactactcacccagctcacactaa

SEQ ID NO: 430640 - DNA, 3826 bp, Homo sapiens
aagtggccagtcggcaggtctgaggcggcgctgtgtgtgtgaagcgtacctagggcgggaggcgacatggagacaggggcggccgagctgtatgaccaggcccttttgggcatcctgcagcacgtgggcaacgtccaggatttcctgcgcgttctctttggcttcctctaccgcaagacagacttctatcgcttgctgcgccacccatcggaccgcatgggcttcccgcccggggccgcgcaggccttggtgctgcaggtattcaaaacctttgaccacatggcccgtcaggatgatgagaagagaaggcaggaacttgaagagaaaatcagaagaaaggaagaggaagaggccaagactgtgtcagctgctgcagctgagaaggagccagtcccagttccagtccaggaaatagagattgactccaccacagaattggatgggcatcaggaagtagagaaagtgcagcctccaggccctgtgaaggaaatggcccatggttcacaggaggcagaagctccaggagcagttgctggtgctgctgaagtccctagggaaccaccaattcttcccaggattcaggagcagttccagaaaaatcccgacagttacaatggtgctgtccgagagaactacacctggtcacaggactatactgacctggaggtcagggtgccagtacccaagcacgtggtgaagggaaagcaggtcatgggtgagacccattgaagccccatccagtcctgagaggcaaagcaaagaacccaggtcacagcgatgaagtggacggccaggcctgtgtgctgtggggctcttccatggagcagggagccatgtcctataagtaccgcatgctaaccgattgcgccactggagccacaccatgtcatgatgtacctgtaacattcgcaacttgagtttcaaacactaaagtttctgaaacctccatctaatgagtttaagtctcagtggcccttagcagcagctccattcgtgtggccatgctggaggaaaatggggagcgcgtcctcatggaagggaagctcacccacaagatcaacactgagagttctctctggagtctcgagcccgggaagtgcgttttggtgaacctgagcaaggtgggcgagtattggtggaacgccatcctggagggagaagagcccatcgacattgacaagatcaacaaggagcgctccatggccaccgtggatgaggaggaacaggcggtgttggacaggcttacctttgactaccaccagaagctgcagggcaagccacagagccatgagctgaaagtccatgagatgctgaagaaggggtgggatgctgaaggttctcccttccgaggccagcgattcgaccctgccatgttcaacatctccccgggggctgtgcagttttaatgaccagaaggaaaggaaaccctcgccggtggggaggcagagccttatcctcggctgcccttcttggctccctgcattccagggacttgctcgtcttgtttacccctagccatcctttctttcaagggtgaaccaggccttccaccctgaccttgcatctccagactgttccagagaaggtgcggggccagctgctatgtggtggccgctgtggctgacactgagtgaaggtgtttgaaatgcaggagaggatatcccagcaaattgggatcacatgcttttgtctccacagcaaccagccactgcaggcagcatgtctttcctcccctgctctctgcttgctgttgttttgacgctattctgcttgcatgtcttctggttgggatgtggagttgttgctggactctcaggcgaagctgaagtcattgaagtgtgtgaagctctgtgcttgcatgagggcaagcaaggaatggctgtgcctgaggctgctctgggaaactccttgccccttgacctcttttgagagcattcacgtggtcttcttgctcatccccttataaatgtgctttgcctgcctcagcctcatggtcagagcagtggagactggagccctgtttgcacgttctagttgttcggagaaagcctaggttctgggctcaggtccagatgcagcggggattctgttctctgactgtggcgaccttgctttggttcttgttgaagtgaaccaagcccggccaccacgcatggcatgctgtgcttggctccccataagacgtcctctttgggtgcacggtgtcaaagtgtgggcaggagtggagagctggtgccctcaggaggagaccacagcatgtccatcagctcagcagagctcgacagccacaagtcctgagaagctttgaccttgaagggcttctgggagaggaggaatttctgcatggggcgtgaaggcacactgtcccaccacaactgaaccagaagagagtgaagactcccctcttcccatcctctgtgccaggtgccagactgtgctccttggaacttatggcccaatcttacctgttctccagggactggtcactgcctcaggacccccaagcctatgccctgagccatggctgctgactgactccagccaaggtgcaaagacgagattatgagacaggtcctcaggcctgtgttccaagtactcacaggggctctgggtgcccatcgccgggagtatggttcagctgccaccggcactgtccatttgcctgtctgtcaagctcagagcatggataagccacacagcagggcagtgcaccctggcaccatgcacggccagcaagaatcaaggcccgcagatgctaagagggcctattgtcaggggaaggtccccgctcctgcacactctctatggatacttgggttgtgggggctctcttggagagtaagtttgtggtttgtttctggtttacagtggtggctgacaccccttgtaagaaagcattcctgggaagtcttctgtgggtccaaacatgttgctccgatcatcacaggagagcaaaaggccctagataccccctttggaatgtgagagtcttgttgtctgatatttgccactgagctggtgaagcccctctaaagagatctcgaccctggggagcagaattcttgtcatctatgaggggtcctgagaaagacttgtcattttttttcctggagttcttcccattgaggtcctaggatttgcacaccactgtcccacaagagctttcctgcctaatgaaaggaggtcttgtggtgtgtgtctcctctcttctctatagttcccgagttggcccccattgcagcccccaccctgtgggtagtcttccagaagtgatgcagtggtgtgagatgccctacaccttgttatttgggagactttgagagtcattcacttccatggtgactagtgtttgttttgcctgattttatattctgtgttgcatttctccccactccctgccctgctttaataaacagcaaaccaatatctaggaagaatgactgagggatagtattgggtattggccccatggcaggaacagccacttgcatctggtcccggtgccacactgcggtgcttggtgtggttgtggagcctgtccctgcgcgccttgctcccgttgagccacgctgtctggtgggtgattctctgccctgagccaccaccctggactggcccagtctccagagctggcacaccctgcctgttttctctttttagacacaacagccgcagtttggccagccactaagtcccaccagctgaggtccgaggaaagcggggtgactcatttcccttgtccagggcccgaggagagtgaggtgtccagcctgcaaagctattccagctccttggtgttggtttgcaataaattggtatttaagca

SEQ ID NO: 430641 - DNA, 5448 bp, Homo sapiens
aagtggccagtcggcaggtctgaggcggcgctgtgtgtgtgaagcgtacctagggcgggaggcgacatggagacaggggcggccgagctgtatgaccaggcccttttgggcatcctgcagcacgtgggcaacgtccaggatttcctgcgcgttctctttggcttcctctaccgcaagacagacttctatcgcttgctgcgccacccatcggaccgcatgggcttcccgcccggggccgcgcaggccttggtgctgcaggtattcaaaacctttgaccacatggcccgtcaggatgatgagaagagaaggcaggaacttgaagagaaaatcagaagaaaggaagaggaagaggccaagactgtgtcagctgctgcagctgagaaggagccagtcccagttccagtccaggaaatagagattgactccaccacagaattggatgggcatcaggaagtagagaaagtgcagcctccaggccctgtgaaggaaatggcccatggttcacaggaggcagaagctccaggagcagttgctggtgctgctgaagtccctagggaaccaccaattcttcccaggattcaggagcagttccagaaaaatcccgacagttacaatggtgctgtccgagagaactacacctggtcacaggactatactgacctggaggtcagggtgccagtacccaagcacgtggtgaagggaaagcaggtctcagtggcccttagcagcagctccattcgtgtggccatgctggaggaaaatggggagcgcgtcctcatggaagggaagctcacccacaagatcaacactgagagttctctctggagtctcgagcccgggaagtgcgttttggtgaacctgagcaaggtgggcgagtattggtggaacgccatcctggagggagaagagcccatcgacattgacaagatcaacaaggagcgctccatggccaccgtggatgaggaggaacaggcggtgttggacaggcttacctttgactaccaccagaagctgcagggcaagccacagagccatgagctgaaagtccatgagatgctgaagaaggggtgggatgctgaaggttctcccttccgaggccagcgattcgaccctgccatgttcaacatctccccgggggctgtgcagttttaatgaccagaaggaaaggaaaccctcgccggtggggaggcagagccttatcctcggctgcccttcttggctccctgcattccagggacttgctcgtcttgtttacccctagccatcctttctttcaagggtgaaccaggccttccaccctgaccttgcatctccagactgttccagagaaggtgcggggccagctgctatgtggtggccgctgtggctgacactgagtgaaggtgtttgaaatgcaggagaggatatcccagcaaattgggatcacatgcttttgtctccacagcaaccagccactgcaggcagcatgtctttcctcccctgctctctgcttgctgttgttttgacgctattctgcttgcatgtcttctggttgggatgtggagttgttgctggactctcaggcgaagctgaagtcattgaagtgtgtgaagctctgtgcttgcatgagggcaagcaaggaatggctgtgcctgaggctgctctgggaaactccttgccccttgacctcttttgagagcattcacgtggtcttcttgctcatccccttataaatgtgctttgcctgcctcagcctcatggtcagagcagtggagactggagccctgtttgcacgttctagttgttcggagaaagcctaggttctgggctcaggtccagatgcagcggggattctgttctctgactgtggcgaccttgctttggttcttgttgaagtgaaccaagcccggccaccacgcatggcatgctgtgcttggctccccataagacgtcctctttgggtgcacggtgtcaaagtgtgggcaggagtggagagctggtgccctcaggaggagaccacagcatgtccatcagctcagcagagctcgacagccacaagtcctgagaagctttgaccttgaagggcttctgggagaggaggaatttctgcatggggcgtgaaggcacactgtcccaccacaactgaaccagaagagagtgaagactcccctcttcccatcctctgtgccaggtgccagactgtgctccttggaacttatggcccaatcttacctgttctccagggactggtcactgcctcaggacccccaagcctatgccctgagccatggctgctgactgactccagccaaggtgcaaagacgagattatgagacaggtcctcaggcctgtgttccaagtactcacaggggctctgggtgcccatcgccgggagtatggttcagctgccaccggcactgtccatttgcctgtctgtcaagctcagagcatggataagccacacagcagggcagtgcaccctggcaccatgcacggccagcaagaatcaaggcccgcagatgctaagagggcctattgtcaggggaaggtccccgctcctgcacactctctatggatacttgggttgtgggggctctcttggagagtaagtttgtggtttgtttctggtttacagtggtggctgacaccccttgtaagaaagcattcctgggaagtcttctgtgggtccaaacatgttgctccgatcatcacaggagagcaaaaggccctagataccccctttggaatgtgagagtcttgttgtctgatatttgccactgagctggtgaagcccctctaaagagatctcgaccctggggagcagaattcttgtcatctatgaggggtcctgagaaagacttgtcattttttttcctggagttcttcccattgaggtcctaggatttgcacaccactgtcccacaagagctttcctgcctaatgaaaggaggtcttgtggtgtgtgtctcctctcttctctatagttcccgagttggcccccattgcagcccccaccctgtgggtagtcttccagaagtgatgcagtggtgtgagatgccctacaccttgttatttgggagactttgagagtcattcacttccatggtgactagtgtttgttttgcctgattttatattctgtgttgcatttctccccactccctgccctgctttaataaacagcaaaccaatatctaggaagaatgactgagggatagtattgggtattggccccatggcaggaacagccacttgcatctggtcccggtgccacactgcggtgcttggtgtggttgtggagcctgtccctgcgcgccttgctcccgttgagccacgctgtctggtgggtgattctctgccctgagccaccaccctggactggcccagtctccagagctggcacaccctgcctgttttctctttttagacacaacagccgcagtttggccagccactaagtcccaccagctgaggtccgaggaaagcggggtgactcatttcccttgtccagggcccgaggagagtgaggtgtccagcctgcaaagctattccagctccttggtgttggtttgcaataaattggtatttaagcagttctgggtctgcgtgtgacatttgctgctgagacagttctgtctgtgcatggtcattattgttgcattctagccttgaggtcccaggccaacgtacacagcaaacaccagcatggggaattcttaggggttgtttcccatctggtctgaatgcactgggcaagatctcaatacagctttagaaatcctgtaagattttgaccagtggggagaaaaagaatgtagctatagatcttacatcctttcaaacaggttctggaattctgtagttactggaaagcttagggtgagtgcagagttgggaatgattccactgaagggccacctttgcccaccaggctccaaggccctccttggtctccaggtgcatacctgctgttaactttgctgagccctcgcaatgggcttcctccaggacataacgccgtgtctgacacagaagtctcccaggtggctggccacctgcttcttcctcagtcagatctttgactctccttctctgtgcccaccccatctccagcctcctctgaccctgctcacccctggggacaggacctaggggtgtgagaagtacttggctgaataaagactgtttcaaaggcaatccttagaattgcctagcatactcccagggccagaaataacccgccagaaaggagaggcgtatttgcccctgaagagtgcaggagggagaacagttgagaagtgttttgtgtggaaatgtgtccaagaggcgtcagctgctgcacagagaactcactgcccagaacactgcgcttggggaacagacctcacccccacctcaaatctgctctccactgggcctgttggcagccagctcagctggggaagggacagcatgactcgctttgtcgatgaaaagcacgaagttgtcagcacagaacctggccagtccttgagaaactccctccttggtggtcagaggtcaagcagcccatgtggcccacggtcctgaagaactgggctatgtccctgaggctcctctctaccgtctgactgtggggtctggggaacaggcatttaaaccaggctgctgccctggggagtgcccactggacgccagggtgccccatagggacagggtcacaaagccctggggcttcccctgccagtcctggtgaggacagtgtggtcactatctcagagagacgaaaaatgaatattctgtcatttcagactaaactactcacccagctcacactaaaaaaaaaaaaaaaaaaaaaaaaaaaaaaaaaaaaaaagggggggcccctaaaaatttccccggggggcccaatttgtttccccctttttttgaaaagggggcccctaatgagagactacgatatatataaagcaagaggcaaggggcgcgcgttttaacagagttgctgcgttggggaaacacagtgtgacctgtgggggatatctggtggtgaggagggaccccttaatttcgtggggggtgttgaaccattagttgcggaccaacattaacttaacagaaaattaaagagcttcagaggggaacattattaaaacatctttgcagggtgttctatatgctggtctcaccagaggactaattagtgactagcaggacatagaaaaagtttgggggataaccggggagtttttgattttatgaaacaatttttttcccgggggtagcttaggtgtatataaaatgggtcatgcatataacagatacaataccacaacaaattcagaataagagagaaaaatacgatcgagagaaatataataaaagtagaatagtatatgaagaacaataaagagaaactagtatatgataatagatgtgacgaataagataaaagaaacaacaaaagaaaacaatagggagaaaaatcaa

SEQ ID NO: 430642 - DNA, 3575 bp, Homo sapiens
  misc_feature (2697)..(2697): n is a, c, g, or t
aagtggccagtcggcaggtctgaggcggcgctgtgtgtgtgaagcgtacctagggcgggaggcgacatggagacaggggcggccgagctgtatgaccaggcccttttgggcatcctgcagcacgtgggcaacgtccaggatttcctgcgcgttctctttggcttcctctaccgcaagacagacttctatcgcttgctgcgccacccatcggaccgcatgggcttcccgcccggggccgcgcaggccttggtgctgcaggtattcaaaacctttgaccacatggcccgtcaggatgatgagaagagaaggcaggaacttgaagagaaaatcagaagaaaggaagaggaagaggccaagactgtgtcagctgctgcagctgagaaggagccagtcccagttccagtccaggaaatagagattgactccaccacagaattggatgggcatcaggaagtagagaaagtgcagcctccaggccctgtgaaggaaatggcccatggttcacaggaggcagaagctccaggagcagttgctggtgctgctgaagtccctagggaaccaccaattcttcccaggattcaggagcagttccagaaaaatcccgacagttacaatggtgctgtccgagagaactacacctggtcacaggactatactgacctggaggtcagggtgccagtacccaagcacgtggtgaagggaaagcaggtctcagtggcccttagcagcagctccattcgtgtggccatgctggaggaaaatggggagcgcgtcctcatggaagggaagctcacccacaagatcaacactgagagttctctctggagtctcgagcccgggaagtgcgttttggtgaacctgagcaaggtgggcgagtattggtggaacgccatcctggagggagaagagcccatcgacattgacaagatcaacaaggagcgctccatggccaccgtggatgaggaggaacaggcggtgttggacaggcttacctttgactaccaccagaagctgcagggcaagccacagagccatgagctgaaagtccatgagatgctgaagaaggggtgggatgctgaaggttctcccttccgaggccagcgattcgaccctgccatgttcaacatctccccgggggctgtgcagttttaatgaccagaaggaaaggaaaccctcgccggtggggaggcagagccttatcctcggctgcccttcttggctccctgcattccagggacttgctcgtcttgtttacccctagccatcctttctttcaagggtgaaccaggccttccaccctgaccttgcatctccagactgttccagagaaggtgcggggccagctgctatgtggtggccgctgtggctgacactgagtgaaggtgtttgaaatgcaggagaggatatcccagcaaattgggatcacatgcttttgtctccacagcaaccagccactgcaggcagcatgtctttcctcccctgctctctgcttgctgttgttttgacgctattctgcttgcatgtcttctggttgggatgtggagttgttgctggactctcaggcgaagctgaagtcattgaagtgtgtgaagctctgtgcttgcatgagggcaagcaaggaatggctgtgcctgaggctgctctgggaaactccttgccccttgacctcttttgagagcattcacgtggtcttcttgctcatccccttataaatgtgctttgcctgcctcagcctcatggtcagagcagtggagactggagccctgtttgcacgttctagttgttcggagaaagcctaggttctgggctcaggtccagatgcagcggggattctgttctctgactgtggcgaccttgctttggttcttgttgaagtgaaccaagcccggccaccacgcatggcatgctgtgcttggctccccataagacgtcctctttgggtgcacggtgtcaaagtgtgggcaggagtggagagctggtgccctcaggaggagaccacagcatgtccatcagctcagcagagctcgacagccacaagtcctgagaagctttgaccttgaagggcttctgggagaggaggaatttctgcatggggcgtgaaggcacactgtcccaccacaactgaaccagaagagagtgaagactcccctcttcccatcctctgtgccaggtgccagactgtgctccttggaacttatggcccaatcttacctgttctccagggactggtcactgcctcaggacccccaagcctatgccctgagccatggctgctgactgactccagccaaggtgcaaagacgagattatgagacaggtcctcaggcctgtgttccaagtactcacaggggctctgggtgcccatcgccgggagtatggttcagctgccaccggcactgtccatttgcctgtctgtcaagctcagagcatggataagccacacagcagggcagtgcaccctggcaccatgcacggccagcaagaatcaaggcccgcagatgctaagagggcctattgtcaggggaaggtccccgctcctgcacactctctatggatacttgggttgtgggggctctcttggagagtaagtttgtggtttgtttctggtttacagtggtggctgacaccccttgtaagaaagcattcctgggaagtcttctgtgggtccaaacatgttgctccgatcatccttcgagnacgctatgacccctgatacccaccccgagctcggtacccatctcgacgtagactctcagactctgagctggtgaagcccctctaaagagatctcgaccctggggagcagaattcttgtcatctatgaggggtcctgagaaagacttgtcattttttttcctggagttcttcccattgaggtcctaggatttgcacaccactgtcccacaagagctttcctgcctaatgaaaggaggtcttgtggtgtgtgtctcctctcttctctatagttcccgagttggcccccattgcagcccccaccctgtgggtagtcttccagaagtgatgcagtggtgtgagatgccctacaccttgttatttgggagactttgagagtcattcacttccatggtgactagtgtttgttttgcctgattttatattctgtgttgcatttctccccactccctgccctgctttaataaacagcaaaccaatatctaggaagaatgactgagggatagtattgggtattggccccatggcaggaacagccacttgcatctggtcccggtgccacactgcggtgcttggtgtggttgtggagcctgtccctgcgcgccttgctcccgttgagccacgctgtctggtgggtgattctctgccctgagccaccaccctggactggcccagtctccagagctggcacaccctgcctgttttctctttttagacacaacagccgcagtttggccagccactaagtcccaccagctgaggtccgaggaaagcggggtgactcatttcccttgtccagggcccgaggagagtgaggtgtccagcctgcaaagctattccagctccttggtgttggtttgcaataaattggtatttaagca

SEQ ID NO: 430643 - DNA, 3125 bp, Homo sapiens
agtagtcttaagatcgctgaggcgggggaccggtccatggttcactaggaggcggaagctcctaggagcatgttgctggatgtctgctgaatgtcccataagggaaccaaacaaattcgttgcgccaggattcaggagcagttccagaaaaatcccgacagttacaatggtgctgtccgagagaactacacctggtcacaggactatactgacctggaggtcagggtgccagtacccaagcacgtggtgaagggaaagcaggtctcagtggcccttagcagcagctccattcgtgtggccatgctggaggaaaatggggagcgcgtcctcatggaagggaagctcacccacaagatcaacactgagagttctctctggagtctcgagcccgggaagtgcgttttggtgaacctgagcaaggtgggcgagtattggtggaacgccatcctggagggagaagagcccatcgacattgacaagatcaacaaggagcgctccatggccaccgtggatgaggaggaacaggcggtgttggacaggcttacctttgactaccaccagaagctgcagggcaagccacagagccatgagctgaaagtccatgagatgctgaagaaggggtgggatgctgaaggttctcccttccgaggccagcgattcgaccctgccatgttcaacatctccccgggggctgtgcagttttaatgaccagaaggaaaggaaaccctcgccggtggggaggcagagccttatcctcggctgcccttcttggctccctgcattccagggacttgctcgtcttgtttacccctagccatcctttctttcaagggtgaaccaggccttccaccctgaccttgcatctccagactgttccagagaaggtgcggggccagctgctatgtggtggccgctgtggctgacactgagtgaaggtgtttgaaatgcaggagaggatatcccagcaaattgggatcacatgcttttgtctccacagcaaccagccactgcaggcagcatgtctttcctcccctgctctctgcttgctgttgttttgacgctattctgcttgcatgtcttctggttgggatgtggagttgttgctggactctcaggcgaagctgaagtcattgaagtgtgtgaagctctgtgcttgcatgagggcaagcaaggaatggctgtgcctgaggctgctctgggaaactccttgccccttgacctcttttgagagcattcacgtggtcttcttgctcatccccttataaatgtgctttgcctgcctcagcctcatggtcagagcagtggagactggagccctgtttgcacgttctagttgttcggagaaagcctaggttctgggctcaggtccagatgcagcggggattctgttctctgactgtggcgaccttgctttggttcttgttgaagtgaaccaagcccggccaccacgcatggcatgctgtgcttggctccccataagacgtcctctttgggtgcacggtgtcaaagtgtgggcaggagtggagagctggtgccctcaggaggagaccacagcatgtccatcagctcagcagagctcgacagccacaagtcctgagaagctttgaccttgaagggcttctgggagaggaggaatttctgcatggggcgtgaaggcacactgtcccaccacaactgaaccagaagagagtgaagactcccctcttcccatcctctgtgccaggtgccagactgtgctccttggaacttatggcccaatcttacctgttctccagggactggtcactgcctcaggacccccaagcctatgccctgagccatggctgctgactgactccagccaaggtgcaaagacgagattatgagacaggtcctcaggcctgtgttccaagtactcacaggggctctgggtgcccatcgccgggagtatggttcagctgccaccggcactgtccatttgcctgtctgtcaagctcagagcatggataagccacacagcagggcagtgcaccctggcaccatgcacggccagcaagaatcaaggcccgcagatgctaagagggcctattgtcaggggaaggtccccgctcctgcacactctctatggatacttgggttgtgggggctctcttggagagtaagtttgtggtttgtttctggtttacagtggtggctgacaccccttgtaagaaagcattcctgggaagtcttctgtgggtccaaacatgttgctccgatcatcacaggagagcaaaaggccctagataccccctttggaatgtgagagtcttgttgtctgatatttgccactgagctggtgaagcccctctaaagagatctcgaccctggggagcagaattcttgtcatctatgaggggtcctgagaaagacttgtcattttttttcctggagttcttcccattgaggtcctaggatttgcacaccactgtcccacaagagctttcctgcctaatgaaaggaggtcttgtggtgtgtgtctcctctcttctctatagttcccgagttggcccccattgcagcccccaccctgtgggtagtcttccagaagtgatgcagtggtgtgagatgccctacaccttgttatttgggagactttgagagtcattcacttccatggtgactagtgtttgttttgcctgattttatattctgtgttgcatttctccccactccctgccctgctttaataaacagcaaaccaatatctaggaagaatgactgagggatagtattgggtattggccccatggcaggaacagccacttgcatctggtcccggtgccacactgcggtgcttggtgtggttgtggagcctgtccctgcgcgccttgctcccgttgagccacgctgtctggtgggtgattctctgccctgagccaccaccctggactggcccagtctccagagctggcacaccctgcctgttttctctttttagacacaacagccgcagtttggccagccactaagtcccaccagctgaggtccgaggaaagcggggtgactcatttcccttgtccagggcccgaggagagtgaggtgtccagcctgcaaagctattccagctccttggtgttggtttgcaataaattggtatttaagca

SEQ ID NO: 430644 - DNA, 3527 bp, Homo sapiens
ctatcagctgaaagcctgaagagcgcagcagagctcccctgaagtagaagaaatttctccgatggacagcagctgcactcagtttctggagagttccacattggcctgctatgtggatttcagactggcctagccagcccccacaatcatgattcaggagcagttccagaaaaatcccgacagttacaatggtgctgtccgagagaactacacctggtcacaggactatactgacctggaggtcagggtgccagtacccaagcacgtggtgaagggaaagcaggtttcttttatgcctcctcagggaacaggtgtcaggctgtgggcctttgttcccctcagcaacaaacacaaaatttatttttcttcagctacaaacacccggtcacccccctttaaactacatcaggtcatgggtgagacccattgaagccccatccagtcctgagaggcaaagcaaagaacccaggtcacagcgatgaagtggacggccaggcctgtgtgctgtggggctcttccatggagcagggagccatgtcctataagtaccgcatgctaaccgattgcgccactggagccacaccatgtcatgatgtacctgtaacattcgcaacttgagtttcaaacactaaagtttctgaaacctccatctaatgagtttaagtctcagtggcccttagcagcagctccattcgtgtggccatgctggaggaaaatggggagcgcgtcctcatggaagggaagctcacccacaagatcaacactgagagttctctctggagtctcgagcccgggaagtgcgttttggtgaacctgagcaaggtgggcgagtattggtggaacgccatcctggagggagaagagcccatcgacattgacaagatcaacaaggagcgctccatggccaccgtggatgaggaggaacaggcggtgttggacaggcttacctttgactaccaccagaagctgcagggcaagccacagagccatgagctgaaagtccatgagatgctgaagaaggggtgggatgctgaaggttctcccttccgaggccagcgattcgaccctgccatgttcaacatctccccgggggctgtgcagttttaatgaccagaaggaaaggaaaccctcgccggtggggaggcagagccttatcctcggctgcccttcttggctccctgcattccagggacttgctcgtcttgtttacccctagccatcctttctttcaagggtgaaccaggccttccaccctgaccttgcatctccagactgttccagagaaggtgcggggccagctgctatgtggtggccgctgtggctgacactgagtgaaggtgtttgaaatgcaggagaggatatcccagcaaattgggatcacatgcttttgtctccacagcaaccagccactgcaggcagcatgtctttcctcccctgctctctgcttgctgttgttttgacgctattctgcttgcatgtcttctggttgggatgtggagttgttgctggactctcaggcgaagctgaagtcattgaagtgtgtgaagctctgtgcttgcatgagggcaagcaaggaatggctgtgcctgaggctgctctgggaaactccttgccccttgacctcttttgagagcattcacgtggtcttcttgctcatccccttataaatgtgctttgcctgcctcagcctcatggtcagagcagtggagactggagccctgtttgcacgttctagttgttcggagaaagcctaggttctgggctcaggtccagatgcagcggggattctgttctctgactgtggcgaccttgctttggttcttgttgaagtgaaccaagcccggccaccacgcatggcatgctgtgcttggctccccataagacgtcctctttgggtgcacggtgtcaaagtgtgggcaggagtggagagctggtgccctcaggaggagaccacagcatgtccatcagctcagcagagctcgacagccacaagtcctgagaagctttgaccttgaagggcttctgggagaggaggaatttctgcatggggcgtgaaggcacactgtcccaccacaactgaaccagaagagagtgaagactcccctcttcccatcctctgtgccaggtgccagactgtgctccttggaacttatggcccaatcttacctgttctccagggactggtcactgcctcaggacccccaagcctatgccctgagccatggctgctgactgactccagccaaggtgcaaagacgagattatgagacaggtcctcaggcctgtgttccaagtactcacaggggctctgggtgcccatcgccgggagtatggttcagctgccaccggcactgtccatttgcctgtctgtcaagctcagagcatggataagccacacagcagggcagtgcaccctggcaccatgcacggccagcaagaatcaaggcccgcagatgctaagagggcctattgtcaggggaaggtccccgctcctgcacactctctatggatacttgggttgtgggggctctcttggagagtaagtttgtggtttgtttctggtttacagtggtggctgacaccccttgtaagaaagcattcctgggaagtcttctgtgggtccaaacatgttgctccgatcatcacaggagagcaaaaggccctagataccccctttggaatgtgagagtcttgttgtctgatatttgccactgagctggtgaagcccctctaaagagatctcgaccctggggagcagaattcttgtcatctatgaggggtcctgagaaagacttgtcattttttttcctggagttcttcccattgaggtcctaggatttgcacaccactgtcccacaagagctttcctgcctaatgaaaggaggtcttgtggtgtgtgtctcctctcttctctatagttcccgagttggcccccattgcagcccccaccctgtgggtagtcttccagaagtgatgcagtggtgtgagatgccctacaccttgttatttgggagactttgagagtcattcacttccatggtgactagtgtttgttttgcctgattttatattctgtgttgcatttctccccactccctgccctgctttaataaacagcaaaccaatatctaggaagaatgactgagggatagtattgggtattggccccatggcaggaacagccacttgcatctggtcccggtgccacactgcggtgcttggtgtggttgtggagcctgtccctgcgcgccttgctcccgttgagccacgctgtctggtgggtgattctctgccctgagccaccaccctggactggcccagtctccagagctggcacaccctgcctgttttctctttttagacacaacagccgcagtttggccagccactaagtcccaccagctgaggtccgaggaaagcggggtgactcatttcccttgtccagggcccgaggagagtgaggtgtccagcctgcaaagctattccagctccttggtgttggtttgcaataaattggtatttaagca

SEQ ID NO: 430645 - DNA, 3164 bp, Homo sapiens
ccagcagttcagttcctcatcctttgaccccagacatataaagcctgtgcattatgacacagcctggagccttttcccaagctataggctcctgtgactactaccagttcctttcctttatgtcatacttgactttgcagatgccattacggcctctccctcacttgagcttcacgtggttgtggaggtatgagagcatgagtgatgcactagtagtactggggccggctagcttgccctctgaaggtgcagccctggccgcctgtattacactagtgagcccgtgatcctggggttgccatctccatggactgagaggtcgtgatagccctgccttaaaacactggccttgactctcctgccttccgttgggtgaactcagtgcagatcatggagcaggtcacgatgctctcaagttggttccctctgagcgaggagctcttggtgaacctgagcaaggtgggcgagtattggtggaacgccatcctggagggagaagagcccatcgacattgacaagatcaacaaggagcgctccatggccaccgtggatgaggaggaacaggcggtgttggacaggcttacctttgactaccaccagaagctgcagggcaagccacagagccatgagctgaaagtccatgagatgctgaagaaggggtgggatgctgaaggttctcccttccgaggccagcgattcgaccctgccatgttcaacatctccccgggggctgtgcagttttaatgaccagaaggaaaggaaaccctcgccggtggggaggcagagccttatcctcggctgcccttcttggctccctgcattccagggacttgctcgtcttgtttacccctagccatcctttctttcaagggtgaaccaggccttccaccctgaccttgcatctccagactgttccagagaaggtgcggggccagctgctatgtggtggccgctgtggctgacactgagtgaaggtgtttgaaatgcaggagaggatatcccagcaaattgggatcacatgcttttgtctccacagcaaccagccactgcaggcagcatgtctttcctcccctgctctctgcttgctgttgttttgacgctattctgcttgcatgtcttctggttgggatgtggagttgttgctggactctcaggcgaagctgaagtcattgaagtgtgtgaagctctgtgcttgcatgagggcaagcaaggaatggctgtgcctgaggctgctctgggaaactccttgccccttgacctcttttgagagcattcacgtggtcttcttgctcatccccttataaatgtgctttgcctgcctcagcctcatggtcagagcagtggagactggagccctgtttgcacgttctagttgttcggagaaagcctaggttctgggctcaggtccagatgcagcggggattctgttctctgactgtggcgaccttgctttggttcttgttgaagtgaaccaagcccggccaccacgcatggcatgctgtgcttggctccccataagacgtcctctttgggtgcacggtgtcaaagtgtgggcaggagtggagagctggtgccctcaggaggagaccacagcatgtccatcagctcagcagagctcgacagccacaagtcctgagaagctttgaccttgaagggcttctgggagaggaggaatttctgcatggggcgtgaaggcacactgtcccaccacaactgaaccagaagagagtgaagactcccctcttcccatcctctgtgccaggtgccagactgtgctccttggaacttatggcccaatcttacctgttctccagggactggtcactgcctcaggacccccaagcctatgccctgagccatggctgctgactgactccagccaaggtgcaaagacgagattatgagacaggtcctcaggcctgtgttccaagtactcacaggggctctgggtgcccatcgccgggagtatggttcagctgccaccggcactgtccatttgcctgtctgtcaagctcagagcatggataagccacacagcagggcagtgcaccctggcaccatgcacggccagcaagaatcaaggcccgcagatgctaagagggcctattgtcaggggaaggtccccgctcctgcacactctctatggatacttgggttgtgggggctctcttggagagtaagtttgtggtttgtttctggtttacagtggtggctgacaccccttgtaagaaagcattcctgggaagtcttctgtgggtccaaacatgttgctccgatcatcacaggagagcaaaaggccctagataccccctttggaatgtgagagtcttgttgtctgatatttgccactgagctggtgaagcccctctaaagagatctcgaccctggggagcagaattcttgtcatctatgaggggtcctgagaaagacttgtcattttttttcctggagttcttcccattgaggtcctaggatttgcacaccactgtcccacaagagctttcctgcctaatgaaaggaggtcttgtggtgtgtgtctcctctcttctctatagttcccgagttggcccccattgcagcccccaccctgtgggtagtcttccagaagtgatgcagtggtgtgagatgccctacaccttgttatttgggagactttgagagtcattcacttccatggtgactagtgtttgttttgcctgattttatattctgtgttgcatttctccccactccctgccctgctttaataaacagcaaaccaatatctaggaagaatgactgagggatagtattgggtattggccccatggcaggaacagccacttgcatctggtcccggtgccacactgcggtgcttggtgtggttgtggagcctgtccctgcgcgccttgctcccgttgagccacgctgtctggtgggtgattctctgccctgagccaccaccctggactggcccagtctccagagctggcacaccctgcctgttttctctttttagacacaacagccgcagtttggccagccactaagtcccaccagctgaggtccgaggaaagcggggtgactcatttcccttgtccagggcccgaggagagtgaggtgtccagcctgcaaagctattccagctccttggtgttggtttgcaataaattggtatttaagca

SEQ ID NO: 430646 - DNA, 2982 bp, Homo sapiens
ctcggtacccaccactggtgtgctgtacggtgggagtggtgatggtttccaaggtacctgactgcacaccagtggtcaccctgataggagagatgattttcttctgctgtgtccccaggtctcagtggcccttagcagcagctccattcgtgtggccatgctggaggaaaatggggagcgcgtcctcatggaagggaagctcacccacaagatcaacactgagagttctctctggagtctcgagcccgggaagtgcgttttggtgaacctgagcaaggtgggcgagtattggtggaacgccatcctggagggagaagagcccatcgacattgacaagatcaacaaggagcgctccatggccaccgtggatgaggaggaacaggcggtgttggacaggcttacctttgactaccaccagaagctgcagggcaagccacagagccatgagctgaaagtccatgagatgctgaagaaggggtgggatgctgaaggttctcccttccgaggccagcgattcgaccctgccatgttcaacatctccccgggggctgtgcagttttaatgaccagaaggaaaggaaaccctcgccggtggggaggcagagccttatcctcggctgcccttcttggctccctgcattccagggacttgctcgtcttgtttacccctagccatcctttctttcaagggtgaaccaggccttccaccctgaccttgcatctccagactgttccagagaaggtgcggggccagctgctatgtggtggccgctgtggctgacactgagtgaaggtgtttgaaatgcaggagaggatatcccagcaaattgggatcacatgcttttgtctccacagcaaccagccactgcaggcagcatgtctttcctcccctgctctctgcttgctgttgttttgacgctattctgcttgcatgtcttctggttgggatgtggagttgttgctggactctcaggcgaagctgaagtcattgaagtgtgtgaagctctgtgcttgcatgagggcaagcaaggaatggctgtgcctgaggctgctctgggaaactccttgccccttgacctcttttgagagcattcacgtggtcttcttgctcatccccttataaatgtgctttgcctgcctcagcctcatggtcagagcagtggagactggagccctgtttgcacgttctagttgttcggagaaagcctaggttctgggctcaggtccagatgcagcggggattctgttctctgactgtggcgaccttgctttggttcttgttgaagtgaaccaagcccggccaccacgcatggcatgctgtgcttggctccccataagacgtcctctttgggtgcacggtgtcaaagtgtgggcaggagtggagagctggtgccctcaggaggagaccacagcatgtccatcagctcagcagagctcgacagccacaagtcctgagaagctttgaccttgaagggcttctgggagaggaggaatttctgcatggggcgtgaaggcacactgtcccaccacaactgaaccagaagagagtgaagactcccctcttcccatcctctgtgccaggtgccagactgtgctccttggaacttatggcccaatcttacctgttctccagggactggtcactgcctcaggacccccaagcctatgccctgagccatggctgctgactgactccagccaaggtgcaaagacgagattatgagacaggtcctcaggcctgtgttccaagtactcacaggggctctgggtgcccatcgccgggagtatggttcagctgccaccggcactgtccatttgcctgtctgtcaagctcagagcatggataagccacacagcagggcagtgcaccctggcaccatgcacggccagcaagaatcaaggcccgcagatgctaagagggcctattgtcaggggaaggtccccgctcctgcacactctctatggatacttgggttgtgggggctctcttggagagtaagtttgtggtttgtttctggtttacagtggtggctgacaccccttgtaagaaagcattcctgggaagtcttctgtgggtccaaacatgttgctccgatcatcacaggagagcaaaaggccctagataccccctttggaatgtgagagtcttgttgtctgatatttgccactgagctggtgaagcccctctaaagagatctcgaccctggggagcagaattcttgtcatctatgaggggtcctgagaaagacttgtcattttttttcctggagttcttcccattgaggtcctaggatttgcacaccactgtcccacaagagctttcctgcctaatgaaaggaggtcttgtggtgtgtgtctcctctcttctctatagttcccgagttggcccccattgcagcccccaccctgtgggtagtcttccagaagtgatgcagtggtgtgagatgccctacaccttgttatttgggagactttgagagtcattcacttccatggtgactagtgtttgttttgcctgattttatattctgtgttgcatttctccccactccctgccctgctttaataaacagcaaaccaatatctaggaagaatgactgagggatagtattgggtattggccccatggcaggaacagccacttgcatctggtcccggtgccacactgcggtgcttggtgtggttgtggagcctgtccctgcgcgccttgctcccgttgagccacgctgtctggtgggtgattctctgccctgagccaccaccctggactggcccagtctccagagctggcacaccctgcctgttttctctttttagacacaacagccgcagtttggccagccactaagtcccaccagctgaggtccgaggaaagcggggtgactcatttcccttgtccagggcccgaggagagtgaggtgtccagcctgcaaagctattccagctccttggtgttggtttgcaataaattggtatttaagca

SEQ ID NO: 430647 - DNA, 2846 bp, Homo sapiens
tcggggggcggggggcgatcggccggggccagcggaggacgaggggagcgcgggccaggaagggacgccacccagcgagacaacgctgagagtctctctggagtccggagcccgggacgtgcgttggtgaacctgagcaaggtgggcgagtattggtggaacgccatcctggagggagaagagcccatcgacattgacaagatcaacaaggagcgctccatggccaccgtggatgaggaggaacaggcggtgttggacaggcttacctttgactaccaccagaagctgcagggcaagccacagagccatgagctgaaagtccatgagatgctgaagaaggggtgggatgctgaaggttctcccttccgaggccagcgattcgaccctgccatgttcaacatctccccgggggctgtgcagttttaatgaccagaaggaaaggaaaccctcgccggtggggaggcagagccttatcctcggctgcccttcttggctccctgcattccagggacttgctcgtcttgtttacccctagccatcctttctttcaagggtgaaccaggccttccaccctgaccttgcatctccagactgttccagagaaggtgcggggccagctgctatgtggtggccgctgtggctgacactgagtgaaggtgtttgaaatgcaggagaggatatcccagcaaattgggatcacatgcttttgtctccacagcaaccagccactgcaggcagcatgtctttcctcccctgctctctgcttgctgttgttttgacgctattctgcttgcatgtcttctggttgggatgtggagttgttgctggactctcaggcgaagctgaagtcattgaagtgtgtgaagctctgtgcttgcatgagggcaagcaaggaatggctgtgcctgaggctgctctgggaaactccttgccccttgacctcttttgagagcattcacgtggtcttcttgctcatccccttataaatgtgctttgcctgcctcagcctcatggtcagagcagtggagactggagccctgtttgcacgttctagttgttcggagaaagcctaggttctgggctcaggtccagatgcagcggggattctgttctctgactgtggcgaccttgctttggttcttgttgaagtgaaccaagcccggccaccacgcatggcatgctgtgcttggctccccataagacgtcctctttgggtgcacggtgtcaaagtgtgggcaggagtggagagctggtgccctcaggaggagaccacagcatgtccatcagctcagcagagctcgacagccacaagtcctgagaagctttgaccttgaagggcttctgggagaggaggaatttctgcatggggcgtgaaggcacactgtcccaccacaactgaaccagaagagagtgaagactcccctcttcccatcctctgtgccaggtgccagactgtgctccttggaacttatggcccaatcttacctgttctccagggactggtcactgcctcaggacccccaagcctatgccctgagccatggctgctgactgactccagccaaggtgcaaagacgagattatgagacaggtcctcaggcctgtgttccaagtactcacaggggctctgggtgcccatcgccgggagtatggttcagctgccaccggcactgtccatttgcctgtctgtcaagctcagagcatggataagccacacagcagggcagtgcaccctggcaccatgcacggccagcaagaatcaaggcccgcagatgctaagagggcctattgtcaggggaaggtccccgctcctgcacactctctatggatacttgggttgtgggggctctcttggagagtaagtttgtggtttgtttctggtttacagtggtggctgacaccccttgtaagaaagcattcctgggaagtcttctgtgggtccaaacatgttgctccgatcatcacaggagagcaaaaggccctagataccccctttggaatgtgagagtcttgttgtctgatatttgccactgagctggtgaagcccctctaaagagatctcgaccctggggagcagaattcttgtcatctatgaggggtcctgagaaagacttgtcattttttttcctggagttcttcccattgaggtcctaggatttgcacaccactgtcccacaagagctttcctgcctaatgaaaggaggtcttgtggtgtgtgtctcctctcttctctatagttcccgagttggcccccattgcagcccccaccctgtgggtagtcttccagaagtgatgcagtggtgtgagatgccctacaccttgttatttgggagactttgagagtcattcacttccatggtgactagtgtttgttttgcctgattttatattctgtgttgcatttctccccactccctgccctgctttaataaacagcaaaccaatatctaggaagaatgactgagggatagtattgggtattggccccatggcaggaacagccacttgcatctggtcccggtgccacactgcggtgcttggtgtggttgtggagcctgtccctgcgcgccttgctcccgttgagccacgctgtctggtgggtgattctctgccctgagccaccaccctggactggcccagtctccagagctggcacaccctgcctgttttctctttttagacacaacagccgcagtttggccagccactaagtcccaccagctgaggtccgaggaaagcggggtgactcatttcccttgtccagggcccgaggagagtgaggtgtccagcctgcaaagctattccagctccttggtgttggtttgcaataaattggtatttaagca

SEQ ID NO: 430648 - DNA, 2783 bp, Homo sapiens
gggacagaagatggagggttagaaattcagtctgtggagcagtcttggagagaaattggcaggcacccagtacctcccttggtcgaaggctgctccagggtagtacagttctctggccagccggtcttgccaggcaagtgcctgagccctgaggaagcaagaaggctctctacctgcagtcagagtctgctctgggagaaagtacacagtgcgttgtgatcccctttaatctctctattttctgttgtgtagaaagtccatgagatgctgaagaaggggtgggatgctgaaggttctcccttccgaggccagcgattcgaccctgccatgttcaacatctccccgggggctgtgcagttttaatgaccagaaggaaaggaaaccctcgccggtggggaggcagagccttatcctcggctgcccttcttggctccctgcattccagggacttgctcgtcttgtttacccctagccatcctttctttcaagggtgaaccaggccttccaccctgaccttgcatctccagactgttccagagaaggtgcggggccagctgctatgtggtggccgctgtggctgacactgagtgaaggtgtttgaaatgcaggagaggatatcccagcaaattgggatcacatgcttttgtctccacagcaaccagccactgcaggcagcatgtctttcctcccctgctctctgcttgctgttgttttgacgctattctgcttgcatgtcttctggttgggatgtggagttgttgctggactctcaggcgaagctgaagtcattgaagtgtgtgaagctctgtgcttgcatgagggcaagcaaggaatggctgtgcctgaggctgctctgggaaactccttgccccttgacctcttttgagagcattcacgtggtcttcttgctcatccccttataaatgtgctttgcctgcctcagcctcatggtcagagcagtggagactggagccctgtttgcacgttctagttgttcggagaaagcctaggttctgggctcaggtccagatgcagcggggattctgttctctgactgtggcgaccttgctttggttcttgttgaagtgaaccaagcccggccaccacgcatggcatgctgtgcttggctccccataagacgtcctctttgggtgcacggtgtcaaagtgtgggcaggagtggagagctggtgccctcaggaggagaccacagcatgtccatcagctcagcagagctcgacagccacaagtcctgagaagctttgaccttgaagggcttctgggagaggaggaatttctgcatggggcgtgaaggcacactgtcccaccacaactgaaccagaagagagtgaagactcccctcttcccatcctctgtgccaggtgccagactgtgctccttggaacttatggcccaatcttacctgttctccagggactggtcactgcctcaggacccccaagcctatgccctgagccatggctgctgactgactccagccaaggtgcaaagacgagattatgagacaggtcctcaggcctgtgttccaagtactcacaggggctctgggtgcccatcgccgggagtatggttcagctgccaccggcactgtccatttgcctgtctgtcaagctcagagcatggataagccacacagcagggcagtgcaccctggcaccatgcacggccagcaagaatcaaggcccgcagatgctaagagggcctattgtcaggggaaggtccccgctcctgcacactctctatggatacttgggttgtgggggctctcttggagagtaagtttgtggtttgtttctggtttacagtggtggctgacaccccttgtaagaaagcattcctgggaagtcttctgtgggtccaaacatgttgctccgatcatcacaggagagcaaaaggccctagataccccctttggaatgtgagagtcttgttgtctgatatttgccactgagctggtgaagcccctctaaagagatctcgaccctggggagcagaattcttgtcatctatgaggggtcctgagaaagacttgtcattttttttcctggagttcttcccattgaggtcctaggatttgcacaccactgtcccacaagagctttcctgcctaatgaaaggaggtcttgtggtgtgtgtctcctctcttctctatagttcccgagttggcccccattgcagcccccaccctgtgggtagtcttccagaagtgatgcagtggtgtgagatgccctacaccttgttatttgggagactttgagagtcattcacttccatggtgactagtgtttgttttgcctgattttatattctgtgttgcatttctccccactccctgccctgctttaataaacagcaaaccaatatctaggaagaatgactgagggatagtattgggtattggccccatggcaggaacagccacttgcatctggtcccggtgccacactgcggtgcttggtgtggttgtggagcctgtccctgcgcgccttgctcccgttgagccacgctgtctggtgggtgattctctgccctgagccaccaccctggactggcccagtctccagagctggcacaccctgcctgttttctctttttagacacaacagccgcagtttggccagccactaagtcccaccagctgaggtccgaggaaagcggggtgactcatttcccttgtccagggcccgaggagagtgaggtgtccagcctgcaaagctattccagctccttggtgttggtttgcaataaattggtatttaagca

SEQ ID NO: 430649 - DNA, 3179 bp, Homo sapiens
aagtggccagtcggcaggtctgaggcggcgctgtgtgtgtgaagcgtacctagggcgggaggcgacatggagacaggggcggccgagctgtatgaccaggcccttttgggcatcctgcagcacgtgggcaacgtccaggatttcctgcgcgttctctttggcttcctctaccgcaagacagacttctatcgcttgctgcgccacccatcggaccgcatgggcttcccgcccggggccgcgcaggccttggtgctgcaggtattcaaaacctttgaccacatggcccgtcaggatgatgagaagagaaggcaggaacttgaagagaaaatcagaagaaaggaagaggaagaggccaagactgtgtcagctgctgcagctgagaaggagccagtcccagttccagtccaggaaatagagattgactccaccacagaattggatgggcatcaggaagtagagaaagtgcagcctccaggccctgtgaaggaaatggcccatggttcacaggaggcagaagctccaggagcagttgctggtgctgctgaagtccctagggaaccaccaattcttcccaggattcaggagcagttccagaaaaatcccgacagttacaatggtgctgtccgagagaactacacctggtcacaggactatactgacctggaggtcagggtgccagtacccaagcacgtggtgaagggaaagcaggtctcagtggcccttagcagcagctccattcgtgtggccatgctggaggaaaatggggagcgcgtcctcatggaagggaagctcacccacaagatcaacactgagagttctctctggagtctcgagcccgggaagtgcgttttggtgaacctgagcaaggtgggcgagtattggtggaacgccatcctggagggagaagagcccatcgacattgacaagatcaacaaggagcgctccatggccaccgtggatgaggaggaacaggcggtgttggacaggcttacctttgactaccaccagaagctgcagggcaagccacagagccatgagctgaaagtccatgagatgctgaagaaggggtgggatgctgaaggttctcccttccgaggccagcgattcgaccctgccatgttcaacatctccccgggggctgtgcagttttaatgaccagaaggaaaggaaaccctcgccggtggggaggcagagccttatcctcggctgcccttcttggctccctgcattccagggacttgctcgtcttgtttacccctagccatcctttctttcaagggtgaaccaggccttccaccctgaccttgcatctccagactgttccagagaaggtgcggggccagctgctatgtggtggccgctgtggctgacactgagtgaaggtgtttgaaatgcaggagaggatatcccagcaaattgggatcacatgcttttgtctccacagcaaccagccactgcaggcagcatgtctttcctcccctgctctctgcttgctgttgttttgacgctattctgcttgcatgtcttctggttgggatgtggagttgttgctggactctcaggcgaagctgaagtcattgaagtgtgtgaagctctgtgcttgcatgagggcaagcaaggaatggctgtgcctgaggctgctctgggaaactccttgccccttgacctcttttgagagcattcacgtggtcttcttgctcatccccttataaatgtgctttgcctgcctcagcctcatggtcagagcagtggagactggagccctgtttgcacgttctagttgttcggagaaagcctaggttctgggctcaggtccagatgcagcggggattctgttctctgactgtggcgaccttgctttggttcttgttgaagtgaaccaagcccggccaccacgcatggcatgctgtgcttggctccccataagacgtcctctttgggtgcacggtgtcaaagtgtgggcaggagtggagagctggtgccctcaggaggagaccacagcatgtccatcagctcagcagagctcgacagccacaagtcctgagaagctttgaccttgaagggcttctgggagaggaggaatttctgcatggggcgtgaaggcacactgtcccaccacaactgaaccagaagagagtgaagactcccctcttcccatcctctgtgccaggtgccagactgtgctccttggaacttatggcccaatcttacctgttctccagggactggtcactgcctcaggacccccaagcctatgccctgagccatggctgctgactgactccagccaaggtgcaaagacgagattatgagacaggtcctcaggcctgtgttccaagtactcacaggggctctgggtgcccatcgccgggagtatggttcagctgccaccggcactgtccatttgcctgtctgtcaagctcagagcatggataagccacacagcagggcagtgcaccctggcaccatgcacggccagcaagaatcaaggcccgcagatgctaagagggcctattgtcaggggaaggtccccgctcctgcacactctctatggatacttgggttgtgggggctctcttggagagtaagtttgtggtttgtttctggtttacagtggtggctgacaccccttgtaagaaagcattcctgggaagtcttctgtgggtccaaacatgttgctccgatcatcacaggagagcaaaaggccctagataccccctttggaatgtgagagtcttgttgtctgatatttgccactgagctggtgaagcccctctaaagagatctcgaccctggggagcagaattcttgtcatctatgaggggtcctgagaaagacttgtcattttttttcctggagttcttcccattgaggtcctaggatttgcacaccactgtcccacaagagctttcctgcctaatgaaaggaggtcttgtggtgtgtgtctcctctcttctctatagttcccgagttggcccccattgcagcccccaccctgtgggtagtcttccagaagtgatgcagtggtgtgagatgccctacaccttgttatttgggagactttgagagtcattcacttccatggtgactagtgtttgttttgcctgattttatattctgtgttgcatttctccccactccctgccctgctttaataaacagcaaaccaatatctagga

SEQ ID NO: 430650 - DNA, 4657 bp, Homo sapiens
aagtggccagtcggcaggtctgaggcggcgctgtgtgtgtgaagcgtacctagggcgggaggcgacatggagacaggggcggccgagctgtatgaccaggcccttttgggcatcctgcagcacgtgggcaacgtccaggatttcctgcgcgttctctttggcttcctctaccgcaagacagacttctatcgcttgctgcgccacccatcggaccgcatgggcttcccgcccggggccgcgcaggccttggtgctgcaggtattcaaaacctttgaccacatggcccgtcaggatgatgagaagagaaggcaggaacttgaagagaaaatcagaagaaaggaagaggaagaggccaagactgtgtcagctgctgcagctgagaaggagccagtcccagttccagtccaggaaatagagattgactccaccacagaattggatgggcatcaggaagtagagaaagtgcagcctccaggccctgtgaaggaaatggcccatggttcacaggaggcagaagctccaggagcagttgctggtgctgctgaagtccctagggaaccaccaattcttcccaggattcaggagcagttccagaaaaatcccgacagttacaatggtgctgtccgagagaactacacctggtcacaggactatactgacctggaggtcagggtgccagtacccaagcacgtggtgaagggaaagcaggtctcagtggcccttagcagcagctccattcgtgtggccatgctggaggaaaatggggagcgcgtcctcatggaagggaagctcacccacaagatcaacactgagagttctctctggagtctcgagcccgggaagtgcgttttggtgaacctgagcaaggtgggcgagtattggtggaacgccatcctggagggagaagagcccatcgacattgacaagatcaacaaggagcgctccatggccaccgtggatgaggaggaacaggcggtgttggacaggcttacctttgactaccaccagaagctgcagggcaagccacagagccatgagctgaaagtccatgagatgctgaagaaggggtgggatgctgaaggttctcccttccgaggccagcgattcgaccctgccatgttcaacatctccccgggggctgtgcagttttaatgaccagaaggaaaggaaaccctcgccggtggggaggcagagccttatcctcggctgcccttcttggctccctgcattccagggacttgctcgtcttgtttacccctagccatcctttctttcaagggtgaaccaggccttccaccctgaccttgcatctccagactgttccagagaaggtgcggggccagctgctatgtggtggccgctgtggctgacactgagtgaaggtgtttgaaatgcaggagaggatatcccagcaaattgggatcacatgcttttgtctccacagcaaccagccactgcaggcagcatgtctttcctcccctgctctctgcttgctgttgttttgacgctattctgcttgcatgtcttctggttgggatgtggagttgttgctggactctcaggcgaagctgaagtcattgaagtgtgtgaagctctgtgcttgcatgagggcaagcaaggaatggctgtgcctgaggctgctctgggaaactccttgccccttgacctcttttgagagcattcacgtggtcttcttgctcatccccttataaatgtgctttgcctgcctcagcctcatggtcagagcagtggagactggagccctgtttgcacgttctagttgttcggagaaagcctaggttctgggctcaggtccagatgcagcggggattctgttctctgactgtggcgaccttgctttggttcttgttgaagtgaaccaagcccggccaccacgcatggcatgctgtgcttggctccccataagacgtcctctttgggtgcacggtgtcaaagtgtgggcaggagtggagagctggtgccctcaggaggagaccacagcatgtccatcagctcagcagagctcgacagccacaagtcctgagaagctttgaccttgaagggcttctgggagaggaggaatttctgcatggggcgtgaaggcacactgtcccaccacaactgaaccagaagagagtgaagactcccctcttcccatcctctgtgccaggtgccagactgtgctccttggaacttatggcccaatcttacctgttctccagggactggtcactgcctcaggacccccaagcctatgccctgagccatggctgctgactgactccagccaaggtgcaaagacgagattatgagacaggtcctcaggcctgtgttccaagtactcacaggggctctgggtgcccatcgccgggagtatggttcagctgccaccggcactgtccatttgcctgtctgtcaagctcagagcatggataagccacacagcagggcagtgcaccctggcaccatgcacggccagcaagaatcaaggcccgcagatgctaagagggcctattgtcaggggaaggtccccgctcctgcacactctctatggatacttgggttgtgggggctctcttggagagtaagtttgtggtttgtttctggtttacagtggtggctgacaccccttgtaagaaagcattcctgggaagtcttctgtgggtccaaacatgttgctccgatcatcacaggagagcaaaaggccctagataccccctttggaatgtgagagtcttgttgtctgatatttgccactgagctggtgaagcccctctaaagagatctcgaccctggggagcagaattcttgtcatctatgaggggtcctgagaaagacttgtcattttttttcctggagttcttcccattgaggtcctaggatttgcacaccactgtcccacaagagctttcctgcctaatgaaaggaggtcttgtggtgtgtgtctcctctcttctctatagttcccgagttggcccccattgcagcccccaccctgtgggtagtcttccagaagtgatgcagtggtgtgagatgccctacaccttgttatttgggagactttgagagtcattcacttccatggtgactagtgtttgttttgcctgattttatattctgtgttgcatttctccccactccctgtccctgcgcgccttgctcccgttgagccacgctgtctggtgggtgattctctgccctgagccaccaccctggactggcccagtctccagagctggcacaccctgcctgttttctctttttagacacaacagccgcagtttggccagccactaagtcccaccagctgaggtccgaggaaagcggggtgactcatttcccttgtccagggcccgaggagagtgaggtgtccagcctgcaaagctattccagctccttggtgttggtttgcaataaattggtatttaagcagttctgggtctgcgtgtgacatttgctgctgagacagttctgtctgtgcatggtcattattgttgcattctagccttgaggtcccaggccaacgtacacagcaaacaccagcatggggaattcttaggggttgtttcccatctggtctgaatgcactgggcaagatctcaatacagctttagaaatcctgtaagattttgaccagtggggagaaaaagaatgtagctatagatcttacatcctttcaaacaggttctggaattctgtagttactggaaagcttagggtgagtgcagagttgggaatgattccactgaagggccacctttgcccaccaggctccaaggccctccttggtctccaggtgcatacctgctgttaactttgctgagccctcgcaatgggcttcctccaggacataacgccgtgtctgacacagaagtctcccaggtggctggccacctgcttcttcctcagtcagatctttgactctccttctctgtgcccaccccatctccagcctcctctgaccctgctcacccctggggacaggacctaggggtgtgagaagtacttggctgaataaagactgtttcaaaggcaatccttagaattgcctagcatactcccagggccagaaataacccgccagaaaggagaggcgtatttgcccctgaagagtgcaggagggagaacagttgagaagtgttttgtgtggaaatgtgtccaagaggcgtcagctgctgcacagagaactcactgcccagaacactgcgcttggggaacagacctcacccccacctcaaatctgctctccactgggcctgttggcagccagctcagctggggaagggacagcatgactcgctttgtcgatgaaaagcacgaagttgtcagcacagaacctggccagtccttgagaaactccctccttggtggtcagaggtcaagcagcccatgtggcccacggtcctgaagaactgggctatgtccctgaggctcctctctaccgtctgactgtggggtctggggaacaggcatttaaaccaggctgctgccctggggagtgcccactggacgccagggtgccccatagggacagggtcacaaagccctggggcttcccctgccagtcctggtgaggacagtgtggtcactatctcagagagacgaaaaatgaatattctgtcatttcagactaaactactcacccagctcacactaa

SEQ ID NO: 430651 - DNA, 3240 bp, Homo sapiens
  misc_feature (3193)..(3193): n is a, c, g, or t
  misc_feature (3206)..(3206): n is a, c, g, or t
aagtggccagtcggcaggtctgaggcggcgctgtgtgtgtgaagcgtacctagggcgggaggcgacatggagacaggggcggccgagctgtatgaccaggcccttttgggcatcctgcagcacgtgggcaacgtccaggatttcctgcgcgttctctttggcttcctctaccgcaagacagacttctatcgcttgctgcgccacccatcggaccgcatgggcttcccgcccggggccgcgcaggccttggtgctgcaggtattcaaaacctttgaccacatggcccgtcaggatgatgagaagagaaggcaggaacttgaagagaaaatcagaagaaaggaagaggaagaggccaagactgtgtcagctgctgcagctgagaaggagccagtcccagttccagtccaggaaatagagattgactccaccacagaattggatgggcatcaggaagtagagaaagtgcagcctccaggccctgtgaaggaaatggcccatggttcacaggaggcagaagctccaggagcagttgctggtgctgctgaagtccctagggaaccaccaattcttcccaggattcaggagcagttccagaaaaatcccgacagttacaatggtgctgtccgagagaactacacctggtcacaggactatactgacctggaggtcagggtgccagtacccaagcacgtggtgaagggaaagcaggtctcagtggcccttagcagcagctccattcgtgtggccatgctggaggaaaatggggagcgcgtcctcatggaagggaagctcacccacaagatcaacactgagagttctctctggagtctcgagcccgggaagtgcgttttggtgaacctgagcaaggtgggcgagtattggtggaacgccatcctggagggagaagagcccatcgacattgacaagatcaacaaggagcgctccatggccaccgtggatgaggaggaacaggcggtgttggacaggcttacctttgactaccaccagaagctgcagggcaagccacagagccatgagctgaaagtccatgagatgctgaagaaggggtgggatgctgaaggttctcccttccgaggccagcgattcgaccctgccatgttcaacatctccccgggggctgtgcagttttaatgaccagaaggaaaggaaaccctcgccggtggggaggcagagccttatcctcggctgcccttcttggctccctgcattccagggacttgctcgtcttgtttacccctagccatcctttctttcaagggtgaaccaggccttccaccctgaccttgcatctccagactgttccagagaaggtgcggggccagctgctatgtggtggccgctgtggctgacactgagtgaaggtgtttgaaatgcaggagaggatatcccagcaaattgggatcacatgcttttgtctccacagcaaccagccactgcaggcagcatgtctttcctcccctgctctctgcttgctgttgttttgacgctattctgcttgcatgtcttctggttgggatgtggagttgttgctggactctcaggcgaagctgaagtcattgaagtgtgtgaagctctgtgcttgcatgagggcaagcaaggaatggctgtgcctgaggctgctctgggaaactccttgccccttgacctcttttgagagcattcacgtggtcttcttgctcatccccttataaatgtgctttgcctgcctcagcctcatggtcagagcagtggagactggagccctgtttgcacgttctagttgttcggagaaagcctaggttctgggctcaggtccagatgcagcggggattctgttctctgactgtggcgaccttgctttggttcttgttgaagtgaaccaagcccggccaccacgcatggcatgctgtgcttggctccccataagacgtcctctttgggtgcacggtgtcaaagtgtgggcaggagtggagagctggtgccctcaggaggagaccacagcatgtccatcagctcagcagagctcgacagccacaagtcctgagaagctttgaccttgaagggcttctgggagaggaggaatttctgcatggggcgtgaaggcacactgtcccaccacaactgaaccagaagagagtgaagactcccctcttcccatcctctgtgccaggtgccagactgtgctccttggaacttatggcccaatcttacctgttctccagggactggtcactgcctcaggacccccaagcctatgccctgagccatggctgctgactgactccagccaaggtgcaaagacgagattatgagacaggtcctcaggcctgtgttccaagtactcacaggggctctgggtgcccatcgccgggagtatggttcagctgccaccggcactgtccatttgcctgtctgtcaagctcagagcatggataagccacacagcagggcagtgcaccctggcaccatgcacggccagcaagaatcaaggcccgcagatgctaagagggcctattgtcaggggaaggtccccgctcctgcacactctctatggatacttgggttgtgggggctctcttggagagtaagtttgtggtttgtttctggtttacagtggtggctgacaccccttgtaagaaagcattcctgggaagtcttctgtgggtccaaacatgttgctccgatcatcacaggagagcaaaaggccctagataccccctttggaatgtgagagtcttgttgtctgatatttgccactgagctggtgaagcccctctaaagagatctcgaccctggggagcagaattcttgtcatctatgaggggtcctgagaaagacttgtcattttttttcctggagttcttcccattgaggtcctaggatttgcacaccactgtcccacaagagctttcctgcctaatgaaaggaggtcttgtggtgtgtgtctcctctcttctctatagttcccgagttggcccccattgcagcccccaccctgtgggtagtcttccagaagtgatgcagtggtgtgagatgccctacaccttgttatttgggagactttgagagtcattcacttccatggtgactagtgtttgttttgcctgattttatattctgtgttgcatttctccccactccctgcacttctggaaacctccctgcactctgggaaacctccctgaacaccctncccaactctgcgntctcagcctccctgcatctctcctggggctccct

SEQ ID NO: 430652 - DNA, 3101 bp, Homo sapiens
aagtggccagtcggcaggtctgaggcggcgctgtgtgtgtgaagcgtacctagggcgggaggcgacatggagacaggggcggccgagctgtatgaccaggcccttttgggcatcctgcagcacgtgggcaacgtccaggatttcctgcgcgttctctttggcttcctctaccgcaagacagacttctatcgcttgctgcgccacccatcggaccgcatgggcttcccgcccggggccgcgcaggccttggtgctgcaggtattcaaaacctttgaccacatggcccgtcaggatgatgagaagagaaggcaggaacttgaagagaaaatcagaagaaaggaagaggaagaggccaagactgtgtcagctgctgcagctgagaaggagccagtcccagttccagtccaggaaatagagattgactccaccacagaattggatgggcatcaggaagtagagaaagtgcagcctccaggccctgtgaaggaaatggcccatggttcacaggaggcagaagctccaggagcagttgctggtgctgctgaagtccctagggaaccaccaattcttcccaggattcaggagcagttccagaaaaatcccgacagttacaatggtgctgtccgagagaactacacctggtcacaggactatactgacctggaggtcagggtgccagtacccaagcacgtggtgaagggaaagcaggtctcagtggcccttagcagcagctccattcgtgtggccatgctggaggaaaatggggagcgcgtcctcatggaagggaagctcacccacaagatcaacactgagagttctctctggagtctcgagcccgggaagtgcgttttggtgaacctgagcaaggtgggcgagtattggtggaacgccatcctggagggagaagagcccatcgacattgacaagatcaacaaggagcgctccatggccaccgtggatgaggaggaacaggcggtgttggacaggcttacctttgactaccaccagaagctgcagggcaagccacagagccatgagctgaaagtccatgagatgctgaagaaggggtgggatgctgaaggttctcccttccgaggccagcgattcgaccctgccatgttcaacatctccccgggggctgtgcagttttaatgaccagaaggaaaggaaaccctcgccggtggggaggcagagccttatcctcggctgcccttcttggctccctgcattccagggacttgctcgtcttgtttacccctagccatcctttctttcaagggtgaaccaggccttccaccctgaccttgcatctccagactgttccagagaaggtgcggggccagctgctatgtggtggccgctgtggctgacactgagtgaaggtgtttgaaatgcaggagaggatatcccagcaaattgggatcacatgcttttgtctccacagcaaccagccactgcaggcagcatgtctttcctcccctgctctctgcttgctgttgttttgacgctattctgcttgcatgtcttctggttgggatgtggagttgttgctggactctcaggcgaagctgaagtcattgaagtgtgtgaagctctgtgcttgcatgagggcaagcaaggaatggctgtgcctgaggctgctctgggaaactccttgccccttgacctcttttgagagcattcacgtggtcttcttgctcatccccttataaatgtgctttgcctgcctcagcctcatggtcagagcagtggagactggagccctgtttgcacgttctagttgttcggagaaagcctaggttctgggctcaggtccagatgcagcggggattctgttctctgactgtggcgaccttgctttggttcttgttgaagtgaaccaagcccggccaccacgcatggcatgctgtgcttggctccccataagacgtcctctttgggtgcacggtgtcaaagtgtgggcaggagtggagagctggtgccctcaggaggagaccacagcatgtccatcagctcagcagagctcgacagccacaagtcctgagaagctttgaccttgaagggcttctgggagaggaggaatttctgcatggggcgtgaaggcacactgtcccaccacaactgaaccagaagagagtgaagactcccctcttcccatcctctgtgccaggtgccagactgtgctccttggaacttatggcccaatcttacctgttctccagggactggtcactgcctcaggacccccaagcctatgccctgagccatggctgctgactgactccagccaaggtgcaaagacgagattatgagacaggtcctcaggcctgtgttccaagtactcacaggggctctgggtgcccatcgccgggagtatggttcagctgccaccggcactgtccatttgcctgtctgtcaagctcagagcatggataagccacacagcagggcagtgcaccctggcaccatgcacggccagcaagaatcaaggcccgcagatgctaagagggcctattgtcaggggaaggtccccgctcctgcacactctctatggatacttgggttgtgggggctctcttggagagtaagtttgtggtttgtttctggtttacagtggtggctgacaccccttgtaagaaagcattcctgggaagtcttctgtgggtccaaacatgttgctccgatcatcacaggagagcaaaaggccctagataccccctttggaatgtgagagtcttgttgtctgatatttgccactgagctggtgaagcccctctaaagagatctcgaccctggggagcagaattcttgtcatctatgaggggtcctgagaaagacttgtcattttttttcctggagttcttcccattgaggtcctaggatttgcacaccactgtcccacaagagctttcctgcctaatgaaaggaggtcttgtggtgtgtgtctcctctcttctctatagttcccgagttggcccccattgcagcccccaccctgtgggtagtcttccagaagtgatgcagtggtgtgagatgccctacaccttgttatttgggagactttgagagtctccgtcgaactgggacctctagatcgacct

SEQ ID NO: 430653 - DNA, 3438 bp, Homo sapiens
aagtggccagtcggcaggtctgaggcggcgctgtgtgtgtgaagcgtacctagggcgggaggcgacatggagacaggggcggccgagctgtatgaccaggcccttttgggcatcctgcagcacgtgggcaacgtccaggatttcctgcgcgttctctttggcttcctctaccgcaagacagacttctatcgcttgctgcgccacccatcggaccgcatgggcttcccgcccggggccgcgcaggccttggtgctgcaggtattcaaaacctttgaccacatggcccgtcaggatgatgagaagagaaggcaggaacttgaagagaaaatcagaagaaaggaagaggaagaggccaagactgtgtcagctgctgcagctgagaaggagccagtcccagttccagtccaggaaatagagattgactccaccacagaattggatgggcatcaggaagtagagaaagtgcagcctccaggccctgtgaaggaaatggcccatggttcacaggaggcagaagctccaggagcagttgctggtgctgctgaagtccctagggaaccaccaattcttcccaggattcaggagcagttccagaaaaatcccgacagttacaatggtgctgtccgagagaactacacctggtcacaggactatactgacctggaggtcagggtgccagtacccaagcacgtggtgaagggaaagcaggtctcagtggcccttagcagcagctccattcgtgtggccatgctggaggaaaatggggagcgcgtcctcatggaagggaagctcacccacaagatcaacactgagagttctctctggagtctcgagcccgggaagtgcgttttggtgaacctgagcaaggtgggcgagtattggtggaacgccatcctggagggagaagagcccatcgacattgacaagatcaacaaggagcgctccatggccaccgtggatgaggaggaacaggcggtgttggacaggcttacctttgactaccaccagaagctgcagggcaagccacagagccatgagctgaaagtccatgagatgctgaagaaggggtgggatgctgaaggttctcccttccgaggccagcgattcgaccctgccatgttcaacatctccccgggggctgtgcagttttaatgaccagaaggaaaggaaaccctcgccggtggggaggcagagccttatcctcggctgcccttcttggctccctgcattccagggacttgctcgtcttgtttacccctagccatcctttctttcaagggtgaaccaggccttccaccctgaccttgcatctccagactgttccagagaaggtgcggggccagctgctatgtggtggccgctgtggctgacactgagtgaaggtgtttgaaatgcaggagaggatatcccagcaaattgggatcacatgcttttgtctccacagcaaccagccactgcaggcagcatgtctttcctcccctgctctctgcttgctgttgttttgacgctattctgcttgcatgtcttctggttgggatgtggagttgttgctggactctcaggcgaagctgaagtcattgaagtgtgtgaagctctgtgcttgcatgagggcaagcaaggaatggctgtgcctgaggctgctctgggaaactccttgccccttgacctcttttgagagcattcacgtggtcttcttgctcatccccttataaatgtgctttgcctgcctcagcctcatggtcagagcagtggagactggagccctgtttgcacgttctagttgttcggagaaagcctaggttctgggctcaggtccagatgcagcggggattctgttctctgactgtggcgaccttgctttggttcttgttgaagtgaaccaagcccggccaccacgcatggcatgctgtgcttggctccccataagacgtcctctttgggtgcacggtgtcaaagtgtgggcaggagtggagagctggtgccctcaggaggagaccacagcatgtccatcagctcagcagagctcgacagccacaagtcctgagaagctttgaccttgaagggcttctgggagaggaggaatttctgcatggggcgtgaaggcacactgtcccaccacaactgaaccagaagagagtgaagactcccctcttcccatcctctgtgccaggtgccagactgtgctccttggaacttatggcccaatcttacctgttctccagggactggtcactgcctcaggacccccaagcctatgccctgagccatggctgctgactgactccagccaaggtgcaaagacgagattatgagacaggtcctcaggcctgtgttccaagtactcacaggggctctgggtgcccatcgccgggagtatggttcagctgccaccggcactgtccatttgcctgtctgtcaagctcagagcatggataagccacacagcagggcagtgcaccctggcaccatgcacggccagcaagaatcaaggcccgcagatgctaagagggcctattgtcaggggaaggtccccgctcctgcacactctctatggatacttgggttgtgggggctctcttggagagtaagtttgtggtttgtttctggtttacagtggtggctgacaccccttgtaagaaagcattcctgggaagtcttctgtgggtccaaacatgttgctccgatcatcacaggagagcaaaaggccctagataccccctttggaatgtgagagtcttgttgtctgatatttgccactgagctggtgaagcccctctaaagagatctcgaccctggggagcagaattcttgtcatctatgaggggtcctgagaaagacttgtcattttttttcctggagttcttcccattgaggtcctaggatttgcacaccactgtcccacaagagctttcctgcctaatgaaaggaggtcttgttgagttgttggttgtctccctcttctttcttcttattaggtttcccccggaggtttggggccccccaatttgggccagggcccacgcaaacccttggttgggggcggtaaagggtccgtttccccaaggaaaaacggttgggaattggcgccaagtgttgcgcgggtggtgtgaggaagcgaattggggcgccgctttataacaaaccccttttttggggttacaaaatctaccggggcggaggaaatatggaaacccatttttcgctgggcaaaagagcacaagggtttattaccaaaaggttatagtgccgacactccagtttatatttcccgccagaaaattgttgtgggcgggtggtcgttgaggggacacccctattttaaacgagggtactcatggggaggttttactcagacgcgtggtcgtttacatataattatgtagtggggacgcacccctgatttgcgggcacaccgctttttgttcgttagcttcaatg

SEQ ID NO: 430654 - DNA, 1690 bp, Homo sapiens
tcttggacgaccgtgtcattcggttcgttgggtccacacactcgagggtcctctttgggtgcacggtgtcaaagtgtgggcaggagtggagagctggtgccctcaggaggagaccacagcatgtccatcagctcagcagagctcgacagccacaagtcctgagaagctttgaccttgaagggcttctgggagaggaggaatttctgcatggggcgtgaaggcacactgtcccaccacaactgaaccagaagagagtgaagactcccctcttcccatcctctgtgccaggtgccagactgtgctccttggaacttatggcccaatcttacctgttctccagggactggtcactgcctcaggacccccaagcctatgccctgagccatggctgctgactgactccagccaaggtgcaaagacgagattatgagacaggtcctcaggcctgtgttccaagtactcacaggggctctgggtgcccatcgccgggagtatggttcagctgccaccggcactgtccatttgcctgtctgtcaagctcagagcatggataagccacacagcagggcagtgcaccctggcaccatgcacggccagcaagaatcaaggcccgcagatgctaagagggcctattgtcaggggaaggtccccgctcctgcacactctctatggatacttgggttgtgggggctctcttggagagtaagtttgtggtttgtttctggtttacagtggtggctgacaccccttgtaagaaagcattcctgggaagtcttctgtgggtccaaacatgttgctccgatcatcacaggagagcaaaaggccctagataccccctttggaatgtgagagtcttgttgtctgatatttgccactgagctggtgaagcccctctaaagagatctcgaccctggggagcagaattcttgtcatctatgaggggtcctgagaaagacttgtcattttttttcctggagttcttcccattgaggtcctaggatttgcacaccactgtcccacaagagctttcctgcctaatgaaaggaggtcttgtggtgtgtgtctcctctcttctctatagttcccgagttggcccccattgcagcccccaccctgtgggtagtcttccagaagtgatgcagtggtgtgagatgccctacaccttgttatttgggagactttgagagtcattcacttccatggtgactagtgtttgttttgcctgattttatattctgtgttgcatttctccccactccctgccctgctttaataaacagcaaaccaatatctaggaagaatgactgagggatagtattgggtattggccccatggcaggaacagccacttgcatctggtcccggtgccacactgcggtgcttggtgtggttgtggagcctgtccctgcgcgccttgctcccgttgagccacgctgtctggtgggtgattctctgccctgagccaccaccctggactggcccagtctccagagctggcacaccctgcctgttttctctttttagacacaacagccgcagtttggccagccactaagtcccaccagctgaggtccgaggaaagcggggtgactcatttcccttgtccagggcccgaggagagtgaggtgtccagcctgcaaagctattccagctccttggtgttggtttgcaataaattggtatttaagca

SEQ ID NO: 430655 - DNA, 1516 bp, Homo sapiens
tgggctgaagtcgtaattactggcccgtgttgtacaatgcaagaaggcacactgtcccaccacaactgaaccagaagagagtgaagactcccctcttcccatcctctgtgccaggtgccagactgtgctccttggaacttatggcccaatcttacctgttctccagggactggtcactgcctcaggacccccaagcctatgccctgagccatggctgctgactgactccagccaaggtgcaaagacgagattatgagacaggtcctcaggcctgtgttccaagtactcacaggggctctgggtgcccatcgccgggagtatggttcagctgccaccggcactgtccatttgcctgtctgtcaagctcagagcatggataagccacacagcagggcagtgcaccctggcaccatgcacggccagcaagaatcaaggcccgcagatgctaagagggcctattgtcaggggaaggtccccgctcctgcacactctctatggatacttgggttgtgggggctctcttggagagtaagtttgtggtttgtttctggtttacagtggtggctgacaccccttgtaagaaagcattcctgggaagtcttctgtgggtccaaacatgttgctccgatcatcacaggagagcaaaaggccctagataccccctttggaatgtgagagtcttgttgtctgatatttgccactgagctggtgaagcccctctaaagagatctcgaccctggggagcagaattcttgtcatctatgaggggtcctgagaaagacttgtcattttttttcctggagttcttcccattgaggtcctaggatttgcacaccactgtcccacaagagctttcctgcctaatgaaaggaggtcttgtggtgtgtgtctcctctcttctctatagttcccgagttggcccccattgcagcccccaccctgtgggtagtcttccagaagtgatgcagtggtgtgagatgccctacaccttgttatttgggagactttgagagtcattcacttccatggtgactagtgtttgttttgcctgattttatattctgtgttgcatttctccccactccctgccctgctttaataaacagcaaaccaatatctaggaagaatgactgagggatagtattgggtattggccccatggcaggaacagccacttgcatctggtcccggtgccacactgcggtgcttggtgtggttgtggagcctgtccctgcgcgccttgctcccgttgagccacgctgtctggtgggtgattctctgccctgagccaccaccctggactggcccagtctccagagctggcacaccctgcctgttttctctttttagacacaacagccgcagtttggccagccactaagtcccaccagctgaggtccgaggaaagcggggtgactcatttcccttgtccagggcccgaggagagtgaggtgtccagcctgcaaagctattccagctccttggtgttggtttgcaataaattggtatttaagca

SEQ ID NO: 430656 - DNA, 1872 bp, Homo sapiens
ggggctggaggaccccctcatgcagcaagcttggccccagtgaggaagaagtggggacagggcatggtgccctgtcatggggtgaggactccccaggagattctgtcatgcattaggctgagccctaagtctcataggtcccagcttacccctaagatagcagaatgttggatgttgctcttggaagcaagagagatcactggagaggtagttggttgataagagctaagcagagccttccatggcaagcatgggggcaggctgggttggcccaggacaggtcctggtgtgggggggtgtcatgggtcttggaaaatagcctttcttcatgagagtgggcaaggtgtgcacatggaacaggcactgtcctgagtatccaggacctgctgaagaaggataaaggcatcttccagaatgtcagtcccctcaggtatgtgcctcctagctcttccctgggatatgttagcacaggcagcaaatgcattcccaggcacagagggtcctgccttgggttctggcaccccctcttgtctgtcacctccctttgtgtagttggtccctgagccatggctgctgactgactccagccaaggtgcaaagacgagattatgagacaggtcctcaggcctgtgttccaagtactcacaggggctctgggtgcccatcgccgggagtatggttcagctgccaccggcactgtccatttgcctgtctgtcaagctcagagcatggataagccacacagcagggcagtgcaccctggcaccatgcacggccagcaagaatcaaggcccgcagatgctaagagggcctattgtcaggggaaggtccccgctcctgcacactctctatggatacttgggttgtgggggctctcttggagagtaagtttgtggtttgtttctggtttacagtggtggctgacaccccttgtaagaaagcattcctgggaagtcttctgtgggtccaaacatgttgctccgatcatcacaggagagcaaaaggccctagataccccctttggaatgtgagagtcttgttgtctgatatttgccactgagctggtgaagcccctctaaagagatctcgaccctggggagcagaattcttgtcatctatgaggggtcctgagaaagacttgtcattttttttcctggagttcttcccattgaggtcctaggatttgcacaccactgtcccacaagagctttcctgcctaatgaaaggaggtcttgtggtgtgtgtctcctctcttctctatagttcccgagttggcccccattgcagcccccaccctgtgggtagtcttccagaagtgatgcagtggtgtgagatgccctacaccttgttatttgggagactttgagagtcattcacttccatggtgactagtgtttgttttgcctgattttatattctgtgttgcatttctccccactccctgccctgctttaataaacagcaaaccaatatctaggaagaatgactgagggatagtattgggtattggccccatggcaggaacagccacttgcatctggtcccggtgccacactgcggtgcttggtgtggttgtggagcctgtccctgcgcgccttgctcccgttgagccacgctgtctggtgggtgattctctgccctgagccaccaccctggactggcccagtctccagagctggcacaccctgcctgttttctctttttagacacaacagccgcagtttggccagccactaagtcccaccagctgaggtccgaggaaagcggggtgactcatttcccttgtccagggcccgaggagagtgaggtgtccagcctgcaaagctattccagctccttggtgttggtttgcaataaattggtatttaagca

SEQ ID NO: 430657 - DNA, 1077 bp, Homo sapiens
ttaaaaagaactttgaagagagagttcaagaagtccccgctcctgcacactctctatggatacttgggttgtgggggctctcttggagagtaagtttgtggtttgtttctggtttacagtggtggctgacaccccttgtaagaaagcattcctgggaagtcttctgtgggtccaaacatgttgctccgatcatcacaggagagcaaaaggccctagataccccctttggaatgtgagagtcttgttgtctgatatttgccactgagctggtgaagcccctctaaagagatctcgaccctggggagcagaattcttgtcatctatgaggggtcctgagaaagacttgtcattttttttcctggagttcttcccattgaggtcctaggatttgcacaccactgtcccacaagagctttcctgcctaatgaaaggaggtcttgtggtgtgtgtctcctctcttctctatagttcccgagttggcccccattgcagcccccaccctgtgggtagtcttccagaagtgatgcagtggtgtgagatgccctacaccttgttatttgggagactttgagagtcattcacttccatggtgactagtgtttgttttgcctgattttatattctgtgttgcatttctccccactccctgccctgctttaataaacagcaaaccaatatctaggaagaatgactgagggatagtattgggtattggccccatggcaggaacagccacttgcatctggtcccggtgccacactgcggtgcttggtgtggttgtggagcctgtccctgcgcgccttgctcccgttgagccacgctgtctggtgggtgattctctgccctgagccaccaccctggactggcccagtctccagagctggcacaccctgcctgttttctctttttagacacaacagccgcagtttggccagccactaagtcccaccagctgaggtccgaggaaagcggggtgactcatttcccttgtccagggcccgaggagagtgaggtgtccagcctgcaaagctattccagctccttggtgttggtttgcaataaattggtatttaagca

SEQ ID NO: 430658 - DNA, 1072 bp, Homo sapiens
cccccgggctgcaggaattcggcacgagtccccgctcctgcacactctctatggatacttgggttgtgggggctctcttggagagtaagtttgtggtttgtttctggtttacagtggtggctgacaccccttgtaagaaagcattcctgggaagtcttctgtgggtccaaacatgttgctccgatcatcacaggagagcaaaaggccctagataccccctttggaatgtgagagtcttgttgtctgatatttgccactgagctggtgaagcccctctaaagagatctcgaccctggggagcagaattcttgtcatctatgaggggtcctgagaaagacttgtcattttttttcctggagttcttcccattgaggtcctaggatttgcacaccactgtcccacaagagctttcctgcctaatgaaaggaggtcttgtggtgtgtgtctcctctcttctctatagttcccgagttggcccccattgcagcccccaccctgtgggtagtcttccagaagtgatgcagtggtgtgagatgccctacaccttgttatttgggagactttgagagtcattcacttccatggtgactagtgtttgttttgcctgattttatattctgtgttgcatttctccccactccctgccctgctttaataaacagcaaaccaatatctaggaagaatgactgagggatagtattgggtattggccccatggcaggaacagccacttgcatctggtcccggtgccacactgcggtgcttggtgtggttgtggagcctgtccctgcgcgccttgctcccgttgagccacgctgtctggtgggtgattctctgccctgagccaccaccctggactggcccagtctccagagctggcacaccctgcctgttttctctttttagacacaacagccgcagtttggccagccactaagtcccaccagctgaggtccgaggaaagcggggtgactcatttcccttgtccagggcccgaggagagtgaggtgtccagcctgcaaagctattccagctccttggtgttggtttgcaataaattggtatttaagca

SEQ ID NO: 430659 - DNA, 1216 bp, Homo sapiens
ctctaaagagatctcgaccctggggagcagaattcttgtcatctatgaggggtcctgagaaagacttgtcattttttttcctggagttcttcccattgaggtcctaggatttgcacaccactgtcccacaagagctttcctgcctaatgaaaggaggtcttgtggtgtgtgttccccgctcctgcacactctctatggatacttgggttgtgggggctctcttggagagtaagtttgtggtttgtttctggtttacagtggtggctgacaccccttgtaagaaagcattcctgggaagtcttctgtgggtccaaacatgttgctccgatcatcacaggagagcaaaaggccctagataccccctttggaatgtgagagtcttgttgtctgatatttgccactgagctggtgaagcccctctaaagagatctcgaccctggggagcagaattcttgtcatctatgaggggtcctgagaaagacttgtcattttttttcctggagttcttcccattgaggtcctaggatttgcacaccactgtcccacaagagctttcctgcctaatgaaaggaggtcttgtggtgtgtgtctcctctcttctctatagttcccgagttggcccccattgcagcccccaccctgtgggtagtcttccagaagtgatgcagtggtgtgagatgccctacaccttgttatttgggagactttgagagtcattcacttccatggtgactagtgtttgttttgcctgattttatattctgtgttgcatttctccccactccctgccctgctttaataaacagcaaaccaatatctaggaagaatgactgagggatagtattgggtattggccccatggcaggaacagccacttgcatctggtcccggtgccacactgcggtgcttggtgtggttgtggagcctgtccctgcgcgccttgctcccgttgagccacgctgtctggtgggtgattctctgccctgagccaccaccctggactggcccagtctccagagctggcacaccctgcctgttttctctttttagacacaacagccgcagtttggccagccactaagtcccaccagctgaggtccgaggaaagcggggtgactcatttcccttgtccagggcccgaggagagtgaggtgtccagcctgcaaagctattccagctccttggtgttggtttgcaataaattggtatttaagca

SEQ ID NO: 430660 - DNA, 1013 bp, Homo sapiens
ggtaccccttttttcaccatagggctggttttccccatgtgtgaggagagtctccgtcgaactagttcgacggagactctcacattcctgggaagtcttctgtgggtccaaacatgttgctccgatcatcacaggagagcaaaaggccctagataccccctttggaatgtgagagtcttgttgtctgatatttgccactgagctggtgaagcccctctaaagagatctcgaccctggggagcagaattcttgtcatctatgaggggtcctgagaaagacttgtcattttttttcctggagttcttcccattgaggtcctaggatttgcacaccactgtcccacaagagctttcctgcctaatgaaaggaggtcttgtggtgtgtgtctcctctcttctctatagttcccgagttggcccccattgcagcccccaccctgtgggtagtcttccagaagtgatgcagtggtgtgagatgccctacaccttgttatttgggagactttgagagtcattcacttccatggtgactagtgtttgttttgcctgattttatattctgtgttgcatttctccccactccctgccctgctttaataaacagcaaaccaatatctaggaagaatgactgagggatagtattgggtattggccccatggcaggaacagccacttgcatctggtcccggtgccacactgcggtgcttggtgtggttgtggagcctgtccctgcgcgccttgctcccgttgagccacgctgtctggtgggtgattctctgccctgagccaccaccctggactggcccagtctccagagctggcacaccctgcctgttttctctttttagacacaacagccgcagtttggccagccactaagtcccaccagctgaggtccgaggaaagcggggtgactcatttcccttgtccagggcccgaggagagtgaggtgtccagcctgcaaagctattccagctccttggtgttggtttgcaataaattggtatttaagca

SEQ ID NO: 430661 - DNA, 2432 bp, Homo sapiens
aagtggccagtcggcaggtctgaggcggcgctgtgtgtgtgaagcgtacctagggcgggaggcgacatggagacaggggcggccgagctgtatgaccaggcccttttgggcatcctgcagcacgtgggcaacgtccaggatttcctgcgcgttctctttggcttcctctaccgcaagacagacttctatcgcttgctgcgccacccatcggaccgcatgggcttcccgcccggggccgcgcaggccttggtgctgcaggtattcaaaacctttgaccacatggcccgtcaggatgatgagaagagaaggcaggaacttgaagagaaaatcagaagaaaggaagaggaagaggccaagactgtgtcagctgctgcagctgagaaggagccagtcccagttccagtccaggaaatagagattgactccaccacagaattggatgggcatcaggaagtagagaaagtgcagcctccaggccctgtgaaggaaatggcccatggttcacaggaggcagaagctccaggagcagttgctggtgctgctgaagtccctagggaaccaccaattcttcccaggattcaggagcagttccagaaaaatcccgacagttacaatggtgctgtccgagagaactacacctggtcacaggactatactgacctggaggtcagggtgccagtacccaagcacgtggtgaagggaaagcaggtctcagtggcccttagcagcagctccattcgtgtggccatgctggaggaaaatggggagcgcgtcctcatggaagggaagctcacccacaagatcaacactgagagttctctctggagtctcgagcccgggaagtgcgttttggtgaacctgagcaaggtgggcgagtattggtggaacgccatcctggagggagaagagcccatcgacattgacaagatcaacaaggagcgctccatggccaccgtggatgaggaggaacaggcggtgttggacaggcttacctttgactaccaccagaagctgcagggcaagccacagagccatgagctgacacaacagccgcagtttggccagccactaagtcccaccagctgaggtccgaggaaagcggggtgactcatttcccttgtccagggcccgaggagagtgaggtgtccagcctgcaaagctattccagctccttggtgttggtttgcaataaattggtatttaagcagttctgggtctgcgtgtgacatttgctgctgagacagttctgtctgtgcatggtcattattgttgcattctagccttgaggtcccaggccaacgtacacagcaaacaccagcatggggaattcttaggggttgtttcccatctggtctgaatgcactgggcaagatctcaatacagctttagaaatcctgtaagattttgaccagtggggagaaaaagaatgtagctatagatcttacatcctttcaaacaggttctggaattctgtagttactggaaagcttagggtgagtgcagagttgggaatgattccactgaagggccacctttgcccaccaggctccaaggccctccttggtctccaggtgcatacctgctgttaactttgctgagccctcgcaatgggcttcctccaggacataacgccgtgtctgacacagaagtctcccaggtggctggccacctgcttcttcctcagtcagatctttgactctccttctctgtgcccaccccatctccagcctcctctgaccctgctcacccctggggacaggacctaggggtgtgagaagtacttggctgaataaagactgtttcaaaggcaatccttagaattgcctagcatactcccagggccagaaataacccgccagaaaggagaggcgtatttgcccctgaagagtgcaggagggagaacagttgagaagtgttttgtgtggaaatgtgtccaagaggcgtcagctgctgcacagagaactcactgcccagaacactgcgcttggggaacagacctcacccccacctcaaatctgctctccactgggcctgttggcagccagctcagctggggaagggacagcatgactcgctttgtcgatgaaaagcacgaagttgtcagcacagaacctggccagtccttgagaaactccctccttggtggtcagaggtcaagcagcccatgtggcccacggtcctgaagaactgggctatgtccctgaggctcctctctaccgtctgactgtggggtctggggaacaggcatttaaaccaggctgctgccctggggagtgcccactggacgccagggtgccccatagggacagggtcacaaagccctggggcttcccctgccagtcctggtgaggacagtgtggtcactatctcagagagacgaaaaatgaatattctgtcatttcagactaaactactcacccagctcacactaa

SEQ ID NO: 430662 - DNA, 915 bp, Homo sapiens
tgtctgctgttgcctgcttgaatatcgcggcgatctcactgtcagcccttggcgaacatgcctttggaatgtgagagtcttgttgtctgatatttgccactgagctggtgaagcccctctaaagagatctcgaccctggggagcagaattcttgtcatctatgaggggtcctgagaaagacttgtcattttttttcctggagttcttcccattgaggtcctaggatttgcacaccactgtcccacaagagctttcctgcctaatgaaaggaggtcttgtggtgtgtgtctcctctcttctctatagttcccgagttggcccccattgcagcccccaccctgtgggtagtcttccagaagtgatgcagtggtgtgagatgccctacaccttgttatttgggagactttgagagtcattcacttccatggtgactagtgtttgttttgcctgattttatattctgtgttgcatttctccccactccctgccctgctttaataaacagcaaaccaatatctaggaagaatgactgagggatagtattgggtattggccccatggcaggaacagccacttgcatctggtcccggtgccacactgcggtgcttggtgtggttgtggagcctgtccctgcgcgccttgctcccgttgagccacgctgtctggtgggtgattctctgccctgagccaccaccctggactggcccagtctccagagctggcacaccctgcctgttttctctttttagacacaacagccgcagtttggccagccactaagtcccaccagctgaggtccgaggaaagcggggtgactcatttcccttgtccagggcccgaggagagtgaggtgtccagcctgcaaagctattccagctccttggtgttggtttgcaataaattggtatttaagca

SEQ ID NO: 430663 - DNA, 1026 bp, Homo sapiens
ttcctacccgtccccggttgctacctcttacccgtccccggttactacctcttatccatctccggccaccacctcatacccatcccctgtgttcacctgcacctcataatccgttcgcccggttgtcacattcccaacctgcctggtgtcgggggcacgagcacaggcaggcctttggaatgtgagagtcttgttgtctgatatttgccactgagctggtgaagcccctctaaagagatctcgaccctggggagcagaattcttgtcatctatgaggggtcctgagaaagacttgtcattttttttcctggagttcttcccattgaggtcctaggatttgcacaccactgtcccacaagagctttcctgcctaatgaaaggaggtcttgtggtgtgtgtctcctctcttctctatagttcccgagttggcccccattgcagcccccaccctgtgggtagtcttccagaagtgatgcagtggtgtgagatgccctacaccttgttatttgggagactttgagagtcattcacttccatggtgactagtgtttgttttgcctgattttatattctgtgttgcatttctccccactccctgccctgctttaataaacagcaaaccaatatctaggaagaatgactgagggatagtattgggtattggccccatggcaggaacagccacttgcatctggtcccggtgccacactgcggtgcttggtgtggttgtggagcctgtccctgcgcgccttgctcccgttgagccacgctgtctggtgggtgattctctgccctgagccaccaccctggactggcccagtctccagagctggcacaccctgcctgttttctctttttagacacaacagccgcagtttggccagccactaagtcccaccagctgaggtccgaggaaagcggggtgactcatttcccttgtccagggcccgaggagagtgaggtgtccagcctgcaaagctattccagctccttggtgttggtttgcaataaattggtatttaagca

SEQ ID NO: 430664 - DNA, 816 bp, Homo sapiens
  misc_feature (39)..(39): n is a, c, g, or t
  misc_feature (41)..(41): n is a, c, g, or t
  misc_feature (44)..(44): n is a, c, g, or t
  misc_feature (50)..(50): n is a, c, g, or t
cgaaaaaaaaatcaaacaaaaaaaactacggctaggagngngcngggttnacttgtcatctatgaggggtcctgagaaagacttgtcattttttttcctggagttcttcccattgaggtcctaggatttgcacaccactgtcccacaagagctttcctgcctaatgaaaggaggtcttgtggtgtgtgtctcctctcttctctatagttcccgagttggcccccattgcagcccccaccctgtgggtagtcttccagaagtgatgcagtggtgtgagatgccctacaccttgttatttgggagactttgagagtcattcacttccatggtgactagtgtttgttttgcctgattttatattctgtgttgcatttctccccactccctgccctgctttaataaacagcaaaccaatatctaggaagaatgactgagggatagtattgggtattggccccatggcaggaacagccacttgcatctggtcccggtgccacactgcggtgcttggtgtggttgtggagcctgtccctgcgcgccttgctcccgttgagccacgctgtctggtgggtgattctctgccctgagccaccaccctggactggcccagtctccagagctggcacaccctgcctgttttctctttttagacacaacagccgcagtttggccagccactaagtcccaccagctgaggtccgaggaaagcggggtgactcatttcccttgtccagggcccgaggagagtgaggtgtccagcctgcaaagctattccagctccttggtgttggtttgcaataaattggtatttaagca

SEQ ID NO: 430665 - DNA, 786 bp, Homo sapiens
atatctaggaagaatgcaacacttgtcatctatgaggggtcctgagaaagacttgtcattttttttcctggagttcttcccattgaggtcctaggatttgcacaccactgtcccacaagagctttcctgcctaatgaaaggaggtcttgtggtgtgtgtctcctctcttctctatagttcccgagttggcccccattgcagcccccaccctgtgggtagtcttccagaagtgatgcagtggtgtgagatgccctacaccttgttatttgggagactttgagagtcattcacttccatggtgactagtgtttgttttgcctgattttatattctgtgttgcatttctccccactccctgccctgctttaataaacagcaaaccaatatctaggaagaatgactgagggatagtattgggtattggccccatggcaggaacagccacttgcatctggtcccggtgccacactgcggtgcttggtgtggttgtggagcctgtccctgcgcgccttgctcccgttgagccacgctgtctggtgggtgattctctgccctgagccaccaccctggactggcccagtctccagagctggcacaccctgcctgttttctctttttagacacaacagccgcagtttggccagccactaagtcccaccagctgaggtccgaggaaagcggggtgactcatttcccttgtccagggcccgaggagagtgaggtgtccagcctgcaaagctattccagctccttggtgttggtttgcaataaattggtatttaagca

SEQ ID NO: 430666 - DNA, 1358 bp, Homo sapiens
aagtggccagtcggcaggtctgaggcggcgctgtgtgtgtgaagcgtacctagggcgggaggcgacatggagacaggggcggccgagctgtatgaccaggcccttttgggcatcctgcagcacgtgggcaacgtccaggatttcctgcgcgttctctttggcttcctctaccgcaagacagacttctatcgcttgctgcgccacccatcggaccgcatgggcttcccgcccggggccgcgcaggccttggtgctgcaggtattcaaaacctttgaccacatggcccgtcaggatgatgagaagagaaggcaggaacttgaagagaaaatcagaagaaaggaagaggaagaggccaagactgtgtcagctgctgcagctgagaaggagccagtcccagttccagtccaggaaatagagattgactccaccacagaattggatgggcatcaggaagtagagaaagtgcagcctccaggccctgtgaaggaaatggcccatggttcacaggaggcagaagctccaggagcagttgctggtgctgctgaagtccctagggaaccaccaattcttcccaggattcaggagcagttccagaaaaatcccgacagttacaatggtgctgtccgagagaactacacctggtcacaggactatactgacctggaggtcagggtgccagtacccaagcacgtggtgaagggaaagcaggtctcagtggcccttagcagcagctccattcgtgtggccatgctggaggaaaatggggagcgcgtcctcatggaagggaagctcacccacaagatcaacactgagagttctctctggagtctcgagcccgggaagtgcgttttggtgaacctgagcaaggtgggcgagtattggtggaacgccatcctggagggagaagagcccatcgacattgacaagatcaacaaggagcgctccatggccaccgtggatgaggaggaacaggcggtgttggacaggcttacctttgactaccaccagaagctgcagggcaagccacagagccatgagctggtacgagcatggcagtcctggagagtccaccctttaggcccttgtgctggtgacaaggccgatagtggcagaggggttggtgatgacggtggggaagaaggttgtgtggaccagcttcctgccatgtcctagcctagcaaggaacctgtcttacctgctcttgtccccaatcactgcctcacaggtgcactctggtctttcagctgtgttctcatacctgggctgagagcccagttaacaggacctcgaagggtgtcatgagatctgcccttcctgcaccagagcctggtaacatcaagtgtgttgatggcttttgt

SEQ ID NO: 430667 - DNA, 2110 bp, Homo sapiens
aagtggccagtcggcaggtctgaggcggcgctgtgtgtgtgaagcgtacctagggcgggaggcgacatggagacaggggcggccgagctgtatgaccaggcccttttgggcatcctgcagcacgtgggcaacgtccaggatttcctgcgcgttctctttggcttcctctaccgcaagacagacttctatcgcttgctgcgccacccatcggaccgcatgggcttcccgcccggggccgcgcaggccttggtgctgcaggtattcaaaacctttgaccacatggcccgtcaggatgatgagaagagaaggcaggaacttgaagagaaaatcagaagaaaggaagaggaagaggccaagactgtgtcagctgctgcagctgagaaggagccagtcccagttccagtccaggaaatagagattgactccaccacagaattggatgggcatcaggaagtagagaaagtgcagcctccaggccctgtgaaggaaatggcccatggttcacaggaggcagaagctccaggagcagttgctggtgctgctgaagtccctagggaaccaccaattcttcccaggattcaggagcagttccagaaaaatcccgacagttacaatggtgctgtccgagagaactacacctggtcacaggactatactgacctggaggtcagggtgccagtacccaagcacgtggtgaagggaaagcaggtctcagtggcccttagcagcagctccattcgtgtggccatgctggaggaaaatggggagcgcgtcctcatggaagggaagctcacccacaagatcaacactgagaagtgaggtgtccagcctgcaaagctattccagctccttggtgttggtttgcaataaattggtatttaagcagttctgggtctgcgtgtgacatttgctgctgagacagttctgtctgtgcatggtcattattgttgcattctagccttgaggtcccaggccaacgtacacagcaaacaccagcatggggaattcttaggggttgtttcccatctggtctgaatgcactgggcaagatctcaatacagctttagaaatcctgtaagattttgaccagtggggagaaaaagaatgtagctatagatcttacatcctttcaaacaggttctggaattctgtagttactggaaagcttagggtgagtgcagagttgggaatgattccactgaagggccacctttgcccaccaggctccaaggccctccttggtctccaggtgcatacctgctgttaactttgctgagccctcgcaatgggcttcctccaggacataacgccgtgtctgacacagaagtctcccaggtggctggccacctgcttcttcctcagtcagatctttgactctccttctctgtgcccaccccatctccagcctcctctgaccctgctcacccctggggacaggacctaggggtgtgagaagtacttggctgaataaagactgtttcaaaggcaatccttagaattgcctagcatactcccagggccagaaataacccgccagaaaggagaggcgtatttgcccctgaagagtgcaggagggagaacagttgagaagtgttttgtgtggaaatgtgtccaagaggcgtcagctgctgcacagagaactcactgcccagaacactgcgcttggggaacagacctcacccccacctcaaatctgctctccactgggcctgttggcagccagctcagctggggaagggacagcatgactcgctttgtcgatgaaaagcacgaagttgtcagcacagaacctggccagtccttgagaaactccctccttggtggtcagaggtcaagcagcccatgtggcccacggtcctgaagaactgggctatgtccctgaggctcctctctaccgtctgactgtggggtctggggaacaggcatttaaaccaggctgctgccctggggagtgcccactggacgccagggtgccccatagggacagggtcacaaagccctggggcttcccctgccagtcctggtgaggacagtgtggtcactatctcagagagacgaaaaatgaatattctgtcatttcagactaaactactcacccagctcacactaa

SEQ ID NO: 430668 - DNA, 756 bp, Homo sapiens
aagtggccagtcggcaggtctgaggcggcgctgtgtgtgtgaagcgtacctagggcgggaggcgacatggagacaggggcggccgagctgtatgaccaggcccttttgggcatcctgcagcacgtgggcaacgtccaggatttcctgcgcgttctctttggcttcctctaccgcaagacagacttctatcgcttgctgcgccacccatcggaccgcatgggcttcccgcccggggccgcgcaggccttggtgctgcaggtattcaaaacctttgaccacatggcccgtcaggatgatgagaagagaaggcaggaacttgaagagaaaatcagaagaaaggaagaggaagaggccaagactgtgtcagctgctgcagctgagaaggagccagtcccagttccagtccaggaaatagagattgactccaccacagaattggatgggcatcaggaagtagagaaagtgcagcctccaggccctgtgaaggaaatggcccatggttcacaggaggcagaagctccaggagcagttgctggtgctgctgaagtccctagggaaccaccaattcttcccaggagcactgctaggatttgctcatgatgcctgaggtataatggacacctgaaatgacagtctgttttaggtgactggattcacatcctcgctatgccgcttcctgaatgtattaccttgaacaagcagtataacctttctgtgtctcagttttcttctctataaaatgtaggtgataataat

SEQ ID NO: 430669 - DNA, 1835 bp, Homo sapiens
ccagcagttcagttcctcatcctttgaccccagacatataaagcctgtgcattatgacacagcctggagccttttcccaagctataggctcctgtgactactaccagttcctttcctttatgtcatacttgactttgcagatgccattacggcctctccctcacttgagcttcacgtggttgtggaggtatgagagcatgagtgatgcactagtagtactggggccggctagcttgccctctgaaggtgcagccctggccgcctgtattacactagtgagcccgtgatcctggggttgccatctccatggactgagaggtcgtgatagccctgccttaaaacactggccttgactctcctgccttccgttgggtgaactcagtgcagatcatggagcaggtcacgatgctctcaagttggttccctctgagcgaggagctcttgacacaacagccgcagtttggccagccactaagtcccaccagctgaggtccgaggaaagcggggtgactcatttcccttgtccagggcccgaggagagtgaggtgtccagcctgcaaagctattccagctccttggtgttggtttgcaataaattggtatttaagcagttctgggtctgcgtgtgacatttgctgctgagacagttctgtctgtgcatggtcattattgttgcattctagccttgaggtcccaggccaacgtacacagcaaacaccagcatggggaattcttaggggttgtttcccatctggtctgaatgcactgggcaagatctcaatacagctttagaaatcctgtaagattttgaccagtggggagaaaaagaatgtagctatagatcttacatcctttcaaacaggttctggaattctgtagttactggaaagcttagggtgagtgcagagttgggaatgattccactgaagggccacctttgcccaccaggctccaaggccctccttggtctccaggtgcatacctgctgttaactttgctgagccctcgcaatgggcttcctccaggacataacgccgtgtctgacacagaagtctcccaggtggctggccacctgcttcttcctcagtcagatctttgactctccttctctgtgcccaccccatctccagcctcctctgaccctgctcacccctggggacaggacctaggggtgtgagaagtacttggctgaataaagactgtttcaaaggcaatccttagaattgcctagcatactcccagggccagaaataacccgccagaaaggagaggcgtatttgcccctgaagagtgcaggagggagaacagttgagaagtgttttgtgtggaaatgtgtccaagaggcgtcagctgctgcacagagaactcactgcccagaacactgcgcttggggaacagacctcacccccacctcaaatctgctctccactgggcctgttggcagccagctcagctggggaagggacagcatgactcgctttgtcgatgaaaagcacgaagttgtcagcacagaacctggccagtccttgagaaactccctccttggtggtcagaggtcaagcagcccatgtggcccacggtcctgaagaactgggctatgtccctgaggctcctctctaccgtctgactgtggggtctggggaacaggcatttaaaccaggctgctgccctggggagtgcccactggacgccagggtgccccatagggacagggtcacaaagccctggggcttcccctgccagtcctggtgaggacagtgtggtcactatctcagagagacgaaaaatgaatattctgtcatttcagactaaactactcacccagctcacactaa

SEQ ID NO: 430670 - DNA, 756 bp, Homo sapiens
aagtggccagtcggcaggtctgaggcggcgctgtgtgtgtgaagcgtacctagggcgggaggcgacatggagacaggggcggccgagctgtatgaccaggcccttttgggcatcctgcagcacgtgggcaacgtccaggatttcctgcgcgttctctttggcttcctctaccgcaagacagacttctatcgcttgctgcgccacccatcggaccgcatgggcttcccgcccggggccgcgcaggccttggtgctgcaggtgaggcgggcgggcctgcggtctggggagccgccgcccccggcctgccctgactcctggcgcccgctcctccaagctctcccagcctgtttcctccttttcctggtgtcctggggttgagcttgtgagaatggcttcagtaatttgaagcgcggattggatgtcagcttattccgctgaggtgttcgctccggacgtcctgaggtttcagaagtagtaagccgactgttaagagccctactcagcacccgccagcgcgtacccctcacggtgctgggggccgctagtcagggagcgaaatccatgcaggccagacagaaggaaggacatttacagcaacagaaacgtgcatgccccagaactaccaaagacttgagctggcggggatgacggaggcattgtgttgatcaatgggtgtggtcgcttgtttgaaatgtgacttcccaggtcaaagactgtcaatgtagtgcttattaaaatttctatttgagcttaatt

SEQ ID NO: 430671 - DNA, 727 bp, Homo sapiens
aagtggccagtcggcaggtctgaggcggcgctgtgtgtgtgaagcgtacctagggcgggaggcgacatggagacaggggcggccgagctgtatgaccaggcccttttgggcatcctgcagcacgtgggcaacgtccaggatttcctgcgcgttctctttggcttcctctaccgcaagacagacttctatcgcttgctgcgccacccatcggaccgcatgggcttcccgcccggggccgcgcaggccttggtgctgcaggtgaggcgggcgggcctgcggtctggggagccgccgcccccggcctgccctgactcctggcgcccgctcctccaagctctcccagcctgtttcctccttttcctggtgtcctggggttgagcttgtgagaatggcttcagtaatttgaagcgcggattggatgtcagcttattccgctgaggtgttcgctccggacgtcctgagagccctactcagcacccgccagcgcgtacccctcacggtgctgggggccgctagtcagggagcgaaatccatgcaggccagacagaaggaaggacatttacagcaacagaaacgtgcatgccccagaactaccaaagacttgagctggcggggatgacggaggcattgtgttgatcaatgggtgtggtcgcttgtttgaaatgtgacttcccaggtcaaagactgtcaatgtagtgcttattaaaatttctatttgagcttaatt

SEQ ID NO: 430672 - DNA, 2400 bp, Homo sapiens
cccggggaggggaggagaggagaacttagagaaggaaggcggcgggtgtcagggctatgagtgcttttaaggaaggtctccatagaaggttcccccagcaaagtagggaggggtactccccgagaggagtcgaggtgccggagcctgctgcctcgccgacgctgggaggagccccgtgtcccgccgcgcttgccaagggttggctgcgcgtgcggcgggagtagaggcgccttgcgcaccaggaagtgactgtttccccgccgcagcaaaccaggccatccgctggccttttagtttgccgcctcaggtggatttcagtgtgttctttggatggcaggccttaagagaagagtcccactgcacagcctcagatacttcatctccatggtgggtctcttctccaaaccaggactgcttccctggtatgccagaaatccaccaggatggtcacagctctttctgggcacagtatgtaagggagatttcacccgtgtgatagccacgaaatgtcagaaaggacaaaaaagtcagaagaaaccaagccatcttggaccactagatggttcctggcaggaaaggctggctgatgttgtgacaccactctggaggttgagctatgaagaacagctcaaggtgaaatttgcagctcagaagaaaattttacaaagactagagtcttacatccaaatgctcaatggagtcagtgtgacaacggctgtacccaaatctgagaggctctcttgtcttctccatcctattataccctctcctgtcatcaatggttaccgaaataagtccaccttctctgtgaaccgaggtccagatggcaatccaaagactgtggggttctacctgggaacttggagagatgggaacgttgtctgtgtgcagtctaatcatctgaaaaacatccctgagaaacacagtcaagtggcgcagtactatgaagtattccttcgacagtctccattggagccctgccttgtatttcatgaaggtggatactggcgtgagctcacagtccgcaccaatagccaagggcacacaatggctatcatcactttccatccccagaaattaagtcaggaggagctccatgttcagaaggagattgtaaaggaatttttcatcagaggtcctggagcagcctgtggcttgacctcactttacttccaggaaagtaccatgacccgttgcagccatcagcagtctccctatcagcttctgtttggggaaccctacatctttgaagaacttctgagcttgaagatccgcatctctccagatgcctttttccagattaacacagctggtgcagagatgctgtatcggactgtgggggagctgactggagtgaactctgacaccatccttcttgacatctgctgtggaactggtgtgattggcctctctctggctcagcatacatctcgggtccttgggattgaattgttggagcaggcagtggaggatgcaagatggactgcagccttcaatggcatcaccaactctgaatttcatactggtcaagcagagaagattttgccagggctgctaaagtcaaaggaagatggacagtcaattgttgctgtggtgaacccagcccgtgccggactgcattacaaggtgattcaagccattcgaaacttcagggccatccacacgctagtttttgtttcctgcaagctccatggtgaatccactaggaatgtcattgaacggagtctcatcttgctggagtgcagtggcatggtctcggctcactgcagcctccacctcccaggttcaagcgattctcctgcctcagcctcctgagtagctggtattacaggctgtgctgtcctccagaccctgctaagaagctcttaggcgagccctttgtcctgcagcaagctgtacctgtggatttgttccctcacaccccacattgtgagctggtgctcctctttactcgataagcagcctcctagaagacagcaggctatttgttaaggctgaagtttcagaaactttcaggtttggcatattgctacattgcagaccctgggagcattacagtggaaaccaatctttggtttgtgaataggaagaatctattaggcctctggtctgaggcagattttttttttgagatggagtctcactcagcctgggtgacagagtgagacaccatctcaaaaaaaaaaaaaaaaagaaaatgtagttatccctaggagcaatagcaccaattaactctcacccgtggaggaagaattggttattggagagaccctaagggaaaggagattttcagagagactgaatacctataattgtgctgtgtagtgtggaggcaaaaagctccaaaatctagtataacataataaactggatattgaaaactgactgtaaataaatact

SEQ ID NO: 430673 - DNA, 1134 bp, Homo sapiens
  misc_feature (863)..(863): n is a, c, g, or t
cccggggaggggaggagaggagaacttagagaaggaaggcggcgggtgtcagggctatgagtgcttttaaggaaggtctccatagaaggttcccccagcaaagtagggaggggtactccccgagaggagtcgaggtgccggagcctgctgcctcgccgacgctgggaggagccccgtgtcccgccgcgcttgccaagggttggctgcgcgtgcggcgggagtagaggcgccttgcgcaccaggaagtgactgtttccccgccgcagcaaaccaggccatccgctggccttttagtttgccgcctcagaaaactccctactatgccaaactgtccgcggggcggggaatggaggaggcaggcggggctggagacgggacccgacggtgactgcgcaaggtggatttcagtgtgttctttggatggcaggccttaagagaagagtcccactgcacagcctcagatacttcatctccatggtgggtctcttctccaaaccaggactgcttccctggtatgccagaaatccaccaggatggtcacagctctttctgggcacagtatgtaagggagatttcacccgtgtgatagccacgaaatgtcagaaaggacaaaaaagtcagaagaaaccaagccatcttggaccactagatggttcctggcaggaaaggctggctgatgttgtgacaccactctggaggttgagctatgaagaacagctcaaggaaacttcgcagtccagaagaacttttccaagactagagtcttacatcccaaatgctccatggcgtccggcgtgccccgggctggtcccaatctgggggggctccctggtttccctcctttttaagcctctcctgtggtnaccggctcccagtaggtccctcttctgtgaacccgggtcccaggcgcaccccacccagtgagggggactcaccggcgaaaccagagaaggtacgcaatagtgaggaccgaaacacgtagaaactccggacacatcacgtggggacatgaatatatcgcaccatagagagccgatatagagagagggacacacacaacacagagaattccacaatgtgaacagcaaagaacctgagcactgtcacgctctgtcacgagctagcgtcctccgt

SEQ ID NO: 430674 - DNA, 216 bp, Homo sapiens
ggctcacacaaaacagctgacactgactaaggaacctgtgcatttgctcagagatgctacaatttttagatatttctaagacttctggattcttgaggtagttaaggattaaaaccagaaacagtcgaggttttttaaaagcagggttaatgctcccgtaggttaaggctcccggaggttaaggctcccggaggtaaggctccaggatcctctaag

SEQ ID NO: 430675 - DNA, 3124 bp, Homo sapiens
cccggggaggggaggagaggagaacttagagaaggaaggcggcgggtgtcagggctatgagtgcttttaaggaaggtctccatagaaggttcccccagcaaagtagggaggggtactccccgagaggagtcgaggtgccggagcctgctgcctcgccgacgctgggaggagccccgtgtcccgccgcgcttgccaagggttggctgcgcgtgcggcgggagtagaggcgccttgcgcaccaggaagtgactgtttccccgccgcagcaaaccaggccatccgctggccttttagtttgccgcctcaggtttgtaagaggatttattggttacgaaggaaggtggatttcagtgtgttctttggatggcaggccttaagagaagagtcccactgcacagcctcagatacttcatctccatggtgggtctcttctccaaaccaggactgcttccctggtatgccagaaatccaccaggatggtcacagctctttctgggcacagtatgtaagggagatttcacccgtgtgatagccacgaaatgtcagaaaggacaaaaaagtcagaagaaaccaagccatcttggaccactagatggttcctggcaggaaaggctggctgatgttgtgacaccactctggaggttgagctatgaagaacagctcaaggtgaaatttgcagctcagaagaaaattttacaaagactagagtcttacatccaaatgctcaatggagtcagtgtgacaacggctgtacccaaatctgagaggctctcttgtcttctccatcctattataccctctcctgtcatcaatggttaccgaaataagtccaccttctctgtgaaccgaggtccagatggcaatccaaagactgtggggttctacctgggaacttggagagatgggaacgttgtctgtgtgcagtctaatcatctgaaaaacatccctgagaaacacagtcaagtggcgcagtactatgaagtattccttcgacagtctccattggagccctgccttgtatttcatgaaggtggatactggcgtgagctcacagtccgcaccaatagccaagggcacacaatggctatcatcactttccatccccagaaattaagtcaggaggagctccatgttcagaaggagattgtaaaggaatttttcatcagaggtcctggagcagcctgtggcttgacctcactttacttccaggaaagtaccatgacccgttgcagccatcagcagtctccctatcagcttctgtttggggaaccctacatctttgaagaacttctgagcttgaagatccgcatctctccagatgcctttttccagattaacacagctggtgcagagatgctgtatcggactgtgggggagctgactggagtgaactctgacaccatccttcttgacatctgctgtggaactggtgtgattggcctctctctggctcagcatacatctcgggtccttgggattgaattgttggagcaggcagtggaggatgcaagatggactgcagccttcaatggcatcaccaactctgaatttcatactggtcaagcagagaagattttgccagggctgctaaagtcaaaggaagatggacagtcaattgttgctgtggtgaacccagcccgtgccggactgcattacaaggtgattcaagccattcgaaacttcagggccatccacacgctagtttttgtttcctgcaagctccatggtgaatccactaggaatgtcattgagctgtgctgtcctccagaccctgctaagaagctcttaggcgagccctttgtcctgcagcaagctgtacctgtggatttgttccctcacaccccacattgtgagctggtgctcctctttactcgataagcagcctcctagaagacagcaggctatttgttaaggctgaagtttcagaaactttcaggtttggcatattgctacattgcagaccctgggagcattacagtggaaaccaatctttggtttgtgaataggaagaatctattaggcctctggtctgaggcagattttttttttgagatggagtctcactcttgcccaggctggagtgtcgtggcgtgatctcagctcactgcaacctccgcctcccgggttcaagtgattctcgtgcctcagcttccccagtagctaggattaaaggtgcgtgccaccatgcccggctaatttttgtatttttggtagagacagggtttcaccatgttggccaggctggtctcaaactcctgacctcaagtgatccacccgcctcggcctctcaaagtgctgggattataggcgtgagccaccacaccccgccgcggctgacttaaccttagatttcagattccctttcaatcatgcccgtttgcttgggtttgaccactccccactcctggatctggactgtttcttcctgttgctgtcagccttggttctagtttatagtcttgtctcctccgtttctgcttatggtgtggacaaatgaccttttttaagcagctggtaataattttacattgactggagcctgtgcatttgctcagagatgctacaatttttagatatttctaagacttctggattcttgaggtagttaaggattaaaaccagaaacagtcgaggttttttaaaagcagggtaagccatgaagtgaatacagggtgactgagtgatcatcagatgagattaattcttttgggttttcttggttttaaggcatctcgaatgccccttgaaaatgtagttttccctggtggtgggcacctgtaatcccagctactcgggaggctgaggcaggataattgcttgaacctgggaggtggaggttgcagtgggctgagattgtgccactgcactccagcctgggtgacagagtgagacaccatctcaaaaaaaaaaaaaaaaagaaaatgtagttatccctaggagcaatagcaccaattaactctcacccgtggaggaagaattggttattggagagaccctaagggaaaggagattttcagagagactgaatacctataattgtgctgtgtagtgtggaggcaaaaagctccaaaatctagtataacataataaactggatattgaaaactgactgtaaataaatact

SEQ ID NO: 430676 - DNA, 2933 bp, Homo sapiens
cccggggaggggaggagaggagaacttagagaaggaaggcggcgggtgtcagggctatgagtgcttttaaggaaggtctccatagaaggttcccccagcaaagtagggaggggtactccccgagaggagtcgaggtgccggagcctgctgcctcgccgacgctgggaggagccccgtgtcccgccgcgcttgccaagggttggctgcgcgtgcggcgggagtagaggcgccttgcgcaccaggaagtgactgtttccccgccgcagcaaaccaggccatccgctggccttttagtttgccgcctcaggtttgtaagaggatttattggttacgaaggaaggtggatttcagtgtgttctttggatggcaggccttaagagaagagtcccactgcacagcctcagatacttcatctccatggctggctgatgttgtgacaccactctggaggttgagctatgaagaacagctcaaggtgaaatttgcagctcagaagaaaattttacaaagactagagtcttacatccaaatgctcaatggagtcagtgtgacaacggctgtacccaaatctgagaggctctcttgtcttctccatcctattataccctctcctgtcatcaatggttaccgaaataagtccaccttctctgtgaaccgaggtccagatggcaatccaaagactgtggggttctacctgggaacttggagagatgggaacgttgtctgtgtgcagtctaatcatctgaaaaacatccctgagaaacacagtcaagtggcgcagtactatgaagtattccttcgacagtctccattggagccctgccttgtatttcatgaaggtggatactggcgtgagctcacagtccgcaccaatagccaagggcacacaatggctatcatcactttccatccccagaaattaagtcaggaggagctccatgttcagaaggagattgtaaaggaatttttcatcagaggtcctggagcagcctgtggcttgacctcactttacttccaggaaagtaccatgacccgttgcagccatcagcagtctccctatcagcttctgtttggggaaccctacatctttgaagaacttctgagcttgaagatccgcatctctccagatgcctttttccagattaacacagctggtgcagagatgctgtatcggactgtgggggagctgactggagtgaactctgacaccatccttcttgacatctgctgtggaactggtgtgattggcctctctctggctcagcatacatctcgggtccttgggattgaattgttggagcaggcagtggaggatgcaagatggactgcagccttcaatggcatcaccaactctgaatttcatactggtcaagcagagaagattttgccagggctgctaaagtcaaaggaagatggacagtcaattgttgctgtggtgaacccagcccgtgccggactgcattacaaggtgattcaagccattcgaaacttcagggccatccacacgctagtttttgtttcctgcaagctccatggtgaatccactaggaatgtcattgagctgtgctgtcctccagaccctgctaagaagctcttaggcgagccctttgtcctgcagcaagctgtacctgtggatttgttccctcacaccccacattgtgagctggtgctcctctttactcgataagcagcctcctagaagacagcaggctatttgttaaggctgaagtttcagaaactttcaggtttggcatattgctacattgcagaccctgggagcattacagtggaaaccaatctttggtttgtgaataggaagaatctattaggcctctggtctgaggcagattttttttttgagatggagtctcactcttgcccaggctggagtgtcgtggcgtgatctcagctcactgcaacctccgcctcccgggttcaagtgattctcgtgcctcagcttccccagtagctaggattaaaggtgcgtgccaccatgcccggctaatttttgtatttttggtagagacagggtttcaccatgttggccaggctggtctcaaactcctgacctcaagtgatccacccgcctcggcctctcaaagtgctgggattataggcgtgagccaccacaccccgccgcggctgacttaaccttagatttcagattccctttcaatcatgcccgtttgcttgggtttgaccactccccactcctggatctggactgtttcttcctgttgctgtcagccttggttctagtttatagtcttgtctcctccgtttctgcttatggtgtggacaaatgaccttttttaagcagctggtaataattttacattgactggagcctgtgcatttgctcagagatgctacaatttttagatatttctaagacttctggattcttgaggtagttaaggattaaaaccagaaacagtcgaggttttttaaaagcagggtaagccatgaagtgaatacagggtgactgagtgatcatcagatgagattaattcttttgggttttcttggttttaaggcatctcgaatgccccttgaaaatgtagttttccctggtggtgggcacctgtaatcccagctactcgggaggctgaggcaggataattgcttgaacctgggaggtggaggttgcagtgggctgagattgtgccactgcactccagcctgggtgacagagtgagacaccatctcaaaaaaaaaaaaaaaaagaaaatgtagttatccctaggagcaatagcaccaattaactctcacccgtggaggaagaattggttattggagagaccctaagggaaaggagattttcagagagactgaatacctataattgtgctgtgtagtgtggaggcaaaaagctccaaaatctagtataacataataaactggatattgaaaactgactgtaaataaatact

SEQ ID NO: 430677 - DNA, 3240 bp, Homo sapiens
cccggggaggggaggagaggagaacttagagaaggaaggcggcgggtgtcagggctatgagtgcttttaaggaaggtctccatagaaggttcccccagcaaagtagggaggggtactccccgagaggagtcgaggtgccggagcctgctgcctcgccgacgctgggaggagccccgtgtcccgccgcgcttgccaagggttggctgcgcgtgcggcgggagtagaggcgccttgcgcaccaggaagtgactgtttccccgccgcagcaaaccaggccatccgctggccttttagtttgccgcctcaggtttgtaagaggatttattggttacgaaggaagcaaggaatagtgtctggagccggtccagctgaaggaagggtgagcagagagtgcaagcaggacccttgtcggtgggtgaacattttgctccaaaagggatccttggccctgcgcaggtggatttcagtgtgttctttggatggcaggccttaagagaagagtcccactgcacagcctcagatacttcatctccatggtgggtctcttctccaaaccaggactgcttccctggtatgccagaaatccaccaggatggtcacagctctttctgggcacagtatgtaagggagatttcacccgtgtgatagccacgaaatgtcagaaaggacaaaaaagtcagaagaaaccaagccatcttggaccactagatggttcctggcaggaaaggctggctgatgttgtgacaccactctggaggttgagctatgaagaacagctcaaggtgaaatttgcagctcagaagaaaattttacaaagactagagtcttacatccaaatgctcaatggagtcagtgtgacaacggctgtacccaaatctgagaggctctcttgtcttctccatcctattataccctctcctgtcatcaatggttaccgaaataagtccaccttctctgtgaaccgaggtccagatggcaatccaaagactgtggggttctacctgggaacttggagagatgggaacgttgtctgtgtgcagtctaatcatctgaaaaacatccctgagaaacacagtcaagtggcgcagtactatgaagtattccttcgacagtctccattggagccctgccttgtatttcatgaaggtggatactggcgtgagctcacagtccgcaccaatagccaagggcacacaatggctatcatcactttccatccccagaaattaagtcaggaggagctccatgttcagaaggagattgtaaaggaatttttcatcagaggtcctggagcagcctgtggcttgacctcactttacttccaggaaagtaccatgacccgttgcagccatcagcagtctccctatcagcttctgtttggggaaccctacatctttgaagaacttctgagcttgaagatccgcatctctccagatgcctttttccagattaacacagctggtgcagagatgctgtatcggactgtgggggagctgactggagtgaactctgacaccatccttcttgacatctgctgtggaactggtgtgattggcctctctctggctcagcatacatctcgggtccttgggattgaattgttggagcaggcagtggaggatgcaagatggactgcagccttcaatggcatcaccaactctgaatttcatactggtcaagcagagaagattttgccagggctgctaaagtcaaaggaagatggacagtcaattgttgctgtggtgaacccagcccgtgccggactgcattacaaggtgattcaagccattcgaaacttcagggccatccacacgctagtttttgtttcctgcaagctccatggtgaatccactaggaatgtcattgagctgtgctgtcctccagaccctgctaagaagctcttaggcgagccctttgtcctgcagcaagctgtacctgtggatttgttccctcacaccccacattgtgagctggtgctcctctttactcgataagcagcctcctagaagacagcaggctatttgttaaggctgaagtttcagaaactttcaggtttggcatattgctacattgcagaccctgggagcattacagtggaaaccaatctttggtttgtgaataggaagaatctattaggcctctggtctgaggcagattttttttttgagatggagtctcactcttgcccaggctggagtgtcgtggcgtgatctcagctcactgcaacctccgcctcccgggttcaagtgattctcgtgcctcagcttccccagtagctaggattaaaggtgcgtgccaccatgcccggctaatttttgtatttttggtagagacagggtttcaccatgttggccaggctggtctcaaactcctgacctcaagtgatccacccgcctcggcctctcaaagtgctgggattataggcgtgagccaccacaccccgccgcggctgacttaaccttagatttcagattccctttcaatcatgcccgtttgcttgggtttgaccactccccactcctggatctggactgtttcttcctgttgctgtcagccttggttctagtttatagtcttgtctcctccgtttctgcttatggtgtggacaaatgaccttttttaagcagctggtaataattttacattgactggagcctgtgcatttgctcagagatgctacaatttttagatatttctaagacttctggattcttgaggtagttaaggattaaaaccagaaacagtcgaggttttttaaaagcagggtaagccatgaagtgaatacagggtgactgagtgatcatcagatgagattaattcttttgggttttcttggttttaaggcatctcgaatgccccttgaaaatgtagttttccctggtggtgggcacctgtaatcccagctactcgggaggctgaggcaggataattgcttgaacctgggaggtggaggttgcagtgggctgagattgtgccactgcactccagcctgggtgacagagtgagacaccatctcaaaaaaaaaaaaaaaaagaaaatgtagttatccctaggagcaatagcaccaattaactctcacccgtggaggaagaattggttattggagagaccctaagggaaaggagattttcagagagactgaatacctataattgtgctgtgtagtgtggaggcaaaaagctccaaaatctagtataacataataaactggatattgaaaactgactgtaaataaatact

SEQ ID NO: 430678 - DNA, 2853 bp, Homo sapiens
cccggggaggggaggagaggagaacttagagaaggaaggcggcgggtgtcagggctatgagtgcttttaaggaaggtctccatagaaggttcccccagcaaagtagggaggggtactccccgagaggagtcgaggtgccggagcctgctgcctcgccgacgctgggaggagccccgtgtcccgccgcgcttgccaagggttggctgcgcgtgcggcgggagtagaggcgccttgcgcaccaggaagtgactgtttccccgccgcagcaaaccaggccatccgctggccttttagtttgccgcctcaggtttgtaagaggatttattggttacgaaggaaggctggctgatgttgtgacaccactctggaggttgagctatgaagaacagctcaaggtgaaatttgcagctcagaagaaaattttacaaagactagagtcttacatccaaatgctcaatggagtcagtgtgacaacggctgtacccaaatctgagaggctctcttgtcttctccatcctattataccctctcctgtcatcaatggttaccgaaataagtccaccttctctgtgaaccgaggtccagatggcaatccaaagactgtggggttctacctgggaacttggagagatgggaacgttgtctgtgtgcagtctaatcatctgaaaaacatccctgagaaacacagtcaagtggcgcagtactatgaagtattccttcgacagtctccattggagccctgccttgtatttcatgaaggtggatactggcgtgagctcacagtccgcaccaatagccaagggcacacaatggctatcatcactttccatccccagaaattaagtcaggaggagctccatgttcagaaggagattgtaaaggaatttttcatcagaggtcctggagcagcctgtggcttgacctcactttacttccaggaaagtaccatgacccgttgcagccatcagcagtctccctatcagcttctgtttggggaaccctacatctttgaagaacttctgagcttgaagatccgcatctctccagatgcctttttccagattaacacagctggtgcagagatgctgtatcggactgtgggggagctgactggagtgaactctgacaccatccttcttgacatctgctgtggaactggtgtgattggcctctctctggctcagcatacatctcgggtccttgggattgaattgttggagcaggcagtggaggatgcaagatggactgcagccttcaatggcatcaccaactctgaatttcatactggtcaagcagagaagattttgccagggctgctaaagtcaaaggaagatggacagtcaattgttgctgtggtgaacccagcccgtgccggactgcattacaaggtgattcaagccattcgaaacttcagggccatccacacgctagtttttgtttcctgcaagctccatggtgaatccactaggaatgtcattgagctgtgctgtcctccagaccctgctaagaagctcttaggcgagccctttgtcctgcagcaagctgtacctgtggatttgttccctcacaccccacattgtgagctggtgctcctctttactcgataagcagcctcctagaagacagcaggctatttgttaaggctgaagtttcagaaactttcaggtttggcatattgctacattgcagaccctgggagcattacagtggaaaccaatctttggtttgtgaataggaagaatctattaggcctctggtctgaggcagattttttttttgagatggagtctcactcttgcccaggctggagtgtcgtggcgtgatctcagctcactgcaacctccgcctcccgggttcaagtgattctcgtgcctcagcttccccagtagctaggattaaaggtgcgtgccaccatgcccggctaatttttgtatttttggtagagacagggtttcaccatgttggccaggctggtctcaaactcctgacctcaagtgatccacccgcctcggcctctcaaagtgctgggattataggcgtgagccaccacaccccgccgcggctgacttaaccttagatttcagattccctttcaatcatgcccgtttgcttgggtttgaccactccccactcctggatctggactgtttcttcctgttgctgtcagccttggttctagtttatagtcttgtctcctccgtttctgcttatggtgtggacaaatgaccttttttaagcagctggtaataattttacattgactggagcctgtgcatttgctcagagatgctacaatttttagatatttctaagacttctggattcttgaggtagttaaggattaaaaccagaaacagtcgaggttttttaaaagcagggtaagccatgaagtgaatacagggtgactgagtgatcatcagatgagattaattcttttgggttttcttggttttaaggcatctcgaatgccccttgaaaatgtagttttccctggtggtgggcacctgtaatcccagctactcgggaggctgaggcaggataattgcttgaacctgggaggtggaggttgcagtgggctgagattgtgccactgcactccagcctgggtgacagagtgagacaccatctcaaaaaaaaaaaaaaaaagaaaatgtagttatccctaggagcaatagcaccaattaactctcacccgtggaggaagaattggttattggagagaccctaagggaaaggagattttcagagagactgaatacctataattgtgctgtgtagtgtggaggcaaaaagctccaaaatctagtataacataataaactggatattgaaaactgactgtaaataaatact

SEQ ID NO: 430679 - DNA, 3303 bp, Homo sapiens
cccggggaggggaggagaggagaacttagagaaggaaggcggcgggtgtcagggctatgagtgcttttaaggaaggtctccatagaaggttcccccagcaaagtagggaggggtactccccgagaggagtcgaggtgccggagcctgctgcctcgccgacgctgggaggagccccgtgtcccgccgcgcttgccaagggttggctgcgcgtgcggcgggagtagaggcgccttgcgcaccaggaagtgactgtttccccgccgcagcaaaccaggccatccgctggccttttagtttgccgcctcagaaaactccctactatgccaaactgtccgcggggcggggaatggaggaggcaggcggggctggagacgggacccgacggtgactgcgcaaggtcgtgtacggcccagcgtgggcctgtgccctaactcctcccactcccttactttctgtccttcccgggccctgcagaccggccaagtttagtggtagcctttcctagtgtctcctctttgttaacccttcctacagacacagtgggcagaacttgcctaaagaagaagggaatggaagggctagtggagtcttgttggggagacaaggacctgactgcctgtgggctgcattcgggacacgacacagcagtcaacccatttgcttgtttggtttagcaaggaatagtgtctggagccggtccagctgaaggaagggtgagcagagagtgcaagcaggacccttgtcggtgggtgaacattttgctccaaaagggatccttggccctgcgcaggctggctgatgttgtgacaccactctggaggttgagctatgaagaacagctcaaggtgaaatttgcagctcagaagaaaattttacaaagactagagtcttacatccaaatgctcaatggagtcagtgtgacaacggctgtacccaaatctgagaggctctcttgtcttctccatcctattataccctctcctgtcatcaatggttaccgaaataagtccaccttctctgtgaaccgaggtccagatggcaatccaaagactgtggggttctacctgggaacttggagagatgggaacgttgtctgtgtgcagtctaatcatctgaaaaacatccctgagaaacacagtcaagtggcgcagtactatgaagtattccttcgacagtctccattggagccctgccttgtatttcatgaaggtggatactggcgtgagctcacagtccgcaccaatagccaagggcacacaatggctatcatcactttccatccccagaaattaagtcaggaggagctccatgttcagaaggagattgtaaaggaatttttcatcagaggtcctggagcagcctgtggcttgacctcactttacttccaggaaagtaccatgacccgttgcagccatcagcagtctccctatcagcttctgtttggggaaccctacatctttgaagaacttctgagcttgaagatccgcatctctccagatgcctttttccagattaacacagctggtgcagagatgctgtatcggactgtgggggagctgactggagtgaactctgacaccatccttcttgacatctgctgtggaactggtgtgattggcctctctctggctcagcatacatctcgggtccttgggattgaattgttggagcaggcagtggaggatgcaagatggactgcagccttcaatggcatcaccaactctgaatttcatactggtcaagcagagaagattttgccagggctgctaaagtcaaaggaagatggacagtcaattgttgctgtggtgaacccagcccgtgccggactgcattacaaggtgattcaagccattcgaaacttcagggccatccacacgctagtttttgtttcctgcaagctccatggtgaatccactaggaatgtcattgagctgtgctgtcctccagaccctgctaagaagctcttaggcgagccctttgtcctgcagcaagctgtacctgtggatttgttccctcacaccccacattgtgagctggtgctcctctttactcgataagcagcctcctagaagacagcaggctatttgttaaggctgaagtttcagaaactttcaggtttggcatattgctacattgcagaccctgggagcattacagtggaaaccaatctttggtttgtgaataggaagaatctattaggcctctggtctgaggcagattttttttttgagatggagtctcactcttgcccaggctggagtgtcgtggcgtgatctcagctcactgcaacctccgcctcccgggttcaagtgattctcgtgcctcagcttccccagtagctaggattaaaggtgcgtgccaccatgcccggctaatttttgtatttttggtagagacagggtttcaccatgttggccaggctggtctcaaactcctgacctcaagtgatccacccgcctcggcctctcaaagtgctgggattataggcgtgagccaccacaccccgccgcggctgacttaaccttagatttcagattccctttcaatcatgcccgtttgcttgggtttgaccactccccactcctggatctggactgtttcttcctgttgctgtcagccttggttctagtttatagtcttgtctcctccgtttctgcttatggtgtggacaaatgaccttttttaagcagctggtaataattttacattgactggagcctgtgcatttgctcagagatgctacaatttttagatatttctaagacttctggattcttgaggtagttaaggattaaaaccagaaacagtcgaggttttttaaaagcagggtaagccatgaagtgaatacagggtgactgagtgatcatcagatgagattaattcttttgggttttcttggttttaaggcatctcgaatgccccttgaaaatgtagttttccctggtggtgggcacctgtaatcccagctactcgggaggctgaggcaggataattgcttgaacctgggaggtggaggttgcagtgggctgagattgtgccactgcactccagcctgggtgacagagtgagacaccatctcaaaaaaaaaaaaaaaaagaaaatgtagttatccctaggagcaatagcaccaattaactctcacccgtggaggaagaattggttattggagagaccctaagggaaaggagattttcagagagactgaatacctataattgtgctgtgtagtgtggaggcaaaaagctccaaaatctagtataacataataaactggatattgaaaactgactgtaaataaatact

SEQ ID NO: 430680 - DNA, 2765 bp, Homo sapiens
cccggggaggggaggagaggagaacttagagaaggaaggcggcgggtgtcagggctatgagtgcttttaaggaaggtctccatagaaggttcccccagcaaagtagggaggggtactccccgagaggagtcgaggtgccggagcctgctgcctcgccgacgctgggaggagccccgtgtcccgccgcgcttgccaagggttggctgcgcgtgcggcgggagtagaggcgccttgcgcaccaggaagtgactgtttccccgccgcagcaaaccaggccatccgctggccttttagtttgccgcctcaggtggatttcagtgtgttctttggatggcaggccttaagagaagagtcccactgcacagcctcagatacttcatctccatggctggctgatgttgtgacaccactctggaggttgagctatgaagaacagctcaagcctgtcatcaatggttaccgaaataagtccaccttctctgtgaaccgaggtccagatggcaatccaaagactgtggggttctacctgggaacttggagagatgggaacgttgtctgtgtgcagtctaatcatctgaaaaacatccctgagaaacacagtcaagtggcgcagtactatgaagtattccttcgacagtctccattggagccctgccttgtatttcatgaaggtggatactggcgtgagctcacagtccgcaccaatagccaagggcacacaatggctatcatcactttccatccccagaaattaagtcaggaggagctccatgttcagaaggagattgtaaaggaatttttcatcagaggtcctggagcagcctgtggcttgacctcactttacttccaggaaagtaccatgacccgttgcagccatcagcagtctccctatcagcttctgtttggggaaccctacatctttgaagaacttctgagcttgaagatccgcatctctccagatgcctttttccagattaacacagctggtgcagagatgctgtatcggactgtgggggagctgactggagtgaactctgacaccatccttcttgacatctgctgtggaactggtgtgattggcctctctctggctcagcatacatctcgggtccttgggattgaattgttggagcaggcagtggaggatgcaagatggactgcagccttcaatggcatcaccaactctgaatttcatactggtcaagcagagaagattttgccagggctgctaaagtcaaaggaagatggacagtcaattgttgctgtggtgaacccagcccgtgccggactgcattacaaggtgattcaagccattcgaaacttcagggccatccacacgctagtttttgtttcctgcaagctccatggtgaatccactaggaatgtcattgagctgtgctgtcctccagaccctgctaagaagctcttaggcgagccctttgtcctgcagcaagctgtacctgtggatttgttccctcacaccccacattgtgagctggtgctcctctttactcgataagcagcctcctagaagacagcaggctatttgttaaggctgaagtttcagaaactttcaggtttggcatattgctacattgcagaccctgggagcattacagtggaaaccaatctttggtttgtgaataggaagaatctattaggcctctggtctgaggcagattttttttttgagatggagtctcactcttgcccaggctggagtgtcgtggcgtgatctcagctcactgcaacctccgcctcccgggttcaagtgattctcgtgcctcagcttccccagtagctaggattaaaggtgcgtgccaccatgcccggctaatttttgtatttttggtagagacagggtttcaccatgttggccaggctggtctcaaactcctgacctcaagtgatccacccgcctcggcctctcaaagtgctgggattataggcgtgagccaccacaccccgccgcggctgacttaaccttagatttcagattccctttcaatcatgcccgtttgcttgggtttgaccactccccactcctggatctggactgtttcttcctgttgctgtcagccttggttctagtttatagtcttgtctcctccgtttctgcttatggtgtggacaaatgaccttttttaagcagctggtaataattttacattgactggagcctgtgcatttgctcagagatgctacaatttttagatatttctaagacttctggattcttgaggtagttaaggattaaaaccagaaacagtcgaggttttttaaaagcagggtaagccatgaagtgaatacagggtgactgagtgatcatcagatgagattaattcttttgggttttcttggttttaaggcatctcgaatgccccttgaaaatgtagttttccctggtggtgggcacctgtaatcccagctactcgggaggctgaggcaggataattgcttgaacctgggaggtggaggttgcagtgggctgagattgtgccactgcactccagcctgggtgacagagtgagacaccatctcaaaaaaaaaaaaaaaaagaaaatgtagttatccctaggagcaatagcaccaattaactctcacccgtggaggaagaattggttattggagagaccctaagggaaaggagattttcagagagactgaatacctataattgtgctgtgtagtgtggaggcaaaaagctccaaaatctagtataacataataaactggatattgaaaactgactgtaaataaatact

SEQ ID NO: 430681 - DNA, 2530 bp, Homo sapiens
cccggggaggggaggagaggagaacttagagaaggaaggcggcgggtgtcagggctatgagtgcttttaaggaaggtctccatagaaggttcccccagcaaagtagggaggggtactccccgagaggagtcgaggtgccggagcctgctgcctcgccgacgctgggaggagccccgtgtcccgccgcgcttgccaagggttggctgcgcgtgcggcgggagtagaggcgccttgcgcaccaggaagtgactgtttccccgccgcagcaaaccaggccatccgctggccttttagtttgccgcctcagatgggaacgttgtctgtgtgcagtctaatcatctgaaaaacatccctgagaaacacagtcaagtggcgcagtactatgaagtattccttcgacagtctccattggagccctgccttgtatttcatgaaggtggatactggcgtgagctcacagtccgcaccaatagccaagggcacacaatggctatcatcactttccatccccagaaattaagtcaggaggagctccatgttcagaaggagattgtaaaggaatttttcatcagaggtcctggagcagcctgtggcttgacctcactttacttccaggaaagtaccatgacccgttgcagccatcagcagtctccctatcagcttctgtttggggaaccctacatctttgaagaacttctgagcttgaagatccgcatctctccagatgcctttttccagattaacacagctggtgcagagatgctgtatcggactgtgggggagctgactggagtgaactctgacaccatccttcttgacatctgctgtggaactggtgtgattggcctctctctggctcagcatacatctcgggtccttgggattgaattgttggagcaggcagtggaggatgcaagatggactgcagccttcaatggcatcaccaactctgaatttcatactggtcaagcagagaagattttgccagggctgctaaagtcaaaggaagatggacagtcaattgttgctgtggtgaacccagcccgtgccggactgcattacaaggtgattcaagccattcgaaacttcagggccatccacacgctagtttttgtttcctgcaagctccatggtgaatccactaggaatgtcattgagctgtgctgtcctccagaccctgctaagaagctcttaggcgagccctttgtcctgcagcaagctgtacctgtggatttgttccctcacaccccacattgtgagctggtgctcctctttactcgataagcagcctcctagaagacagcaggctatttgttaaggctgaagtttcagaaactttcaggtttggcatattgctacattgcagaccctgggagcattacagtggaaaccaatctttggtttgtgaataggaagaatctattaggcctctggtctgaggcagattttttttttgagatggagtctcactcttgcccaggctggagtgtcgtggcgtgatctcagctcactgcaacctccgcctcccgggttcaagtgattctcgtgcctcagcttccccagtagctaggattaaaggtgcgtgccaccatgcccggctaatttttgtatttttggtagagacagggtttcaccatgttggccaggctggtctcaaactcctgacctcaagtgatccacccgcctcggcctctcaaagtgctgggattataggcgtgagccaccacaccccgccgcggctgacttaaccttagatttcagattccctttcaatcatgcccgtttgcttgggtttgaccactccccactcctggatctggactgtttcttcctgttgctgtcagccttggttctagtttatagtcttgtctcctccgtttctgcttatggtgtggacaaatgaccttttttaagcagctggtaataattttacattgactggagcctgtgcatttgctcagagatgctacaatttttagatatttctaagacttctggattcttgaggtagttaaggattaaaaccagaaacagtcgaggttttttaaaagcagggtaagccatgaagtgaatacagggtgactgagtgatcatcagatgagattaattcttttgggttttcttggttttaaggcatctcgaatgccccttgaaaatgtagttttccctggtggtgggcacctgtaatcccagctactcgggaggctgaggcaggataattgcttgaacctgggaggtggaggttgcagtgggctgagattgtgccactgcactccagcctgggtgacagagtgagacaccatctcaaaaaaaaaaaaaaaaagaaaatgtagttatccctaggagcaatagcaccaattaactctcacccgtggaggaagaattggttattggagagaccctaagggaaaggagattttcagagagactgaatacctataattgtgctgtgtagtgtggaggcaaaaagctccaaaatctagtataacataataaactggatattgaaaactgactgtaaataaatact

SEQ ID NO: 430682 - DNA, 2317 bp, Homo sapiens
cccggggaggggaggagaggagaacttagagaaggaaggcggcgggtgtcagggctatgagtgcttttaaggaaggtctccatagaaggttcccccagcaaagtagggaggggtactccccgagaggagtcgaggtgccggagcctgctgcctcgccgacgctgggaggagccccgtgtcccgccgcgcttgccaagggttggctgcgcgtgcggcgggagtagaggcgccttgcgcaccaggaagtgactgtttccccgccgcagcaaaccaggccatccgctggccttttagtttgccgcctcaggtggatttcagtgtgttctttggatggcaggccttaagagaagagtcccactgcacagcctcagatacttcatctccatggtgggtctcttctccaaaccaggactgcttccctggtatgccagaaatccaccaggatggtcacagctctttctgggcacagtatgtaagggagatttcacccgtgtgatagccacgaaatgtcagaaaggacaaaaaagtcagaagaaaccaagccatcttggaccactagatggttcctggcaggaaaggctggctgatgttgtgacaccactctggaggttgagctatgaagaacagctcaaggtgaaatttgcagctcagaagaaaattttacaaagactagagtcttacatccaaatgctcaatggagtcagtgtgacaacggctgtacccaaatctgagaggctctcttgtcttctccatcctattataccctctcctgtcatcaatggttaccgaaataagtccaccttctctgtgaaccgaggtccagatggcaatccaaagactgtggggttctacctgggaacttggagagatgggaacgttgtctgtgtgcagtctaatcatctgaaaaacatccctgagaaacacagtcaagtggcgcagtactatgaagtattccttcgacagtctccattggagccctgccttgtatttcatgaaggtggatactggcgtgagctcacagtccgcaccaatagccaagggcacacaatggctatcatcactttccatccccagaaattaagtcaggaggagctccatgttcagaaggagattgtaaaggaatttttcatcagaggtcctggagcagcctgtggcttgacctcactttacttccaggaaagtaccatgacccgttgcagccatcagcagtctccctatcagcttctgtttggggaaccctacatctttgaagaacttctgagcttgaagatccgcatctctccagatgcctttttccagattaacacagctggtgcagagatgctgtatcggactgtgggggagctgactggagtgaactctgacaccatccttcttgacatctgctgtggaactggtgtgattggcctctctctggctcagcatacatctcgggtccttgggattgaattgttggagcaggcagtggaggatgcaagatggactgcagccttcaatggcatcaccaactctgaatttcatactggtcaagcagagaagattttgccagggctgctaaagtcaaaggaagatggacagtcaattgttgctgtggtgaacccagcccgtgccggactgcattacaaggtgattcaagccattcgaaacttcagggccatccacacgctagtttttgtttcctgcaagctccatggtgaatccactaggaatgtcattgagctgtgctgtcctccagaccctgctaagaagctcttaggcgagccctttgtcctgcagcaagctgtacctgtggatttgttccctcacaccccacattgtgagctggtgctcctctttactcgataagcagcctcctagaagacagcaggctatttgttaaggctgaagtttcagaaactttcaggtttggcatattgctacattgcagaccctgggagcattacagtggaaaccaatctttggtttgtgaataggaagaatctattaggcctctggtctgaggcagattttttttttgagatggagtctcactgcagtgggctgagattgtgccactgcactccagcctgggtgacagagtgagacaccatctcaaaaaaaaaaaaaaaaagaaaatgtagttatccctaggagcaatagcaccaattaactctcacccgtggaggaagaattggttattggagagaccctaagggaaaggagattttcagagagactgaatacctataattgtgctgtgtagtgtggaggcaaaaagctccaaaatctagtataacataataaactggatattgaaaactgactgtaaataaatact

SEQ ID NO: 430683 - DNA, 2212 bp, Homo sapiens
cccggggaggggaggagaggagaacttagagaaggaaggcggcgggtgtcagggctatgagtgcttttaaggaaggtctccatagaaggttcccccagcaaagtagggaggggtactccccgagaggagtcgaggtgccggagcctgctgcctcgccgacgctgggaggagccccgtgtcccgccgcgcttgccaagggttggctgcgcgtgcggcgggagtagaggcgccttgcgcaccaggaagtgactgtttccccgccgcagcaaaccaggccatccgctggccttttagtttgccgcctcaggtggatttcagtgtgttctttggatggcaggccttaagagaagagtcccactgcacagcctcagatacttcatctccatggtgggtctcttctccaaaccaggactgcttccctggtatgccagaaatccaccaggatggtcacagctctttctgggcacagtatgtaagggagatttcacccgtgtgatagccacgaaatgtcagaaaggacaaaaaagtcagaagaaaccaagccatcttggaccactagatggttcctggcaggaaaggctggctgatgttgtgacaccactctggaggttgagctatgaagaacagctcaaggtgaaatttgcagctcagaagaaaattttacaaagactagagtcttacatccaaatgctcaatggagtcagtgtgacaacggctgtacccaaatctgagaggctctcttgtcttctccatcctattataccctctcctgtcatcaatggttaccgaaataagtccaccttctctgtgaaccgaggtccagatggcaatccaaagactgtggggttctacctgggaacttggagagatgggaacgttgtctgtgtgcagtctaatcatctgaaaaacatccctgagaaacacagtcaagtggcgcagtactatgaagtattccttcgacagtctccattggagccctgccttgtatttcatgaaggtggatactggcgtgagctcacagtccgcaccaatagccaagggcacacaatggctatcatcactttccatccccagaaattaagtcaggaggagctccatgttcagaaggagattgtaaaggaatttttcatcagaggtcctggagcagcctgtggcttgacctcactttacttccaggaaagtaccatgacccgttgcagccatcagcagtctccctatcagcttctgtttggggaaccctacatctttgaagaacttctgagcttgaagatccgcatctctccagatgcctttttccagattaacacagctggtgcagagatgctgtatcggactgtgggggagctgactggagtgaactctgacaccatccttcttgacatctgctgtggaactggtgtgattggcctctctctggctcagcatacatctcgggtccttgggattgaattgttggagcaggcagtggaggatgcaagatggactgcagccttcaatggcatcaccaactctgaatttcatactggtcaagcagagaagattttgccagggctgctaaagtcaaaggaagatggacagtcaattgttgctgtggtgaacccagcccgtgccggactgcattacaaggtgattcaagccattcgaaacttcagggccatccacacgctagtttttgtttcctgcaagctccatggtgaatccactaggaatgtcattgagctgtgctgtcctccagaccctgctaagaagctcttaggcgagccctttgtcctgcagcaagctgtacctgtggatttgttccctcacaccccacattgtgagctggtgctcctctttactcgataagcagcctcctagaagacagcaggctatttgttaaggctgaagtttcagaaactttcaggtttggcatattgctacattgcaggcagtgggctgagattgtgccactgcactccagcctgggtgacagagtgagacaccatctcaaaaaaaaaaaaaaaaagaaaatgtagttatccctaggagcaatagcaccaattaactctcacccgtggaggaagaattggttattggagagaccctaagggaaaggagattttcagagagactgaatacctataattgtgctgtgtagtgtggaggcaaaaagctccaaaatctagtataacataataaactggatattgaaaactgactgtaaataaatact

SEQ ID NO: 430684 - DNA, 2849 bp, Homo sapiens
cccggggaggggaggagaggagaacttagagaaggaaggcggcgggtgtcagggctatgagtgcttttaaggaaggtctccatagaaggttcccccagcaaagtagggaggggtactccccgagaggagtcgaggtgccggagcctgctgcctcgccgacgctgggaggagccccgtgtcccgccgcgcttgccaagggttggctgcgcgtgcggcgggagtagaggcgccttgcgcaccaggaagtgactgtttccccgccgcagcaaaccaggccatccgctggccttttagtttgccgcctcaggtggatttcagtgtgttctttggatggcaggccttaagagaagagtcccactgcacagcctcagatacttcatctccatggtgggtctcttctccaaaccaggactgcttccctggtatgccagaaatccaccaggatggtcacagctctttctgggcacagtatgtaagggagatttcacccgtgtgatagccacgaaatgtcagaaaggacaaaaaagtcagaagaaaccaagccatcttggaccactagatggttcctggcaggaaaggctggctgatgttgtgacaccactctggaggttgagctatgaagaacagctcaaggtgaaatttgcagctcagaagaaaattttacaaagactagagtcttacatccaaatgctcaatggagtcagtgtgacaacggctgtacccaaatctgagaggctctcttgtcttctccatcctattataccctctcctgtcatcaatggttaccgaaataagtccaccttctctgtgaaccgaggtccagatggcaatccaaagactgtggggttctacctgggaacttggagagatgggaacgttgtctgtgtgcagtctaatcatctgaaaaacatccctgagaaacacagtcaagtggcgcagtaccatgacccgttgcagccatcagcagtctccctatcagcttctgtttggggaaccctacatctttgaagaacttctgagcttgaagatccgcatctctccagatgcctttttccagattaacacagctggtgcagagatgctgtatcggactgtgggggagctgactggagtgaactctgacaccatccttcttgacatctgctgtggaactggtgtgattggcctctctctggctcagcatacatctcgggtccttgggattgaattgttggagcaggcagtggaggatgcaagatggactgcagccttcaatggcatcaccaactctgaatttcatactggtcaagcagagaagattttgccagggctgctaaagtcaaaggaagatggacagtcaattgttgctgtggtgaacccagcccgtgccggactgcattacaaggtgattcaagccattcgaaacttcagggccatccacacgctagtttttgtttcctgcaagctccatggtgaatccactaggaatgtcattgagctgtgctgtcctccagaccctgctaagaagctcttaggcgagccctttgtcctgcagcaagctgtacctgtggatttgttccctcacaccccacattgtgagctggtgctcctctttactcgataagcagcctcctagaagacagcaggctatttgttaaggctgaagtttcagaaactttcaggtttggcatattgctacattgcagaccctgggagcattacagtggaaaccaatctttggtttgtgaataggaagaatctattaggcctctggtctgaggcagattttttttttgagatggagtctcactcttgcccaggctggagtgtcgtggcgtgatctcagctcactgcaacctccgcctcccgggttcaagtgattctcgtgcctcagcttccccagtagctaggattaaaggtgcgtgccaccatgcccggctaatttttgtatttttggtagagacagggtttcaccatgttggccaggctggtctcaaactcctgacctcaagtgatccacccgcctcggcctctcaaagtgctgggattataggcgtgagccaccacaccccgccgcggctgacttaaccttagatttcagattccctttcaatcatgcccgtttgcttgggtttgaccactccccactcctggatctggactgtttcttcctgttgctgtcagccttggttctagtttatagtcttgtctcctccgtttctgcttatggtgtggacaaatgaccttttttaagcagctggtaataattttacattgactggagcctgtgcatttgctcagagatgctacaatttttagatatttctaagacttctggattcttgaggtagttaaggattaaaaccagaaacagtcgaggttttttaaaagcagggtaagccatgaagtgaatacagggtgactgagtgatcatcagatgagattaattcttttgggttttcttggttttaaggcatctcgaatgccccttgaaaatgtagttttccctggtggtgggcacctgtaatcccagctactcgggaggctgaggcaggataattgcttgaacctgggaggtggaggttgcagtgggctgagattgtgccactgcactccagcctgggtgacagagtgagacaccatctcaaaaaaaaaaaaaaaaagaaaatgtagttatccctaggagcaatagcaccaattaactctcacccgtggaggaagaattggttattggagagaccctaagggaaaggagattttcagagagactgaatacctataattgtgctgtgtagtgtggaggcaaaaagctccaaaatctagtataacataataaactggatattgaaaactgactgtaaataaatact

SEQ ID NO: 430685 - DNA, 1973 bp, Homo sapiens
cccggggaggggaggagaggagaacttagagaaggaaggcggcgggtgtcagggctatgagtgcttttaaggaaggtctccatagaaggttcccccagcaaagtagggaggggtactccccgagaggagtcgaggtgccggagcctgctgcctcgccgacgctgggaggagccccgtgtcccgccgcgcttgccaagggttggctgcgcgtgcggcgggagtagaggcgccttgcgcaccaggaagtgactgtttccccgccgcagcaaaccaggccatccgctggccttttagtttgccgcctcaggtggatttcagtgtgttctttggatggcaggccttaagagaagagtcccactgcacagcctcagatacttcatctccatggtgggtctcttctccaaaccaggactgcttccctggtatgccagaaatccaccaggatggtcacagctctttctgggcacagtatgtaagggagatttcacccgtgtgatagccacgaaatgtcagaaaggacaaaaaagtcagaagaaaccaagccatcttggaccactagatggttcctggcaggaaaggctggctgatgttgtgacaccactctggaggttgagctatgaagaacagctcaaggtgaaatttgcagctcagaagaaaattttacaaagactagagtcttacatccaaatgctcaatggagtcagtgtgacaacggctgtacccaaatctgagaggctctcttgtcttctccatcctattataccctctcctgtcatcaatggttaccgaaataagtccaccttctctgtgaaccgaggtccagatggcaatccaaagactgtggggttctacctgggaacttggagagatgggaacgttgtctgtgtgcagtctaatcatctgaaaaacatccctgagaaacacagtcaagtggcgcagtactatgaagtattccttcgacagtctccattggagccctgccttgtatttcatgaaggtggatactggcgtgagctcacagtccgcaccaatagccaagggcacacaatggctatcatcactttccatccccagaaattaagtcaggaggagctccatgttcagaaggagattgtaaaggaatttttcatcagaggtcctggagcagcctgtggcttgacctcactttacttccaggaaagtaccatgacccgttgcagccatcagcagtctccctatcagcttctgtttggggaaccctacatctttgaagaacttctgagcttgaagatccgcatctctccagatgcctttttccagattaacacagctggtgcagagatgctgtatcggactgtgggggagctgactggagtgaactctgacaccatccttcttgacatctgctgtggaactggtgtgattggcctctctctggctcagcatacatctcgggtccttgggattgaattgttggagcaggcagtggaggatgcaagatggactgcagccttcaatggcatcaccaactctgaatttcatactggtcaagcagagaagattttgccagggctgctaaagtcaaaggaagatggacagtcaattgttgctgtggtgaacccagcccgtgccggactgcattacaaggtgattcaagccattcgaaacttcagggccatccacacgctagtttttgtttcctgcaagctccatggtgaatccactaggaatgtcattgacagcctgggtgacagagtgagacaccatctcaaaaaaaaaaaaaaaaagaaaatgtagttatccctaggagcaatagcaccaattaactctcacccgtggaggaagaattggttattggagagaccctaagggaaaggagattttcagagagactgaatacctataattgtgctgtgtagtgtggaggcaaaaagctccaaaatctagtataacataataaactggatattgaaaactgactgtaaataaatact

SEQ ID NO: 430686 - DNA, 1969 bp, Homo sapiens
cccggggaggggaggagaggagaacttagagaaggaaggcggcgggtgtcagggctatgagtgcttttaaggaaggtctccatagaaggttcccccagcaaagtagggaggggtactccccgagaggagtcgaggtgccggagcctgctgcctcgccgacgctgggaggagccccgtgtcccgccgcgcttgccaagggttggctgcgcgtgcggcgggagtagaggcgccttgcgcaccaggaagtgactgtttccccgccgcagcaaaccaggccatccgctggccttttagtttgccgcctcaggtttgtaagaggatttattggttacgaaggaaggctggctgatgttgtgacaccactctggaggttgagctatgaagaacagctcaaggtgaaatttgcagctcagaagaaaattttacaaagactagagtcttacatccaaatgctcaatggagtcagtgtgacaacggctgtacccaaatctgagaggctctcttgtcttctccatcctattataccctctggccatccacacgctagtttttgtttcctgcaagctccatggtgaatccactaggaatgtcattgagctgtgctgtcctccagaccctgctaagaagctcttaggcgagccctttgtcctgcagcaagctgtacctgtggatttgttccctcacaccccacattgtgagctggtgctcctctttactcgataagcagcctcctagaagacagcaggctatttgttaaggctgaagtttcagaaactttcaggtttggcatattgctacattgcagaccctgggagcattacagtggaaaccaatctttggtttgtgaataggaagaatctattaggcctctggtctgaggcagattttttttttgagatggagtctcactcttgcccaggctggagtgtcgtggcgtgatctcagctcactgcaacctccgcctcccgggttcaagtgattctcgtgcctcagcttccccagtagctaggattaaaggtgcgtgccaccatgcccggctaatttttgtatttttggtagagacagggtttcaccatgttggccaggctggtctcaaactcctgacctcaagtgatccacccgcctcggcctctcaaagtgctgggattataggcgtgagccaccacaccccgccgcggctgacttaaccttagatttcagattccctttcaatcatgcccgtttgcttgggtttgaccactccccactcctggatctggactgtttcttcctgttgctgtcagccttggttctagtttatagtcttgtctcctccgtttctgcttatggtgtggacaaatgaccttttttaagcagctggtaataattttacattgactggagcctgtgcatttgctcagagatgctacaatttttagatatttctaagacttctggattcttgaggtagttaaggattaaaaccagaaacagtcgaggttttttaaaagcagggtaagccatgaagtgaatacagggtgactgagtgatcatcagatgagattaattcttttgggttttcttggttttaaggcatctcgaatgccccttgaaaatgtagttttccctggtggtgggcacctgtaatcccagctactcgggaggctgaggcaggataattgcttgaacctgggaggtggaggttgcagtgggctgagattgtgccactgcactccagcctgggtgacagagtgagacaccatctcaaaaaaaaaaaaaaaaagaaaatgtagttatccctaggagcaatagcaccaattaactctcacccgtggaggaagaattggttattggagagaccctaagggaaaggagattttcagagagactgaatacctataattgtgctgtgtagtgtggaggcaaaaagctccaaaatctagtataacataataaactggatattgaaaactgactgtaaataaatact

SEQ ID NO: 430687 - DNA, 726 bp, Homo sapiens
gtttgtaagaggatttattggttacgaaggaaggtaaggtggataaatagcccggaaaacctgatttaacccttgctttacagaaaactccctactatgccaaactgtccgcggggcggggaatggaggaggcaggcggggctggagacgggacccgacggtgactgcgcaaggtcgtgtacggcccagcgtgggcctgtgccctaactcctcccactcccttactttctgtccttcccgggccctgcagaccggccaagtttagtggtagcctttcctagtgtctcctctttgttaacccttcctacagacacagtgggcagaacttgcctaaagaagaagggaatggaagggctagtggagtcttgttggggagacaaggacctgactgcctgtgggctgcattcgggacacgacacagcagtcaacccatttgcttgtttggtttagcaaggaatagtgtctggagccggtccagctgaaggaagggtgagcagagagtgcaagcaggacccttgtcggtgggtgaacattttgctccaaaagggatccttggccctgcgcaggtgagacctaccacatagtctctttgatttgaacctctctgagcacaggagagttagcctgccttcctatttgggctactctggactccaggactcttcctgatcaattcctgaggcaggtatagaacagtcgagcacgactgctcacacgctttttttt

SEQ ID NO: 430688 - DNA, 136 bp, Homo sapiens
tctgagaggctctcttgtcttctccatcctattataccctctgtaagcccccacctccctattccttatctattaaggccccttaatgctaataacatcagctgatatttactgggtacttgctagggaccaggcc

SEQ ID NO: 430689 - DNA, 662 bp, Homo sapiens
agggaaagagatttgtcacagaaatatatccagagatttgaactctttcctggaggacagagactatattttcctcatctctttattttgggaaccgaaacataccttgcatacagtaattcagttctgctcaacaggcttgcttttactgtctgctgtgtgccagcattctgctaggcgcttcagttccataagggtttataagtggatgaatgggtttgatagttgtgcttctatttcccaacctctgtatgtgtacctttcatgcaggtggatttcagtgtgttctttggatggcaggccttaagagaagagtcccactgcacagcctcagatacttcatctccatggtgggtctcttctccaaaccaggactgcttccctggtatgccagaaatccaccaggatggtcacagctctttctgggcacagtatgtaagggagatttcacccgtgtgatagccacgaaatgtcagaaaggacaaaaaagtcagaagaaaccaagccatcttggaccactagatggttcctggcaggaaaggtaaaggccaggctgatgtcctctctccttagcaggtctcaatctgtacatctgctgaaattctgtattcctagtgtaactaatgtagcattacaaggatttgaggggccacctgaggtag

SEQ ID NO: 430690 - DNA, 1290 bp, Homo sapiens
cccggggaggggaggagaggagaacttagagaaggaaggcggcgggtgtcagggctatgagtgcttttaaggaaggtctccatagaaggttcccccagcaaagtagggaggggtactccccgagaggagtcgaggtgccggagcctgctgcctcgccgacgctgggaggagccccgtgtcccgccgcgcttgccaagggttggctgcgcgtgcggcgggagtagaggcgccttgcgcaccaggaagtgactgtttccccgccgcagcaaaccaggccatccgctggccttttagtttgccgcctcaggtttgtaagaggatttattggttacgaaggaaggctggctgatgttgtgacaccactctggaggttgagctatgaagaacagctcaaggtgaaatttgcagctcagaagaaaattttacaaagactagagtcttacatccaaatgctcaatggagtcagtgtgacaacggctgtacccaaatctgagaggctctcttgtcttctccatcctattataccctctcctgtcatcaatggttaccgaaataagtccaccttctctgtgaaccgaggtccagatggcaatccaaagactgtggggttctacctgggaacttggagagatgggaacgttgtctgtgtgcagtctaatcatctgaaaaacatccctgagaaacacagtcaagtggcgcagtactatgaagtattccttcgacagtctccattggagccctgccttgtatttcatgaaggtggatactggcgtgagctcacagtccgcaccaatagccaagggcacacaatggctatcatcactttccatccccagaaattaagtcaggaggagctccatgttcagaaggagattgtaaaggaatttttcatcagaggtcctggagcagcctgtggcttgacctcactttacttccaggaaagtaccatgacccgttgcagccatcagcagtctccctatcagcttctgtttggggaaccctacatctttgaagaacttctgagcttgaagatccgatttttcaaggatacatttcccgattaaccctcttcgtgccagactcgcgcatcccgaacggggaagaacgaaacgaagagaccgagaccacgcagagaaactgaacagaacggcgacgcgaagaataggcgaaaaacaaccagagcatggacacatgagccccacagaagccacgaggagaagcataggaacaagcagcagaagtccaagcaagcgcgagagaagacagagcaaaccaggagaagcagactac

SEQ ID NO: 430691 - DNA, 3091 bp, Homo sapiens
cccggggaggggaggagaggagaacttagagaaggaaggcggcgggtgtcagggctatgagtgcttttaaggaaggtctccatagaaggttcccccagcaaagtagggaggggtactccccgagaggagtcgaggtgccggagcctgctgcctcgccgacgctgggaggagccccgtgtcccgccgcgcttgccaagggttggctgcgcgtgcggcgggagtagaggcgccttgcgcaccaggaagtgactgtttccccgccgcagcaaaccaggccatccgctggccttttagtttgccgcctcaggtggatttcagtgtgttctttggatggcaggccttaagagaagagtcccactgcacagcctcagatacttcatctccatggtgggtctcttctccaaaccaggactgcttccctggtatgccagaaatccaccaggatggtcacagctctttctgggcacagtatgtaagggagatttcacccgtgtgatagccacgaaatgtcagaaaggacaaaaaagtcagaagaaaccaagccatcttggaccactagatggttcctggcaggaaaggctggctgatgttgtgacaccactctggaggttgagctatgaagaacagctcaaggtgaaatttgcagctcagaagaaaattttacaaagactagagtcttacatccaaatgctcaatggagtcagtgtgacaacggctgtacccaaatctgagaggctctcttgtcttctccatcctattataccctctcctgtcatcaatggttaccgaaataagtccaccttctctgtgaaccgaggtccagatggcaatccaaagactgtggggttctacctgggaacttggagagatgggaacgttgtctgtgtgcagtctaatcatctgaaaaacatccctgagaaacacagtcaagtggcgcagtactatgaagtattccttcgacagtctccattggagccctgccttgtatttcatgaaggtggatactggcgtgagctcacagtccgcaccaatagccaagggcacacaatggctatcatcactttccatccccagaaattaagtcaggaggagctccatgttcagaaggagattgtaaaggaatttttcatcagaggtcctggagcagcctgtggcttgacctcactttacttccaggaaagtaccatgacccgttgcagccatcagcagtctccctatcagcttctgtttggggaaccctacatctttgaagaacttctgagcttgaagatccgcatctctccagatgcctttttccagattaacacagctggtgcagagatgctgtatcggactgtgggggagctgactggagtgaactctgacaccatccttcttgacatctgctgtggaactggtgtgattggcctctctctggctcagcatacatctcgggtccttgggattgaattgttggagcaggcagtggaggatgcaagatggactgcagccttcaatggcatcaccaactctgaatttcatactggtcaagcagagaagattttgccagggctgctaaagtcaaaggaagatggacagtcaattgttgctgtggtgaacccagcccgtgccggactgcattacaaggtgattcaagccattcgaaacttcagggccatccacacgctagtttttgtttcctgcaagctccatggtgaatccactaggaatgtcattgagctgtgctgtcctccagaccctgctaagaagctcttaggcgagccctttgtcctgcagcaagctgtacctgtggatttgttccctcacaccccacattgtgagctggtgctcctctttactcgataagcagcctcctagaagacagcaggctatttgttaaggctgaagtttcagaaactttcaggtttggcatattgctacattgcagaccctgggagcattacagtggaaaccaatctttggtttgtgaataggaagaatctattaggcctctggtctgaggcagattttttttttgagatggagtctcactcttgcccaggctggagtgtcgtggcgtgatctcagctcactgcaacctccgcctcccgggttcaagtgattctcgtgcctcagcttccccagtagctaggattaaaggtgcgtgccaccatgcccggctaatttttgtatttttggtagagacagggtttcaccatgttggccaggctggtctcaaactcctgacctcaagtgatccacccgcctcggcctctcaaagtgctgggattataggcgtgagccaccacaccccgccgcggctgacttaaccttagatttcagattccctttcaatcatgcccgtttgcttgggtttgaccactccccactcctggatctggactgtttcttcctgttgctgtcagccttggttctagtttatagtcttgtctcctccgtttctgcttatggtgtggacaaatgaccttttttaagcagctggtaataattttacattgactggagcctgtgcatttgctcagagatgctacaatttttagatatttctaagacttctggattcttgaggtagttaaggattaaaaccagaaacagtcgaggttttttaaaagcagggtaagccatgaagtgaatacagggtgactgagtgatcatcagatgagattaattcttttgggttttcttggttttaaggcatctcgaatgccccttgaaaatgtagttttccctggtggtgggcacctgtaatcccagctactcgggaggctgaggcaggataattgcttgaacctgggaggtggaggttgcagtgggctgagattgtgccactgcactccagcctgggtgacagagtgagacaccatctcaaaaaaaaaaaaaaaaagaaaatgtagttatccctaggagcaatagcaccaattaactctcacccgtggaggaagaattggttattggagagaccctaagggaaaggagattttcagagagactgaatacctataattgtgctgtgtagtgtggaggcaaaaagctccaaaatctagtataacataataaactggatattgaaaactgactgtaaataaatact

SEQ ID NO: 430692 - DNA, 2789 bp, Homo sapiens
ggaaacctttctaatgtggcctcagaagagtggaatttaatttatggcaggggttagcagactacagcttttaggccaattctgtcttgctgcctgattttgtaaataaagttttattggaacacagccaagctcacttgtttatgtattgtctatggctgcttttgcactatgatggcagagttgagtagttgcaacagggaccatatggcctgcaaagccctaaattatttactctttggctcttgacataagtagtttgttgactcctgctttatggcaagattggaactccccttctatggactgtcttgatcttcttagccacagactttcacatatgccataccctccaagcaaaccttatttgtcctcatccagagaacattcctgctttccctttattgttatcttccttggtttcatttgacctctcatccccctcctgtccttctgccctctccagcctgtcatcaatggttaccgaaataagtccaccttctctgtgaaccgaggtccagatggcaatccaaagactgtggggttctacctgggaacttggagagatgggaacgttgtctgtgtgcagtctaatcatctgaaaaacatccctgagaaacacagtcaagtggcgcagtactatgaagtattccttcgacagtctccattggagccctgccttgtatttcatgaaggtggatactggcgtgagctcacagtccgcaccaatagccaagggcacacaatggctatcatcactttccatccccagaaattaagtcaggaggagctccatgttcagaaggagattgtaaaggaatttttcatcagaggtcctggagcagcctgtggcttgacctcactttacttccaggaaagtaccatgacccgttgcagccatcagcagtctccctatcagcttctgtttggggaaccctacatctttgaagaacttctgagcttgaagatccgcatctctccagatgcctttttccagattaacacagctggtgcagagatgctgtatcggactgtgggggagctgactggagtgaactctgacaccatccttcttgacatctgctgtggaactggtgtgattggcctctctctggctcagcatacatctcgggtccttgggattgaattgttggagcaggcagtggaggatgcaagatggactgcagccttcaatggcatcaccaactctgaatttcatactggtcaagcagagaagattttgccagggctgctaaagtcaaaggaagatggacagtcaattgttgctgtggtgaacccagcccgtgccggactgcattacaaggtgattcaagccattcgaaacttcagggccatccacacgctagtttttgtttcctgcaagctccatggtgaatccactaggaatgtcattgagctgtgctgtcctccagaccctgctaagaagctcttaggcgagccctttgtcctgcagcaagctgtacctgtggatttgttccctcacaccccacattgtgagctggtgctcctctttactcgataagcagcctcctagaagacagcaggctatttgttaaggctgaagtttcagaaactttcaggtttggcatattgctacattgcagaccctgggagcattacagtggaaaccaatctttggtttgtgaataggaagaatctattaggcctctggtctgaggcagattttttttttgagatggagtctcactcttgcccaggctggagtgtcgtggcgtgatctcagctcactgcaacctccgcctcccgggttcaagtgattctcgtgcctcagcttccccagtagctaggattaaaggtgcgtgccaccatgcccggctaatttttgtatttttggtagagacagggtttcaccatgttggccaggctggtctcaaactcctgacctcaagtgatccacccgcctcggcctctcaaagtgctgggattataggcgtgagccaccacaccccgccgcggctgacttaaccttagatttcagattccctttcaatcatgcccgtttgcttgggtttgaccactccccactcctggatctggactgtttcttcctgttgctgtcagccttggttctagtttatagtcttgtctcctccgtttctgcttatggtgtggacaaatgaccttttttaagcagctggtaataattttacattgactggagcctgtgcatttgctcagagatgctacaatttttagatatttctaagacttctggattcttgaggtagttaaggattaaaaccagaaacagtcgaggttttttaaaagcagggtaagccatgaagtgaatacagggtgactgagtgatcatcagatgagattaattcttttgggttttcttggttttaaggcatctcgaatgccccttgaaaatgtagttttccctggtggtgggcacctgtaatcccagctactcgggaggctgaggcaggataattgcttgaacctgggaggtggaggttgcagtgggctgagattgtgccactgcactccagcctgggtgacagagtgagacaccatctcaaaaaaaaaaaaaaaaagaaaatgtagttatccctaggagcaatagcaccaattaactctcacccgtggaggaagaattggttattggagagaccctaagggaaaggagattttcagagagactgaatacctataattgtgctgtgtagtgtggaggcaaaaagctccaaaatctagtataacataataaactggatattgaaaactgactgtaaataaatact

SEQ ID NO: 430693 - DNA, 2798 bp, Homo sapiens
cccggggaggggaggagaggagaacttagagaaggaaggcggcgggtgtcagggctatgagtgcttttaaggaaggtctccatagaaggttcccccagcaaagtagggaggggtactccccgagaggagtcgaggtgccggagcctgctgcctcgccgacgctgggaggagccccgtgtcccgccgcgcttgccaagggttggctgcgcgtgcggcgggagtagaggcgccttgcgcaccaggaagtgactgtttccccgccgcagcaaaccaggccatccgctggccttttagtttgccgcctcaggtttgtaagaggatttattggttacgaaggaaggtgaaatttgcagctcagaagaaaattttacaaagactagagtcttacatccaaatgctcaatggagtcagtgtgacaacggctgtacccaaatctgagaggctctcttgtcttctccatcctattataccctctcctgtcatcaatggttaccgaaataagtccaccttctctgtgaaccgaggtccagatggcaatccaaagactgtggggttctacctgggaacttggagagatgggaacgttgtctgtgtgcagtctaatcatctgaaaaacatccctgagaaacacagtcaagtggcgcagtactatgaagtattccttcgacagtctccattggagccctgccttgtatttcatgaaggtggatactggcgtgagctcacagtccgcaccaatagccaagggcacacaatggctatcatcactttccatccccagaaattaagtcaggaggagctccatgttcagaaggagattgtaaaggaatttttcatcagaggtcctggagcagcctgtggcttgacctcactttacttccaggaaagtaccatgacccgttgcagccatcagcagtctccctatcagcttctgtttggggaaccctacatctttgaagaacttctgagcttgaagatccgcatctctccagatgcctttttccagattaacacagctggtgcagagatgctgtatcggactgtgggggagctgactggagtgaactctgacaccatccttcttgacatctgctgtggaactggtgtgattggcctctctctggctcagcatacatctcgggtccttgggattgaattgttggagcaggcagtggaggatgcaagatggactgcagccttcaatggcatcaccaactctgaatttcatactggtcaagcagagaagattttgccagggctgctaaagtcaaaggaagatggacagtcaattgttgctgtggtgaacccagcccgtgccggactgcattacaaggtgattcaagccattcgaaacttcagggccatccacacgctagtttttgtttcctgcaagctccatggtgaatccactaggaatgtcattgagctgtgctgtcctccagaccctgctaagaagctcttaggcgagccctttgtcctgcagcaagctgtacctgtggatttgttccctcacaccccacattgtgagctggtgctcctctttactcgataagcagcctcctagaagacagcaggctatttgttaaggctgaagtttcagaaactttcaggtttggcatattgctacattgcagaccctgggagcattacagtggaaaccaatctttggtttgtgaataggaagaatctattaggcctctggtctgaggcagattttttttttgagatggagtctcactcttgcccaggctggagtgtcgtggcgtgatctcagctcactgcaacctccgcctcccgggttcaagtgattctcgtgcctcagcttccccagtagctaggattaaaggtgcgtgccaccatgcccggctaatttttgtatttttggtagagacagggtttcaccatgttggccaggctggtctcaaactcctgacctcaagtgatccacccgcctcggcctctcaaagtgctgggattataggcgtgagccaccacaccccgccgcggctgacttaaccttagatttcagattccctttcaatcatgcccgtttgcttgggtttgaccactccccactcctggatctggactgtttcttcctgttgctgtcagccttggttctagtttatagtcttgtctcctccgtttctgcttatggtgtggacaaatgaccttttttaagcagctggtaataattttacattgactggagcctgtgcatttgctcagagatgctacaatttttagatatttctaagacttctggattcttgaggtagttaaggattaaaaccagaaacagtcgaggttttttaaaagcagggtaagccatgaagtgaatacagggtgactgagtgatcatcagatgagattaattcttttgggttttcttggttttaaggcatctcgaatgccccttgaaaatgtagttttccctggtggtgggcacctgtaatcccagctactcgggaggctgaggcaggataattgcttgaacctgggaggtggaggttgcagtgggctgagattgtgccactgcactccagcctgggtgacagagtgagacaccatctcaaaaaaaaaaaaaaaaagaaaatgtagttatccctaggagcaatagcaccaattaactctcacccgtggaggaagaattggttattggagagaccctaagggaaaggagattttcagagagactgaatacctataattgtgctgtgtagtgtggaggcaaaaagctccaaaatctagtataacataataaactggatattgaaaactgactgtaaataaatact

SEQ ID NO: 430694 - DNA, 2669 bp, Homo sapiens
tcgacccacgcgtcgggacccacgcgtacgggcgactcaggttggtaagaggatttattaggttacagaagggaaggtggatttcagtgtgttctttggatggcaggccttaagagaagagtcccactgcacagcctcagatacttcatctccatggctggctgatgttgtgacaccactctggaggttgagctatgaagaacagctcaaggtgaaatttgcagctcagaagaaaattttacaaagactagagtcttacatccaaatgctcaatggagtcagtgtgacaacggctgtacccaaatctgagaggctctcttgtcttctccatcctattataccctctcctgtcatcaatggttaccgaaataagtccaccttctctgtgaaccgaggtccagatggcaatccaaagactgtggggttctacctgggaacttggagagatgggaacgttgtctgtgtgcagtctaatcatctgaaaaacatccctgagaaacacagtcaagtggcgcagtactatgaagtattccttcgacagtctccattggagccctgccttgtatttcatgaaggtggatactggcgtgagctcacagtccgcaccaatagccaagggcacacaatggctatcatcactttccatccccagaaattaagtcaggaggagctccatgttcagaaggagattgtaaaggaatttttcatcagaggtcctggagcagcctgtggcttgacctcactttacttccaggaaagtaccatgacccgttgcagccatcagcagtctccctatcagcttctgtttggggaaccctacatctttgaagaacttctgagcttgaagatccgcatctctccagatgcctttttccagattaacacagctggtgcagagatgctgtatcggactgtgggggagctgactggagtgaactctgacaccatccttcttgacatctgctgtggaactggtgtgattggcctctctctggctcagcatacatctcgggtccttgggattgaattgttggagcaggcagtggaggatgcaagatggactgcagccttcaatggcatcaccaactctgaatttcatactggtcaagcagagaagattttgccagggctgctaaagtcaaaggaagatggacagtcaattgttgctgtggtgaacccagcccgtgccggactgcattacaaggtgattcaagccattcgaaacttcagggccatccacacgctagtttttgtttcctgcaagctccatggtgaatccactaggaatgtcattgagctgtgctgtcctccagaccctgctaagaagctcttaggcgagccctttgtcctgcagcaagctgtacctgtggatttgttccctcacaccccacattgtgagctggtgctcctctttactcgataagcagcctcctagaagacagcaggctatttgttaaggctgaagtttcagaaactttcaggtttggcatattgctacattgcagaccctgggagcattacagtggaaaccaatctttggtttgtgaataggaagaatctattaggcctctggtctgaggcagattttttttttgagatggagtctcactcttgcccaggctggagtgtcgtggcgtgatctcagctcactgcaacctccgcctcccgggttcaagtgattctcgtgcctcagcttccccagtagctaggattaaaggtgcgtgccaccatgcccggctaatttttgtatttttggtagagacagggtttcaccatgttggccaggctggtctcaaactcctgacctcaagtgatccacccgcctcggcctctcaaagtgctgggattataggcgtgagccaccacaccccgccgcggctgacttaaccttagatttcagattccctttcaatcatgcccgtttgcttgggtttgaccactccccactcctggatctggactgtttcttcctgttgctgtcagccttggttctagtttatagtcttgtctcctccgtttctgcttatggtgtggacaaatgaccttttttaagcagctggtaataattttacattgactggagcctgtgcatttgctcagagatgctacaatttttagatatttctaagacttctggattcttgaggtagttaaggattaaaaccagaaacagtcgaggttttttaaaagcagggtaagccatgaagtgaatacagggtgactgagtgatcatcagatgagattaattcttttgggttttcttggttttaaggcatctcgaatgccccttgaaaatgtagttttccctggtggtgggcacctgtaatcccagctactcgggaggctgaggcaggataattgcttgaacctgggaggtggaggttgcagtgggctgagattgtgccactgcactccagcctgggtgacagagtgagacaccatctcaaaaaaaaaaaaaaaaagaaaatgtagttatccctaggagcaatagcaccaattaactctcacccgtggaggaagaattggttattggagagaccctaagggaaaggagattttcagagagactgaatacctataattgtgctgtgtagtgtggaggcaaaaagctccaaaatctagtataacataataaactggatattgaaaactgactgtaaataaatact

SEQ ID NO: 430695 - DNA, 2563 bp, Homo sapiens
cccggggaggggaggagaggagaacttagagaaggaaggcggcgggtgtcagggctatgagtgcttttaaggaaggtctccatagaaggttcccccagcaaagtagggaggggtactccccgagaggagtcgaggtgccggagcctgctgcctcgccgacgctgggaggagccccgtgtcccgccgcgcttgccaagggttggctgcgcgtgcggcgggagtagaggcgccttgcgcaccaggaagtgactgtttccccgccgcagcaaaccaggccatccgctggccttttagtttgccgcctcaggtttgtaagaggatttattggttacgaaggaagatgggaacgttgtctgtgtgcagtctaatcatctgaaaaacatccctgagaaacacagtcaagtggcgcagtactatgaagtattccttcgacagtctccattggagccctgccttgtatttcatgaaggtggatactggcgtgagctcacagtccgcaccaatagccaagggcacacaatggctatcatcactttccatccccagaaattaagtcaggaggagctccatgttcagaaggagattgtaaaggaatttttcatcagaggtcctggagcagcctgtggcttgacctcactttacttccaggaaagtaccatgacccgttgcagccatcagcagtctccctatcagcttctgtttggggaaccctacatctttgaagaacttctgagcttgaagatccgcatctctccagatgcctttttccagattaacacagctggtgcagagatgctgtatcggactgtgggggagctgactggagtgaactctgacaccatccttcttgacatctgctgtggaactggtgtgattggcctctctctggctcagcatacatctcgggtccttgggattgaattgttggagcaggcagtggaggatgcaagatggactgcagccttcaatggcatcaccaactctgaatttcatactggtcaagcagagaagattttgccagggctgctaaagtcaaaggaagatggacagtcaattgttgctgtggtgaacccagcccgtgccggactgcattacaaggtgattcaagccattcgaaacttcagggccatccacacgctagtttttgtttcctgcaagctccatggtgaatccactaggaatgtcattgagctgtgctgtcctccagaccctgctaagaagctcttaggcgagccctttgtcctgcagcaagctgtacctgtggatttgttccctcacaccccacattgtgagctggtgctcctctttactcgataagcagcctcctagaagacagcaggctatttgttaaggctgaagtttcagaaactttcaggtttggcatattgctacattgcagaccctgggagcattacagtggaaaccaatctttggtttgtgaataggaagaatctattaggcctctggtctgaggcagattttttttttgagatggagtctcactcttgcccaggctggagtgtcgtggcgtgatctcagctcactgcaacctccgcctcccgggttcaagtgattctcgtgcctcagcttccccagtagctaggattaaaggtgcgtgccaccatgcccggctaatttttgtatttttggtagagacagggtttcaccatgttggccaggctggtctcaaactcctgacctcaagtgatccacccgcctcggcctctcaaagtgctgggattataggcgtgagccaccacaccccgccgcggctgacttaaccttagatttcagattccctttcaatcatgcccgtttgcttgggtttgaccactccccactcctggatctggactgtttcttcctgttgctgtcagccttggttctagtttatagtcttgtctcctccgtttctgcttatggtgtggacaaatgaccttttttaagcagctggtaataattttacattgactggagcctgtgcatttgctcagagatgctacaatttttagatatttctaagacttctggattcttgaggtagttaaggattaaaaccagaaacagtcgaggttttttaaaagcagggtaagccatgaagtgaatacagggtgactgagtgatcatcagatgagattaattcttttgggttttcttggttttaaggcatctcgaatgccccttgaaaatgtagttttccctggtggtgggcacctgtaatcccagctactcgggaggctgaggcaggataattgcttgaacctgggaggtggaggttgcagtgggctgagattgtgccactgcactccagcctgggtgacagagtgagacaccatctcaaaaaaaaaaaaaaaaagaaaatgtagttatccctaggagcaatagcaccaattaactctcacccgtggaggaagaattggttattggagagaccctaagggaaaggagattttcagagagactgaatacctataattgtgctgtgtagtgtggaggcaaaaagctccaaaatctagtataacataataaactggatattgaaaactgactgtaaataaatact

SEQ ID NO: 430696 - DNA, 2167 bp, Homo sapiens
  misc_feature (6)..(6): n is a, c, g, or t
gggagnaaacaaaactaggctaggtacgaggcgggtggtgaatcggccgaggcctgccttgtatttcatgaaggtggatactggcgtgagctcacagtccgcaccaatagccaagggcacacaatggctatcatcactttccatccccagaaattaagtcaggaggagctccatgttcagaaggagattgtaaaggaatttttcatcagaggtcctggagcagcctgtggcttgacctcactttacttccaggaaagtaccatgacccgttgcagccatcagcagtctccctatcagcttctgtttggggaaccctacatctttgaagaacttctgagcttgaagatccgcatctctccagatgcctttttccagattaacacagctggtgcagagatgctgtatcggactgtgggggagctgactggagtgaactctgacaccatccttcttgacatctgctgtggaactggtgtgattggcctctctctggctcagcatacatctcgggtccttgggattgaattgttggagcaggcagtggaggatgcaagatggactgcagccttcaatggcatcaccaactctgaatttcatactggtcaagcagagaagattttgccagggctgctaaagtcaaaggaagatggacagtcaattgttgctgtggtgaacccagcccgtgccggactgcattacaaggtgattcaagccattcgaaacttcagggccatccacacgctagtttttgtttcctgcaagctccatggtgaatccactaggaatgtcattgagctgtgctgtcctccagaccctgctaagaagctcttaggcgagccctttgtcctgcagcaagctgtacctgtggatttgttccctcacaccccacattgtgagctggtgctcctctttactcgataagcagcctcctagaagacagcaggctatttgttaaggctgaagtttcagaaactttcaggtttggcatattgctacattgcagaccctgggagcattacagtggaaaccaatctttggtttgtgaataggaagaatctattaggcctctggtctgaggcagattttttttttgagatggagtctcactcttgcccaggctggagtgtcgtggcgtgatctcagctcactgcaacctccgcctcccgggttcaagtgattctcgtgcctcagcttccccagtagctaggattaaaggtgcgtgccaccatgcccggctaatttttgtatttttggtagagacagggtttcaccatgttggccaggctggtctcaaactcctgacctcaagtgatccacccgcctcggcctctcaaagtgctgggattataggcgtgagccaccacaccccgccgcggctgacttaaccttagatttcagattccctttcaatcatgcccgtttgcttgggtttgaccactccccactcctggatctggactgtttcttcctgttgctgtcagccttggttctagtttatagtcttgtctcctccgtttctgcttatggtgtggacaaatgaccttttttaagcagctggtaataattttacattgactggagcctgtgcatttgctcagagatgctacaatttttagatatttctaagacttctggattcttgaggtagttaaggattaaaaccagaaacagtcgaggttttttaaaagcagggtaagccatgaagtgaatacagggtgactgagtgatcatcagatgagattaattcttttgggttttcttggttttaaggcatctcgaatgccccttgaaaatgtagttttccctggtggtgggcacctgtaatcccagctactcgggaggctgaggcaggataattgcttgaacctgggaggtggaggttgcagtgggctgagattgtgccactgcactccagcctgggtgacagagtgagacaccatctcaaaaaaaaaaaaaaaaagaaaatgtagttatccctaggagcaatagcaccaattaactctcacccgtggaggaagaattggttattggagagaccctaagggaaaggagattttcagagagactgaatacctataattgtgctgtgtagtgtggaggcaaaaagctccaaaatctagtataacataataaactggatattgaaaactgactgtaaataaatact

SEQ ID NO: 430697 - DNA, 2838 bp, Homo sapiens
cccggggaggggaggagaggagaacttagagaaggaaggcggcgggtgtcagggctatgagtgcttttaaggaaggtctccatagaaggttcccccagcaaagtagggaggggtactccccgagaggagtcgaggtgccggagcctgctgcctcgccgacgctgggaggagccccgtgtcccgccgcgcttgccaagggttggctgcgcgtgcggcgggagtagaggcgccttgcgcaccaggaagtgactgtttccccgccgcagcaaaccaggccatccgctggccttttagtttgccgcctcaggtttgtaagaggatttattggttacgaaggaaggtggatttcagtgtgttctttggatggcaggccttaagagaagagtcccactgcacagcctcagatacttcatctccatggctggctgatgttgtgacaccactctggaggttgagctatgaagaacagctcaaggtgaaatttgcagctcagaagaaaattttacaaagactagagtcttacatccaaatgctcaatggagtcagtgtgacaacggctgtacccaaatctgagaggctctcttgtcttctccatcctattataccctctcctgtcatcaatggttaccgaaataagtccaccttctctgtgaaccgaggtccagatggcaatccaaagactgtggggttctacctgggaacttggagagatgggaacgttgtctgtgtgcagtctaatcatctgaaaaacatccctgagaaacacagtcaagtggcgcagtactatgaagtattccttcgacagtctccattggagccctgccttgtatttcatgaaggtggatactggcgtgagctcacagtccgcaccaatagccaagggcacacaatggctatcatcactttccatccccagaaattaagtcagtaccatgacccgttgcagccatcagcagtctccctatcagcttctgtttggggaaccctacatctttgaagaacttctgagcttgaagatccgcatctctccagatgcctttttccagattaacacagctggtgcagagatgctgtatcggactgtgggggagctgactggagtgaactctgacaccatccttcttgacatctgctgtggaactggtgtgattggcctctctctggctcagcatacatctcgggtccttgggattgaattgttggagcaggcagtggaggatgcaagatggactgcagccttcaatggcatcaccaactctgaatttcatactggtcaagcagagaagattttgccagggctgctaaagtcaaaggaagatggacagtcaattgttgctgtggtgaacccagcccgtgccggactgcattacaaggtgattcaagccattcgaaacttcagggccatccacacgctagtttttgtttcctgcaagctccatggtgaatccactaggaatgtcattgagctgtgctgtcctccagaccctgctaagaagctcttaggcgagccctttgtcctgcagcaagctgtacctgtggatttgttccctcacaccccacattgtgagctggtgctcctctttactcgataagcagcctcctagaagacagcaggctatttgttaaggctgaagtttcagaaactttcaggtttggcatattgctacattgcagaccctgggagcattacagtggaaaccaatctttggtttgtgaataggaagaatctattaggcctctggtctgaggcagattttttttttgagatggagtctcactcttgcccaggctggagtgtcgtggcgtgatctcagctcactgcaacctccgcctcccgggttcaagtgattctcgtgcctcagcttccccagtagctaggattaaaggtgcgtgccaccatgcccggctaatttttgtatttttggtagagacagggtttcaccatgttggccaggctggtctcaaactcctgacctcaagtgatccacccgcctcggcctctcaaagtgctgggattataggcgtgagccaccacaccccgccgcggctgacttaaccttagatttcagattccctttcaatcatgcccgtttgcttgggtttgaccactccccactcctggatctggactgtttcttcctgttgctgtcagccttggttctagtttatagtcttgtctcctccgtttctgcttatggtgtggacaaatgaccttttttaagcagctggtaataattttacattgactggagcctgtgcatttgctcagagatgctacaatttttagatatttctaagacttctggattcttgaggtagttaaggattaaaaccagaaacagtcgaggttttttaaaagcagggtaagccatgaagtgaatacagggtgactgagtgatcatcagatgagattaattcttttgggttttcttggttttaaggcatctcgaatgccccttgaaaatgtagttttccctggtggtgggcacctgtaatcccagctactcgggaggctgaggcaggataattgcttgaacctgggaggtggaggttgcagtgggctgagattgtgccactgcactccagcctgggtgacagagtgagacaccatctcaaaaaaaaaaaaaaaaagaaaatgtagttatccctaggagcaatagcaccaattaactctcacccgtggaggaagaattggttattggagagaccctaagggaaaggagattttcagagagactgaatacctataattgtgctgtgtagtgtggaggcaaaaagctccaaaatctagtataacataataaactggatattgaaaactgactgtaaataaatact

SEQ ID NO: 430698 - DNA, 1918 bp, Homo sapiens
cccggggaggggaggagaggagaacttagagaaggaaggcggcgggtgtcagggctatgagtgcttttaaggaaggtctccatagaaggttcccccagcaaagtagggaggggtactccccgagaggagtcgaggtgccggagcctgctgcctcgccgacgctgggaggagccccgtgtcccgccgcgcttgccaagggttggctgcgcgtgcggcgggagtagaggcgccttgcgcaccaggaagtgactgtttccccgccgcagcaaaccaggccatccgctggccttttagtttgccgcctcaggtggatttcagtgtgttctttggatggcaggccttaagagaagagtcccactgcacagcctcagatacttcatctccatggtgggtctcttctccaaaccaggactgcttccctggtatgccagaaatccaccaggatggtcacagctctttctgggcacagtatgtaagggagatttcacccgtgtgatagccacgaaatgtcagaaaggacaaaaaagtcagaagaaaccaagccatcttggaccactagatggttcctggcaggaaaggctggctgatgttgtgacaccactctggaggttgagctatgaagaacagctcaaggtgaaatttgcagctcagaagaaaattttacaaagactagagtcttacatccaaatgctcaatggagtcagtgtgacaacggctgtacccaaatctgagaggctctcttgtcttctccatcctattataccctctcctgtcatcaatggttaccgaaataagtccaccttctctgtgaaccgaggtccagatggcaatccaaagactgtggggttctacctgggaacttggagagatgggaacgttgtctgtgtgcagtctaatcatctgaaaaacatccctgagaaacacagtcaagtggcgcagtactatgaagtattccttcgacagtctccattggagccctgccttgtatttcatgaaggtggatactggcgtgagctcacagtccgcaccaatagccaagggcacacaatggctatcatcactttccatccccagaaattaagtcaggaggagctccatgttcagaaggagattgtaaaggaatttttcatcagaggtcctggagcagcctgtggcttgacctcactttacttccaggaaagtaccatgacccgttgcagccatcagcagtctccctatcagcttctgtttggggaaccctacatctttgaagaacttctgagcttgaagatccgcatctctccagatgcctttttccagattaacacagctggtgcagagatgctgtatcggactgtgggggagctgactggagtgaactctgacaccatccttcttgacatctgctgtggaactggtgtgattggcctctctctggctcagcatacatctcgggtccttgggattgaattgttggagcaggcagtggaggatgcaagatggactgcagccttcaatggcatcaccaactctgaatttcatactggtcaagcagagaagattttgccagggctgctaaagtcaaaggaagatggacagtcaattgttgctgtggtgaacccagcccgtgccggactgcattacaaggtgattcaagccattcgaaacttcagggccatccacacgctagtttttgtttcctgcaagctccatggtgaatccactaggaatgtcattgaacggagtctcatcttgctggagtgcagtggcatggtctcggctcactgcagcctccacctcccaggagaatcacttgaacctggggggcggaggttgcagtaagccgagatcgcgccttgcactccagcctgggcaacaagagtgaaactctctccccccgaaaaaaaagaaattaaaaatacatccttgaggaacttta

SEQ ID NO: 430699 - DNA, 1667 bp, Homo sapiens
cttcctgcttctgccgcgtcctgcttcgcctgcttcctgcttctgccgcttcctgcttctgctgcttcctgcttctgccaaatggctgcttcctgcttctggtcaagcagagaagattttgccagggctgctaaagtcaaaggaagatggacagtcaattgttgctgtggtgaacccagcccgtgccggactgcattacaaggtgattcaagccattcgaaacttcagggccatccacacgctagtttttgtttcctgcaagctccatggtgaatccactaggaatgtcattgagctgtgctgtcctccagaccctgctaagaagctcttaggcgagccctttgtcctgcagcaagctgtacctgtggatttgttccctcacaccccacattgtgagctggtgctcctctttactcgataagcagcctcctagaagacagcaggctatttgttaaggctgaagtttcagaaactttcaggtttggcatattgctacattgcagaccctgggagcattacagtggaaaccaatctttggtttgtgaataggaagaatctattaggcctctggtctgaggcagattttttttttgagatggagtctcactcttgcccaggctggagtgtcgtggcgtgatctcagctcactgcaacctccgcctcccgggttcaagtgattctcgtgcctcagcttccccagtagctaggattaaaggtgcgtgccaccatgcccggctaatttttgtatttttggtagagacagggtttcaccatgttggccaggctggtctcaaactcctgacctcaagtgatccacccgcctcggcctctcaaagtgctgggattataggcgtgagccaccacaccccgccgcggctgacttaaccttagatttcagattccctttcaatcatgcccgtttgcttgggtttgaccactccccactcctggatctggactgtttcttcctgttgctgtcagccttggttctagtttatagtcttgtctcctccgtttctgcttatggtgtggacaaatgaccttttttaagcagctggtaataattttacattgactggagcctgtgcatttgctcagagatgctacaatttttagatatttctaagacttctggattcttgaggtagttaaggattaaaaccagaaacagtcgaggttttttaaaagcagggtaagccatgaagtgaatacagggtgactgagtgatcatcagatgagattaattcttttgggttttcttggttttaaggcatctcgaatgccccttgaaaatgtagttttccctggtggtgggcacctgtaatcccagctactcgggaggctgaggcaggataattgcttgaacctgggaggtggaggttgcagtgggctgagattgtgccactgcactccagcctgggtgacagagtgagacaccatctcaaaaaaaaaaaaaaaaagaaaatgtagttatccctaggagcaatagcaccaattaactctcacccgtggaggaagaattggttattggagagaccctaagggaaaggagattttcagagagactgaatacctataattgtgctgtgtagtgtggaggcaaaaagctccaaaatctagtataacataataaactggatattgaaaactgactgtaaataaatact

SEQ ID NO: 430700 - DNA, 4896 bp, Homo sapiens
ttgctgtcaggtgactctcccgtggcgccatggcggaagcagtggagcaggaaactgggtcccttgaagaatctacagatgagtctgaggaagaagagagcgaagaggaacccaagctgaagtatgaaaggctttccaatggggtaactgaaatacttcagaaggatgcagctagctgcatgacagtccatgacaagtttttggcattgggcacacattatggcaaggtttatttacttgatgtccaggggaacatcactcagaagtttgatgtaagtcctgtgaagataaatcagattagcttggatgaaagtggagagcacatgggtgtgtgttcagaggatggcaaggtgcaggtatttggactgtattctggagaagaatttcacgagacttttgactgtcccattaaaattattgctgtgcacccacatttcgtgagatccagttgcaagcagtttgtgaccggagggaagaagctgctactgtttgaacggtcttggatgaacagatggaagtctgctgttctgcatgaaggggaagggaacataaggagtgtgaagtggagaggccatctgattgcttgggccaataatatgggtgtgaagatttttgacatcatctcaaagcaaagaatcaccaatgtgccccgggatgatataagtcttcgcccagacatgtatccctgcagcctctgctggaaggacaatgtgacactgattattggctgggggacttctgtcaaggtgtgctcagtgaaggaacggcatgccagtgaaatgagggatttgccaagtcgatatgttgaaatagtgtctcagtttgaaactgaattctacatcagtggacttgcacctctctgtgatcagcttgttgtactttcgtatgtaaaggagatttcagaaaaaacggaaagagaatactgtgccaggcctagactggacatcatccagccactttctgagacttgtgaagagatctcttctgatgctttgacagtcagaggctttcaggagaatgaatgtagagattatcatttagaatactctgaaggggaatcacttttttacatcgtgagtccgagagatgttgtagtggccaaggaacgagaccaagatgatcacattgactggctccttgaaaagaagaaatatgaagaagcattgatggcagctgaaattagccaaaaaaatattaaaagacataagattctggatattggcttggcatatataaatcacctggtggagagaggagactatgacatagcagcacgcaaatgccagaaaattcttgggaaaaatgcagcactctgggaatatgaagtttataaatttaaagaaattggacagcttaaggctattagtccttatttgccaagaggtgatccagttctgaaaccactcatctatgaaatgatcttacatgaatttttggagagtgattatgagggttttgccacattgatccgagaatggcctggagatctgtataataattcagtcatagttcaagcagttcgggatcatttgaagaaagatagtcagaacaagactttacttaaaaccctggcagaattgtacacctatgacaagaactatggcaatgctctggaaatatacttaacattaagacataaagacgtttttcagttgatccacaagcataatcttttcagttctatcaaggataaaattgttttattaatggattttgattcagagaaagctgttgacatgcttttggacaatgaagataaaatttcaattaaaaaggtagtggaagaattggaagacagaccagagctacagcatgtgtatttgcataagcttttcaagagagaccaccataaggggcagcgttaccatgaaaaacagatcagtctttatgctgaatatgatcgaccaaacttacttccctttctccgagacagtacccattgcccacttgaaaaggctcttgagatctgtcaacagagaaactttgtagaagagacagtttatcttctgagccgaatgggtaatagccgaagtgccctgaagatgattatggaggaattacatgatgttgataaagcaatcgaatttgccaaggagcaagatgatggagagctgtgggaagatttgattttatattccattgacaaaccaccatttattactggcttgttaaacaacattggcacacatgttgacccaattctactgattcaccgtattaaggaaggaatggagatccccaatttgagagattccttggttaaaattctgcaagactacaatttgcaaattctgcttcgtgaaggctgcaagaagattctcgtagctgactctttgtccttactgaagaaaatgcaccgaactcaaatgaaaggtgttcttgttgatgaggagaacatctgtgagtcgtgcctttcccctattcttccatcagatgcagctaagcccttcagcgtggtggtcttccattgccggcacatgttccacaaggagtgcctgcccatgcccagcatgaactctgctgcacagttctgcaacatctgcagtgctaagaaccgtggaccaggaagtgcaattttggagatgaaaaaatagctcatttctccttgtcagtctccttgtcaccactctttttgagactgtttttgcaacaacaaaagcatttgttgacactcgtgctgttaagagatttgtttatgtttatattatactcaaaaacaatttcttcatctattcctgtactaatggtttctctttgcagttcacagagaatttggggctctcttcatgccttgaaattttggggtccatagtgaatattttgttatttatttgtttggctcattctttatatagtaatggaaacataagtctaggagttagaaatgaattttttagaccttagtaaaaccatttaaccataaaatggacaactgagaattctcccagctgcctgaaagcgtcgccaactgtggttatcctgcaagctgctacctgcaacttggacgttgtttccacgtgctctgctggctacgattcttgcattctgggtttggcttttttctgtgtcatcaactatggttatcctctaaataggcatttaatgaaacattgtacaaattgtcactcatttgatgacacctgggaataacattagcaggctgatgtcctgcaccattatgtttactaatcacatgttctgtgtgctgtgacgactgtcaaagagtatctggccatggcggacactcagcatttgttgattgaataaatgttagctcttctcattgtgaaggactcacttttactgggataaacaaatgcagttaagaattctggcacccttgtaaggaagaaaagagagttcaacaccttcgagtctgagcgcttgtggctagagtttgccaggagggaggaaaccagtgaccctgaaaactgagggtgcctcaggagcagtgggaccacctgatgctgaaggacggactaatgatgtttcctcttgccttctctggtgcctccattgccctcatggaacagagcatatcatagagggagaaaagtcaaacttgtaattgtgtcttacagttactggcttcatcttccttgggatatatggtcatcctctaatgagtgtaaaagtgcgcaaaacacatccttattgttcctgatctcttagtcccataaatgggaacaaatacagctttctgcttctttctttttggggaaaggacagggtgctagtgagtactgacagcatgccagctaccgaagtcacccagccattcccatgagcagcagttcatttaattgtcacagcgtcgccaggaagaagatctgataaacctaggtttacagataaagaaagcaaaatgtagagatgttgttgaggtcacagaggtgactgcctaacttcagagcagggcttctgatccctttaagaaattacagggccagccgggcatggtggctcacgcccgtaatcccagggctttgggaggccttggcaggtggatcacctgagatcgcacgttcgagaccagcctgaccaacatggagaaaccccatctctactaaaaacacaaattggccaggcatggtggtgcatgcctgtaatcccagctactcaggaggctgaggcaggagaatcacttgaccccaggagacgtaggttgtggtgagctgagatcgcgccattgcactccagcctgggcaacaagagcaaaactccgtctcaaaaaagaaaagaaaagaaaagaaatcatagggccaagttcaaaggaaatgcacagaacatatcttcacattagagttaagaattctctagcaaacaacagatttttttgttgttgttagtcacaaatacttagaactggaaggctctttgttattattgaatgtacccctcagccttctcagcatttccttatcccaagactagtgtgctttctgctacactgctagttttcagttttgttcttacccaattgttttttcttttcaacattaccaatttacagattcagtttattacatttacattaatcctcacttatgatttgagcaagctcatttccagaaaagtttactttaagatcatcaataggatttgctaatttcagtgaagtcattttgcttcaggggtaaattatcctagttaccaagtcctatttggacataaagaaaatcctacttatagaaaaggagaaaataattaaacagtcttcatttttaagtaactgatttaaaaggaaaataataaaatatgttcgtttatcatttcagaaattgctgtaacacactggaaaattcctgaacaatatagattttatcgttaataaaaaacactagctttcgttccttagaatgtcttttcttttgaataaacagtattgggtgattt

SEQ ID NO: 430701 - DNA, 3490 bp, Homo sapiens
gcaaattcagagacacacataagaaactggaagaagagaaaggcaaaaaggaaaaagaaagacaggaaattgagaaagaacggagagaaagagagagggagcgtgaaagggaacgagaaaggcgagatcgtgaccgggatagagaaaggagctcagatcgtaataaggatcgcagtcgatcaagagaaaaaagcagagatcgtgaaagggaacgagagcgggaaagagagagagagagagaacgagagcgagaacgagaacgggagcgagagagagagcgagagagggaacgggagcgagaaaaaaaaaaaaaaaaaacggaagcagaggagcaggaaactgggtcccttgaagaatctacagatgagtctgaggaagaagagagcgaagaggaacccaagctgaagtatgaaaggctttccaatggggtaactgaaatacttcagaaggatgcagctagctgcatgacagtccatgacaagtttttggcattgggcacacattatggcaaggtttatttacttgatgtccaggggaacatcactcagaagtttgatgtagtgcaggtatttggactgtattctggagaagaatttcacgagacttttgactgtcccattaaaattattgctgtgcacccacatttcgtgagatccagttgcaagcagtttgtgaccggagggaagaagctgctactgtttgaacggtcttggatgaacagatggaagtctgctgttctgcatgaaggggaagggaacataaggagtgtgaagtggagaggccatctgattgcttgggccaataatatgggtgtgaagatttttgacatcatctcaaagcaaagaatcaccaatgtgccccgggatgatataagtcttcgcccagacatgtatccctgcagcctctgctggaaggacaatgtgacactgattattggctgggggacttctgtcaaggtgtgctcagtgaaggaacggcatgccagtgaaatgagggatttgccaagtcgatatgttgaaatagtgtctcagtttgaaactgaattctacatcagtggacttgcacctctctgtgatcagcttgttgtactttcgtatgtaaaggagatttcagaaaaaacggaaagagaatactgtgccaggcctagactggacatcatccagccactttctgagacttgtgaagagatctcttctgatgctttgacagtcagaggctttcaggagaatgaatgtagagattatcatttagaatactctgaaggggaatcacttttttacatcgtgagtccgagagatgttgtagtggccaaggaacgagaccaagatgatcacattgactggctccttgaaaagaagaaatatgaagaagcattgatggcagctgaaattagccaaaaaaatattaaaagacataagattctggatattggcttggcatatataaatcacctggtggagagaggagactatgacatagcagcacgcaaatgccagaaaattcttgggaaaaatgcagcactctgggaatatgaagtttataaatttaaagaaattggacagcttaaggctattagtccttatttgccaagaggtgatccagttctgaaaccactcatctatgaaatgatcttacatgaatttttggagagtgattatgagggttttgccacattgatccgagaatggcctggagatctgtataataattcagtcatagttcaagcagttcgggatcatttgaagaaagatagtcagaacaagactttacttaaaaccctggcagaattgtacacctatgacaagaactatggcaatgctctggaaatatacttaacattaagacataaagacgtttttcagttgatccacaagcataatcttttcagttctatcaaggataaaattgttttattaatggattttgattcagagaaagctgttgacatgcttttggacaatgaagataaaatttcaattaaaaaggtagtggaagaattggaagacagaccagagctacagcatgtgtatttgcataagcttttcaagagagaccaccataaggggcagcgttaccatgaaaaacagatcagtctttatgctgaatatgatcgaccaaacttacttccctttctccgagacagtacccattgcccacttgaaaaggctcttgagatctgtcaacagagaaactttgtagaagagacagtttatcttctgagccgaatgggtaatagccgaagtgccctgaagatgattatggaggaattacatgatgttgataaagcaatcgaatttgccaaggagcaagatgatggagagctgtgggaagatttgattttatattccattgacaaaccaccatttattactggcttgttaaacaacattggcacacatgttgacccaattctactgattcaccgtattaaggaaggaatggagatccccaatttgagagattccttggttaaaattctgcaagactacaatttgcaaattctgcttcgtgaaggctgcaagaagattctcgtagctgactctttgtccttactgaagaaaatgcaccgaactcaaatgaaaggtgttcttgttgatgaggagaacatctgtgagtcgtgcctttcccctattcttccatcagatgcagctaagcccttcagcgtggtggtcttccattgccggcacatgttccacaaggagtgcctgcccatgcccagcatgaactctgctgcacagttctgcaacatctgcagtgctaagaaccgtggaccaggaagtgcaattttggagatgaaaaaatagctcatttctccttgtcagtctccttgtcaccactctttttgagactgtttttgcaacaacaaaagcatttgttgacactcgtgctgttaagagatttgtttatgtttatattatactcaaaaacaatttcttcatctattcctgtactaatggtttctctttgcagttcacagagaatttggggctctcttcatgccttgaaattttggggtccatagtgaatattttgttatttatttgtttggctcattctttatatagtaatggaaacataagtctaggagttagaaatgaattttttagaccttagtaaaaccatttaaccataaaatggacaactgagaattctcccagctgcctgaaagcgtcgccaactgtggttatcctgcaagctgctacctgcaacttggacgttgtttccacgtgctctgctggctacgattcttgcattctgggtttggcttttttctgtgtcatcaactatggttatcctctaaataggcatttaatgaaacattgtacaaattgtcactcatttgatgacacctgggaataacattagcaggctgatgtcctgcaccattatgtttactaatcacatgttctgtgtgctgtgacgactgtcaaagagtatctggccatggcggacactcagcatttgttgattgaataaatgttagctcttc

SEQ ID NO: 430702 - DNA, 831 bp, Homo sapiens
ttagtgcccgctacttgagtttttaagaatatgtgcttgtcccaggactctaccctcttttgtgtaaaataatttttatgatctgggaagaccactcatctttttatttctgagccaaagcagataccaatgatgatattgacaactactgtcattaacatttctgtagttcttagtgtatgctaagttcattggttctgagtgatttcgtaatggcaactcgtttaattgtcacagtaactcaataaaatttttgtagataaactgagtctcagagagattagtgacttgcctaaggtcacagttggtacgtggcagagtcaggttttggggcccttctagagaaattatcggaatcctttgctctcccaaagggttttcctttccacttctccatcacctagaggttttccctgaagactgcttctcccccaacctgtccatgggaggtgtttagagctaaaaatagcaatgttagccaggtattgctcttctcattttaatgggtcacggcttatcttttgttccttttagtatttgcataagcttttcaagagagaccaccataaggggcagcgttaccatgaaaaacagatcagtctttatgctgaatatgatcgaccaaacttacttccctttctccgagacagtacccattgcccacttgaaaaggtaaggcacagactccccgacttgtacactttggatgaagaggttgtcattgatggtaagttgtttgtctttcttctctttctatctctgttcatctgtccctttccagggggaagactgttgctctcaaagaagtaggtttttggctgggacattctg

SEQ ID NO: 430703 - DNA, 6048 bp, Homo sapiens
ttgctgtcaggtgactctcccgtggcgccatggcggaagcagtggagcaggaaactgggtcccttgaagaatctacagatgagtctgaggaagaagagagcgaagaggaacccaagctgaagtatgaaaggctttccaatggggtaactgaaatacttcagaaggatgcagctagctgcatgacagtccatgacaagtttttggcattgggcacacattatggcaaggtttatttacttgatgtccaggggaacatcactcagaagtttgatgtaagtcctgtgaagataaatcagattagcttggatgaaagtggagagcacatgggtgtgtgttcagaggatggcaaggtgcaggtatttggactgtattctggagaagaatttcacgagacttttgactgtcccattaaaattattgctgtgcacccacatttcgtgagatccagttgcaagcagtttgtgaccggagggaagaagctgctactgtttgaacggtcttggatgaacagatggaagtctgctgttctgcatgaaggggaagggaacataaggagtgtgaagtggagaggccatctgattgcttgggccaataatatgggtgtgaagatttttgacatcatctcaaagcaaagaatcaccaatgtgccccgggatgatataagtcttcgcccagacatgtatccctgcagcctctgctggaaggacaatgtgacactgattattggctgggggacttctgtcaaggtgtgctcagtgaaggaacggcatgccagtgaaatgagggatttgccaagtcgatatgttgaaatagtgtctcagtttgaaactgaattctacatcagtggacttgcacctctctgtgatcagcttgttgtactttcgtatgtaaaggagatttcagaaaaaacggaaagagaatactgtgccaggcctagactggacatcatccagccactttctgagacttgtgaagagatctcttctgatgctttgacagtcagaggctttcaggagaatgaatgtagagattatcatttagaatactctgaaggggaatcacttttttacatcgtgagtccgagagatgttgtagtggccaaggaacgagaccaagatgatcacattgactggctccttgaaaagaagaaatatgaagaagcattgatggcagctgaaattagccaaaaaaatattaaaagacataagattctggatattggcttggcatatataaatcacctggtggagagaggagactatgacatagcagcacgcaaatgccagaaaattcttgggaaaaatgcagcactctgggaatatgaagtttataaatttaaagaaattggacagcttaaggctattagtccttatttgccaagaggtgatccagttctgaaaccactcatctatgaaatgatcttacatgaatttttggagagtgattatgagggttttgccacattgatccgagaatggcctggagatctgtataataattcagtcatagttcaagcagttcgggatcatttgaagaaagatagtcagaacaagactttacttaaaaccctggcagaattgtacacctatgacaagaactatggcaatgctctggaaatatacttaacattaagacataaagacgtttttcagttgatccacaagcataatcttttcagttctatcaaggataaaattgttttattaatggattttgattcagagaaagctgttgacatgcttttggacaatgaagataaaatttcaattaaaaaggtagtggaagaattggaagacagaccagagctacagcatgtgtatttgcataagcttttcaagagagaccaccataaggggcagcgttaccatgaaaaacagatcagtctttatgctgaatatgatcgaccaaacttacttccctttctccgagacagtacccattgcccacttgaaaaggctcttgagatctgtcaacagagaaactttgtagaagagacagtttatcttctgagccgaatgggtaatagccgaagtgccctgaagatgattatggaggaattacatgatgttgataaagcaatcgaatttgccaaggagcaagatgatggagagctgtgggaagatttgattttatattccattgacaaaccaccatttattactggcttgttaaacaacattggcacacatgttgacccaattctactgattcaccgtattaaggaaggaatggagatccccaatttgagagattccttggttaaaattctgcaagactacaatttgcaaattctgcttcgtgaaggctgcaagaagattctcgtagctgactctttgtccttactgaagaaaatgcaccgaactcaaatgaaaggtgttcttgttgatgaggagaacatctgtgagtcgtgcctttcccctattcttccatcagatgcagctaagcccttcagcgtggtggtcttccattgccggcacatgttccacaaggagtgcctgcccatgcccagcatgaactctgctgcacagttctgcaacatctgcagtgctaagaaccgtggaccaggaagtgcaattttggagatgaaaaaatagctcatttctccttgtcagtctccttgtcaccactctttttgagactgtttttgcaacaacaaaagcatttgttgacactcgtgctgttaagagatttgtttatgtttatattatactcaaaaacaatttcttcatctattcctgtactaatggtttctctttgcagttcacagagaatttggggctctcttcatgccttgaaattttggggtccatagtgaatattttgttatttatttgtttggctcattctttatatagtaatggaaacataagtctaggagttagaaatgaattttttagaccttagtaaaaccatttaaccataaaatggacaactgagaattctcccagctgcctgaaagcgtcgccaactgtggttatcctgcaagctgctacctgcaacttggacgttgtttccacgtgctctgctggctacgattcttgcattctgggtttggcttttttctgtgtcatcaactatggttatcctctaaataggcatttaatgaaacattgtacaaattgtcactcatttgatgacacctgggaataacattagcaggctgatgtcctgcaccattatgtttactaatcacatgttctgtgtgctgtgacgactgtcaaagagtatctggccatggcggacactcagcatttgttgattgaataaatgttagctcttctcattgtgaaggactcacttttactgggataaacaaatgcagttaagaattctggcacccttgtaaggaagaaaagagagttcaacaccttcgagtctgagcgcttgtggctagagtttgccaggagggaggaaaccagtgaccctgaaaactgagggtgcctcaggagcagtgggaccacctgatgctgaaggacggactaatgatgtttcctcttgccttctctggtgcctccattgccctcatggaacagagcatatcatagagggagaaaagtcaaacttgtaattgtgtcttacagttactggcttcatcttccttgggatatatggtcatcctctaatgagtgtaaaagtgcgcaaaacacatccttattgttcctgatctcttagtcccataaatgggaacaaatacagctttctgcttctttctttttggggaaaggacagggtgctagtgagtactgacagcatgccagctaccgaagtcacccagccattcccatgagcagcagttcatttaattgtcacagcgtcgccaggaagaagatctgataaacctaggtttacagataaagaaagcaaaatgtagagatgttgttgaggtcacagaggtgactgcctaacttcagagcagggcttctgatccctttaagaaattacagggccagccgggcatggtggctcacgcccgtaatcccagggctttgggaggccttggcaggtggatcacctgagatcgcacgttcgagaccagcctgaccaacatggagaaaccccatctctactaaaaacacaaattggccaggcatggtggtgcatgcctgtaatcccagctactcaggaggctgaggcaggagaatcacttgaccccaggagacgtaggttgtggtgagctgagatcgcgccattgcactccagcctgggcaacaagagcaaaactccgtctcaaaaaagaaaagaaaagaaaagaaatcatagggccaagttcaaaggaaatgcacagaacatatcttcacattagagttaagaattctctagcaaacaacagatttttttgttgttgttagtcacaaatacttagaactggaaggctctttgttattattgaatgtacccctcagccttctcagcatttccttatcccaagactagtgtgctttctgctacactgctagttttcagttttgttcttacccaattgttttttcttttcaacattaccaatttacagattcagtttattacatttacattaatcctcacttatgatttgagcaagctcatttccagaaaagtttactttaagatcatcaataggatttgctaatttcagtgaagtcattttgcttcaggggtaaattatcctagttaccaagtcctatttggacataaagaaaatcctacttatagaaaaggagaaaataattaaacagtcttcatttttaagtaactgatttaaaaggaaaataataaaatatgttcgtttatcatttcagaaattgctgtaacacactggaaaattcctgaacaatatagattttatcgttaataaaaaacactagctttcgttccttagaatgtcttttcttttgaataaacagtattgggtgatttattaaaggatattcaatcctttttacttttcatcaacctataagggcttaaatatggcaaaataatccaagtgttagtcaattatttttcatgtgtgactagcccaatttaaaatataggtaaaaaggaaacccattcccctcgttttggggaagaacatagttgcaaagtacacacttcataagctattctttttttttttttttttttttttttttttgagatggagtctcgttctgttgccttggctggagtgcagtgacatgatcttggctcactgcaacctccgcctcccaggttcaagtgattctcccgtctcagcttccggagtgggtgggagtgcaggcacgcaccaccatgcccagctaattttttgtactttggtagagatggggtttcaccatgttgcccaagctggtctcgaactcctgagctcaggaatccgcccacctcggccttccgaagtgttgggattacgggcgtaagtcaccatgcccagccaagaaagctattcttgaagtgtaaaacagccaggtgcaaaattattttggagtactttagtttgcttttgtttttagccaaagggatttcatactggtttaattatgttcatccttgagaatttttgagaagtttccaacagatttgtagttcattttgctgttgttacaatgtaaagctatatatagttgacccttgaacaacacaggttggaactgcaaggatccacttatacatggattttcttctgcctctgccacccttgagacggcaagaccaggccctccccttcctcctccttctcagcctactcagtatgaagacgacagagatgaaacacttatgatgatccacttctacttaatgagtagtaaatatattttcttttccttatgattttcttactattttctttagcttgctttattataagaatatagcatataatataaataaaatataaaatatgtgttaatggtctatttatgtcaccagtaaggcttccagtccacagtagtctattagtagttaggttttgggggaattatacgtggatttttgactgcatggggtgtcagcacctcatcccccacattgttcaaggttctactgtattttaatattaaaaaccaaacatgcattgagtaatta

SEQ ID NO: 430704 - DNA, 4857 bp, Homo sapiens
ttgctgtcaggtgactctcccgtggcgccatggcggaagcagtggagcaggaaactgggtcccttgaagaatctacagatgagtctgaggaagaagagagcgaagaggaacccaagctgaagtatgaaaggctttccaatggggtaactgaaatacttcagaaggatgcagctagctgcatgacagtccatgacaagtttttggcattgggcacacattatggcaaggtttatttacttgatgtccaggggaacatcactcagaagtttgatgtaagtcctgtgaagataaatcagattagcttggatgaaagtggagagcacatgggtgtgtgttcagaggatggcaaggtgcaggtatttggactgtattctggagaagaatttcacgagacttttgactgtcccattaaaattattgctgtgcacccacatttcgtgagatccagttgcaagcagtttgtgaccggagggaagaagctgctactgtttgaacggtcttggatgaacagatggaagtctgctgttctgcatgaaggggaagggaacataaggagtgtgaagtggagaggccatctgattgcttgggccaataatatgggtgtgaagatttttgacatcatctcaaagcaaagaatcaccaatgtgccccgggatgatataagtcttcgcccagacatgtatccctgcagcctctgctggaaggacaatgtgacactgattattggctgggggacttctgtcaaggtgtgctcagtgaaggaacggcatgccagtgaaatgagggatttgccaagtcgatatgttgaaatagtgtctcagtttgaaactgaattctacatcagtggacttgcacctctctgtgatcagcttgttgtactttcgtatgtaaaggagatttcagaaaaaacggaaagagaatactgtgccaggcctagactggacatcatccagccactttctgagacttgtgaagagatctcttctgatgctttgacagtcagaggctttcaggagaatgaatgtagagattatcatttagaatactctgaaggggaatcacttttttacatcgtgagtccgagagatgttgtagtggccaaggaacgagaccaagatgatcacattgactggctccttgaaaagaagaaatatgaagaagcattgatggcagctgaaattagccaaaaaaatattaaaagacataagattctggatattggcttggcatatataaatcacctggtggagagaggagactatgacatagcagcacgcaaatgccagaaaattcttgggaaaaatgcagcactctgggaatatgaagtttataaatttaaagaaattggacagcttaaggctattagtccttatttgccaagaggtgatccagttctgaaaccactcatctatgaaatgatcttacatgaatttttggagagtgattatgagggttttgccacattgatccgagaatggcctggagatctgtataataattcagtcatagttcaagcagttcgggatcatttgaagaaagatagtcagaacaagactttacttaaaaccctggcagaattgtacacctatgacaagaactatggcaatgctctggaaatatacttaacattaagacataaagacgtttttcagttgatccacaagcataatcttttcagttctatcaaggataaaattgttttattaatggattttgattcagagaaagctgttgacatgcttttggacaatgaagataaaatttcaattaaaaaggtagtggaagaattggaagacagaccagagctacagcatgtgtatttgcataagcttttcaagagagaccaccataaggggcagcgttaccatgaaaaacagatcagtctttatgctgaatatgatcgaccaaacttacttccctttctccgagacagtacccattgcccacttgaaaaggctcttgagatctgtcaacagagaaactttgtagaagagacagtttatcttctgagccgaatgggtaatagccgaagtgccctgaagatgattatggaggaattacatgatgttgataaagcaatcgaatttgccaaggagcaagatgatggagagctgtgggaagatttgattttatattccattgacaaaccaccatttattactggcttgttaaacaacattggcacacatgttgacccaattctactgattcaccgtattaaggaaggaatggagatccccaatttgagagattccttggttaaaattctgcaagactacaatttgcaaattctgcttcgtgaaggctgcaagaagattctcgtagctgactctttgtccttactgaagaaaatgcaccgaactcaaatgaaaggtgttcttgttgatgaggagaacatctgtgagtcgtgcctttcccctattcttccatcagatgcagctaagcccttcagcgtggtggtcttccattgccggcacatgttccacaaggagtgcctgcccatgcccagcatgaactctgctgcacagttctgcaacatctgcagtgctaagaaccgtggaccaggaagtgcaattttggagatgaaaaaatagctcatttctccttgtcagtctccttgtcaccactctttttgagactgtttttgcaacaacaaaagcatttgttgacactcgtgctgttaagagatttgtttatgtttatattatactcaaaaacaatttcttcatctattcctgtactaatggtttctctttgcagttcacagagaatttggggctctcttcatgccttgaaattttggggtccatagtgaatattttgttatttatttgtttggctcattctttatatagtaatggaaacataagtctaggagttagaaatgaattttttagaccttagtaaaaccatttaaccataaaatggacaactgagaattctcccagctgcctgaaagcgtcgccaactgtggttatcctgcaagctgctacctgcaacttggacgttgtttccacgtgctctgctggctacgattcttgcattctgggtttggcttttttctgtgtcatcaactatggttatcctctaaataggcatttaatgaaacattgtacaaattgtcactcatttgatgacacctgggaataacattagcaggctgatgtcctgcaccattatgtttactaatcacatgttctgtgtgctgtgacgactgtcaaagagtatctggccatggcggacactcagcatttgttgattgaataaatgttagctcttctcattgtgaaggactcacttttactgggataaacaaatgcagttaagaattctggcacccttgtaaggaagaaaagagagttcaacaccttcgagtctgagcgcttgtggctagagtttgccaggagggaggaaaccagtgaccctgaaaactgagggtgcctcaggagcagtgggaccacctgatgctgaaggacggactaatgatgtttcctcttgccttctctggtgcctccattgccctcatggaacagagcatatcatagagggagaaaagtcaaacttgtaattgtgtcttacagttactggcttcatcttccttgggatatatggtcatcctctaatgagtgtaaaagtgcgcaaaacacatccttattgttcctgatctcttagtcccataaatgggaacaaatacagctttctgcttctttctttttggggaaaggacagggtgctagtgagtactgacagcatgccagctaccgaagtcacccagccattcccatgagcagcagttcatttaattgtcacagcgtcgccaggaagaagatctgataaacctaggtttacagataaagaaagcaaaatgtagagatgttgttgaggtcacagaggtgactgcctaacttcagagcagggcttctgatccctttaagaaattacagggccagccgggcatggtggctcacgcccgtaatcccagggctttgggaggccttggcaggtggatcacctgagatcgcacgttcgagaccagcctgaccaacatggagaaaccccatctctactaaaaacacaaattggccaggcatggtggtgcatgcctgtaatcccagctactcaggaggctgaggcaggagaatcacttgaccccaggagacgtaggttgtggtgagctgagatcgcgccattgcactccagcctgggcaacaagagcaaaactccgtctcaaaaaagaaaagaaaagaaaagaaatcatagggccaagttcaaaggaaatgcacagaacatatcttcacattagagttaagaattctctagcaaacaacagatttttttgttgttgttagtcacaaatacttagaactggaaggctctttgttattattgaatgtacccctcagccttctcagcatttccttatcccaagactagtgtgctttctgctacactgctagttttcagttttgttcttacccaattgttttttcttttcaacattaccaatttacagattcagtttattacatttacattaatcctcacttatgatttgagcaagctcatttccagaaaagtttactttaagatcatcaataggatttgctaatttcagtgaagtcattttgcttcaggggtaaattatcctagttaccaagtcctatttggacataaagaaaatcctacttatagaaaaggagaaaataattaaacagtcttcatttttaagtaactgatttaaaaggaaaataataaaatatgttcgtttatcatttcagaaattgctgtaacacactggaaaattcctgaacaatatagattttatcgttaataaaaaacactagctttcgttcctta

SEQ ID NO: 430705 - DNA, 4864 bp, Homo sapiens
ctctggggaaaatgtctacttattctgtctctgtttgttttttgtttttttaatatatactttctttctgcctgggatgtttttactgccagcaaatgccagaaaattcttgggaaaaatgcagcactctgggaatatgaagtttataaatttaaagaaattggacagcttaaggctattagtccttatttgccaagaggtgatccagttctgaaaccactcatctatgaaatgatcttacatgaatttttggagagtgattatgagggttttgccacattgatccgagaatggcctggagatctgtataataattcagtcatagttcaagcagttcgggatcatttgaagaaagatagtcagaacaagactttacttaaaaccctggcagaattgtacacctatgacaagaactatggcaatgctctggaaatatacttaacattaagacataaagacgtttttcagttgatccacaagcataatcttttcagttctatcaaggataaaattgttttattaatggattttgattcagagaaagctgttgacatgcttttggacaatgaagataaaatttcaattaaaaaggtagtggaagaattggaagacagaccagagctacagcatgtgtatttgcataagcttttcaagagagaccaccataaggggcagcgttaccatgaaaaacagatcagtctttatgctgaatatgatcgaccaaacttacttccctttctccgagacagtacccattgcccacttgaaaaggctcttgagatctgtcaacagagaaactttgtagaagagacagtttatcttctgagccgaatgggtaatagccgaagtgccctgaagatgattatggaggaattacatgatgttgataaagcaatcgaatttgccaaggagcaagatgatggagagctgtgggaagatttgattttatattccattgacaaaccaccatttattactggcttgttaaacaacattggcacacatgttgacccaattctactgattcaccgtattaaggaaggaatggagatccccaatttgagagattccttggttaaaattctgcaagactacaatttgcaaattctgcttcgtgaaggctgcaagaagattctcgtagctgactctttgtccttactgaagaaaatgcaccgaactcaaatgaaaggtgttcttgttgatgaggagaacatctgtgagtcgtgcctttcccctattcttccatcagatgcagctaagcccttcagcgtggtggtcttccattgccggcacatgttccacaaggagtgcctgcccatgcccagcatgaactctgctgcacagttctgcaacatctgcagtgctaagaaccgtggaccaggaagtgcaattttggagatgaaaaaatagctcatttctccttgtcagtctccttgtcaccactctttttgagactgtttttgcaacaacaaaagcatttgttgacactcgtgctgttaagagatttgtttatgtttatattatactcaaaaacaatttcttcatctattcctgtactaatggtttctctttgcagttcacagagaatttggggctctcttcatgccttgaaattttggggtccatagtgaatattttgttatttatttgtttggctcattctttatatagtaatggaaacataagtctaggagttagaaatgaattttttagaccttagtaaaaccatttaaccataaaatggacaactgagaattctcccagctgcctgaaagcgtcgccaactgtggttatcctgcaagctgctacctgcaacttggacgttgtttccacgtgctctgctggctacgattcttgcattctgggtttggcttttttctgtgtcatcaactatggttatcctctaaataggcatttaatgaaacattgtacaaattgtcactcatttgatgacacctgggaataacattagcaggctgatgtcctgcaccattatgtttactaatcacatgttctgtgtgctgtgacgactgtcaaagagtatctggccatggcggacactcagcatttgttgattgaataaatgttagctcttctcattgtgaaggactcacttttactgggataaacaaatgcagttaagaattctggcacccttgtaaggaagaaaagagagttcaacaccttcgagtctgagcgcttgtggctagagtttgccaggagggaggaaaccagtgaccctgaaaactgagggtgcctcaggagcagtgggaccacctgatgctgaaggacggactaatgatgtttcctcttgccttctctggtgcctccattgccctcatggaacagagcatatcatagagggagaaaagtcaaacttgtaattgtgtcttacagttactggcttcatcttccttgggatatatggtcatcctctaatgagtgtaaaagtgcgcaaaacacatccttattgttcctgatctcttagtcccataaatgggaacaaatacagctttctgcttctttctttttggggaaaggacagggtgctagtgagtactgacagcatgccagctaccgaagtcacccagccattcccatgagcagcagttcatttaattgtcacagcgtcgccaggaagaagatctgataaacctaggtttacagataaagaaagcaaaatgtagagatgttgttgaggtcacagaggtgactgcctaacttcagagcagggcttctgatccctttaagaaattacagggccagccgggcatggtggctcacgcccgtaatcccagggctttgggaggccttggcaggtggatcacctgagatcgcacgttcgagaccagcctgaccaacatggagaaaccccatctctactaaaaacacaaattggccaggcatggtggtgcatgcctgtaatcccagctactcaggaggctgaggcaggagaatcacttgaccccaggagacgtaggttgtggtgagctgagatcgcgccattgcactccagcctgggcaacaagagcaaaactccgtctcaaaaaagaaaagaaaagaaaagaaatcatagggccaagttcaaaggaaatgcacagaacatatcttcacattagagttaagaattctctagcaaacaacagatttttttgttgttgttagtcacaaatacttagaactggaaggctctttgttattattgaatgtacccctcagccttctcagcatttccttatcccaagactagtgtgctttctgctacactgctagttttcagttttgttcttacccaattgttttttcttttcaacattaccaatttacagattcagtttattacatttacattaatcctcacttatgatttgagcaagctcatttccagaaaagtttactttaagatcatcaataggatttgctaatttcagtgaagtcattttgcttcaggggtaaattatcctagttaccaagtcctatttggacataaagaaaatcctacttatagaaaaggagaaaataattaaacagtcttcatttttaagtaactgatttaaaaggaaaataataaaatatgttcgtttatcatttcagaaattgctgtaacacactggaaaattcctgaacaatatagattttatcgttaataaaaaacactagctttcgttccttagaatgtcttttcttttgaataaacagtattgggtgatttattaaaggatattcaatcctttttacttttcatcaacctataagggcttaaatatggcaaaataatccaagtgttagtcaattatttttcatgtgtgactagcccaatttaaaatataggtaaaaaggaaacccattcccctcgttttggggaagaacatagttgcaaagtacacacttcataagctattctttttttttttttttttttttttttttttgagatggagtctcgttctgttgccttggctggagtgcagtgacatgatcttggctcactgcaacctccgcctcccaggttcaagtgattctcccgtctcagcttccggagtgggtgggagtgcaggcacgcaccaccatgcccagctaattttttgtactttggtagagatggggtttcaccatgttgcccaagctggtctcgaactcctgagctcaggaatccgcccacctcggccttccgaagtgttgggattacgggcgtaagtcaccatgcccagccaagaaagctattcttgaagtgtaaaacagccaggtgcaaaattattttggagtactttagtttgcttttgtttttagccaaagggatttcatactggtttaattatgttcatccttgagaatttttgagaagtttccaacagatttgtagttcattttgctgttgttacaatgtaaagctatatatagttgacccttgaacaacacaggttggaactgcaaggatccacttatacatggattttcttctgcctctgccacccttgagacggcaagaccaggccctccccttcctcctccttctcagcctactcagtatgaagacgacagagatgaaacacttatgatgatccacttctacttaatgagtagtaaatatattttcttttccttatgattttcttactattttctttagcttgctttattataagaatatagcatataatataaataaaatataaaatatgtgttaatggtctatttatgtcaccagtaaggcttccagtccacagtagtctattagtagttaggttttgggggaattatacgtggatttttgactgcatggggtgtcagcacctcatcccccacattgttcaaggttctactgtattttaatattaaaaaccaaacatgcattgagtaatta

SEQ ID NO: 430706 - DNA, 4765 bp, Homo sapiens
ttagtgcccgctacttgagtttttaagaatatgtgcttgtcccaggactctaccctcttttgtgtaaaataatttttatgatctgggaagaccactcatctttttatttctgagccaaagcagataccaatgatgatattgacaactactgtcattaacatttctgtagttcttagtgtatgctaagttcattggttctgagtgatttcgtaatggcaactcgtttaattgtcacagtaactcaataaaatttttgtagataaactgagtctcagagagattagtgacttgcctaaggtcacagttggtacgtggcagagtcaggttttggggcccttctagagaaattatcggaatcctttgctctcccaaagggttttcctttccacttctccatcacctagaggttttccctgaagactgcttctcccccaacctgtccatgggaggtgtttagagctaaaaatagcaatgttagccaggtattgctcttctcattttaatgggtcacggcttatcttttgttccttttagtatttgcataagcttttcaagagagaccaccataaggggcagcgttaccatgaaaaacagatcagtctttatgctgaatatgatcgaccaaacttacttccctttctccgagacagtacccattgcccacttgaaaaggctcttgagatctgtcaacagagaaactttgtagaagagacagtttatcttctgagccgaatgggtaatagccgaagtgccctgaagatgattatggaggaattacatgatgttgataaagcaatcgaatttgccaaggagcaagatgatggagagctgtgggaagatttgattttatattccattgacaaaccaccatttattactggcttgttaaacaacattggcacacatgttgacccaattctactgattcaccgtattaaggaaggaatggagatccccaatttgagagattccttggttaaaattctgcaagactacaatttgcaaattctgcttcgtgaaggctgcaagaagattctcgtagctgactctttgtccttactgaagaaaatgcaccgaactcaaatgaaaggtgttcttgttgatgaggagaacatctgtgagtcgtgcctttcccctattcttccatcagatgcagctaagcccttcagcgtggtggtcttccattgccggcacatgttccacaaggagtgcctgcccatgcccagcatgaactctgctgcacagttctgcaacatctgcagtgctaagaaccgtggaccaggaagtgcaattttggagatgaaaaaatagctcatttctccttgtcagtctccttgtcaccactctttttgagactgtttttgcaacaacaaaagcatttgttgacactcgtgctgttaagagatttgtttatgtttatattatactcaaaaacaatttcttcatctattcctgtactaatggtttctctttgcagttcacagagaatttggggctctcttcatgccttgaaattttggggtccatagtgaatattttgttatttatttgtttggctcattctttatatagtaatggaaacataagtctaggagttagaaatgaattttttagaccttagtaaaaccatttaaccataaaatggacaactgagaattctcccagctgcctgaaagcgtcgccaactgtggttatcctgcaagctgctacctgcaacttggacgttgtttccacgtgctctgctggctacgattcttgcattctgggtttggcttttttctgtgtcatcaactatggttatcctctaaataggcatttaatgaaacattgtacaaattgtcactcatttgatgacacctgggaataacattagcaggctgatgtcctgcaccattatgtttactaatcacatgttctgtgtgctgtgacgactgtcaaagagtatctggccatggcggacactcagcatttgttgattgaataaatgttagctcttctcattgtgaaggactcacttttactgggataaacaaatgcagttaagaattctggcacccttgtaaggaagaaaagagagttcaacaccttcgagtctgagcgcttgtggctagagtttgccaggagggaggaaaccagtgaccctgaaaactgagggtgcctcaggagcagtgggaccacctgatgctgaaggacggactaatgatgtttcctcttgccttctctggtgcctccattgccctcatggaacagagcatatcatagagggagaaaagtcaaacttgtaattgtgtcttacagttactggcttcatcttccttgggatatatggtcatcctctaatgagtgtaaaagtgcgcaaaacacatccttattgttcctgatctcttagtcccataaatgggaacaaatacagctttctgcttctttctttttggggaaaggacagggtgctagtgagtactgacagcatgccagctaccgaagtcacccagccattcccatgagcagcagttcatttaattgtcacagcgtcgccaggaagaagatctgataaacctaggtttacagataaagaaagcaaaatgtagagatgttgttgaggtcacagaggtgactgcctaacttcagagcagggcttctgatccctttaagaaattacagggccagccgggcatggtggctcacgcccgtaatcccagggctttgggaggccttggcaggtggatcacctgagatcgcacgttcgagaccagcctgaccaacatggagaaaccccatctctactaaaaacacaaattggccaggcatggtggtgcatgcctgtaatcccagctactcaggaggctgaggcaggagaatcacttgaccccaggagacgtaggttgtggtgagctgagatcgcgccattgcactccagcctgggcaacaagagcaaaactccgtctcaaaaaagaaaagaaaagaaaagaaatcatagggccaagttcaaaggaaatgcacagaacatatcttcacattagagttaagaattctctagcaaacaacagatttttttgttgttgttagtcacaaatacttagaactggaaggctctttgttattattgaatgtacccctcagccttctcagcatttccttatcccaagactagtgtgctttctgctacactgctagttttcagttttgttcttacccaattgttttttcttttcaacattaccaatttacagattcagtttattacatttacattaatcctcacttatgatttgagcaagctcatttccagaaaagtttactttaagatcatcaataggatttgctaatttcagtgaagtcattttgcttcaggggtaaattatcctagttaccaagtcctatttggacataaagaaaatcctacttatagaaaaggagaaaataattaaacagtcttcatttttaagtaactgatttaaaaggaaaataataaaatatgttcgtttatcatttcagaaattgctgtaacacactggaaaattcctgaacaatatagattttatcgttaataaaaaacactagctttcgttccttagaatgtcttttcttttgaataaacagtattgggtgatttattaaaggatattcaatcctttttacttttcatcaacctataagggcttaaatatggcaaaataatccaagtgttagtcaattatttttcatgtgtgactagcccaatttaaaatataggtaaaaaggaaacccattcccctcgttttggggaagaacatagttgcaaagtacacacttcataagctattctttttttttttttttttttttttttttttgagatggagtctcgttctgttgccttggctggagtgcagtgacatgatcttggctcactgcaacctccgcctcccaggttcaagtgattctcccgtctcagcttccggagtgggtgggagtgcaggcacgcaccaccatgcccagctaattttttgtactttggtagagatggggtttcaccatgttgcccaagctggtctcgaactcctgagctcaggaatccgcccacctcggccttccgaagtgttgggattacgggcgtaagtcaccatgcccagccaagaaagctattcttgaagtgtaaaacagccaggtgcaaaattattttggagtactttagtttgcttttgtttttagccaaagggatttcatactggtttaattatgttcatccttgagaatttttgagaagtttccaacagatttgtagttcattttgctgttgttacaatgtaaagctatatatagttgacccttgaacaacacaggttggaactgcaaggatccacttatacatggattttcttctgcctctgccacccttgagacggcaagaccaggccctccccttcctcctccttctcagcctactcagtatgaagacgacagagatgaaacacttatgatgatccacttctacttaatgagtagtaaatatattttcttttccttatgattttcttactattttctttagcttgctttattataagaatatagcatataatataaataaaatataaaatatgtgttaatggtctatttatgtcaccagtaaggcttccagtccacagtagtctattagtagttaggttttgggggaattatacgtggatttttgactgcatggggtgtcagcacctcatcccccacattgttcaaggttctactgtattttaatattaaaaaccaaacatgcattgagtaatta

SEQ ID NO: 430707 - DNA, 4647 bp, Homo sapiens
atttcaatttaatttaattttaatcaatttaaacttaaatagacacatagagcaagtggctgctgtcttggataactcagatgaggcttcaaactgcaaactcttttgtggtttgagactagcatgttcttaagcattctcatgtgcagaagaaaatgggtaatggttctgtctgaaatcttgaatggtattttaaagtgtgtaagtgaatttccaagtacagaattgattcatggataccttttaataataaattattttaagcaacataaatgcttatcattagtcagactatctttctctaaacattctccttattcagttgtattacagtgttctatttatctgtgaatggcagtcccactcaactataaactatctgtatcttaacacccagaacaaatctagggagatgtgttctttatttgtttgctttgttttatttttaaagaagctgtggaaaaattctttcaagtgtaagtttaaatgactttattactgtttgttcttatttggtcgcctatagtaacatttttaccctgctttaattgaaggctcttgagatctgtcaacagagaaactttgtagaagagacagtttatcttctgagccgaatgggtaatagccgaagtgccctgaagatgattatggaggaattacatgatgttgataaagcaatcgaatttgccaaggagcaagatgatggagagctgtgggaagatttgattttatattccattgacaaaccaccatttattactggcttgttaaacaacattggcacacatgttgacccaattctactgattcaccgtattaaggaaggaatggagatccccaatttgagagattccttggttaaaattctgcaagactacaatttgcaaattctgcttcgtgaaggctgcaagaagattctcgtagctgactctttgtccttactgaagaaaatgcaccgaactcaaatgaaaggtgttcttgttgatgaggagaacatctgtgagtcgtgcctttcccctattcttccatcagatgcagctaagcccttcagcgtggtggtcttccattgccggcacatgttccacaaggagtgcctgcccatgcccagcatgaactctgctgcacagttctgcaacatctgcagtgctaagaaccgtggaccaggaagtgcaattttggagatgaaaaaatagctcatttctccttgtcagtctccttgtcaccactctttttgagactgtttttgcaacaacaaaagcatttgttgacactcgtgctgttaagagatttgtttatgtttatattatactcaaaaacaatttcttcatctattcctgtactaatggtttctctttgcagttcacagagaatttggggctctcttcatgccttgaaattttggggtccatagtgaatattttgttatttatttgtttggctcattctttatatagtaatggaaacataagtctaggagttagaaatgaattttttagaccttagtaaaaccatttaaccataaaatggacaactgagaattctcccagctgcctgaaagcgtcgccaactgtggttatcctgcaagctgctacctgcaacttggacgttgtttccacgtgctctgctggctacgattcttgcattctgggtttggcttttttctgtgtcatcaactatggttatcctctaaataggcatttaatgaaacattgtacaaattgtcactcatttgatgacacctgggaataacattagcaggctgatgtcctgcaccattatgtttactaatcacatgttctgtgtgctgtgacgactgtcaaagagtatctggccatggcggacactcagcatttgttgattgaataaatgttagctcttctcattgtgaaggactcacttttactgggataaacaaatgcagttaagaattctggcacccttgtaaggaagaaaagagagttcaacaccttcgagtctgagcgcttgtggctagagtttgccaggagggaggaaaccagtgaccctgaaaactgagggtgcctcaggagcagtgggaccacctgatgctgaaggacggactaatgatgtttcctcttgccttctctggtgcctccattgccctcatggaacagagcatatcatagagggagaaaagtcaaacttgtaattgtgtcttacagttactggcttcatcttccttgggatatatggtcatcctctaatgagtgtaaaagtgcgcaaaacacatccttattgttcctgatctcttagtcccataaatgggaacaaatacagctttctgcttctttctttttggggaaaggacagggtgctagtgagtactgacagcatgccagctaccgaagtcacccagccattcccatgagcagcagttcatttaattgtcacagcgtcgccaggaagaagatctgataaacctaggtttacagataaagaaagcaaaatgtagagatgttgttgaggtcacagaggtgactgcctaacttcagagcagggcttctgatccctttaagaaattacagggccagccgggcatggtggctcacgcccgtaatcccagggctttgggaggccttggcaggtggatcacctgagatcgcacgttcgagaccagcctgaccaacatggagaaaccccatctctactaaaaacacaaattggccaggcatggtggtgcatgcctgtaatcccagctactcaggaggctgaggcaggagaatcacttgaccccaggagacgtaggttgtggtgagctgagatcgcgccattgcactccagcctgggcaacaagagcaaaactccgtctcaaaaaagaaaagaaaagaaaagaaatcatagggccaagttcaaaggaaatgcacagaacatatcttcacattagagttaagaattctctagcaaacaacagatttttttgttgttgttagtcacaaatacttagaactggaaggctctttgttattattgaatgtacccctcagccttctcagcatttccttatcccaagactagtgtgctttctgctacactgctagttttcagttttgttcttacccaattgttttttcttttcaacattaccaatttacagattcagtttattacatttacattaatcctcacttatgatttgagcaagctcatttccagaaaagtttactttaagatcatcaataggatttgctaatttcagtgaagtcattttgcttcaggggtaaattatcctagttaccaagtcctatttggacataaagaaaatcctacttatagaaaaggagaaaataattaaacagtcttcatttttaagtaactgatttaaaaggaaaataataaaatatgttcgtttatcatttcagaaattgctgtaacacactggaaaattcctgaacaatatagattttatcgttaataaaaaacactagctttcgttccttagaatgtcttttcttttgaataaacagtattgggtgatttattaaaggatattcaatcctttttacttttcatcaacctataagggcttaaatatggcaaaataatccaagtgttagtcaattatttttcatgtgtgactagcccaatttaaaatataggtaaaaaggaaacccattcccctcgttttggggaagaacatagttgcaaagtacacacttcataagctattctttttttttttttttttttttttttttttgagatggagtctcgttctgttgccttggctggagtgcagtgacatgatcttggctcactgcaacctccgcctcccaggttcaagtgattctcccgtctcagcttccggagtgggtgggagtgcaggcacgcaccaccatgcccagctaattttttgtactttggtagagatggggtttcaccatgttgcccaagctggtctcgaactcctgagctcaggaatccgcccacctcggccttccgaagtgttgggattacgggcgtaagtcaccatgcccagccaagaaagctattcttgaagtgtaaaacagccaggtgcaaaattattttggagtactttagtttgcttttgtttttagccaaagggatttcatactggtttaattatgttcatccttgagaatttttgagaagtttccaacagatttgtagttcattttgctgttgttacaatgtaaagctatatatagttgacccttgaacaacacaggttggaactgcaaggatccacttatacatggattttcttctgcctctgccacccttgagacggcaagaccaggccctccccttcctcctccttctcagcctactcagtatgaagacgacagagatgaaacacttatgatgatccacttctacttaatgagtagtaaatatattttcttttccttatgattttcttactattttctttagcttgctttattataagaatatagcatataatataaataaaatataaaatatgtgttaatggtctatttatgtcaccagtaaggcttccagtccacagtagtctattagtagttaggttttgggggaattatacgtggatttttgactgcatggggtgtcagcacctcatcccccacattgttcaaggttctactgtattttaatattaaaaaccaaacatgcattgagtaatta

SEQ ID NO: 430708 - DNA, 4478 bp, Homo sapiens
cttaatggagggaaacagagcttaaacaaatgactacagatttggaaggaagcagtgctgtaaggaaacctgaagtagtgtaaagagagaaagcttagtgggaaaggccctttcttttcatttggtgtcttgttttctactcttgctcatgaaatgttctgagtagcttcaaatatgttttaaattgaattgtgtagagtccagtacctctgagaggtaactgagtgcagctattctagggagatgtgttctttatttgtttgctttgttttatttttaaagaagctgtggaaaaattctttcaagtgtaagtttaaatgactttattactgtttgttcttatttggtcgcctatagtaacatttttaccctgctttaattgaaggctcttgagatctgtcaacagagaaactttgtagaagagacagtttatcttctgagccgaatgggtaatagccgaagtgccctgaagatgattatggaggaattacatgatgttgataaagcaatcgaatttgccaaggagcaagatgatggagagctgtgggaagatttgattttatattccattgacaaaccaccatttattactggcttgttaaacaacattggcacacatgttgacccaattctactgattcaccgtattaaggaaggaatggagatccccaatttgagagattccttggttaaaattctgcaagactacaatttgcaaattctgcttcgtgaaggctgcaagaagattctcgtagctgactctttgtccttactgaagaaaatgcaccgaactcaaatgaaaggtgttcttgttgatgaggagaacatctgtgagtcgtgcctttcccctattcttccatcagatgcagctaagcccttcagcgtggtggtcttccattgccggcacatgttccacaaggagtgcctgcccatgcccagcatgaactctgctgcacagttctgcaacatctgcagtgctaagaaccgtggaccaggaagtgcaattttggagatgaaaaaatagctcatttctccttgtcagtctccttgtcaccactctttttgagactgtttttgcaacaacaaaagcatttgttgacactcgtgctgttaagagatttgtttatgtttatattatactcaaaaacaatttcttcatctattcctgtactaatggtttctctttgcagttcacagagaatttggggctctcttcatgccttgaaattttggggtccatagtgaatattttgttatttatttgtttggctcattctttatatagtaatggaaacataagtctaggagttagaaatgaattttttagaccttagtaaaaccatttaaccataaaatggacaactgagaattctcccagctgcctgaaagcgtcgccaactgtggttatcctgcaagctgctacctgcaacttggacgttgtttccacgtgctctgctggctacgattcttgcattctgggtttggcttttttctgtgtcatcaactatggttatcctctaaataggcatttaatgaaacattgtacaaattgtcactcatttgatgacacctgggaataacattagcaggctgatgtcctgcaccattatgtttactaatcacatgttctgtgtgctgtgacgactgtcaaagagtatctggccatggcggacactcagcatttgttgattgaataaatgttagctcttctcattgtgaaggactcacttttactgggataaacaaatgcagttaagaattctggcacccttgtaaggaagaaaagagagttcaacaccttcgagtctgagcgcttgtggctagagtttgccaggagggaggaaaccagtgaccctgaaaactgagggtgcctcaggagcagtgggaccacctgatgctgaaggacggactaatgatgtttcctcttgccttctctggtgcctccattgccctcatggaacagagcatatcatagagggagaaaagtcaaacttgtaattgtgtcttacagttactggcttcatcttccttgggatatatggtcatcctctaatgagtgtaaaagtgcgcaaaacacatccttattgttcctgatctcttagtcccataaatgggaacaaatacagctttctgcttctttctttttggggaaaggacagggtgctagtgagtactgacagcatgccagctaccgaagtcacccagccattcccatgagcagcagttcatttaattgtcacagcgtcgccaggaagaagatctgataaacctaggtttacagataaagaaagcaaaatgtagagatgttgttgaggtcacagaggtgactgcctaacttcagagcagggcttctgatccctttaagaaattacagggccagccgggcatggtggctcacgcccgtaatcccagggctttgggaggccttggcaggtggatcacctgagatcgcacgttcgagaccagcctgaccaacatggagaaaccccatctctactaaaaacacaaattggccaggcatggtggtgcatgcctgtaatcccagctactcaggaggctgaggcaggagaatcacttgaccccaggagacgtaggttgtggtgagctgagatcgcgccattgcactccagcctgggcaacaagagcaaaactccgtctcaaaaaagaaaagaaaagaaaagaaatcatagggccaagttcaaaggaaatgcacagaacatatcttcacattagagttaagaattctctagcaaacaacagatttttttgttgttgttagtcacaaatacttagaactggaaggctctttgttattattgaatgtacccctcagccttctcagcatttccttatcccaagactagtgtgctttctgctacactgctagttttcagttttgttcttacccaattgttttttcttttcaacattaccaatttacagattcagtttattacatttacattaatcctcacttatgatttgagcaagctcatttccagaaaagtttactttaagatcatcaataggatttgctaatttcagtgaagtcattttgcttcaggggtaaattatcctagttaccaagtcctatttggacataaagaaaatcctacttatagaaaaggagaaaataattaaacagtcttcatttttaagtaactgatttaaaaggaaaataataaaatatgttcgtttatcatttcagaaattgctgtaacacactggaaaattcctgaacaatatagattttatcgttaataaaaaacactagctttcgttccttagaatgtcttttcttttgaataaacagtattgggtgatttattaaaggatattcaatcctttttacttttcatcaacctataagggcttaaatatggcaaaataatccaagtgttagtcaattatttttcatgtgtgactagcccaatttaaaatataggtaaaaaggaaacccattcccctcgttttggggaagaacatagttgcaaagtacacacttcataagctattctttttttttttttttttttttttttttttgagatggagtctcgttctgttgccttggctggagtgcagtgacatgatcttggctcactgcaacctccgcctcccaggttcaagtgattctcccgtctcagcttccggagtgggtgggagtgcaggcacgcaccaccatgcccagctaattttttgtactttggtagagatggggtttcaccatgttgcccaagctggtctcgaactcctgagctcaggaatccgcccacctcggccttccgaagtgttgggattacgggcgtaagtcaccatgcccagccaagaaagctattcttgaagtgtaaaacagccaggtgcaaaattattttggagtactttagtttgcttttgtttttagccaaagggatttcatactggtttaattatgttcatccttgagaatttttgagaagtttccaacagatttgtagttcattttgctgttgttacaatgtaaagctatatatagttgacccttgaacaacacaggttggaactgcaaggatccacttatacatggattttcttctgcctctgccacccttgagacggcaagaccaggccctccccttcctcctccttctcagcctactcagtatgaagacgacagagatgaaacacttatgatgatccacttctacttaatgagtagtaaatatattttcttttccttatgattttcttactattttctttagcttgctttattataagaatatagcatataatataaataaaatataaaatatgtgttaatggtctatttatgtcaccagtaaggcttccagtccacagtagtctattagtagttaggttttgggggaattatacgtggatttttgactgcatggggtgtcagcacctcatcccccacattgttcaaggttctactgtattttaatattaaaaaccaaacatgcattgagtaatta

SEQ ID NO: 430709 - DNA, 3813 bp, Homo sapiens
tcgcatagcaacatgattataatacctgttttgtgtctgatcataccacccctcaggaatgcttttgtaaataagccattctctaaaggcaccttattgctgaaaattaaactgcaactcgactttcagtcgggattggtttaaaatgatcttgcttgttgcattaagttctcctcctttctctgccctcctcgccagatgcagctaagcccttcagcgtggtggtcttccattgccggcacatgttccacaaggagtgcctgcccatgcccagcatgaactctgctgcacagttctgcaacatctgcagtgctaagaaccgtggaccaggaagtgcaattttggagatgaaaaaatagctcatttctccttgtcagtctccttgtcaccactctttttgagactgtttttgcaacaacaaaagcatttgttgacactcgtgctgttaagagatttgtttatgtttatattatactcaaaaacaatttcttcatctattcctgtactaatggtttctctttgcagttcacagagaatttggggctctcttcatgccttgaaattttggggtccatagtgaatattttgttatttatttgtttggctcattctttatatagtaatggaaacataagtctaggagttagaaatgaattttttagaccttagtaaaaccatttaaccataaaatggacaactgagaattctcccagctgcctgaaagcgtcgccaactgtggttatcctgcaagctgctacctgcaacttggacgttgtttccacgtgctctgctggctacgattcttgcattctgggtttggcttttttctgtgtcatcaactatggttatcctctaaataggcatttaatgaaacattgtacaaattgtcactcatttgatgacacctgggaataacattagcaggctgatgtcctgcaccattatgtttactaatcacatgttctgtgtgctgtgacgactgtcaaagagtatctggccatggcggacactcagcatttgttgattgaataaatgttagctcttctcattgtgaaggactcacttttactgggataaacaaatgcagttaagaattctggcacccttgtaaggaagaaaagagagttcaacaccttcgagtctgagcgcttgtggctagagtttgccaggagggaggaaaccagtgaccctgaaaactgagggtgcctcaggagcagtgggaccacctgatgctgaaggacggactaatgatgtttcctcttgccttctctggtgcctccattgccctcatggaacagagcatatcatagagggagaaaagtcaaacttgtaattgtgtcttacagttactggcttcatcttccttgggatatatggtcatcctctaatgagtgtaaaagtgcgcaaaacacatccttattgttcctgatctcttagtcccataaatgggaacaaatacagctttctgcttctttctttttggggaaaggacagggtgctagtgagtactgacagcatgccagctaccgaagtcacccagccattcccatgagcagcagttcatttaattgtcacagcgtcgccaggaagaagatctgataaacctaggtttacagataaagaaagcaaaatgtagagatgttgttgaggtcacagaggtgactgcctaacttcagagcagggcttctgatccctttaagaaattacagggccagccgggcatggtggctcacgcccgtaatcccagggctttgggaggccttggcaggtggatcacctgagatcgcacgttcgagaccagcctgaccaacatggagaaaccccatctctactaaaaacacaaattggccaggcatggtggtgcatgcctgtaatcccagctactcaggaggctgaggcaggagaatcacttgaccccaggagacgtaggttgtggtgagctgagatcgcgccattgcactccagcctgggcaacaagagcaaaactccgtctcaaaaaagaaaagaaaagaaaagaaatcatagggccaagttcaaaggaaatgcacagaacatatcttcacattagagttaagaattctctagcaaacaacagatttttttgttgttgttagtcacaaatacttagaactggaaggctctttgttattattgaatgtacccctcagccttctcagcatttccttatcccaagactagtgtgctttctgctacactgctagttttcagttttgttcttacccaattgttttttcttttcaacattaccaatttacagattcagtttattacatttacattaatcctcacttatgatttgagcaagctcatttccagaaaagtttactttaagatcatcaataggatttgctaatttcagtgaagtcattttgcttcaggggtaaattatcctagttaccaagtcctatttggacataaagaaaatcctacttatagaaaaggagaaaataattaaacagtcttcatttttaagtaactgatttaaaaggaaaataataaaatatgttcgtttatcatttcagaaattgctgtaacacactggaaaattcctgaacaatatagattttatcgttaataaaaaacactagctttcgttccttagaatgtcttttcttttgaataaacagtattgggtgatttattaaaggatattcaatcctttttacttttcatcaacctataagggcttaaatatggcaaaataatccaagtgttagtcaattatttttcatgtgtgactagcccaatttaaaatataggtaaaaaggaaacccattcccctcgttttggggaagaacatagttgcaaagtacacacttcataagctattctttttttttttttttttttttttttttttgagatggagtctcgttctgttgccttggctggagtgcagtgacatgatcttggctcactgcaacctccgcctcccaggttcaagtgattctcccgtctcagcttccggagtgggtgggagtgcaggcacgcaccaccatgcccagctaattttttgtactttggtagagatggggtttcaccatgttgcccaagctggtctcgaactcctgagctcaggaatccgcccacctcggccttccgaagtgttgggattacgggcgtaagtcaccatgcccagccaagaaagctattcttgaagtgtaaaacagccaggtgcaaaattattttggagtactttagtttgcttttgtttttagccaaagggatttcatactggtttaattatgttcatccttgagaatttttgagaagtttccaacagatttgtagttcattttgctgttgttacaatgtaaagctatatatagttgacccttgaacaacacaggttggaactgcaaggatccacttatacatggattttcttctgcctctgccacccttgagacggcaagaccaggccctccccttcctcctccttctcagcctactcagtatgaagacgacagagatgaaacacttatgatgatccacttctacttaatgagtagtaaatatattttcttttccttatgattttcttactattttctttagcttgctttattataagaatatagcatataatataaataaaatataaaatatgtgttaatggtctatttatgtcaccagtaaggcttccagtccacagtagtctattagtagttaggttttgggggaattatacgtggatttttgactgcatggggtgtcagcacctcatcccccacattgttcaaggttctactgtattttaatattaaaaaccaaacatgcattgagtaatta

SEQ ID NO: 430710 - DNA, 3301 bp, Homo sapiens
ttgctgtcaggtgactctcccgtggcgccatggcggaagcagtggagcaggaaactgggtcccttgaagaatctacagatgagtctgaggaagaagagagcgaagaggaacccaagctgaagtatgaaaggctttccaatggggtaactgaaatacttcagaaggatgcagctagctgcatgacagtccatgacaagtttttggcattgggcacacattatggcaaggtttatttacttgatgtccaggggaacatcactcagaagtttgatgtaagtcctgtgaagataaatcagattagcttggatgaaagtggagagcacatgggtgtgtgttcagaggatggcaaggtgcaggtatttggactgtattctggagaagaatttcacgagacttttgactgtcccattaaaattattgctgtgcacccacatttcgtgagatccagttgcaagcagtttgtgaccggagggaagaagctgctactgtttgaacggtcttggatgaacagatggaagtctgctgttctgcatgaaggggaagggaacataaggagtgtgaagtggagaggccatctgattgcttgggccaataatatgggtgtgaagatttttgacatcatctcaaagcaaagaatcaccaatgtgccccgggatgatataagtcttcgcccagacatgtatccctgcagcctctgctggaaggacaatgtgacactgattattggctgggggacttctgtcaaggtgtgctcagtgaaggaacggcatgccagtgaaatgagggatttgccaagtcgatatgttgaaatagtgtctcagtttgaaactgaattctacatcagtggacttgcacctctctgtgatcagcttgttgtactttcgtatgtaaaggagatttcagaaaaaacggaaagagaatactgtgccaggcctagactggacatcatccagccactttctgagacttgtgaagagatctcttctgatgctttgacagtcagaggctttcaggagaatgaatgtagagattatcatttagaatactctgaaggggaatcacttttttacatcgtgagtccgagagatgttgtagtggccaaggaacgagaccaagatgatcacattgactggctccttgaaaagaagaaatatgaagaagcattgatggcagctgaaattagccaaaaaaatattaaaagacataagattctggatattggcttggcatatataaatcacctggtggagagaggagactatgacatagcagcacgcaaatgccagaaaattcttgggaaaaatgcagcactctgggaatatgaagtttataaatttaaagaaattggacagcttaaggctattagtccttatttgccaagaggtgatccagttctgaaaccactcatctatgaaatgatcttacatgaatttttggagagtgattatgagggttttgccacattgatccgagaatggcctggagatctgtataataattcagtcatagttcaagcagttcgggatcatttgaagaaagatagtcagaacaagactttacttaaaaccctggcagaattgtacacctatgacaagaactatggcaatgctctggaaatatacttaacattaagacataaagacgtttttcagttgatccacaagcataatcttttcagttctatcaaggataaaattgttttattaatggattttgattcagagaaagctgttgacatgcttttggacaatgaagataaaatttcaattaaaaaggtagtggaagaattggaagacagaccagagctacagcatgtgtatttgcataagcttttcaagagagaccaccataaggggcagcgttaccatgaaaaacagatcagtctttatgctgaatatgatcgaccaaacttacttccctttctccgagacagtacccattgcccacttgaaaaggctcttgagatctgtcaacagagaaactttgtagaagagacagtttatcttctgagccgaatgggtaatagccgaagtgccctgaagatgattatggaggaattacatgatgttgataaagcaatcgaatttgccaaggagcaagatgatggagagctgtgggaagatttgattttatattccattgacaaaccaccatttattactggcttgttaaacaacattggcacacatgttgacccaattctactgattcaccgtattaaggaaggaatggagatccccaatttgagagattccttggttaaaattctgcaagactacaatttgcaaattctgcttcgtgaaggctgcaagaagattctcgtagctgactctttgtccttactgaagaaaatgcaccgaactcaaatgaaaggtgttcttgttgatgaggagaacatctgtgagtcgtgcctttcccctattcttccatcagatgcagctaagcccttcagcgtggtggtcttccattgccggcacatgttccacaaggagtgcctgcccatgcccagcatgaactctgctgcacagttctgcaacatctgcagtgctaagaaccgtggaccaggaagtgcaattttggagatgaaaaaatagctcatttctccttgtcagtctccttgtcaccactctttttgagactgtttttgcaacaacaaaagcatttgttgacactcgtgctgttaagagatttgtttatgtttatattatactcaaaaacaatttcttcatctattcctgtactaatggtttctctttgcagttcacagagaatttggggctctcttcatgccttgaaattttggggtccatagtgaatattttgttatttatttgtttggctcattctttatatagtaatggaaacataagtctaggagttagaaatgaattttttagaccttagtaaaaccatttaaccataaaatggacaactgagaattctcccagctgcctgaaagcgtcgccaactgtggttatcctgcaagctgctacctgcaacttggacgttgtttccacgtgctctgctggctacgattcttgcattctgggtttggcttttttctgtgtcatcaactatggttatcctctaaataggcatttaatgaaacattgtacaaattgtcactcatttgatgacacctgggaataacattagcaggctgatgtcctgcaccattatgtttactaatcacatgttctgtgtgctgtgacgactgtcaaagagtatctggccatggcggacactcagcatttgttgattgaataaatgttagctcttcaaaaaaagtcgacgcggccgc

SEQ ID NO: 430711 - DNA, 3374 bp, Homo sapiens
ttgctgtcaggtgactctcccgtggcgccatggcggaagcagtggagcaggaaactgggtcccttgaagaatctacagatgagtctgaggaagaagagagcgaagaggaacccaagctgaagtatgaaaggctttccaatggggtaactgaaatacttcagaaggatgcagctagctgcatgacagtccatgacaagtttttggcattgggcacacattatggcaaggtttatttacttgatgtccaggggaacatcactcagaagtttgatgtaagtcctgtgaagataaatcagattagcttggatgaaagtggagagcacatgggtgtgtgttcagaggatggcaaggtgcaggtatttggactgtattctggagaagaatttcacgagacttttgactgtcccattaaaattattgctgtgcacccacatttcgtgagatccagttgcaagcagtttgtgaccggagggaagaagctgctactgtttgaacggtcttggatgaacagatggaagtctgctgttctgcatgaaggggaagggaacataaggagtgtgaagtggagaggccatctgattgcttgggccaataatatgggtgtgaagatttttgacatcatctcaaagcaaagaatcaccaatgtgccccgggatgatataagtcttcgcccagacatgtatccctgcagcctctgctggaaggacaatgtgacactgattattggctgggggacttctgtcaaggtgtgctcagtgaaggaacggcatgccagtgaaatgagggatttgccaagtcgatatgttgaaatagtgtctcagtttgaaactgaattctacatcagtggacttgcacctctctgtgatcagcttgttgtactttcgtatgtaaaggagatttcagaaaaaacggaaagagaatactgtgccaggcctagactggacatcatccagccactttctgagacttgtgaagagatctcttctgatgctttgacagtcagaggctttcaggagaatgaatgtagagattatcatttagaatactctgaaggggaatcacttttttacatcgtgagtccgagagatgttgtagtggccaaggaacgagaccaagatgatcacattgactggctccttgaaaagaagaaatatgaagaagcattgatggcagctgaaattagccaaaaaaatattaaaagacataagattctggatattggcttggcatatataaatcacctggtggagagaggagactatgacatagcagcacgcaaatgccagaaaattcttgggaaaaatgcagcactctgggaatatgaagtttataaatttaaagaaattggacagcttaaggctattagtccttatttgccaagaggtgatccagttctgaaaccactcatctatgaaatgatcttacatgaatttttggagagtgattatgagggttttgccacattgatccgagaatggcctggagatctgtataataattcagtcatagttcaagcagttcgggatcatttgaagaaagatagtcagaacaagactttacttaaaaccctggcagaattgtacacctatgacaagaactatggcaatgctctggaaatatacttaacattaagacataaagacgtttttcagttgatccacaagcataatcttttcagttctatcaaggataaaattgttttattaatggattttgattcagagaaagctgttgacatgcttttggacaatgaagataaaatttcaattaaaaaggtagtggaagaattggaagacagaccagagctacagcatgtgtatttgcataagcttttcaagagagaccaccataaggggcagcgttaccatgaaaaacagatcagtctttatgctgaatatgatcgaccaaacttacttccctttctccgagacagtacccattgcccacttgaaaaggctcttgagatctgtcaacagagaaactttgtagaagagacagtttatcttctgagccgaatgggtaatagccgaagtgccctgaagatgattatggaggaattacatgatgttgataaagcaatcgaatttgccaaggagcaagatgatggagagctgtgggaagatttgattttatattccattgacaaaccaccatttattactggcttgttaaacaacattggcacacatgttgacccaattctactgattcaccgtattaaggaaggaatggagatccccaatttgagagattccttggttaaaattctgcaagactacaatttgcaaattctgcttcgtgaaggctgcaagaagattctcgtagctgactctttgtccttactgaagaaaatgcaccgaactcaaatgaaaggtgttcttgttgatgaggagaacatctgtgagtcgtgcctttcccctattcttccatcagaataacccagtggagagaagtgttgtggcttccatcctgctcagtggaatgctggtgctgccattgcttagagctgaggttctcaagctctaggatgcagctaagcccttcagcgtggtggtcttccattgccggcacatgttccacaaggagtgcctgcccatgcccagcatgaactctgctgcacagttctgcaacatctgcagtgctaagaaccgtggaccaggaagtgcaattttggagatgaaaaaatagctcatttctccttgtcagtctccttgtcaccactctttttgagactgtttttgcaacaacaaaagcatttgttgacactcgtgctgttaagagatttgtttatgtttatattatactcaaaaacaatttcttcatctattcctgtactaatggtttctctttgcagttcacagagaatttggggctctcttcatgccttgaaattttggggtccatagtgaatattttgttatttatttgtttggctcattctttatatagtaatggaaacataagtctaggagttagaaatgaattttttagaccttagtaaaaccatttaaccataaaatggacaactgagaattctcccagctgcctgaaagcgtcgccaactgtggttatcctgcaagctgctacctgcaacttggacgttgtttccacgtgctctgctggctacgattcttgcattctgggtttggcttttttctgtgtcatcaactatggttatcctctaaataggcatttaatgaaacattgtacaaattgtcactcatttgatgacacctgggaataacattagcaggctgatgtcctgcaccattatgtttactaatcacatgttctgtgtgctgtgacgactgtcaaagagtatctggccatggcggacactcagcatttgttgattgaataaatgttagctcttc

SEQ ID NO: 430712 - DNA, 2956 bp, Homo sapiens
ttgctgtcaggtgactctcccgtggcgccatggcggaagcagtggagcaggaaactgggtcccttgaagaatctacagatgagtctgaggaagaagagagcgaagaggaacccaagctgaagtatgaaaggctttccaatggggtaactgaaatacttcagaaggatgcagctagctgcatgacagtccatgacaagtttttggcattgggcacacattatggcaaggtttatttacttgatgtccaggggaacatcactcagaagtttgatgtaagtcctgtgaagataaatcagattagcttggatgaaagtggagagcacatgggtgtgtgttcagaggatggcaaggtgcaggtatttggactgtattctggagaagaatttcacgagacttttgactgtcccattaaaattattgctgtgcacccacatttcgtgagatccagttgcaagcagtttgtgaccggagggaagaagctgctactgtttgaacggtcttggatgaacagatggaagtctgctgttctgcatgaaggggaagggaacataaggagtgtgaagtggagaggccatctgattgcttgggccaataatatgggtgtgaagatttttgacatcatctcaaagcaaagaatcaccaatgtgccccgggatgatataagtcttcgcccagacatgtatccctgcagcctctgctggaaggacaatgtgacactgattattggctgggggacttctgtcaaggtgtgctcagtgaaggaacggcatgccagtgaaatgagggatttgccaagtcgatatgttgaaatagtgtctcagtttgaaactgaattctacatcagtggacttgcacctctctgtgatcagcttgttgtactttcgtatgtaaaggagatttcagaaaaaacggaaagagaatactgtgccaggcctagactggacatcatccagccactttctgagacttgtgaagagatctcttctgatgctttgacagtcagaggctttcaggagaatgaatgtagagattatcatttagaatactctgaaggggaatcacttttttacatcgtgagtccgagagatgttgtagtggccaaggaacgagaccaagatgatcacattgactggctccttgaaaagaagaaatatgaagaagcattgatggcagctgaaattagccaaaaaaatattaaaagacataagattctggatattggcttggcatatataaatcacctggtggagagaggagactatgacatagcagcacgcaaatgccagaaaattcttgggaaaaatgcagcactctgggaatatgaagtttataaatttaaagaaattggacagcttaaggctattagtccttatttgccaagaggtgatccagttctgaaaccactcatctatgaaatgatcttacatgaatttttggagagtgattatgagggttttgccacattgatccgagaatggcctggagatctgtataataattcagtcatagttcaagcagttcgggatcatttgaagaaagatagtcagaacaagactttacttaaaaccctggcagaattgtacacctatgacaagaactatggcaatgctctggaaatatacttaacattaagacataaagacgtttttcagttgatccacaagcataatcttttcagttctatcaaggataaaattgttttattaatggattttgattcagagaaagctgttgacatgcttttggacaatgaagataaaatttcaattaaaaaggtagtggaagaattggaagacagaccagagctacagcatgtgtatttgcataagcttttcaagagagaccaccataaggggcagcgttaccatgaaaaacagatcagtctttatgctgaatatgatcgaccaaacttacttccctttctccgagacagtacccattgcccacttgaaaaggctcttgagatctgtcaacagagaaactttgtagaagagacagtttatcttctgagccgaatgggtaatagccgaagtgccctgaagatgattatggaggaattacatgatgttgataaagcaatcgaatttgccaaggagcaagatgatggagagctgtgggaagatttgattttatattccattgacaaaccaccatttattactggcttgttaaacaacattggcacacatgttgacccaattctactgattcaccgtattaaggaaggaatggagatccccaatttgagagattccttggttaaaattctgcaagactacaatttgcaaattctgcttcgtgaaggctgcaagaagattctcgtagctgactctttgtccttactgaagaaaatgcaccgaactcaaatgaaaggtgttcttgttgatgaggagaacatctgtgagtcgtgcctttcccctattcttccatcagatgcagctaagcccttcagcgtggtggtcttccattgccggcacatgttccacaaggagtgcctgcccatgcccagcatggttggaactgcaaggatccacttatacatggattttcttctgcctctgccacccttgagacggcaagaccaggccctccccttcctcctccttctcagcctactcagtatgaagacgacagagatgaaacacttatgatgatccacttctacttaatgagtagtaaatatattttcttttccttatgattttcttactattttctttagcttgctttattataagaatatagcatataatataaataaaatataaaatatgtgttaatggtctatttatgtcaccagtaaggcttccagtccacagtagtctattagtagttaggttttgggggaattatacgtggatttttgactgcatggggtgtcagcacctcatcccccacattgttcaaggttctactgtattttaatattaaaaaccaaacatgcattgagtaatta

SEQ ID NO: 430713 - DNA, 2678 bp, Homo sapiens
ttgctgtcaggtgactctcccgtggcgccatggcggaagcagtggagcaggaaactgggtcccttgaagaatctacagatgagtctgaggaagaagagagcgaagaggaacccaagctgaagtatgaaaggctttccaatggggtaactgaaatacttcagaaggatgcagctagctgcatgacagtccatgacaagtttttggcattgggcacacattatggcaaggtttatttacttgatgtccaggggaacatcactcagaagtttgatgtaagtcctgtgaagataaatcagattagcttggatgaaagtggagagcacatgggtgtgtgttcagaggatggcaaggtgcaggtatttggactgtattctggagaagaatttcacgagacttttgactgtcccattaaaattattgctgtgcacccacatttcgtgagatccagttgcaagcagtttgtgaccggagggaagaagctgctactgtttgaacggtcttggatgaacagatggaagtctgctgttctgcatgaaggggaagggaacataaggagtgtgaagtggagaggccatctgattgcttgggccaataatatgggtgtgaagatttttgacatcatctcaaagcaaagaatcaccaatgtgccccgggatgatataagtcttcgcccagacatgtatccctgcagcctctgctggaaggacaatgtgacactgattattggctgggggacttctgtcaaggtgtgctcagtgaaggaacggcatgccagtgaaatgagggatttgccaagtcgatatgttgaaatagtgtctcagtttgaaactgaattctacatcagtggacttgcacctctctgtgatcagcttgttgtactttcgtatgtaaaggagatttcagaaaaaacggaaagagaatactgtgccaggcctagactggacatcatccagccactttctgagacttgtgaagagatctcttctgatgctttgacagtcagaggctttcaggagaatgaatgtagagattatcatttagaatactctgaaggggaatcacttttttacatcgtgagtccgagagatgttgtagtggccaaggaacgagaccaagatgatcacattgactggctccttgaaaagaagaaatatgaagaagcattgatggcagctgaaattagccaaaaaaatattaaaagacataagattctggatattggcttggcatatataaatcacctggtggagagaggagactatgacatagcagcacgcaaatgccagaaaattcttgggaaaaatgcagcactctgggaatatgaagtttataaatttaaagaaattggacagcttaaggctattagtccttatttgccaagaggtgatccagttctgaaaccactcatctatgaaatgatcttacatgaatttttggagagtgattatgagggttttgccacattgatccgagaatggcctggagatctgtataataattcagtcatagttcaagcagttcgggatcatttgaagaaagatagtcagaacaagactttacttaaaaccctggcagaattgtacacctatgacaagaactatggcaatgctctggaaatatacttaacattaagacataaagacgtttttcagttgatccacaagcataatcttttcagttctatcaaggataaaattgttttattaatggattttgattcagagaaagctgttgacatgcttttggacaatgaagataaaatttcaattaaaaaggtagtggaagaattggaagacagaccagagctacagcatgtgtatttgcataagcttttcaagagagaccaccataaggggcagcgttaccatgaaaaacagatcagtctttatgctgaatatgatcgaccaaacttacttccctttctccgagacagtacccattgcccacttgaaaaggctcttgagatctgtcaacagagaaactttgtagaagagacagtttatcttctgagccgaatgggtaatagccgaagtgccctgaagatgattatggaggaattacatgatgttgataaagcaatcgaatttgccaaggagcaagatgatggagagctgtgggaagatttgattttatattccattgacaaaccaccatttattactggcttgttaaacaacattggcacacatgttgacccaattctactgattcaccgtattaaggaaggaatggagatccccaatttgagagattccttggttaaaattctgcaagactacaatttgcaaattctgcttcgtgaaggctgcaagaagattctcgtagctgactctttgtccttactgaagaaaatgcaccgaactcaaatgaaaggtgttcttgttgatgaggagaacatctgtgagtcgtgcctttcccctattcttccatcagatgcagctgaaaacaatggaactggaaaatcttgtcttttagaaaagaaattaatcccaactatctctcttgcctaaaagataaatataggtaaacccaaggaaaggggaatttagtttctctacatgtcatttcggtctccaaactccctgttggctttttaatgcaattttaattgttggaataaaaaagtcccaagggtgttttgttactgttttctccatgaataaactcccttggtttta

SEQ ID NO: 430714 - DNA, 2358 bp, Homo sapiens
ttgctgtcaggtgactctcccgtggcgccatggcggaagcagtggagcaggaaactgggtcccttgaagaatctacagatgagtctgaggaagaagagagcgaagaggaacccaagctgaagtatgaaaggctttccaatggggtaactgaaatacttcagaaggatgcagctagctgcatgacagtccatgacaagtttttggcattgggcacacattatggcaaggtttatttacttgatgtccaggggaacatcactcagaagtttgatgtaagtcctgtgaagataaatcagattagcttggatgaaagtggagagcacatgggtgtgtgttcagaggatggcaaggtgcaggtatttggactgtattctggagaagaatttcacgagacttttgactgtcccattaaaattattgctgtgcacccacatttcgtgagatccagttgcaagcagtttgtgaccggagggaagaagctgctactgtttgaacggtcttggatgaacagatggaagtctgctgttctgcatgaaggggaagggaacataaggagtgtgaagtggagaggccatctgattgcttgggccaataatatgggtgtgaagatttttgacatcatctcaaagcaaagaatcaccaatgtgccccgggatgatataagtcttcgcccagacatgtatccctgcagcctctgctggaaggacaatgtgacactgattattggctgggggacttctgtcaaggtgtgctcagtgaaggaacggcatgccagtgaaatgagggatttgccaagtcgatatgttgaaatagtgtctcagtttgaaactgaattctacatcagtggacttgcacctctctgtgatcagcttgttgtactttcgtatgtaaaggagatttcagaaaaaacggaaagagaatactgtgccaggcctagactggacatcatccagccactttctgagacttgtgaagagatctcttctgatgctttgacagtcagaggctttcaggagaatgaatgtagagattatcatttagaatactctgaaggggaatcacttttttacatcgtgagtccgagagatgttgtagtggccaaggaacgagaccaagatgatcacattgactggctccttgaaaagaagaaatatgaagaagcattgatggcagctgaaattagccaaaaaaatattaaaagacataagattctggatattggcttggcatatataaatcacctggtggagagaggagactatgacatagcagcacgcaaatgccagaaaattcttgggaaaaatgcagcactctgggaatatgaagtttataaatttaaagaaattggacagcttaaggctattagtccttatttgccaagaggtgatccagttctgaaaccactcatctatgaaatgatcttacatgaatttttggagagtgattatgagggttttgccacattgatccgagaatggcctggagatctgtataataattcagtcatagttcaagcagttcgggatcatttgaagaaagatagtcagaacaagactttacttaaaaccctggcagaattgtacacctatgacaagaactatggcaatgctctggaaatatacttaacattaagacataaagacgtttttcagttgatccacaagcataatcttttcagttctatcaaggataaaattgttttattaatggattttgattcagagaaagctgttgacatgcttttggacaatgaagataaaatttcaattaaaaaggtagtggaagaattggaagacagaccagagctacagcatgtgtatttgcataagcttttcaagagagaccaccataaggggcagcgttaccatgaaaaacagatcagtctttatgctgaatatgatcgaccaaacttacttccctttctccgagacagtacccattgcccacttgaaaaggctcttgagatctgtcaacagagaaactttgtagaagagacagtttatcttctgagccgaatgggtaatagccgaagtgccctgaagatgattatggaggaattacatgatgttgataaagcaatcgaatttgccaaggagcaagatgatggagagctgtgggaagatttgattttatattccattgacaaaccaccatttattactggcttgttaaacaacattggcacacatgttgacccaattctactgattcaccgtattaaggaaggaatggagatccccaatttgagagattccttggttaaaattctgcaagactacaatttgcaacaattactatttttcaggatgctggtaacttctatagaacttgaattaaaacatttccttaaaaattcgg

SEQ ID NO: 430715 - DNA, 1837 bp, Homo sapiens
ttgctgtcaggtgactctcccgtggcgccatggcggaagcagtggagcaggaaactgggtcccttgaagaatctacagatgagtctgaggaagaagagagcgaagaggaacccaagctgaagtatgaaaggctttccaatggggtaactgaaatacttcagaaggatgcagctagctgcatgacagtccatgacaagtttttggcattgggcacacattatggcaaggtttatttacttgatgtccaggggaacatcactcagaagtttgatgtaagtcctgtgaagataaatcagattagcttggatgaaagtggagagcacatgggtgtgtgttcagaggatggcaaggtgcaggtatttggactgtattctggagaagaatttcacgagacttttgactgtcccattaaaattattgctgtgcacccacatttcgtgagatccagttgcaagcagtttgtgaccggagggaagaagctgctactgtttgaacggtcttggatgaacagatggaagtctgctgttctgcatgaaggggaagggaacataaggagtgtgaagtggagaggccatctgattgcttgggccaataatatgggtgtgaagatttttgacatcatctcaaagcaaagaatcaccaatgtgccccgggatgatataagtcttcgcccagacatgtatccctgcagcctctgctggaaggacaatgtgacactgattattggctgggggacttctgtcaaggtgtgctcagtgaaggaacggcatgccagtgaaatgagggatttgccaagtcgatatgttgaaatagtgtctcagtttgaaactgaattctacatcagtggacttgcacctctctgtgatcagcttgttgtactttcgtatgtaaaggagatttcagaaaaaacggaaagagaatactgtgccaggcctagactggacatcatccagccactttctgagacttgtgaagagatctcttctgatgctttgacagtcagaggctttcaggagaatgaatgtagagattatcatttagaatactctgaaggggaatcacttttttacatcgtgagtccgagagatgttgtagtggccaaggaacgagaccaagatgatcacattgactggctccttgaaaagaagaaatatgaagaagcattgatggcagctgaaattagccaaaaaaatattaaaagacataagattctggatattggcttggcatatataaatcacctggtggagagaggagactatgacatagcagcacgcaaatgccagaaaattcttgggaaaaatgcagcactctgggaatatgaagtttataaatttaaagaaattggacagcttaaggctattagtccttatttgccaagaggtgatccagttctgaaaccactcatctatgaaatgatcttacatgaatttttggagagtgattatgagggttttgccacattgatccgagaatggcctggagatctgtataataattcagtcatagttcaagcagttcgggatcatttgaagaaagatagtcagaacaagactttacttaaaaccctggcagaattgtgagtatacttaagtgtctctttttccatatcagtctgtgttgaaaagtttttcatactttagatttggcaaactccaagtggagaagatgtattttataccattttcctacattccttcttagtaaaaacctctcataaacctcaaatgagtaggcgataaggacatgtgtgaaactgtacaattgcaatgtaatctgtttcccgagaagagaacccctaacgcacgcgcttgggagaggcagtggttaggaaaca

SEQ ID NO: 430716 - DNA, 1278 bp, Homo sapiens
ttgctgtcaggtgactctcccgtggcgccatggcggaagcagtggagcaggaaactgggtcccttgaagaatctacagatgagtctgaggaagaagagagcgaagaggaacccaagctgaagtatgaaaggctttccaatggggtaactgaaatacttcagaaggatgcagctagctgcatgacagtccatgacaagtttttggcattgggcacacattatggcaaggtttatttacttgatgtccaggggaacatcactcagaagtttgatgtaagtcctgtgaagataaatcagattagcttggatgaaagtggagagcacatgggtgtgtgttcagaggatggcaaggtgcaggtatttggactgtattctggagaagaatttcacgagacttttgactgtcccattaaaattattgctgtgcacccacatttcgtgagatccagttgcaagcagtttgtgaccggagggaagaagctgctactgtttgaacggtcttggatgaacagatggaagtctgctgttctgcatgaaggggaagggaacataaggagtgtgaagtggagaggccatctgattgcttgggccaataatatgggtgtgaagatttttgacatcatctcaaagcaaagaatcaccaatgtgccccgggatgatataagtcttcgcccagacatgtatccctgcagcctctgctggaaggacaatgtgacactgattattggctgggggacttctgtcaaggtgtgctcagtgaaggaacggcatgccagtgaaatgagggatttgccaagtcgatatgttgaaatagtgtctcagtttgaaactgaattctacatcagtggacttgcacctctctgtgatcagcttgttgtactttcgtatgtaaaggagatttcagaaaaaacggaaagagaatactgtgccaggcctagactggacatcatccagccactttctgagacttgtgaagagatctcttctgatgctttgacagtcagaggctttcaggagaatgaatgtagagattatcatttagaatactctgaaggggaatcacttttttacatcgtgagtccgagagatgttgtagtggccaaggaacgagaccaagatgatcacattgactggctccttgaaaagaagaaatatgaagaagcattgatggcagctgaaattagccaaaaaaatattaaaagacataagattctggatattggcttggcatatataaatcacctggattcagaagtgagacggggatcctctatataag

SEQ ID NO: 430717 - DNA, 1132 bp, Homo sapiens
ttgctgtcaggtgactctcccgtggcgccatggcggaagcagtggagcaggaaactgggtcccttgaagaatctacagatgagtctgaggaagaagagagcgaagaggaacccaagctgaagtatgaaaggctttccaatggggtaactgaaatacttcagaaggatgcagctagctgcatgacagtccatgacaagtttttggcattgggcacacattatggcaaggtttatttacttgatgtccaggggaacatcactcagaagtttgatgtaagtcctgtgaagataaatcagattagcttggatgaaagtggagagcacatgggtgtgtgttcagaggatggcaaggtgcaggtatttggactgtattctggagaagaatttcacgagacttttgactgtcccattaaaattattgctgtgcacccacatttcgtgagatccagttgcaagcagtttgtgaccggagggaagaagctgctactgtttgaacggtcttggatgaacagatggaagtctgctgttctgcatgaaggggaagggaacataaggagtgtgaagtggagaggccatctgattgcttgggccaataatatgggtgtgaagatttttgacatcatctcaaagcaaagaatcaccaatgtgccccgggatgatataagtcttcgcccagacatgtatccctgcagcctctgctggaaggacaatgtgacactgattattggctgggggacttctgtcaaggtgtgctcagtgaaggaacggcatgccagtgaaatgagggatttgccaagtcgatatgttgaaatagtgtctgctgatcctgttgtgaaatgatacggatggtattcactgcacatatgatgaaatcatcagaattgttaaaacttttgccagtggaatggataaactattgatgaattgtttcctgggtcacatctctggaaaatagatgttacagttcttaaaggcagtgctttaaagtgaagttcattctgtttccaaaggctctactttcaaaggttaagaatgagattttaaaattggatttttgcctggacttgagggtacaagatgtttctatttgaagtgaagttataaaagggcaaatccagattcataaactatca

SEQ ID NO: 430718 - DNA, 786 bp, Homo sapiens
ttgctgtcaggtgactctcccgtggcgccatggcggaagcagtggagcaggaaactgggtcccttgaagaatctacagatgagtctgaggaagaagagagcgaagaggaacccaagctgaagtatgaaaggctttccaatggggtaactgaaatacttcagaaggatgcagctagctgcatgacagtccatgacaagtttttggcattgggcacacattatggcaaggtttatttacttgatgtccaggggaacatcactcagaagtttgatgtaagtcctgtgaagataaatcagattagcttggatgaaagtggagagcacatgggtgtgtgttcagaggatggcaaggtgcaggtatttggactgtattctggagaagaatttcacgagacttttgactgtcccattaaaattattgctgtgcacccacatttcgtgagatccagttgcaagcagtttgtgaccggagggaagaaggtaagtgctgtgtgtctcctaccttgatatgtagccttgaaggggtgttgtgtgtttactctgtaatttatccttaatgtttttatgtctggctattcattaggagaaattcgagaaagacaaatgtaatgaaatctgatgatcatcatctcttgggggagttgtggcttcagtgtttctcactacattgctttttttgttgagacggagtctcgctctgtcgcccaggatggagtgcagtggcgtgatcttggctcactgcagcctccgcctcctgggttcaagtggttctcctgcatcagcctca

SEQ ID NO: 430719 - DNA, 426 bp, Homo sapiens
ctgtgcattggccatgactcctaaaccagagttgggttctgtttctcttgtagattattgctgtgcacccacatttcgtgagatccagttgcaagcagtttgtgaccggagggaagaaggtaagtgctgtgtgtctcctaccttgatatgtagccttgaaggggtgttgtgtgtttactctgtaatttatccttaatgtttttatgtctggctattcattaggagaaattcgagaaagacaaatgtaatgaaatctgatgatcatcatctcttgggggagttgtggcttcagtgtttctcactacattgctttttttgttgagacggagtctcgctctgtcgcccaggatggagtgcagtggcgtgatcttggctcactgcagcctccgcctcctgggttcaagtggttctcctgcatcagcctca

SEQ ID NO: 430720 - DNA, 504 bp, Homo sapiens
tcctctaaagtatagttgtagattctcttccaaaaagggcagatgcgtggtagtaggaacatgaggactctttccccttgcaaatgattattcttttatcatctcttctgaccattttctttttctatgctttataggaaactgggtcccttgaagaatctacagatgagtctgaggtaaggtggtgactcaggagccctcggatttgtagctcaccacgttgttctcttgagttgcgcttctttgctaaatgcaacattcccaggggctgagggtgtaaagcagggcgataggtaactaagccttggggaagagcttttaatatgccagctatcttaaaaaagattaaatggattagcttaaaaaataagaaaaggaacaaaaagttttcatctgaaacaatattttaacttgaaacatgttggcagttggaaaattgatacaaagttttagaaatttatctcaacactttaacatccccctcacctgctttttaaaaatagc

SEQ ID NO: 430721 - DNA, 1228 bp, Homo sapiens
ggatgacatctggtgtattgactgtggccagtcttaaagctagtttttgctatgtggaacatgctgctctaattcagatttaaagagtttcttcctgttaattcgaagctcactgtgcctcttgtttccgagggaagaaggactgattaagtcatctaaatggatgcaatactgaattacaggtcagaagatactgaagattactacacattactgggatgtgatgaactatcttcggttgaacaaatcctggcagaatttaaagtcagagctctggaatgtcacccagacaagcatcctgaaaaccccaaagctgtggagacttttcagaaactgcagaaggcaaaggagattctgaccaatgaagagagtcgagcccgctatgaccactggcgaaggagccagatgtcgatgccattccagcagtgggaagctttgaatgactcagtgaagacgtcaatgcactgggttgtcagaggtaaaaaagacctgatgctggaagaatctgacaagactcataccaccaagatggaaaatgaggaatgtaatgagcaaagagaaagaaagaaagaggagctggcttcaaccgcagagaaaacggagcagaaagaacccaagcccctagagaagtcagtctccccgcaaaattcagattcttcaggttttgcagatgtgaatggttggcaccttcgtttccgctggtccaaggatgctccctcagaactcctgaggaagttcagaaactatgaaatatgaaatatctctgcttcaaaaaatgaggaagagcaagactgtcccctatgctgccaacatgcagtctttgtttatgtcttaaaaatgtcatgtttatgtcatgtctgtgaattgctgagtactaattgattcctccatccttgaatcagttctcataatgctttttaaataagaaaaattcagaagatgaatttcttccaatatttgaataaattaaagctcttagatacagagtagattgtattatatgctttttcctattaatactacttatagaaatccattaaaaagcaatctctgtacagtgtatttaaatatttcattgacatactgtgatctctattagtgatggatgtacaaaaaatgttttcttacccttgacttacaatgaaatgtgaaattacttgtctgaaccccgtggggagaaataaataattttcccaaagttcaaaaatgaatttataattcaattttt

SEQ ID NO: 430722 - DNA, 1200 bp, Homo sapiens
ggacgcgtgggtcgacccacgcgtcgtggaacatgctgctctaattcagatttaaagagtttcttcctgttaattcgaagctcactgtgcctcttgtttccgagggaagaaggactgattaagtcatctaaatggatgcaatactgaattacaggtcagaagatactgaagattactacacattactgggatgtgatgaactatcttcggttgaacaaatcctggcagaatttaaagtcagagctctggaatgtcacccagacaagcatcctgaaaaccccaaagctgtggagacttttcagaaactgcagaaggcaaaggagattctgaccaatgaagagagtcgagcccgctatgaccactggcgaaggagccagatgtcgatgccattccagcagtgggaagctttgaatgactcagtgaagacgtcaatgcactgggttgtcagaggtaaaaaagacctgatgctggaagaatctgacaagactcataccaccaagatggaaaatgaggaatgtaatgagcaaagagaaagaaagaaagaggagctggcttcaaccgcagagaaaacggagcagaaagaacccaagcccctagagaagtcagtctccccgcaaaattcagattcttcaggttttgcagatgtgaatggttggcaccttcgtttccgctggtccaaggatgctccctcagaactcctgaggaagttcagaaactatgaaatatgaaatatctctgcttcaaaaaatgaggaagagcaagactgtcccctatgctgccaacatgcagtctttgtttatgtcttaaaaatgtcatgtttatgtcatgtctgtgaattgctgagtactaattgattcctccatccttgaatcagttctcataatgctttttaaataagaaaaattcagaagatgaatttcttccaatatttgaataaattaaagctcttagatacagagtagattgtattatatgctttttcctattaatactacttatagaaatccattaaaaagcaatctctgtacagtgtatttaaatatttcattgacatactgtgatctctattagtgatggatgtacaaaaaatgttttcttacccttgacttacaatgaaatgtgaaattacttgtctgaaccccgtggggagaaataaataattttcccaaagttcaaaaatgaatttataattcaattttt

SEQ ID NO: 430723 - DNA, 1200 bp, Homo sapiens
ggatgacatctggtgtattgactgtggccagtcttaaagctagtttttgctatgtggaacatgctgctctaattcagatttaaagagtttcttcctgttaattcgaagctcactgtgcctcttgtttccgagggaagaaggactgattaagtcatctaaatggatgcaatactgaattacaggtcagaagatactgaagattactacacattactgggatgtgatgaactatcttcggttgaacaaatcctggcagaatttaaagtcagagctctggaatgtcacccagacaagcatcctgaaaaccccaaagctgtggagacttttcagaaactgcagaaggcaaaggagattctgaccaatgaagagagtcgagcccgctatgaccactggcgaaggagccagatgtcgatgccattccagcagtgggaagctttgaatgactcagtgaagacgtcaatgcactgggttgtcagaggtaaaaaagacctgatgctggaagaatctgacaagactcataccaccaagatggaaaatgaggaatgtaatgagcaaagagaaagaaagaaagaggagctggcttcaaccgcagagaaaacggagcagaaagaacccaagcccctagagaagtcagtctccccgcaaaattcagattcttcaggttttgcagatgtgaatggttggcaccttcgtttccgctggtccaaggatgctccctcagaactcctgaggaagttcagaaactatgaaatatgaaatatctctgcttcaaaaaatgaggaagagcaagactgtcccctatgctgccaacatgcagtctttgtttatgtcttaaaaatgtcatgtttatgtcatgtctgtgaattgctgagtactaattgattcctccatccttgaatcagttctcataatgctttttaaataagaaaaattcagaagatgaatttcttccaatatttgaataaattaaagctcttagatacagagtagattgtattatatgctttttcctattaatactacttatagaaatccattaaaaagcaatctctgtacagtgtatttaaatatttcattgacatactgtgatctctattagtgatggatgtacaaaaaatgttttcttacccttgacttacaatgaaatgtgaaattacttgtctgaaccccgtggggagaaataaataattttcccaaagt

SEQ ID NO: 430724 - DNA, 1294 bp, Homo sapiens
ggacgcgtgggtcgacccacgcgtcgtggaacatgctgctctaattcagatttaaagagtttcttcctgttaattcgaagctcactgtgcctcttgtttccgagggaagaaggactgattaagtcatctaaatggatgcaatactgaattacaggtcagaagatactgaagattactacacattactgggatgtgatgaactatcttcggttgaacaaatcctggcagaatttaaagtcagagctctggaatgtcacccagacaagcatcctgaaaaccccaaagctggtagacccaggagttaaatcagaatgtctcgcaagacttccagcatcatttgctcctataagcttacaaaatgagatctctcttcccagaactgtggagacttttcagaaactgcagaaggcaaaggagattctgaccaatgaagagagtcgagcccgctatgaccactggcgaaggagccagatgtcgatgccattccagcagtgggaagctttgaatgactcagtgaagacgtcaatgcactgggttgtcagaggtaaaaaagacctgatgctggaagaatctgacaagactcataccaccaagatggaaaatgaggaatgtaatgagcaaagagaaagaaagaaagaggagctggcttcaaccgcagagaaaacggagcagaaagaacccaagcccctagagaagtcagtctccccgcaaaattcagattcttcaggttttgcagatgtgaatggttggcaccttcgtttccgctggtccaaggatgctccctcagaactcctgaggaagttcagaaactatgaaatatgaaatatctctgcttcaaaaaatgaggaagagcaagactgtcccctatgctgccaacatgcagtctttgtttatgtcttaaaaatgtcatgtttatgtcatgtctgtgaattgctgagtactaattgattcctccatccttgaatcagttctcataatgctttttaaataagaaaaattcagaagatgaatttcttccaatatttgaataaattaaagctcttagatacagagtagattgtattatatgctttttcctattaatactacttatagaaatccattaaaaagcaatctctgtacagtgtatttaaatatttcattgacatactgtgatctctattagtgatggatgtacaaaaaatgttttcttacccttgacttacaatgaaatgtgaaattacttgtctgaaccccgtggggagaaataaataattttcccaaagttcaaaaatgaatttataattcaattttt

SEQ ID NO: 430725 - DNA, 1138 bp, Homo sapiens
ggatgacatctggtgtattgactgtggccagtcttaaagctagtttttgctatgtggaacatgctgctctaattcagatttaaagagtttcttcctgttaattcgaagctcactgtgcctcttgtttccgagggaagaaggactgattaagtcatctaaatggatgcaatactgaattacaggtcagaagatactgaagattactacacattactgggatgtgatgaactatcttcggttgaacaaatcctggcagaatttaaagtcagagctctggaatgtcacccagacaagcatcctgaaaaccccaaagctgtggagacttttcagaaactgcagaaggcaaaggagattctgaccaatgaagagagtcgagcccgctatgaccactggcgaaggagccagatgtcgatgccattccagcagtgggaagctttgaatgactcagtgaagacggtgggtttctcgctgggtgcgacgtgaatttgtgaagctcaggatgcccatggattagactcatgtagtagcttaaagagtcattaggcgataggagggagaaaaccaagaagttagcagagtctggatataattcagtgtccgtaaatcccatgaagagaagctcatcagaataaaggcaatgaatttgtgccagaagagcctgtgactacatttctttcaatctctttggctgtttgtttcagtatacacactccctgttattgcttactattttatgagctctaataaatgtacttctcaagttgctcatgaattgctgagttttaaccattgtaaattcacattctccatctttttagtttatgtcagcttgctctcttttcaaggcttagaattttcattaaaaaggcaggatctgattagtcagagaaagccatgaattattcctattaaacattctggtgaaagaattgttagactttaaaaacattgtgttatctttcttcatgtcattaaaaggcataaatatcaaaatattcactataattactgtcatatatttattttgttcaacattgacctttatatattatagacaaaatgtaattttaaagatttaggcatgatttattacctagattctctccattggaacacttttctatgacatgggacttat

SEQ ID NO: 430726 - DNA, 651 bp, Homo sapiens
ggatgacatctggtgtattgactgtggccagtcttaaagctagtttttgctatgtggaacatgctgctctaattcagatttaaagagtttcttcctgttaattcgaagctcactgtgcctcttgtttccgagggaagaaggactgattaagtcatctaaatggatgcaatactgaattacaggtcagaagatactgaagattactacacattactgggatgtgatgaactatcttcggttgaacaaatcctggcagaatttaaagtcagagctctggaatgtcacccagacaagcatcctgaaaaccccaaagctgtggagacttttcagaaactgcagaaggcaaaggagattctgaccaatgaagagagtcgagcccgctatgaccactggcgaaggagccagatgtcgatgccattccagcagtgggaagctttgaatgactcagtgaagacggtgggtttctcgctgggtgcgacgtgaatttgtgaagctcaggatgcccatggattagactcatgtagtagcttaaagagtcattaggcgataggagggagaaaaccaagaagttagcagagtctggatataattcagtgtccgtaaatcccatgaagagaagctcatcagaataaaggcaatgaatttgtgcca

SEQ ID NO: 430727 - DNA, 281 bp, Homo sapiens
ggacgcgtgggtcgacccacgcgtcgtggaacatgctgctctaattcagatttaaagagtttcttcctgttaattcgaagctcactgtgcctcttgtttccgagggaagaaggactgattaagtcatctaaatggatgcaatactgaattacaggtcagaagatactgaagattactacacattactgggatgtgatgaactatcttcgtagagatgaggtttcaccatgttggtcagcctggtctccaattcctgacctcgtgatccgcccaccttggcc

SEQ ID NO: 430728 - DNA, 1206 bp, Homo sapiens
gatatgcactctaagggttgtttataaagaaacatgcacagccatatatagaaatggttatgttttatgaacaatataactagtttaatgcatagttataccttattttaactgcctgtgagccacaatttcaggtactttttaatatatatttttgtattaaaattacctcaggagcttagcttttttcttctcttttaaaattatgcagacattaaataagaagttgagtaaacagattcaggactctagaattaaagccagagctagaaattcttaacttataatttttaaggcattgagttagaagttacatatgagacaaggatttgtgggcatgggatgaagggccttacaggatggagagaccatacaggctatggagtgagtctagaaagcatagaacgtgtttagagaacagaaaatacctaattttataagctctataaggtgtatgaatggtagtacaaatggagaaagggtattagagcatttactcattttattcatagtcaacgggtaccctcttcagtggatattggaatttatgttttacagacaaggaaacttagttatgtgttttgcccaggctaataagttatggaagcacaattcaaaataggtctgtagctttggctttgaatacctgggtagtgagtaaaattttcatttcatgtggtggtttttacatagttgtaatccaagcagtaacacttacaggaagattagattgtcagtaatgtgaacagtagattggaggggaagaagcaaagagagccagtcttaattggttggatacttttatttctgtattcctcagtgatgttataaataaatattttgtttttcagagaatgactaatagtagcagctccccaagccttctaaatgacagtgccaagccatattcagcccatggtaagacctgatcccttttgcttatgtgtgtctgtgtatatatttcttactctaaaagtaatatacaaccattgtagaaattttgaaaattgtaaacgggcataaagaagaaaataaaaattattatcttcccactcagatctaactattgagatttagattccaggccaggtgtggtggctcatgcctgtaatcccagcactttgggaggctcaggtgggaggaatgattgagcccaggagtttgaaaccaacttgggcaatataacaagaccatgtctctattatt

SEQ ID NO: 430729 - DNA, 1220 bp, Homo sapiens
gatatgcactctaagggttgtttataaagaaacatgcacagccatatatagaaatggttatgttttatgaacaatataactagtttaatgcatagttataccttattttaactgcctgtgagccacaatttcaggtactttttaatatatatttttgtattaaaattacctcaggagcttagcttttttcttctcttttaaaattatgcagacattaaataagaagttgagtaaacagattcaggactctagaattaaagccagagctagaaattcttaacttataatttttaaggcattgagttagaagttacatatgagacaaggatttgtgggcatgggatgaagggccttacaggatggagagaccatacaggctatggagtgagtctagaaagcatagaacgtgtttagagaacagaaaatacctaattttataagctctataaggtgtatgaatggtagtacaaatggagaaagggtattagagcatttactcattttattcatagtcaacgggtaccctcttcagtggatattggaatttatgttttacagacaaggaaacttagttatgtgttttgcccaggctaataagttatggaagcacaattcaaaataggtctgtagctttggctttgaatacctgggtagtgagtaaaattttcatttcatgtggtggtttttacatagttgtaatccaagcagtaacacttacaggaagattagattgtcagtaatgtgaacagtagattggaggggaagaagcaaagagagccagtcttaattggttggatacttttatttctgtattcctcagtgatgttataaataaatattttgtttttcagagaatgactaatagtagcagctccccaagccttctaaatgacagtgccaagccatattcagcccatgatcctctaacatcacctgcttcatccttgtttaatgactttggtgccctcaacatctctcagagacgaaagagacggagcttgtctttgtcacccaggctggagtgcagtggcgtgatctcggctcagtgcaacctctgcctcccaggttcaagcaattctgcctcggcctcccaagtagctgggactgcagatgcacactgctgacacacggctaaatttcttttgtgttttagtagagatggtgtttcaccttgttggctcagtctggtcttgaactcctgagctcaggcaatctgccca

SEQ ID NO: 430730 - DNA, 1095 bp, Homo sapiens
tcgctgcagcgggcctctgcgtgggcggcgggaatccgcggacatcgggtcgggtctaggctcccgagtccgcgctcctgggcgggagcccttgtctgggtctcgcggggggctgccagatgcgtaggccacactgactagttccttcttgtcgcttttcccagcaaatggcggatgacgccggtgcagcgggggggcccgggggccctggtggccctgggatggggaaccgcggtggcttccgcggaggtttcggcagtggcatccggggccggggtcgcggccgtggacggggccggggccgaggccgcggagctcgcggaggcaaggccgaggataaggagtggatgcccgtcaccaagttgggccgcttggtcaaggacatgaagatcaagtccctggaggagatctatctcttctccctgcccattaaggaatcagagatcattgatttcttcctgggggcctctctcaaggatgaggttttgaagattatgccagtgcagaagcagacccgtgccggccagcgcaccaggttcaaggcatttgttgctatcggggactacaatggccacgtcggtctgggtgttaagtgctccaaggaggtggccaccgccatccgtggggccatcatcctggccaagctctccatcgtccccgtgcgcagaggctactgggggaacaagatcggcaagccccacactgtcccttgcaaggtgacaggccgctgcggctctgtgctggtacgcctcatccctgcacccaggggcactggcatcgtctccgcacctgtgcctaagaagctgctcatgatggctggtatcgatgactgctacacctcagcccggggctgcactgccaccctgggcaacttcgccaaggccacctttgatgccatttctaagacctacagctacctgacccccgacctctggaaggagactgtattcaccaagtctccctatcaggagttcactgaccacctcgtcaagacccacaccagagtctccgtgcagcggactcaggctccagctgtggctacaacatagggtttttatacaagaaaaataaagtgaattaagcgtgaaaaaaaaa

SEQ ID NO: 430731 - DNA, 1001 bp, Homo sapiens
  misc_feature (30)..(30): n is a, c, g, or t
  misc_feature (40)..(40): n is a, c, g, or t
actaaggacctcatgttggtcaacagaaanaccccagggngtatttaaaactgagcagtactatacgtctagtgcgagctggtgcggattgagccggtggcagcgggggcgccctggtggccctgggatggggaaccgcggtggcttccgcggaggtttcggcagtggcatccggggccggggtcgcggccgtggacggggccggggccgaggccgcggagctcgcggaggcaaggccgaggataaggagtggatgcccgtcaccaagttgggccgcttggtcaaggacatgaagatcaagtccctggaggagatctatctcttctccctgcccattaaggaatcagagatcattgatttcttcctgggggcctctctcaaggatgaggttttgaagattatgccagtgcagaagcagacccgtgccggccagcgcaccaggttcaaggcatttgttgctatcggggactacaatggccacgtcggtctgggtgttaagtgctccaaggaggtggccaccgccatccgtggggccatcatcctggccaagctctccatcgtccccgtgcgcagaggctactgggggaacaagatcggcaagccccacactgtcccttgcaaggtgacaggccgctgcggctctgtgctggtacgcctcatccctgcacccaggggcactggcatcgtctccgcacctgtgcctaagaagctgctcatgatggctggtatcgatgactgctacacctcagcccggggctgcactgccaccctgggcaacttcgccaaggccacctttgatgccatttctaagacctacagctacctgacccccgacctctggaaggagactgtattcaccaagtctccctatcaggagttcactgaccacctcgtcaagacccacaccagagtctccgtgcagcggactcaggctccagctgtggctacaacatagggtttttatacaagaaaaataaagtgaattaagcgtgaaaaaaaaa

SEQ ID NO: 430732 - DNA, 1225 bp, Homo sapiens
tcgctgcagcgggcctctgcgtgggcggcgggaatccgcggacatcgggtcgggtctaggctcccgagtccgcgctcctgggcgggagcccttgtctgggtctcgcggggggctgccagatgcgtaggccacactgactagttccttcttgtcgcttttcccagcaaatggcggatgacgccggtgcagcgggggggcccgggggccctggtggccctgggatggggaaccgcggtggcttccgcggaggtttcggcagtggcatccggggccggggtcgcggccgtggacggggccggggccgaggccgcggagctcgcggaggcaaggccgaggataaggagtggatgcccgtcaccaagttgggccgcttggtcaaggacatgaagatcaagtccctggaggagatctatctcttctccctgcccattaaggaatcagagatcattgatttcttcctgggggcctctctcaaggatgaggttttgaagattatgccagtgcagaagcagacccgtgccggccagcgcaccaggttcaaggcatttgttgctatcggggactacaatggccacgtcggtctgggtgttaagtgctccaaggaggtggccaccgccatccgtggggccatcatcctggccaagctctccatcgtccccgtgcgcagaggctactgggggaacaagatcggcaagccccacactgtcccttgcaaggtgacaggccgctgcggctctgtgctggtacgcctcatccctgcacccaggggcactggcatcgtctccgcacctgtgcctaagaagctgctcatgatggctggtatcgatgactgctacacctcagcccggggctgcactgccaccctgggcaacttcgccaaggccacctttgatgccatttctaagacctacagctacctgacccccgacctctggaaggagactgtattcaccaagtctccctatcaggagttcactgaccacctcgtcaagacccacaccagagtctccgtgcagcggactcaggctccagctgtggctacaacatagggtttttatacaagaaaaataaagtgaattaagcgtgaaaaaaaaaaaaataaaaaaaaaactggggggttttttggggggggggaacaagggtaaaaggggactgggaatttttccggaccctttttgtggcaaggggaaagcgggcccaagggggaaaaaagaaccggtattga

SEQ ID NO: 430733 - DNA, 1517 bp, Homo sapiens
tcgctgcagcgggcctctgcgtgggcggcgggaatccgcggacatcgggtcgggtctaggctcccgagtccgcgctcctgggcgggagcccttgtctgggtctcgcggggggctgccagatgcgtaggccacactgactagttccttcttgtcgcttttcccagcaaatggcggatgacgccggtgcagcgggggggcccgggggccctggtggccctgggatggggaaccgcggtggcttccgcggaggtttcggcagtggcatccggggccggggtcgcggccgtggacggggccggggccgaggccgcggagctcgcggaggcaaggccgaggataaggagtggatgcccgtcaccaagttgggccgcttggtcaaggacatgaagatcaagtccctggaggagatctatctcttctccctgcccattaaggaatcagagatcattgatttcttcctgggggcctctctcaaggatgaggttttgaagattatgccagtgcagaagcagacccgtgccggccagcgcaccaggttcaaggcatttgttgctatcggggactacaatggccacgtcggtctgggtgttaagtgctccaaggaggtggccaccgccatccgtggggccatcatcctggccaagctctccatcgtccccgtgcgcagaggctactgggggaacaagatcggcaagccccacactgtcccttgcaaggtgacaggccgctgcggctctgtgctggtacgcctcatccctgcacccaggggcactggcatcgtctccgcacctgtgcctaagaagctgctcatgatggctggtatcgatgactgctacacctcagcccggggctgcactgccaccctgggcaacttcgccaaggccacctttgatgccatttctaagacctacagctacctgacccccgacctctggaaggagactgtattcaccaagtctccctatcaggagttcactgaccacctcgtcaagacccacaccagagtctccgtgcagcggactcaggctccagctgtggctacaacatagggtttttatacaagaaaaataaagtgaattaagcgtgaaaaaaaaacaaaaaattgcggccgtctggccaactgtctttaatttgacaagcttatcatgtgggccaatttggtctcacttgggaatctgcctctatatgggcgcatacaaaaaaatgtccggcgttttacaagtgtacattggaaaaactcggggtcccacacttaacgcttttagaaatatcctttcacctgtgttatatataaagaccccacataggcttcttaaattgtaccccttaggctagggattgtgagtaaatatttaaaactcctaaattttgataccctcttttacacaggcgatatgaaacctttttaacatcctccttatttggtgttcaccacaatttcctatggactgctctcctattgtctcatctttaggggtcctctgtctctccacacataccttttcttctctctcccg

SEQ ID NO: 430734 - DNA, 1219 bp, Homo sapiens
tcgctgcagcgggcctctgcgtgggcggcgggaatccgcggacatcgggtcgggtctaggctcccgagtccgcgctcctgggcgggagcccttgtctgggtctcgcggggggctgccagatgcgtaggccacactgactagttccttcttgtcgcttttcccagcaaatggcggatgacgccggtgcagcgggggggcccgggggccctggtggccctgggatggggaaccgcggtggcttccgcggaggtttcggcagtggcatccggggccggggtcgcggccgtggacggggccggggccgaggccgcggagctcgcggaggcaaggccgaggataaggagtggatgcccgtcaccaagttgggccgcttggtcaaggacatgaagatcaagtccctggaggagatctatctcttctccctgcccattaaggaatcagagatcattgatttcttcctgggggcctctctcaaggatgaggttttgaagattatgccagtgcagaagcagacccgtgccggccagcgcaccaggttcaaggcatttgttgctatcggggactacaatggccacgtcggtctgggtgttaagtgctccaaggaggtggccaccgccatccgtggggccatcatcctggccaagctctccatcgtccccgtgcgcagaggctactgggggaacaagatcggcaagccccacactgtcccttgcaaggtgacaggccgctgcggctctgtgctggtacgcctcatccctgcacccaggggcactggcatcgtctccgcacctgtgcctaagaagctgctcatgatggctggtatcgatgactgctacacctcagcccggggctgcactgccaccctgggcaacttcgccaaggccacctttgatgccatttctaagacctacagctacctgacccccgacctctggaaggagactgtattcaccaagtctccctatcaggagttcactgaccacctcgtcaagacccacaccagagtctccgtgcagcggactcaggctccagctgtggctacaacatagggtttttatacaagaaaaataaagtgaattaagcgtgaaaaaaaaaaaaaaaaaaaacaaaaaaaacgcggccttattgggaaagaaggcgattgggggggaaattaaaaccctcttaattgtcacccttcctttgtttttctatatcttctaatctacttcctcactct

SEQ ID NO: 430735 - DNA, 1071 bp, Homo sapiens
tcgctgcagcgggcctctgcgtgggcggcgggaatccgcggacatcgggtcgggtctaggctcccgagtccgcgctcctgggcgggagcccttgtctgggtctcgcggggggctgccagatgcgtaggccacactgactagttccttcttgtcgcttttcccagcaaatggcggatgacgccggtgcagcgggggggcccgggggccctggtggccctgggatggggaaccgcggtggcttccgcggaggtttcggcagtggcatccggggccggggtcgcggccgcggagctcgcggaggcaaggccgaggataaggagtggatgcccgtcaccaagttgggccgcttggtcaaggacatgaagatcaagtccctggaggagatctatctcttctccctgcccattaaggaatcagagatcattgatttcttcctgggggcctctctcaaggatgaggttttgaagattatgccagtgcagaagcagacccgtgccggccagcgcaccaggttcaaggcatttgttgctatcggggactacaatggccacgtcggtctgggtgttaagtgctccaaggaggtggccaccgccatccgtggggccatcatcctggccaagctctccatcgtccccgtgcgcagaggctactgggggaacaagatcggcaagccccacactgtcccttgcaaggtgacaggccgctgcggctctgtgctggtacgcctcatccctgcacccaggggcactggcatcgtctccgcacctgtgcctaagaagctgctcatgatggctggtatcgatgactgctacacctcagcccggggctgcactgccaccctgggcaacttcgccaaggccacctttgatgccatttctaagacctacagctacctgacccccgacctctggaaggagactgtattcaccaagtctccctatcaggagttcactgaccacctcgtcaagacccacaccagagtctccgtgcagcggactcaggctccagctgtggctacaacatagggtttttatacaagaaaaataaagtgaattaagcgtgaaaaaaaaa

SEQ ID NO: 430736 - DNA, 847 bp, Homo sapiens
gttcactgaccacctttgatgccatttctaagacctacagctacctgaccccccgacctctggaaggagactgtatgcaaggccgaggataaggagtggatgcccgtcaccaagttgggccgcttggtcaaggacatgaagatcaagtccctggaggagatctatctcttctccctgcccattaaggaatcagagatcattgatttcttcctgggggcctctctcaaggatgaggttttgaagattatgccagtgcagaagcagacccgtgccggccagcgcaccaggttcaaggcatttgttgctatcggggactacaatggccacgtcggtctgggtgttaagtgctccaaggaggtggccaccgccatccgtggggccatcatcctggccaagctctccatcgtccccgtgcgcagaggctactgggggaacaagatcggcaagccccacactgtcccttgcaaggtgacaggccgctgcggctctgtgctggtacgcctcatccctgcacccaggggcactggcatcgtctccgcacctgtgcctaagaagctgctcatgatggctggtatcgatgactgctacacctcagcccggggctgcactgccaccctgggcaacttcgccaaggccacctttgatgccatttctaagacctacagctacctgacccccgacctctggaaggagactgtattcaccaagtctccctatcaggagttcactgaccacctcgtcaagacccacaccagagtctccgtgcagcggactcaggctccagctgtggctacaacatagggtttttatacaagaaaaataaagtgaattaagcgtgaaaaaaaaa

SEQ ID NO: 430737 - DNA, 1033 bp, Homo sapiens
tcgctgcagcgggcctctgcgtgggcggcgggaatccgcggacatcgggtcgggtctaggctcccgagtccgcgctcctgggcgggagcccttgtctgggtctcgcggggggctgccagatgcgtaggccacactgactagttccttcttgtcgcttttcccagcaaatggcggatgacgccggtgcagcgggggggcccgggggccctggtggccctgggatggggaaccgcggtggcttccgcggaggtttcggcagtggcatccggggccggggtcgcggccgtggacggggccggggccgaggccgcggagctcgcggaggcaaggccgaggataaggagtggatgcccgtcaccaagttgggccgcttggtcaaggacatgaagatcaagtccctggaggagatctatctcttctccctgcccaattatgccagtgcagaagcagacccgtgccggccagcgcaccaggttcaaggcatttgttgctatcggggactacaatggccacgtcggtctgggtgttaagtgctccaaggaggtggccaccgccatccgtggggccatcatcctggccaagctctccatcgtccccgtgcgcagaggctactgggggaacaagatcggcaagccccacactgtcccttgcaaggtgacaggccgctgcggctctgtgctggtacgcctcatccctgcacccaggggcactggcatcgtctccgcacctgtgcctaagaagctgctcatgatggctggtatcgatgactgctacacctcagcccggggctgcactgccaccctgggcaacttcgccaaggccacctttgatgccatttctaagacctacagctacctgacccccgacctctggaaggagactgtattcaccaagtctccctatcaggagttcactgaccacctcgtcaagacccacaccagagtctccgtgcagcggactcaggctccagctgtggctacaacatagggtttttatacaagaaaaataaagtgaattaagcgtgaaaaaaaaa

SEQ ID NO: 430738 - DNA, 1133 bp, Homo sapiens
tcgctgcagcgggcctctgcgtgggcggcgggaatccgcggacatcgggtcgggtctaggctcccgagtccgcgctcctgggcgggagcccttgtctgggtctcgcggggggctgccagatgcgtaggccacactgactagttccttcttgtcgcttttcccagcaaatggcggatgacgccggtgcagcgggggggcccgggggccctggtggccctgggatggggaaccgcggtggcttccgcggaggtttcggcagtggcatccggggccggggtcgcggccgtggacggggccggggccgaggccgcggagctcgcggaggcaaggccgaggataaggattaaggaatcagagatcattgatttcttcctgggggcctctctcaaggatgaggttttgaagattatgccagtgcagaagcagacccgtgccggccagcgcaccaggttcaaggcatttgttgctatcggggactacaatggccacgtcggtctgggtgttaagtgctccaaggaggtggccaccgccatccgtggggccatcatcctggccaagctctccatcgtccccgtgcgcagaggctactgggggaacaagatcggcaagccccacactgtcccttgcaaggtgacaggccgctgcggctctgtgctggtacgcctcatccctgcacccaggggcactggcatcgtctccgcacctgtgcctaagaagctgctcatgatggctggtatcgatgactgctacacctcagcccggggctgcactgccaccctgggcaacttcgccaaggccacctttgatgccatttctaagacctacagctacctgacccccgacctctggaaggagactgtattcaccaagtctccctatcaggagttcactgaccacctcgtcaagacccacaccagagtctccgtgcagcggactcaggctccagctgtggctacaacatagggtttttatacaagaaaaataaagtgaattaagcgtgaaaaaaaaaaaaaaaaaaaacaaaaaaaacgcggccttattgggaaagaaggcgattgggggggaaattaaaaccctcttaattgtcacccttcctttgtttttctatatcttctaatctacttcctcactct

SEQ ID NO: 430739 - DNA, 613 bp, Homo sapiens
  misc_feature (440)..(441): n is a, c, g, or t
  misc_feature (444)..(444): n is a, c, g, or t
  misc_feature (591)..(591): n is a, c, g, or t
  misc_feature (593)..(595): n is a, c, g, or t
  misc_feature (609)..(610): n is a, c, g, or t
  misc_feature (613)..(613): n is a, c, g, or t
tcgctgcagcgggcctctgcgtgggcggcgggaatccgcggacatcgggtcgggtctaggctcccgagtccgcgctcctgggcgggagcccttgtctgggtctcgcggggggctgccagatgcgtaggccacactgactagttccttcttgtcgcttttcccagcaaatggcggatgacgccggtgcagcgggggggcccgggggccctggtggccctgggatggggaaccgcggtggcttccgcggaggtttcggcagtggcatccggggccggggtcgcggccgtggacggggccggggccgaggccgcggagctcgcggaggcaaggccgaggataaggagtggatgcccgtcaccaagttgggccgcttggtcaaggacatgaagatcaagtccctggaggagatctatctcttctccctgcccactccctgcccnnaangatctctgattccttaatgggcagggagaagagatagatctcttaaggaatcagagatcattgatttcttcctgggggcctctctcaaggatgaggttttgaagattatgccagtgcagaagcaacaaatgccttgaacctagtctngnnngggggcccggtacnnggn

SEQ ID NO: 430740 - DNA, 2377 bp, Homo sapiens
gtgaagatgaagattacttctcaaaaagtatccatatttccagtgttccttttaataaaatatgccacttttaaataaataattacaaaatgtaaaattataaaatttttaaatttaaataataagtaacagtaaaattttttgacaatatatatgtcactgtctttgtaatttaaacatattgctgcctgggatatgggtaacagaattatcactcatggaactttgtagtagtgatggcttggtttgtaattcatcatttcatctttcttggtcttgattaatcctgaaatccttaaaatggctggcatggttatgactttattgtggtaaccttggagatataagccctcttacgatcaaaaacagaagaaaaaaatatattgttcaaactgatgccaggcctacctttattccctcccttaattactttttttctcattcagctcagatcatcctgcacttgaaaaatgaagttttaccaccatcaaaactatcattatttaacaacaagtgaagatcaacagaaaaattcaagtagctttgcaaatactagttgatactcagtgaaatcacgtcactattttgatgcctgaatccatacctttgtgatttatgtttaattacagaagcctattgccttgcagcaattttgttgttataatactgattaattggttactccttcttattataactcagtaatacctgtggtcatttggttcctctatcctgacaaagttcactggaaattgccctcagattttataaactgggggatttcttaattagataaaagttcattactgaagatggaatattatataagatggaggaagggtaattaatagacatgagatatagaaatactttgttagccctgctatagattgcctattgtagtctttctgtgcatttcaatagtctgtattaggaaattataacttcagcacttttgatagcaaaaattggcatctttcaattctgtatagtatgtgactatcctgtaaatgataatatgtgtacagactgagaaggcaggaatataaagtaattgaaatctctcattgccggtatactctaaaacatgcttgatgccttgtcagcatcattgcacacattgactctgtatttacatctgtatatacactatgattaggaaaatatgcaagaaattgtttttccatgttaaggaacaaatgccattaggaagatgtccccttaattgtattgtcagagtattactatgtcaaggatgactgttctgttaacctaattttgtgttttcacatggaaatgtgattggactccatttttctgtgagttgagagtaagagcataagtcagtttgaaagcatttacaagtttgttttagaatgtagtaagggctgaaaggtgctctacttcttaacttgttttttccatgttgtagacaaatgaaatttgtctaaatgcttttgtctaaaaatgcatttgtctaaatgctttagattgatgtagggtttagatcctctttaatactttgagatagtcttattctgattttttttttcttctggaaaccaagtagaattagggatgggaatacaaatgcatttattctggcttctgttttattccaagaagcttcttggaacaaatcagtaggaattgaaaagaaagcatgaccaacccaattacaggggataaatgtaagcttgttaaagtaagcaccacaccatgtttctgtctccccagcacccagcacagtgctgtgaaccttggcagatgctagataaatgtgtgttgaatgaatgtgcctatgaagccacaaagatgccacatgttagtatatcagtgagaggtgactccacagtgctctctggagaagcaatatgagtgactgaagagtggggccttttgcttttgcctggatataggggtgctcttctactgtaattgggtgtggaaaaactctggctttatggtattccattaggttcttttcatttaaagtagtcttaaaatcaaagtatccaatattttaaagccacaaagtagattacataattagcagagattttagtcagtaaaatgttagaaatcaaactataagaaaattcaagtcctttattttgtgtcttgggtatatgtcattattttaaattccacactcccttatttaatcactttggtaagtgcctttgatgttttgaaatgtatagtgggagatgagcaaatgtaaatgtcatgtgccctgttccctagcttctcaattcctcataaccatttttaccagtgttgcaaagtttagacctttgtgttaatatcagaagtgtatttgtagcccctccatagtgaacaatgaaataaactatttcatagaaaacaaaaatta

SEQ ID NO: 430741 - DNA, 1953 bp, Homo sapiens
tcgcaattgtattgatgtaagaaaatcgattaacactattcatatgtaacaatggataggttaggttcagagacagtacagttcataatagtagtagatacagggcaggtgagccctaaaattgaagcttagcctgggagagttcttaacttcatctaagaaggaatctgatgcagggcaggaaggctcccaaattggagcttagcccaggaaggttcctggcttcatccagaaaagaattcaagggtactactgaggtgtaagcgcttacacctcagtaatacctgtggtcatttggttcctctatcctgacaaagttcactggaaattgccctcagattttataaactgggggatttcttaattagataaaagttcattactgaagatggaatattatataagatggaggaagggtaattaatagacatgagatatagaaatactttgttagccctgctatagattgcctattgtagtctttctgtgcatttcaatagtctgtattaggaaattataacttcagcacttttgatagcaaaaattggcatctttcaattctgtatagtatgtgactatcctgtaaatgataatatgtgtacagactgagaaggcaggaatataaagtaattgaaatctctcattgccggtatactctaaaacatgcttgatgccttgtcagcatcattgcacacattgactctgtatttacatctgtatatacactatgattaggaaaatatgcaagaaattgtttttccatgttaaggaacaaatgccattaggaagatgtccccttaattgtattgtcagagtattactatgtcaaggatgactgttctgttaacctaattttgtgttttcacatggaaatgtgattggactccatttttctgtgagttgagagtaagagcataagtcagtttgaaagcatttacaagtttgttttagaatgtagtaagggctgaaaggtgctctacttcttaacttgttttttccatgttgtagacaaatgaaatttgtctaaatgcttttgtctaaaaatgcatttgtctaaatgctttagattgatgtagggtttagatcctctttaatactttgagatagtcttattctgattttttttttcttctggaaaccaagtagaattagggatgggaatacaaatgcatttattctggcttctgttttattccaagaagcttcttggaacaaatcagtaggaattgaaaagaaagcatgaccaacccaattacaggggataaatgtaagcttgttaaagtaagcaccacaccatgtttctgtctccccagcacccagcacagtgctgtgaaccttggcagatgctagataaatgtgtgttgaatgaatgtgcctatgaagccacaaagatgccacatgttagtatatcagtgagaggtgactccacagtgctctctggagaagcaatatgagtgactgaagagtggggccttttgcttttgcctggatataggggtgctcttctactgtaattgggtgtggaaaaactctggctttatggtattccattaggttcttttcatttaaagtagtcttaaaatcaaagtatccaatattttaaagccacaaagtagattacataattagcagagattttagtcagtaaaatgttagaaatcaaactataagaaaattcaagtcctttattttgtgtcttgggtatatgtcattattttaaattccacactcccttatttaatcactttggtaagtgcctttgatgttttgaaatgtatagtgggagatgagcaaatgtaaatgtcatgtgccctgttccctagcttctcaattcctcataaccatttttaccagtgttgcaaagtttagacctttgtgttaatatcagaagtgtatttgtagcccctccatagtgaacaatgaaataaactatttcatagaaaacaaaaatta

SEQ ID NO: 430742 - DNA, 1157 bp, Homo sapiens
gacctcatgagtaagctgtggcggcgtgggagcacctctggggctatggaggcccctgagccgggagaagccctggagttgagcctggcgggtgcccatggccatggagtgcacaagaaaaaacacaagaagcacaagaagaaacacaagaagaaacaccatcaggaagaagacgccgggcccacgcagccgtcccctgccaagcctcagctcaaactcaaaatcaagcttgggggacaagtcctggggaccaagagtgttcctaccttcactgtgatcccagaggggcctcgctcaccctctccccttatggttgtggataatgaagaggaacctatggaaggagtcccccttgagcagtaccgtgcctggctggatgaagacagtaatctctctccctctccacttcgggacctatcaggagggttagggggtcaggaggaagaggaggaacagaggtggctggatgccctggagaagggggagctggatgacaatggagacctcaagaaggagatcaatgagcggctgcttactgctcgacagcgagctctgctccagaaggcgcggagtcaaccttcccctatgctgccgctgcctgtagctgagggctgcccacctcccgccctcacagaggagatgctgctgaagcgcgaggagcgggcgcggaagcggcggctccaggcggcgcggcgggcagaagagcacaagaaccagactatcgagcgcctcaccaagactgcggcgaccagtgggcggggaggccgggggggcgcacggggcgagcggcggggagggcgggctgcggctccggcccccatggtgcgctactgcagcggagcacagggttccaccctttccttcccacctggcgtccccgcccccacggcagtgtctcagcggccatccccctcaggcccgccgccgcgctgctctgtccccggctgtccccatccgcgccgctacgcttgctcccgcacaggccaggcactctgtagtcttcagtgctaccgcatcaacctgcagatgcggctgggggggcccgagggtcctggatccccccttttggctacgtaaggcccttaacccggactctgcgccccgtcccatgcccgctcttgagtatcttccccaccctattaaattacatccggtgc

SEQ ID NO: 430743 - DNA, 1178 bp, Homo sapiens
gacctcatgagtaagctgtggcggcgtgggagcacctctggggctatggaggcccctgagccgggagaagccctggagttgagcctggcgggtgcccatggccatggagtgcacaagaaaaaacacaagaagcacaagaagaaacacaagaagaaacaccatcaggaagaagacgccgggcccacgcagccgtcccctgccaagcctcagctcaaactcaaaatcaagcttgggggacaagtcctggggaccaagagtgttcctaccttcactgtgatcccagaggggcctcgctcaccctctccccttatggttgtggataatgaagaggaacctatggaaggagtcccccttgagcagtaccgtgcctggctggatgaagacagtaatctctctccctctccacttcgggacctatcaggagggttagggggtcaggaggaagaggaggaacagaggtggctggatgccctggagaagggggagctggatgacaatggagacctcaagaaggagatcaatgagcggctgcttactgctcgacagcgagctctgctccagaaggcgcggagtcaaccttcccctatgctgccgctgcctgtagctgagggctgcccacctcccgccctcacagaggagatgctgctgaagcgcgaggagcgggcgcggaagcggcggctccaggcggcgcggcgggcagaagagcacaagaaccagactatcgagcgcctcaccaagactgcggcgaccagtgggcggggaggccgggggggcgcacggggcgagcggcggggagggcgggctgcggctccggcccccatggtgcgctactgcagcggagcacagggttccaccctttccttcccacctggcgtccccgcccccacggcagtgtctcagcggccatccccctcaggcccgccgccgcgctgctctgtccccggctgtccccatccgcgccgctacgcttgctcccgcacaggccaggcactctgtagtcttcagtgctaccgcatcaacctgcagatgcggctgggggggcccgagggtcctggatccccccttttggctacgtaaggcccttaacccggactctgcgccccgtcccatgcccgctcttgagtatcttccccaccctattaaattacatccggtgcttcggcttgtacagaaaaggg

SEQ ID NO: 430744 - DNA, 1841 bp, Homo sapiens
  misc_feature (1411)..(1411): n is a, c, g, or t
gacctcatgagtaagctgtggcggcgtgggagcacctctggggctatggaggcccctgagccgggagaagccctggagttgagcctggcgggtgcccatggccatggagtgcacaagaaaaaacacaagaagcacaagaagaaacacaagaagaaacaccatcaggaagaagacgccgggcccacgcagccgtcccctgccaagcctcagctcaaactcaaaatcaagcttgggggacaagtcctggggaccaagagtgttcctaccttcactgtgatcccagaggggcctcgctcaccctctccccttatggttgtggataatgaagaggaacctatggaaggagtcccccttgagcagtaccgtgcctggctggatgaagacagtaatctctctccctctccacttcgggacctatcaggagggttagggggtcaggaggaagaggaggaacagaggtggctggatgccctggagaagggggagctggatgacaatggagacctcaagaaggagatcaatgagcggctgcttactgctcgacagcgagctctgctccagaaggcgcggagtcaaccttcccctatgctgccgctgcctgtagctgagggctgcccacctcccgccctcacagaggagatgctgctgaagcgcgaggagcgggcgcggaagcggcggctccaggcggcgcggcgggcagaagagcacaagaaccagactatcgagcgcctcaccaagactgcggcgaccagtgggcggggaggccgggggggcgcacggggcgagcggcggggagggcgggctgcggctccggcccccatggtgcgctactgcagcggagcacagggttccaccctttccttcccacctggcgtccccgcccccacggcagtgtctcagcggccatccccctcaggcccgccgccgcgctgctctgtccccggctgtccccatccgcgccgctacgcttgctcccgcacaggccaggcactctgtagtcttcagtgctaccgcatcaacctgcagatgcggctgggggggcccgagggtcctggatccccccttttggctacgtaaggcccttaacccggactctgcgccccgtcccatgcccgctcttgagtatcttccccaccctattaaattacatccggtgcaaaaaaaaaacaaacaaaaaaaaaaaaaaaaatgtgtgtgtgggcgccgcggcccggggccccgtggagaaagagtttttaaagaccatttcccgttgtgggcccgcgggcgggcccccagagttggtgttccgggttgaacccgtgtggcccaaggaggggtgtctcccaaggggagaaacccgggggcccagtgaccatcggtgggcccggggcttttcctccacccaaaataaaaaacgggccgcgggggnactaccggagcggggctctggaaaccaattcccagagtgggggagtcccgggagagcgaccatcgcgggcgtctcatcaaccaacagcggggctccccaggcagggacgtcggaatatcaaaattatgcccgggcgcggggacgcacagacaccgcgcaacgcagacacgcagaaacacgcagccacacatcaggtcgccacacgaagaccaggcagacgacaggaaggacagcaacgagcagaacgaacagagaagaagaggcagacggagcagcagacaggacaaccaccaggcgggaacaacgagcgaaggaggacagagcaagcgaagcaagggcggaggaaagcgccggaagcggagagagcgagaacaacgcccgggagggaccaggcaaggggaaagaagaagaaaaaaaaaaacggccgcga

SEQ ID NO: 430745 - DNA, 1383 bp, Homo sapiens
gacctcatgagtaagctgtggcggcgtgggagcacctctggggctatggaggcccctgagccgggtaagcgcgaatagatcaagcaatttaggtcgtgttagaaaagaagtcccgttcttgctcctcggagagtccaggtacttcggccacaggtggcaaggagaaaggcggtgctgttgttatggtaacagcgagtactgcgggaagggtgggatccagtaggggcttaggttattcagggcttcccctgccaccctccggccaaacactgtcgacaggctttccttccgagaagccctggagttgagcctggcgggtgcccatggccatggagtgcacaagaaaaaacacaagaagcacaagaagaaacacaagaagaaacaccatcaggaagaagacgccgggcccacgcagccgtcccctgccaagcctcagctcaaactcaaaatcaagcttgggggacaagtcctggggaccaagagtgttcctaccttcactgtgatcccagaggggcctcgctcaccctctccccttatggttgtggataatgaagaggaacctatggaaggagtcccccttgagcagtaccgtgcctggctggatgaagacagtaatctctctccctctccacttcgggacctatcaggagggttagggggtcaggaggaagaggaggaacagaggtggctggatgccctggagaagggggagctggatgacaatggagacctcaagaaggagatcaatgagcggctgcttactgctcgacagcgagctctgctccagaaggcgcggagtcaaccttcccctatgctgccgctgcctgtagctgagggctgcccacctcccgccctcacagaggagatgctgctgaagcgcgaggagcgggcgcggaagcggcggctccaggcggcgcggcgggcagaagagcacaagaaccagactatcgagcgcctcaccaagactgcggcgaccagtgggcggggaggccgggggggcgcacggggcgagcggcggggagggcgggctgcggctccggcccccatggtgcgctactgcagcggagcacagggttccaccctttccttcccacctggcgtccccgcccccacggcagtgtctcagcggccatccccctcaggcccgccgccgcgctgctctgtccccggctgtccccatccgcgccgctacgcttgctcccgcacaggccaggcactctgtagtcttcagtgctaccgcatcaacctgcagatgcggctgggggggcccgagggtcctggatccccccttttggctacgtaaggcccttaacccggactctgcgccccgtcccatgcccgctcttgagtatcttccccaccctattaaattacatccggtgc

SEQ ID NO: 430746 - DNA, 1278 bp, Homo sapiens
gacctcatgagtaagctgtggcggcgtgggagcacctctggggctatggaggcccctgagccgggtaagcgcgaatagatcaagcaatttaggtcgtgttagaaaagaagtcccgttcttgctcctcggagagtccaggtacttcggccacaggtggcaaggagaaaggcggtgctgttgttatggagaagccctggagttgagcctggcgggtgcccatggccatggagtgcacaagaaaaaacacaagaagcacaagaagaaacacaagaagaaacaccatcaggaagaagacgccgggcccacgcagccgtcccctgccaagcctcagctcaaactcaaaatcaagcttgggggacaagtcctggggaccaagagtgttcctaccttcactgtgatcccagaggggcctcgctcaccctctccccttatggttgtggataatgaagaggaacctatggaaggagtcccccttgagcagtaccgtgcctggctggatgaagacagtaatctctctccctctccacttcgggacctatcaggagggttagggggtcaggaggaagaggaggaacagaggtggctggatgccctggagaagggggagctggatgacaatggagacctcaagaaggagatcaatgagcggctgcttactgctcgacagcgagctctgctccagaaggcgcggagtcaaccttcccctatgctgccgctgcctgtagctgagggctgcccacctcccgccctcacagaggagatgctgctgaagcgcgaggagcgggcgcggaagcggcggctccaggcggcgcggcgggcagaagagcacaagaaccagactatcgagcgcctcaccaagactgcggcgaccagtgggcggggaggccgggggggcgcacggggcgagcggcggggagggcgggctgcggctccggcccccatggtgcgctactgcagcggagcacagggttccaccctttccttcccacctggcgtccccgcccccacggcagtgtctcagcggccatccccctcaggcccgccgccgcgctgctctgtccccggctgtccccatccgcgccgctacgcttgctcccgcacaggccaggcactctgtagtcttcagtgctaccgcatcaacctgcagatgcggctgggggggcccgagggtcctggatccccccttttggctacgtaaggcccttaacccggactctgcgccccgtcccatgcccgctcttgagtatcttccccaccctattaaattacatccggtgc

SEQ ID NO: 430747 - DNA, 884 bp, Homo sapiens
gacctcatgagtaagctgtggcggcgtgggagcacctctggggctatggaggcccctgagccgggagaagccctggagttgagcctggcgggtgcccatggccatggagtgcacaagaaaaaacacaagaagcacaagaagaaacacaagaagaaacaccatcaggaagaagacgccgggcccacgcagccgtcccctgccaagcctcagctcaaactcaaaatcaagcttgggggacaagtcctggggaccaagagtgttcctaccttcactgtgatcccagaggggcctcgctcaccctctccccttatggttgtggataatgaagaggaacctatggaaggagtcccccttgagcagtaccgtgcctggctggatgaagacagtaatctctctccctctccacttcgggacctatcaggagggttagggggtcaggaggaagaggaggaacagaggtggctggatgccctggagaagggggagctggatgacaatggagacctcaagaaggagatcaatgagcggctgcttactgctcgacagcgagctctgctccagaaggcgcggagtcaaccttcccctatgctgccgctgcctgtagctgagggctgcccacctcccgccctcacagaggagatgctgctgaagcgcgaggagcgggcgcggaagcggcggctccaggcggcgcggcgggcagaagagcacaagaaccagactatcgagcgcctcaccaagactgcggcgaccagtgggcggggaggccgggggggcgcacggggcgagcggcggggagggcgggctgcggctccggcccccatggtgcccccgtcccatgcccgctcttgagtatcttccccaccctattaaattacatccggtgc

SEQ ID NO: 430748 - DNA, 750 bp, Homo sapiens
gacctcatgagtaagctgtggcggcgtgggagcacctctggggctatggaggcccctgagccgggagaagccctggagttgagcctggcgggtgcccatggccatggagtgcacaagaaaaaacacaagaagcacaagaagaaacacaagaagaaacaccatcaggaagaagacgccgggcccacgcagccgtcccctgccaagcctcagctcaaactcaaaatcaagcttgggggacaagtcctggggaccaagagtgttcctaccttcactgtgatcccagaggggcctcgctcaccctctccccttatggttgtggataatgaagaggaacctatggaaggagtcccccttgagcagtaccgtgcctggctggatgaagacagtaatctctctccctctccacttcgggacctatcaggagggttagggggtcaggaggaagaggaggaacagaggtggctggatgccctggagaagggggagctggatgacaatggagacctcaggcccgccgccgcgctgctctgtccccggctgtccccatccgcgccgctacgcttgctcccgcacaggccaggcactctgtagtcttcagtgctaccgcatcaacctgcagatgcggctgggggggcccgagggtcctggatccccccttttggctacgtaaggcccttaacccggactctgcgccccgtcccatgcccgctcttgagtatcttccccaccctattaaattacatccggtgc

SEQ ID NO: 430749 - DNA, 1434 bp, Homo sapiens
  misc_feature (1004)..(1004): n is a, c, g, or t
gacctcatgagtaagctgtggcggcgtgggagcacctctggggctatggaggcccctgagccgggagaagccctggagttgagcctggcgggtgcccatggccatggagtgcacaagaaaaaacacaagaagcacaagaagaaacacaagaagaaacaccatcaggaagaagacgccgggcccacgcagccgtcccctgccaagcctcagctcaaactcaaaatcaagcttgggggacaagtcctggggaccaagagtgttcctaccttcactgtgatcccagaggggcctcgctcaccctctccccttatggttgtggataatgaagaggaacctatggaaggagtcccccttgagcagtaccgtgcctggctggatgaagacagtaatctctctccctctccacttcgggacctatcaggagggttagggggtcaggaggaagaggaggaacagaggtggctggatgccctggagaagggggagctggatgacaatggagacctcaggcccgccgccgcgctgctctgtccccggctgtccccatccgcgccgctacgcttgctcccgcacaggccaggcactctgtagtcttcagtgctaccgcatcaacctgcagatgcggctgggggggcccgagggtcctggatccccccttttggctacgtaaggcccttaacccggactctgcgccccgtcccatgcccgctcttgagtatcttccccaccctattaaattacatccggtgcaaaaaaaaaacaaacaaaaaaaaaaaaaaaaatgtgtgtgtgggcgccgcggcccggggccccgtggagaaagagtttttaaagaccatttcccgttgtgggcccgcgggcgggcccccagagttggtgttccgggttgaacccgtgtggcccaaggaggggtgtctcccaaggggagaaacccgggggcccagtgaccatcggtgggcccggggcttttcctccacccaaaataaaaaacgggccgcgggggnactaccggagcggggctctggaaaccaattcccagagtgggggagtcccgggagagcgaccatcgcgggcgtctcatcaaccaacagcggggctccccaggcagggacgtcggaatatcaaaattatgcccgggcgcggggacgcacagacaccgcgcaacgcagacacgcagaaacacgcagccacacatcaggtcgccacacgaagaccaggcagacgacaggaaggacagcaacgagcagaacgaacagagaagaagaggcagacggagcagcagacaggacaaccaccaggcgggaacaacgagcgaaggaggacagagcaagcgaagcaagggcggaggaaagcgccggaagcggagagagcgagaacaacgcccgggagggaccaggcaaggggaaagaagaagaaaaaaaaaaacggccgcga

SEQ ID NO: 430750 - DNA, 933 bp, Homo sapiens
gacctcatgagtaagctgtggcggcgtgggagcacctctggggctatggaggcccctgagccgggtaagcgcgaatagatcaagcaatttaggtcgtgttagaaaagaagtcccgttcttgctcctcggagagtccaggtacttcggccacaggtggcaaggagaaaggcggtgctgttgttatggtaacagcgagtactgcgggaagggtgggatccagtaggggcttaggttattcagggcttcccctgccaccctccggccaaacactgtcgacaggctttccttccgagaagccctggagttgagcctggcgggtgcccatggccatggagtgcacaagaaaaaacacaagaagcacaagaagaaacacaagaagaaacaccatcaggaagaagacgccgggcccacgcagccgtcccctgccaagcctcagctcaaactcaaaatcaagcttgggggacaagtcctggggaccaagagtgttcctaccttcactgtgatcccagaggggcctcgctcaccctctccccttatggttgtggataatgaagaggaacctatggaaggagtcccccttgagcagtaccgtgcctggctggatgaagacagtaatctctctccctctccacttcgggacctatcaggagggttagggggtcaggaggaagaggaggaacagaggtggctggatgccctggagaagggggagctggatgacaatggagacctcaagaaggagatcaatgagcggctgcttactgctcgacagcgagctctgctccagaaggcgcggagtcaaccttccctgggggggcccgagggtcctggatccccccttttggctacgtaaggcccttaacccggactctgcgccccgtcccatgcccgctcttgagtatcttccccaccctattaaattacatccggtgc

SEQ ID NO: 430751 - DNA, 562 bp, Homo sapiens
gacctcatgagtaagctgtggcggcgtgggagcacctctggggctatggaggcccctgagccgggagaagccctggagttgagcctggcgggtgcccatggccatggagtgcacaagaaaaaacacaagaagcacaagaagaaacacaagaagaaacaccatcaggaagaagacgccgggcccacgcagccgtcccctgccaagcctcagctcaaactcaaaatcaagcttgggggacaagtcctggggaccaagagtgttcctaccttcactgtgatcccagaggggcctcgctcaccctctccccttatggttgtggataatgaagaggaacctatggaaggagtcccccttgagcagtaccgtgcctggctggatgaagacagtaatctctctccctctccacttcgggacctatcaggagggttagggggtcaggaggaagaggaggaacagaggtggctggatgccctggagaagggggagctggatgacaatggagacccccgtcccatgcccgctcttgagtatcttccccaccctattaaattacatccggtgc

SEQ ID NO: 430752 - DNA, 548 bp, Homo sapiens
tatgttattcaattgaaatattttctatcttagctgcaactaaagaattttattttcaagatacaattctaaatctgatgtcaaagtaaacatttttgtgtataggtgaaggtggtataatatctgggaattccttcaaaataatctgagggaagataagtgtgtgtatagattttttaaagattggtttataaattgataattgttaaagtaggttgataggtatatgggagtttattatactatcccacttttacgtgtgtttgaaaaaattttttttaaatcgttgtttttttcccccttttgccttctaggattcttacagaagcagagattgatgctcaccttgttgctctagcagagagagactaaacattgtcgttagtttaccagatccgtgatgccacttacctgtgtgtttggtaacaacaaaccaacatcatggaggtccctggattgaaaaaggagcctctcccactcctcctaccaccgaagtggttaggactctatataaataaaaacaaggcttttggaaaataattgcatcc

SEQ ID NO: 430753 - DNA, 929 bp, Homo sapiens
cagtatagtgaagagttcaggccctggagtcatacatggattcaaatctctgccctgctccatactacctgatctgggcacttgccagaatatgcttttaaggctattaaccagggtggccttacatcagtagctgtcagagggaaagactgtgcagtaattgtcacacagaagaaagtacctgacaaattattggattccagcacagtgactcacttattcaagataactgaaaacattggttgtgtgatgaccggaatgacagctgacagcagatcccaggtacagagggcacgctatgaggcagctaactggaaatacaagtatggctatgagattcctgtggacatgctgtgtaaaagaattgccgatatttctcaggtctacacacagaatgctgaaatgaggcctcttggttgttgtatgattttaattggtatagatgaagagcaaggccctcaggtatataagtgtgatcctgcaggttactactgtgggtttaaagccactgcagcgggagttaaacaaactgagtcaaccagcttccttgaaaaaaaagtgaagaagaaatttgattggacatttgaacagacagtggaaactgcaattacatgcctgtctactgttctatcaattgatttcaaaccttcagaaatagaagttggagtagtgacagttgaaaatcctaaattcaggattcttacagaagcagagattgatgctcaccttgttgctctagcagagagagactaaacattgtcgttagtttaccagatccgtgatgccacttacctgtgtgtttggtaacaacaaaccaacatcatggaggtccctggattgaaaaaggagcctctcccactcctcctaccaccgaagtggttaggactctatataaataaaaacaaggcttttggaaaataattgcatcc

SEQ ID NO: 430754 - DNA, 783 bp, Homo sapiens
cagtgctcgaactggctccagagccgtgagttcggcatgcaagagcggaagaaacgcggctggtaccccggaagcagtcgctgcaacttccgggaggtgcttgtgtgcctggtgcgggagctacggggcccagggattgtgtttaaagtagtgcttctaccaacatgtcccgtggttccagcgccggttttgaccgccacattaccattttttcacccgagggtcggctctaccaagtagaatatgcttttaaggctattaaccagggtggccttacatcagtagctgtcagagggaaagactgtgcagtaattgtcacacagaagaaagtacctgacaaattattggattccagcacagtgactcacttattcaagataactgaaaacattggttgtgtgatgaccggaatgacagctgacagcagatcccaggtacagagggcacgctatgaggcagctaactggaaatacaagtatggctatgagattcctgtggacatgctgtgtaaaagaattgccgatatttctcaggtctacacacagaatgctgaaatgaggcctcttggttgttgtaagtatgctaagaggtctcccaaataattgatgaattgaaactttttacagaacatgtatacagaattatttaaataacacttgagttctgaacatgtggtttggaaaatacatagagtgggaaaatctttataataaatcagaactaaaggataggtttcacaacagtatgtcgggcattatctttaagctttagatgctgttagac

SEQ ID NO: 430755 - DNA, 211 bp, Homo sapiens
ggatccaggtctgtgattctcaagcctgctcttgcagggcactgatattcaggatgcaggagaagagtactttgcaattaaatcagagtaaaagcagatgcggccgcgaggtccctggattgaaaaaggagcctctcccactcctcctaccaccgaagtggttaggactctatataaataaaaacaaggcttttggaaaataattgcatcc

SEQ ID NO: 430756 - DNA, 1080 bp, Homo sapiens
  misc_feature (63)..(63): n is a, c, g, or t
  misc_feature (68)..(68): n is a, c, g, or t
aagcatgctatcaacgcagagtgcccattatggccgggaagcagtggtatcaacgcagagtgnattanggccggggtcgctgcaacttccgggaggtgcttgtgtgcctggtgcgggagctacggggcccagggattgtgtttaaagtagtgcttctaccaacatgtcccgtggttccagcgccggttttgaccgccacattaccattttttcacccgagggtcggctctaccaagtagaatatgcttttaaggctattaaccagggtggccttacatcagtagctgtcagagggaaagactgtgcagtaattgtcacacagaagaaagtacctgacaaattattggattccagcacagtgactcacttattcaagataactgaaaacattggttgtgtgatgaccggaatgacagctgacagcagatcccaggtacagagggcacgctatgaggcagctaactggaaatacaagtatggctatgagattcctgtggacatgctgtgtaaaagaattgccgatatttctcaggtctacacacagaatgctgaaatgaggcctcttggttgttgtatgattttaattggtatagatgaagagcaaggccctcaggtatataagtgtgatcctgcaggttactactgtgggtttaaagccactgcagcgggagttaaacaaactgagtcaaccagcttccttgaaaaaaaagtgaagaagaaatttgattggacatttgaacagacagtggaaactgcaattacatgcctgtctactgttctatcaattgatttcaaaccttcagaaatagaagttggagtagtgacagttgaaaatcctaaattcaggattcttacagaagcagagattgatgctcaccttgttgctctagcagagagagactaaacattgtcgttagtttaccagatccgtgatgccacttacctgtgtgtttggtaacaacaaaccaacatcatggaggtccctggattgaaaaaggagcctctcccactcctcctaccaccgaagtggttaggactctatataaataaaaacaaggcttttggaaaataattgcatcc

SEQ ID NO: 430757 - DNA, 1066 bp, Homo sapiens
ggaacgtggcatcgactgggacactagacatgatatgctggatggatactcctgttgtccgaccgtggtaaattccggcgatgtgcctattgtgctggtctgcttgatctcggtagcccaggtatagcgtcataagtagatgtaccaacatgtcccgtggttccagcgccggttttgaccgccacattaccattttttcacccgagggtcggctctaccaagtagaatatgcttttaaggctattaaccagggtggccttacatcagtagctgtcagagggaaagactgtgcagtaattgtcacacagaagaaagtacctgacaaattattggattccagcacagtgactcacttattcaagataactgaaaacattggttgtgtgatgaccggaatgacagctgacagcagatcccaggtacagagggcacgctatgaggcagctaactggaaatacaagtatggctatgagattcctgtggacatgctgtgtaaaagaattgccgatatttctcaggtctacacacagaatgctgaaatgaggcctcttggttgttgtatgattttaattggtatagatgaagagcaaggccctcaggtatataagtgtgatcctgcaggttactactgtgggtttaaagccactgcagcgggagttaaacaaactgagtcaaccagcttccttgaaaaaaaagtgaagaagaaatttgattggacatttgaacagacagtggaaactgcaattacatgcctgtctactgttctatcaattgatttcaaaccttcagaaatagaagttggagtagtgacagttgaaaatcctaaattcaggattcttacagaagcagagattgatgctcaccttgttgctctagcagagagagactaaacattgtcgttagtttaccagatccgtgatgccacttacctgtgtgtttggtaacaacaaaccaacatcatggaggtccctggattgaaaaaggagcctctcccactcctcctaccaccgaagtggttaggactctatataaataaaaacaaggcttttggaaaataattgcatcc

SEQ ID NO: 430758 - DNA, 1526 bp, Homo sapiens
tacgggccgggatctgggatcgcccatctcggcctcccaaagtgctgggattataggcgtgagccactgagcctggccttagattttcttaatagcaagagtacaattatttctctttctttaacatgttttccccagtatttctcacctaaattcttttttgtgtaagcaaatctaataagaaaattggttttgcaagttagactagtcaacgtttattaggtgcatattcttttttattcaaggaataataataaacattataatagcaaactgacataacttgataaagaacttgatggaaccatgtctcatctcagccaggtgtggtggggtatgccttagtccgcactgcttgggaggccaaggtgggaggatcgcttgggcttgaacccgggaggcggaggttgcagtgagctgagattgcaccactgtactccagcctgatgacagagcgagattccatctcaaaaataaataaataaataaggtttcttgtgctttctatgactgcatcagaacagagaatgtcagtatccaataggatgccagtggaattccctgacgattccatccatgcggctctgctggagcagggtagtgtcctaggctgggagaatgggatggagcctccacctcatgaagtagcttcctttggaggtggctatggcaggtcttcggagagaatatgcttttaaggctattaaccagggtggccttacatcagtagctgtcagagggaaagactgtgcagtaattgtcacacagaagaaagtacctgacaaattattggattccagcacagtgactcacttattcaagataactgaaaacattggttgtgtgatgaccggaatgacagctgacagcagatcccaggtacagagggcacgctatgaggcagctaactggaaatacaagtatggctatgagattcctgtggacatgctgtgtaaaagaattgccgatatttctcaggtctacacacagaatgctgaaatgaggcctcttggttgttgtatgattttaattggtatagatgaagagcaaggccctcaggtatataagtgtgatcctgcaggttactactgtgggtttaaagccactgcagcgggagttaaacaaactgagtcaaccagcttccttgaaaaaaaagtgaagaagaaatttgattggacatttgaacagacagtggaaactgcaattacatgcctgtctactgttctatcaattgatttcaaaccttcagaaatagaagttggagtagtgacagttgaaaatcctaaattcaggattcttacagaagcagagattgatgctcaccttgttgctctagcagagagagactaaacattgtcgttagtttaccagatccgtgatgccacttacctgtgtgtttggtaacaacaaaccaacatcatggaggtccctggattgaaaaaggagcctctcccactcctcctaccaccgaagtggttaggactctatataaataaaaacaaggcttttggaaaataattgcatcc

SEQ ID NO: 430759 - DNA, 1123 bp, Homo sapiens
  misc_feature (1005)..(1005): n is a, c, g, or t
  misc_feature (1008)..(1008): n is a, c, g, or t
  misc_feature (1011)..(1011): n is a, c, g, or t
cagtgctcgaactggctccagagccgtgagttcggcatgcaagagcggaagaaacgcggctggtaccccggaagcagtcgctgcaacttccgggaggtgcttgtgtgcctggtgcgggagctacggggcccagggattgtgtttaaagtagtgcttctaccaacatgtcccgtggttccagcgccggttttgaccgccacattaccattttttcacccgagggtcggctctaccaagtagaatatgcttttaaggctattaaccagggtggccttacatcagtagctgtcagagggaaagactgtgcagtaattgtcacacagaagaaagtacctgacaaattattggattccagcacagtgactcacttattcaagataactgaaaacattggttgtgtgatgaccggaatgacagctgacagcagatcccaggtacagagggcacgctatgaggcagctaactggaaatacaagtatggctatgagattcctgtggacatgctgtgtaaaagaattgccgatatttctcaggtctacacacagaatgctgaaatgaggcctcttggttgttgtatgattttaattggtatagatgaagagcaaggccctcaggtatataagtgtgatcctgcaggttactactgtgggtttaaagccactgcagcgggagttaaacaaactgagtcaaccagcttccttgaaaaaaaagtgaagaagaaatttgattggacatttgaacagacagtggaaactgcaattacatgcctgtctactgttctatcaattgatttcaaaccttcagaaatagaagttggagtagtgacagttgaaaatcctaaattcaggattcttacagaagcagagattgatgctcaccttgttgctctagcagagagagactaaacattgtcgttagtttaccagatccgtgatgccacttacctgtgtgtttggtaacaacaaaccaacatcatgtgatggaaagggcttccatctctacacnganggntgggtttttataaaaagggttggagcacaaaaaaaagaaacaaaaaaagggggaatactcgggggagagaacatttagaggaagaataaaaagggcaaaggagagattactt

SEQ ID NO: 430760 - DNA, 928 bp, Homo sapiens
  misc_feature (34)..(34): n is a, c, g, or t
atcacggctaggtagatgctgtggtgtaatcggncgaggtgcttgtgtgcctggtgcgggagctacggggcccagggattgtgtttaaagtagtgcttctaccaacatgtcccgtggttccagcgccggttttgaccgccacattaccattttttcacccgagggtcggctctaccaagtaggacaaattattggattccagcacagtgactcacttattcaagataactgaaaacattggttgtgtgatgaccggaatgacagctgacagcagatcccaggtacagagggcacgctatgaggcagctaactggaaatacaagtatggctatgagattcctgtggacatgctgtgtaaaagaattgccgatatttctcaggtctacacacagaatgctgaaatgaggcctcttggttgttgtatgattttaattggtatagatgaagagcaaggccctcaggtatataagtgtgatcctgcaggttactactgtgggtttaaagccactgcagcgggagttaaacaaactgagtcaaccagcttccttgaaaaaaaagtgaagaagaaatttgattggacatttgaacagacagtggaaactgcaattacatgcctgtctactgttctatcaattgatttcaaaccttcagaaatagaagttggagtagtgacagttgaaaatcctaaattcaggattcttacagaagcagagattgatgctcaccttgttgctctagcagagagagactaaacattgtcgttagtttaccagatccgtgatgccacttacctgtgtgtttggtaacaacaaaccaacatcatggaggtccctggattgaaaaaggagcctctcccactcctcctaccaccgaagtggttaggactctatataaataaaaacaaggcttttggaaaataattgcatcc

SEQ ID NO: 430761 - DNA, 1117 bp, Homo sapiens
cagtgctcgaactggctccagagccgtgagttcggcatgcaagagcggaagaaacgcggctggtaccccggaagcagtcgctgcaacttccgggaggtgcttgtgtgcctggtgcgggagctacggggcccagggattgtgtttaaagtagtgcttctaccaacatgtcccgtggttccagcgccggttttgaccgccacattaccattttttcacccgagggtcggctctaccaagtagaatatgcttttaaggctattaaccagggtggccttacatcagtagctgtcagagggaaagactgtgcagtaattgtcacacagaagaaagtacctgacaaattattggattccagcacagtgactcacttattcaagataactgaaaacattggttgtgtgatgaccggaatgacagctgacagcagatcccaggtacagagggcacgctatgaggcagctaactggaaatacaagtatggctatgagattcctgtggacatgctgtgtaaaagaattgccgatatttctcaggtctacacacagaatgctgaaatgaggcctcttggttgttgtatgattttaattggtatagatgaagagcaaggccctcaggtatataagtgtgatcctgcaggttactactgtgggtttaaagccactgcagcgggagttaaacaaactgagtcaaccagcttccttgaaaaaaaagtgaagaagaaatttgattggacatttgaacagacagtggaaactgcaattacatgcctgtctactgttctatcaattgatttcaaaccttcagaaatagaagttggagtagtgacagttgaaaatcctaaattcaggattctttcccagttcctgcttcttgaaaccagttcctccagttcctgcttcttcctcttcatagtcatcttctgaaggattaaaagtctcatcttcaatttcagactctgaatccccttcttcagcatcactcccctcaacctcaggctccaggaaaagacaggcaacttgttcgaagaagccctcagggtcatcaacaatggtcttcatgattttagtccagttgagggactgtactccttctgtgtatttcaagaaagaggaactgg

SEQ ID NO: 430762 - DNA, 988 bp, Homo sapiens
cagtgctcgaactggctccagagccgtgagttcggcatgcaagagcggaagaaacgcggctggtaccccggaagcagtcgctgcaacttccgggaggtgcttgtgtgcctggtgcgggagctacggggcccagggattgtgtttaaagtagtgcttctaccaacatgtcccgtggttccagcgccggttttgaccgccacattaccattttttcacccgagggtcggctctaccaagtagaatatgcttttaaggctattaaccagggtggccttacatcagtagctgtcagagggaaagactgtgcagtaattgtcacacagaagaaagtacctgacaaattattggattccagcacagtgactcacttattcaagataactgaaaacattggttgtgtgatgaccggaatgacagctgacagcagatcccaggtacagagggcacgctatgaggcagctaactggaaatacaagtatggctatgagattcctgtggacatgctgtgtaaaagaattgccgatatttctcaggtctacacacagaatgctgaaatgaggcctcttggttgttgtatgattttaattggtatagatgaagagcaaggccctcaggtatataagtgtgatcctgcaggttactactgtgggtttaaagccactgcagcgggagttaaacaaactgagtcaaccagcttccttgaaaaaaaagtgaagaagaaatttgattggacatttgaacagacagtggaaactgcaattacatgcctgtctactgttctatcaattgatttcaaaccttcagaaatagaagttggagtagtgacagttgaaaatcctaaattcaggattctttcaagaagcaggaactggaagcaggaactggcaagaagcaggaactggagtttctaaactcttattctcaatgtctgtactacaggcagtgcatttgactgcagactaataaactagtcctggactgtacattt

SEQ ID NO: 430763 - DNA, 830 bp, Homo sapiens
attatacagtttatttttatggttccatagtattgttttctccaagaagcagggcaaattaaaaacataattttttttataactacacagaaacctgtatgttttttaaaaaattatctttgtttattttgtttattaggacaaattattggattccagcacagtgactcacttattcaagataactgaaaacattggttgtgtgatgaccggaatgacagctgacagcagatcccaggtacagagggcacgctatgaggcagctaactggaaatacaagtatggctatgagattcctgtggacatgctgtgtaaaagaattgtatgattttaattggtatagatgaagagcaaggccctcaggtatataagtgtgatcctgcaggttactactgtgggtttaaagccactgcagcgggagttaaacaaactgagtcaaccagcttccttgaaaaaaaagtgaagaagaaatttgattggacatttgaacagacagtggaaactgcaattacatgcctgtctactgttctatcaattgatttcaaaccttcagaaatagaagttggagtagtgacagttgaaaatcctaaattcaggattcttacagaagcagagattgatgctcaccttgttgctctagcagagagagactaaacattgtcgttagtttaccagatccgtgatgccacttacctgtgtgtttggtaacaacaaaccaacatcatggaggtccctggattgaaaaaggagcctctcccactcctcctaccaccgaagtggttaggactctatataaataaaaacaaggcttttggaaaataattgcatcc

SEQ ID NO: 430764 - DNA, 1258 bp, Homo sapiens
cagtgctcgaactggctccagagccgtgagttcggcatgcaagagcggaagaaacgcggctggtaccccggaagcagtcgctgcaacttccgggaggtgcttgtgtgcctggtgcgggagctacggggcccagggattgtgtttaaagtagtgcttctaccaacatgtcccgtggttccagcgccggttttgaccgccacattaccattttttcacccgagggtcggctctaccaagtagaatatgcttttaaggctattaaccagggtggccttacatcagtagctgtcagagggaaagactgtgcagtaattgtcacacagaagaaagtacctgacaaattattggattccagcacagtgactcacttattcaagataactgaaaacattggttgtgtgatgaccggaatgacagctgacagcagatcccaggtacagagggcacgctatgaggcagctaactggaaatacaagtatggctatgagattcctgtggacatgctgtgtaaaagaattgccgatatttctcaggtctacacacagaatgctgaaatgaggcctcttggttgttgtatgattttaattggtatagatgaagagcaaggccctcaggtatataagtgtgatcctgcaggttactactgtgggtttaaagccactgcagcgggagttaaacaaactgagtcaaccagcttccttgaaaaaaaagtgaagaagaaatttgattggacatttgaacagacagtggaagtaagtcaaccaaaaggagctgactttttttatgctatatagaacagtgaggatctttgtataatttctatacaaagctattcctgaattacatcccaggattcaagttgtcaacttaataatgaaattgatatcatacagctgacataggaaaatttgagttgcttttattcacttaattccttatttcgtaatgtatttgaggtggctttcaacaaaacgcatataataggaaaatataaataaaaataggaaccagctgggcatggtggcacacacctgtagtcccagctacttgagaggctgaagctggaggactgcttgagtctaggtgttcgaggccagtcctatttactgccaagaaattaaaaacaaaaattttagtagattttgggtgtaagtctggaattaaagccattctgaagatgctaacaacatgcttctgataagtgaccaaaaaaaaattaccatctaatgcttttacgtttggtttggaagtatgctta

SEQ ID NO: 430765 - DNA, 757 bp, Homo sapiens
cagtgctcgaactggctccagagccgtgagttcggcatgcaagagcggaagaaacgcggctggtaccccggaagcagtcgctgcaacttccgggaggtgcttgtgtgcctggtgcgggagctacggggcccagggattgtgtttaaagtagtgcttctaccaacatgtcccgtggttccagcgccggttttgaccgccacattaccattttttcacccgagggtcggctctaccaagtagaatatgcttttaaggctattaaccagggtggccttacatcagtagctgtcagagggaaagactgtgcagtaattgtcacacagaagaaagtacctgacaaattattggattccagcacagtgactcacttattcaagataactgaaaacattggttgtgtgatgaccggaatgacagctgacagcagatcccaggtacagagggcacgctatgaggcagctaactggaaatacaagtatggctatgagattcctgtggacatgctgtgtaaaagaattgccgatatttctcaggtctacacacagaatgctgaaatgaggcctcttggttgttgtatgattttaattggtatagatgaagagcaaggccctcaggtatataagtgtgatcctgcaggttactactgtgggtttaaagccactgcagcgggagttaaacaaactgagtcaaccagcttccttggtggagatttgatggccattggaacagcgggggctgcattactgcctggctctgg

SEQ ID NO: 430766 - DNA, 381 bp, Homo sapiens
ataacgtcagattgtcaacgcgcaatccacgtccaccctcaaacaaccagtcactgcaattacatgcctgtctactgttctatcaattgatttcaaaccttcagaaatagaagttggagtagtgacagttgaaaatcctaaattcaggattcttacagaagcagagattgatgctcaccttgttgctctagcagagagagactaaacattgtcgttagtttaccagatccgtgatgccacttacctgtgtgtttggtaacaacaaaccaacatcatggaggtccctggattgaaaaaggagcctctcccactcctcctaccaccgaagtggttaggactctatataaataaaaacaaggcttttggaaaataattgcatcc

SEQ ID NO: 430767 - DNA, 856 bp, Homo sapiens
ggggcttggcttccgccttgtgctggggagggcctttccggcgtggtggatctggtatggcgcccagaaagataggggaccggctcaagaaatatgaagctgcctatggaaaacagttcaccccatgccagctgctagctgaccatgctaccagccctaacaagaagttctaccagtgagcaggcctcatgcctcgctcagtcagtgcactaaccccaggggcgggcagggctggttctccaacagagttggtgaaatgaggcctctgggtggtggtatgattttaattggtatagatgaagagcaaggccctcaggtatataagtgtgatcctgcaggttactactgtgggtttaaagccactgcagcgggagttaaacaaactgagtcaaccagcttccttgaaaaaaaagtgaagaagaaatttgattggacatttgaacagacagtggaaactgcaattacatgcctgtctactgttctatcaattgatttcaaaccttcagaaatagaagttggagtagtgacagttgaaaatcctaaattcaggattctttcaagaagcaggaactggccagttcctgcttcttgaaacctcaggtcaccatttgtgtatgcccctttatgggatttcatgtctggaattcctgctaccactccaatgctcttcacctccatcacacacacacccacacgcacacacacaattttgggtcgctccattctactttttggttgtaagactttgtatcagatagttattaaatgattgacaatggacaaagatgtcataaatgatagtttcactaagttgccattccagacctccctagatttgcagcaccctgtgactgtt

SEQ ID NO: 430768 - DNA, 531 bp, Homo sapiens
  misc_feature (34)..(34): n is a, c, g, or t
atcacggctaggtagatgctgtggtgtaatcggncgaggtgcttgtgtgcctggtgcgggagctacggggcccagggattgtgtttaaagtagtgcttctaccaacatgtcccgtggttccagcgccggttttgaccgccacattaccattttttcacccgagggtcggctctaccaagtagaatatgcttttaaggctattaaccagggtggccttacatcagtagctgtcagagggaaagactgtgcagtaattgtcacacagaagaaagtacctgtaagtaatactgcccaaatagttaataattgcagaatataagaatttttcagccaagtgcagtggctcacacctgtaatcccagcactttgggaggctgaggtgggcagatcaccttagatcgggagttctagaccagcgtgaccaacatggagaaaccctgtctctattaaaaatacaaaattagtcaggcgtggtggcacatgcctgtaattccagctactcgggaggctgaggcaggagaatcacttgaa

SEQ ID NO: 430769 - DNA, 679 bp, Homo sapiens
atcatctagaaaaggtaaatagagcccctcgaaactaaaattgattttaactataaaatgatcagaagacatttattatacagtttatttttatggttccatagtattgttttctccaagaagcagggcaaattaaaaacataattttttttataactacacagaaacctgtatgttttttaaaaaattatctttgtttattttgtttattaggacaaattattggattccagcacagtgactcacttattcaagataactgaaaacattggttgtgtgatgaccggaatgacaggtaattaatctgtagatatacaagacatctgtagatatacaagccttttgttattttcttcaaattattttgagttttgtattaattttaaacttattgcctgattttcaagtgccatgagtggatttgcagtcttctaagactagtatcaatattttaagagtattgtgagcttttttgaaattatacctataatagaattagatgcttatgctgctgtcggagaaactgggctgagggccctttcatagatgattttatcttatttcagctatagttagtagtttaaggggacctaactcagtatatctcaaacctggtaataatggcatcggttagaagtgagtgagaattattatgaaaattattttaggttgggcacag

SEQ ID NO: 430770 - DNA, 782 bp, Homo sapiens
cagtgctcgaactggctccagagccgtgagttcggcatgcaagagcggaagaaacgcggctggtaccccggaagcagtcgctgcaacttccgggaggtgcttgtgtgcctggtgcgggagctacggggcccagggattgtgtttaaagtagtgcttctaccaacatgtcccgtggttccagcgccggttttgaccgccacattaccattttttcacccgagggtcggctctaccaagtagaatatgcttttaaggctattaaccagggtggccttacatcagtagctgtcagagggaaagactgtgcagtaattgtcacacagaagaaagtacctgacaaattattggattccagcacagtgactcacttattcaagataactgaaaacattggttgtgtgatgaccggaatgacagctgacagcagatcccaggtacagagggcacgctatgaggcagctaactggaaatacaagtatggctatgagattcctgtggacatgctgtgtaaaagaattgccgatatttctcaggtctacacacagaatgctgaaatgaggcctcttggttgttgtatgattttaattggtatagatgaagagcaaggccctcaggtatataagtgtgatcctgcaggttactactgtgtctaaaggccctttatcggttgtatactaatttggccactcagttcctttgaatctacgttcgcacttttgcttgccattgatatcgcatttgtttccccaattccaccgtctggctttgtctttctggcttct

SEQ ID NO: 430771 - DNA, 1081 bp, Homo sapiens
cagtgctcgaactggctccagagccgtgagttcggcatgcaagagcggaagaaacgcggctggtaccccggaagcagtcgctgcaacttccgggaggtgcttgtgtgcctggtgcgggagctacggggcccagggattgtgtttaaagtagtgcttctaccaacatgtcccgtggttccagcgccggttttgaccgccacattaccattttttcacccgagggtcggctctaccaagtagaatatgcttttaaggctattaaccagggtggccttacatcagtagctgtcagagggaaagactgtgcagtaattgtcacacagaagaaagtacctgacaaattattggattccagcacagtgactcacttattcaagataactgaaaacattggttgtgtgatgaccggaatgacagctgacagcagatcccaggtacagagggcacgctatgaggcagctaactggaaatacaagtatggctatgagattcctgtggacatgctgtgtaaaagaattgccgatatttctcaggtctacacacagaatgctgaaatgaggcctcttggttgttgtatgattttaattggtatagatgaagagcaaggccctcaggtatataagtgtgatcctgcaggttactactgtgggtttaaagccactgcagcgggagttaaacaaactgagtcaaccagcttccttgaaaaaaaagtgaagaagaaatttgattggacatttgaacagacagtggaaactgcaattacatgcctgtctactgttctatcaattgatttcaaaccttcagaaatagaagttggagtagtgacagttgaaaatcctaaattcaggattcttacagaagcagagattgatgctcaccttgttgctctagcagagagagactaaacattgtcgttagtttaccagatccgtgatgccacttacctgtgtgtttggtaacaacaaaccaacatcatggaggtccctggattgaaaaaggagcctctcccactcctcctaccaccgaagtggttaggactctatataaataaaaacaaggcttttggaaaataattgcatcc

SEQ ID NO: 430772 - DNA, 1023 bp, Homo sapiens
  misc_feature (34)..(34): n is a, c, g, or t
atcacggctaggtagatgctgtggtgtaatcggncgaggtgcttgtgtgcctggtgcgggagctacggggcccagggattgtgtttaaagtagtgcttctaccaacatgtcccgtggttccagcgccggttttgaccgccacattaccattttttcacccgagggtcggctctaccaagtagaatatgcttttaaggctattaaccagggtggccttacatcagtagctgtcagagggaaagactgtgcagtaattgtcacacagaagaaagtacctgacaaattattggattccagcacagtgactcacttattcaagataactgaaaacattggttgtgtgatgaccggaatgacagctgacagcagatcccaggtacagagggcacgctatgaggcagctaactggaaatacaagtatggctatgagattcctgtggacatgctgtgtaaaagaattgccgatatttctcaggtctacacacagaatgctgaaatgaggcctcttggttgttgtatgattttaattggtatagatgaagagcaaggccctcaggtatataagtgtgatcctgcaggttactactgtgggtttaaagccactgcagcgggagttaaacaaactgagtcaaccagcttccttgaaaaaaaagtgaagaagaaatttgattggacatttgaacagacagtggaaactgcaattacatgcctgtctactgttctatcaattgatttcaaaccttcagaaatagaagttggagtagtgacagttgaaaatcctaaattcaggattcttacagaagcagagattgatgctcaccttgttgctctagcagagagagactaaacattgtcgttagtttaccagatccgtgatgccacttacctgtgtgtttggtaacaacaaaccaacatcatggaggtccctggattgaaaaaggagcctctcccactcctcctaccaccgaagtggttaggactctatataaataaaaacaaggcttttggaaaataattgcatcc

SEQ ID NO: 430773 - DNA, 1086 bp, Homo sapiens
gtttagtctggggccgaagctgggctggagctgggaagggagaacggctgaagctggattgagctctgtggtgtttgcacccccgtctggacgcagggatcgggggcctgaaggcctgtctctgcagggcgagcggccacactgcgtagacccaatggagagttaaggaagatagggctgtaatgcctgactccggcttcgtgaggccccttcagttattgtattctgtcctggccaggcacaagaatatgcttttaaggctattaaccagggtggccttacatcagtagctgtcagagggaaagactgtgcagtaattgtcacacagaagaaagtacctgacaaattattggattccagcacagtgactcacttattcaagataactgaaaacattggttgtgtgatgaccggaatgacagctgacagcagatcccaggtacagagggcacgctatgaggcagctaactggaaatacaagtatggctatgagattcctgtggacatgctgtgtaaaagaattgccgatatttctcaggtctacacacagaatgctgaaatgaggcctcttggttgttgtatgattttaattggtatagatgaagagcaaggccctcaggtatataagtgtgatcctgcaggttactactgtgggtttaaagccactgcagcgggagttaaacaaactgagtcaaccagcttccttgaaaaaaaagtgaagaagaaatttgattggacatttgaacagacagtggaaactgcaattacatgcctgtctactgttctatcaattgatttcaaaccttcagaaatagaagttggagtagtgacagttgaaaatcctaaattcaggattcttacagaagcagagattgatgctcaccttgttgctctagcagagagagactaaacattgtcgttagtttaccagatccgtgatgccacttacctgtgtgtttggtaacaacaaaccaacatcatggaggtccctggattgaaaaaggagcctctcccactcctcctaccaccgaagtggttaggactctatataaataaaaacaaggcttttggaaaataattgcatcc

SEQ ID NO: 430774 - DNA, 1144 bp, Homo sapiens
cagtgctcgaactggctccagagccgtgagttcggcatgcaagagcggaagaaacgcggctggtaccccggaagcagtcgctgcaacttccgggaggtgcttgtgtgcctggtgcgggagctacggggcccagggattgtgtttaaagtagtgcttctaccaacatgtcccgtggttccagcgccggttttgaccgccacattaccattttttcacccgagggtcggctctaccaagtagaatatgcttttaaggctattaaccagggtggccttacatcagtagctgtcagagggaaagactgtgcagtaattgtcacacagaagaaagtacctgacaaattattggattccagcacagtgactcacttattcaagataactgaaaacattggttgtgtgatgaccggaatgacagctgacagcagatcccaggtacagagggcacgctatgaggcagctaactggaaatacaagtatggctatgagattcctgtggacatgctgtgtaaaagaattgccgatatttctcaggtctacacacagaatgctgaaatgaggcctcttggttgttgtatgattttaattggtatagatgaagagcaaggccctcaggtatataagtgtgatcctgcaggttactactgtgggtttaaagccactgcagcgggagttaaacaaactgagtcaaccagcttccttgaaaaaaaagtgaagaagaaatttgattggacatttgaacagacagtggaaactgcaattacatgcctgtctactgttctatcaattgatttcaaaccttcagaaatagaagttggagtagtgacagttgaaaatcctaaattcaggattcttacagaagcagagattgatgctcaccttgttgctctagcagagagagactaaacattgtcgttagtttaccagatccgtgatgccatttctaagacctacagctacctgacccccgacctctggaaggagactgtattcaccaagtctccctatcaggagttcactgaccacctcgtcaagacccacaccagagtctccgtgcagcggactcaggctccagctgtggctacaacatagggtttttatacaagaaaaataaagtgaattaagcgtgaaaaaaaacaaaccag

SEQ ID NO: 430775 - DNA, 1154 bp, Homo sapiens
cagtgctcgaactggctccagagccgtgagttcggcatgcaagagcggaagaaacgcggctggtaccccggaagcagtcgctgcaacttccgggaggtgcttgtgtgcctggtgcgggagctacggggcccagggattgtgtttaaagtagtgcttctaccaacatgtcccgtggttccagcgccggttttgaccgccacattaccattttttcacccgagggtcggctctaccaagtagaatatgcttttaaggctattaaccagggtggccttacatcagtagctgtcagagggaaagactgtgcagtaattgtcacacagaagaaagtacctgacaaattattggattccagcacagtgactcacttattcaagataactgaaaacattggttgtgtgatgaccggaatgacagctgacagcagatcccaggtacagagggcacgctatgaggcagctaactggaaatacaagtatggctatgagattcctgtggacatgctgtgtaaaagaattgccgatatttctcaggtctacacacagaatgctgaaatgaggcctcttggttgttgtatgattttaattggtatagatgaagagcaaggccctcaggtatataagtgtgatcctgcaggttactactgtgggtttaaagccactgcagcgggagttaaacaaactgagtcaaccagcttccttgaaaaaaaagtgaagaagaaatttgattggacatttgaacagacagtggaaactgcaattacatgcctgtctactgttctatcaattgatttcaaaccttcagaaatagaagttggagtagtgacagttgaaaatcctaaattcaggattctttcaagaagcaggaactggccagttcctgcttcttgaaacctcaggtcaccatttgtgtatgcccctttatgggatttcatgtctggaattcctgctaccactccaatgctcttcacctccatcacacacacacccacacgcacacacacaattttgggtcgctccattctactttttggttgtaagactttgtatcagatagttattaaatgattgacaatggacaaagatgtcataaatgatagtttcactaagttgccattccagacctccctagatttgcagcaccctgtgactgtt

SEQ ID NO: 430776 - DNA, 630 bp, Homo sapiens
agacggtagaaggggcaaggaacaccaattgtgtttgttagcacatttgtaataactgcaagttgggaacagttttaatctcctctgttgttattcaataatgacagtttgaatttcatgttgtatgattttaattggtatagatgaagagcaaggccctcaggtatataagtgtgatcctgcaggttactactgtgggtttaaagccactgcagcgggagttaaacaaactgagtcaaccagcttccttgaaaaaaaagtgaagaagaaatttgattggacatttgaacagacagtggaaactgcaattacatgcctgtctactgttctatcaattgatttcaaaccttcagaaatagaagttggagtagtgacagttgaaaatcctaaattcaggattcttacagaagcagagattgatgctcaccttgttgctctagcagagagagactaaacattgtcgttagtttaccagatccgtgatgccacttacctgtgtgtttggtaacaacaaaccaacatcatggaggtccctggattgaaaaaggagcctctcccactcctcctaccaccgaagtggttaggactctatataaataaaaacaaggcttttggaaaataattgcatcc

SEQ ID NO: 430777 - DNA, 1031 bp, Homo sapiens
cagtgctcgaactggctccagagccgtgagttcggcatgcaagagcggaagaaacgcggctggtaccccggaagcagtcgctgcaacttccgggaggtgcttgtgtgcctggtgcgggagctacggggcccagggattgtgtttaaagtagtgcttctaccaacatgtcccgtggttccagcgccggttttgaccgccacattaccattttttcacccgagggtcggctctaccaagtagaatatgcttttaaggctattaaccagggtggccttacatcagtagctgtcagagggaaagactgtgcagtaattgtcacacagaagaaagtacctgacaaattattggattccagcacagtgactcacttattcaagataactgaaaacattggttgtgtgatgaccggaatgacagctgacagcagatcccaggtacagagggcacgctatgaggcagctaactggaaatacaagtatggctatgagattcctgtggacatgctgtgtaaaagaattgccgatatttctcaggtctacacacagaatgctgaaatgaggcctcttggttgttgtatgattttaattggtatagatgaagagcaaggccctcaggtatataagtgtgatcctgcaggttactactgtgggtttaaagccactgcagcgggagttaaacaaactgagtcaaccagcttccttgactgcaattacatgcctgtctactgttctatcaattgatttcaaaccttcagaaatagaagttggagtagtgacagttgaaaatcctaaattcaggattcttacagaagcagagattgatgctcaccttgttgctctagcagagagagactaaacattgtcgttagtttaccagatccgtgatgccacttacctgtgtgtttggtaacaacaaaccaacatcatggaggtccctggattgaaaaaggagcctctcccactcctcctaccaccgaagtggttaggactctatataaataaaaacaaggcttttggaaaataattgcatcc

SEQ ID NO: 430778 - DNA, 943 bp, Homo sapiens
cagtgctcgaactggctccagagccgtgagttcggcatgcaagagcggaagaaacgcggctggtaccccggaagcagtcgctgcaacttccgggaggtgcttgtgtgcctggtgcgggagctacggggcccagggattgtgtttaaagtagtgcttctaccaacatgtcccgtggttccagcgccggttttgaccgccacattaccattttttcacccgagggtcggctctaccaagtagaatatgcttttaaggctattaaccagggtggccttacatcagtagctgtcagagggaaagactgtgcagtaattgtcacacagaagaaagtacctgacaaattattggattccagcacagtgactcacttattcaagataactgaaaacattggttgtgtgatgaccggaatgacagctgacagcagatcccaggtacagagggcacgctatgaggcagctaactggaaatacaagtatggctatgagattcctgtggacatgctgtgtaaaagaattgccgatatttctcaggtctacacacagaatgctgaaatgaggcctcttggttgttgtatgattttaattggtatagatgaagagcaaggccctcagactgcaattacatgcctgtctactgttctatcaattgatttcaaaccttcagaaatagaagttggagtagtgacagttgaaaatcctaaattcaggattcttacagaagcagagattgatgctcaccttgttgctctagcagagagagactaaacattgtcgttagtttaccagatccgtgatgccacttacctgtgtgtttggtaacaacaaaccaacatcatggaggtccctggattgaaaaaggagcctctcccactcctcctaccaccgaagtggttaggactctatataaataaaaacaaggcttttggaaaataattgcatcc

SEQ ID NO: 430779 - DNA, 156 bp, Homo sapiens
caactgagaaaaaactgtcattaaattagagtgcgtcctgatttaagagatacaaaaatatttcttagaatcattcaaaggtggttgagagagtggtgaaaaagggcttttctgagcataggttgtgagtatattaacactaaaagtaaacgagat

SEQ ID NO: 430780 - DNA, 2182 bp, Homo sapiens
ataaaggttttaaatagtctataccgtatactaaaactaaattaatatttaggactgaaataacatattgattaagtaccagctatgtacccaaaaaatgctgggcacagaagttagagtaagatgttttacttaaagggcctttgagtgagagttggcaattcattctgaactaaccactaatatcattaagaattagtgctgagttggtagcaggaaataggtaattctgtctaaaggaatcatgaaatggaaaataaataagcttttaataaggagaaggaagagctgaagaaatggcacagtgttcttagaatgacagatagtcctatggggactgcagcataaaagtgaaaaatgtataagataaacctttagatggtaagcaaggcaagattctcaaattctgtatgaatcagctccacctccgccccatggacagtagatgaccgttaatggcttttaaggaaagatgcaacctggaaaaaaagaaaaaaaacttgttttagaatggtaaccactggcaatatgaagaataattagactaaagaagagaggtaggataatcatgggcattggcagtggaattgaaagagtaatttcagaagcagaatggtcagatgttggaggtgattggttatagagtttaagaattgtactgattttctattgtgtaacaaactaccccaaaacttaatggcttaaagcaactattatttctcctgattctgtggttgactggatggtcgtctgctgctcttgcttagacttaggcatctgcatttagctgagggttcagccagggctggacatcctttaatggcctcattcccatgtctggggcctcaggtcagatagctgggactaccgggtctcactccagaagaggcttcttcagagcatggtagtcttggggttctaagagaatgagagtagaagctgcaaaacctcttgaaactggggcttgggagtcacacatgactttctccacattctgttcgtcaaaagcgaatcataaggacagcacagactcaagggataagaaaggagattccatctcttgatgagaagagctgcaaaggccatatttaatcagtcacaggagtctaatgctacaaagtagttttttaaaaagatgactagattggcaagttcaaggttaatctttttatttgttttatttatatatcacttagctggtattcagtaaaagcttgctttgtaaaatttagttaatatctttttggttcagcacagacattgcatcatcttagcagctctttttcaaacagatttgaagctgcttcaaataacaatctggtttataaaatgaaaatagaaaattatgatcttagaatgaagaagtgaatttctaagccatgataattattacggttgctgtgattagacagacttttctgtggagcttcctgacaaccaagaaaaaaggggaaatcaaggaactgttcttatcagaaagtaggaacccagcaattctttcattttctcattgggaacttaatagtcactgaattacaaagtagacagtgaccttgattatacaacatatgcggaagtgtttcctgtaacttacgtgagtattttatcaaatacttatatatttgataaaagctaagtacataaagcataactcagtagatagaattctctagtagtaagctaaagtgcttcaagtattagttgtcatattaatccaagagaaaattagatctgagactacctcgaggagtaaacgaacaacttctttaaaccaatactagtcaaaatgcagtccacggaccaatgctggttcatgccctatttgatccaagtccacattaagtacagaaatgaagagtaagcatttagaaacttggggcaatttgacattgcctcaacatccaagtttcagtgtcctttataaactattgatccatgacagatcatgaaactttctaaaaattgatccttttatcacatagtctttcaaaatattatttgcttctttgaagctttggatagaaacttgataatgtgaagttccatactattaactagacacagaactgcgcagcaagatgcctgctgtgtgcattccagatatagtacatagctcagctctcaaatcagcaacaaagaagataagcacaccaggtccacatagcagagaacttcgtcgacc

SEQ ID NO: 430781 - DNA, 4569 bp, Homo sapiens
gctgccgcgccccgccctttctcggcccccggagggtgacggggtgaaggcgggggaaccgaggtggggagtccgccagagctcccagactgcgagcacgcgagccgccgcagccgtcacccgcgccgcgtcacggctcccgggcccgccctcctctgacccctcccctctctccgtttccccctctccccctcctccgccgaccgagcagtgacttaagcaacggagcgcggtgaagctcatttttctccttcctcgcagccgcgccagggagctcgcggcgcgcggcccctgtcctccggcccgagatgaatcctgcggcagaagccgagttcaacatcctcctggccaccgactcctacaaggttactcactataaacaatatccacccaacacaagcaaagtttattcctactttgaatgccgtgaaaagaagacagaaaactccaaattaaggaaggtgaaatatgaggaaacagtattttatgggttgcagtacattcttaataagtacttaaaaggtaaagtagtaaccaaagagaaaatccaggaagccaaagatgtctacaaagaacatttccaagatgatgtctttaatgaaaagggatggaactacattcttgagaagtatgatgggcatcttccaatagaaataaaagctgttcctgagggctttgtcattcccagaggaaatgttctcttcacggtggaaaacacagatccagagtgttactggcttacaaattggattgagactattcttgttcagtcctggtatccaatcacagtggccacaaattctagagagcagaagaaaatattggccaaatatttgttagaaacttctggtaacttagatggtctggaatacaagttacatgattttggctacagaggagtctcttcccaagagactgctggcataggagcatctgctcacttggttaacttcaaaggaacagatacagtagcaggacttgctctaattaaaaaatattatggaacgaaagatcctgttccaggctattctgttccagcagcagaacacagtaccataacagcttgggggaaagaccatgaaaaagatgcttttgaacatattgtaacacagttttcatcagtgcctgtatctgtggtcagcgatagctatgacatttataatgcgtgtgagaaaatatggggtgaagatctaagacatttaatagtatcgagaagtacacaggcaccactaataatcagacctgattctggaaaccctcttgacactgtgttaaaggttttggagattttaggtaagaagtttcctgttactgagaactcaaagggttacaagttgctgccaccttatcttagagttattcaaggggatggagtagatattaataccttacaagagattgtagaaggcatgaaacaaaaaatgtggagtattgaaaatattgccttcggttctggtggaggtttgctacagaagttgacaagagatctcttgaattgttccttcaagtgtagctatgttgtaactaatggccttgggattaacgtcttcaaggacccagttgctgatcccaacaaaaggtccaaaaagggccgattatctttacataggacgccagcagggaattttgttacactggaggaaggaaaaggagaccttgaggaatatggtcaggatcttctccatactgtcttcaagaatggcaaggtgacaaaaagctattcatttgatgaaataagaaaaaatgcacagctgaatattgaactggaagcagcacatcattaggctttatgactgggtgtgtgttgtgtgtatgtaatacataatgtttattgtacagatgtgtggggtttgtgttttatgatacattacagccaaattatttgttggtttatggacatactgccctttcattttttttcttttccagtgtttaggtgatctcaaattaggaaatgcatttaaccatgtaaaagatgagtgctaaagtaagctttttagggccctttgccaataggtagtcattcaatctggtattgatcttttcacaaataacagaactgagaaacttttatatataactgatgatcacataaaacagatttgcataaaattaccatgattgctttatgtttatatttaacttgtatttttgtacaaacaagattgtgtaagatatatttgaagtttcagtgatttaacagtctttccaacttttcatgatttttatgagcacagactttcaagaaaatacttgaaaataaattacattgccttttgtccattaatcagcaaataaaacatggccttaacaaagttgtttgtgttattgtacaatttgaaaattatgtcgggacataccctatagaattactaaccttactgccccttgtagaatatgtattaatcattctacattaaagaaaataatggttcttactggaatgtctaggcactgtacagttattatatatcttggttgttgtattgtaccagtgaaatgccaaatttgaaaggcctgtactgcaattttatatgtcagagattgcctgtggctctaatatgcacctcaagattttaaggagataatgtttttagagagaatttctgcttccactatagaatatatacataaatgtaaaatacttacaaaagtggaagtagtgtattttaaagtaattacacttctgaatttatttttcatattctatagttggtatgacttaaatgaattactggagtgggtagtgagtgtacttaaatgtttcaattctgttatattttttattaagtttttaaaaaattaaattggatattaaattgtatggacatcatttattaattttaaactgaatgccctcaataagtaatactgaagcacattcttaaatgaagataaattatctccaatgaaaagcatgacatgtgtttcaatagaagaatcttaagttggctaaattcaaagtgcttgacatcaaaatgttctagagtgattagctactagattctgaatcagacatcacatctgactagagaccagtttctttcgaatgattcttttatgtatgtagatctgttcttctgaggcagcggttggccaactatagcccaaaggccaaatttggacttctttttataaatgcagattgtctatggctgctttcccactactccagcctaaggtaaacagctgcaatagaagccaaatgagaatcgcaaagcccaaaatgtttattaacctgccctttacacaaaatcacacaaaaagtttcctgatctctgttctaagaaaaggagtgtgccttgcatttaaaaggaaatgttggtttctagggaagggaggaggctaaataattgatacggaattttcctcttttgtcttcttttttctcacttaagaatccgatactggaagactgatttagaaaagtttttaacatgacattaaatgtgaaattttaaaaattgaaaagccataaatcatctgttttaaatagttacatgagaaaatgatcactagaataacctaattagaagtgttatcttcattaaatgttttttgtaagtggtattagaaagaatatgtttttcagatggttctttaaacatgtagtgagaacaataagcattattcacttttagtaagtcttctgtaatccatgatataaaataattttaaaatgattttttaatgtatttgagtaaagatgagtagtattaagaaaaacacacatttcttcacaaaatgtgctaaggggcgtgtaaagaatcaaaagaaactattaccaataatagttttgataatcacccataattttgtgtttaaacattgaaattatagtacagacagtattctctgtgttctgtgaatttcagcagcttcagaatagagtttaatttagaaatttgcagtgaaaaaagctatctctttgttcacaaccataaatcaggagatggagattaattctattggctcttagtcacttggaactgattaattctgactttctgtcactaagcacttggtatttggccatctccattctgagcaccaaacggttaacacgaatgtccactagaactctgctgtgtgtcacccttaaatcagtctaaatcttccagacaaaagcaaatggcatttatggatttaagtcattagattttcaactgacattaattaatccctcttgattgattatatcatcaagtatttatatcttaaataggaggtaggatttctgtgttaagactcttatttgtaccctataattaaagtaaaatgttttttatgagtatcccttgttttcccttcttaaattgttatcaaacaatttttataatgaaatctatcttggaaaattagaaagaaaaatggcaaggtatttattgttctgtttgccataatttagaactcacacttaagtattttgtagttttacattcctttttaacccattcagtggagaatgtcagcttttctcccaagttgtatgttaagtctattctaatatgtactcaacatcaagttataaacatgtaataaacatggaaataaagtttagctctatta

SEQ ID NO: 430782 - DNA, 5145 bp, Homo sapiens
gctgccgcgccccgccctttctcggcccccggagggtgacggggtgaaggcgggggaaccgaggtggggagtccgccagagctcccagactgcgagcacgcgagccgccgcagccgtcacccgcgccgcgtcacggctcccgggcccgccctcctctgacccctcccctctctccgtttccccctctccccctcctccgccgaccgagcagtgacttaagcaacggagcgcggtgaagctcatttttctccttcctcgcagccgcgccagggagctcgcggcgcgcggcccctgtcctccggcccgagatgaatcctgcggcagaagccgagttcaacatcctcctggccaccgactcctacaaggttactcactataaacaatatccacccaacacaagcaaagtttattcctactttgaatgccgtgaaaagaagacagaaaactccaaattaaggaaggtgaaatatgaggaaacagtattttatgggttgcagtacattcttaataagtacttaaaaggtaaagtagtaaccaaagagaaaatccaggaagccaaagatgtctacaaagaacatttccaagatgatgtctttaatgaaaagggatggaactacattcttgagaagtatgatgggcatcttccaatagaaataaaagctgttcctgagggctttgtcattcccagaggaaatgttctcttcacggtggaaaacacagatccagagtgttactggcttacaaattggattgagactattcttgttcagtcctggtatccaatcacagtggccacaaattctagagagcagaagaaaatattggccaaatatttgttagaaacttctggtaacttagatggtctggaatacaagttacatgattttggctacagaggagtctcttcccaagagactgctggcataggagcatctgctcacttggttaacttcaaaggaacagatacagtagcaggacttgctctaattaaaaaatattatggaacgaaagatcctgttccaggctattctgttccagcagcagaacacagtaccataacagcttgggggaaagaccatgaaaaagatgcttttgaacatattgtaacacagttttcatcagtgcctgtatctgtggtcagcgatagctatgacatttataatgcgtgtgagaaaatatggggtgaagatctaagacatttaatagtatcgagaagtacacaggcaccactaataatcagacctgattctggaaaccctcttgacactgtgttaaaggttttggagattttaggtaagaagtttcctgttactgagaactcaaagggttacaagttgctgccaccttatcttagagttattcaaggggatggagtagatattaataccttacaagagattgtagaaggcatgaaacaaaaaatgtggagtattgaaaatattgccttcggttctggtggaggtttgctacagaagttgacaagagatctcttgaattgttccttcaagtgtagctatgttgtaactaatggccttgggattaacgtcttcaaggacccagttgctgatcccaacaaaaggtccaaaaagggccgattatctttacataggacgccagcagggaattttgttacactggaggaaggaaaaggagaccttgaggaatatggtcaggatcttctccatactgtcttcaagaatggcaaggtgacaaaaagctattcatttgatgaaataagaaaaaatgcacagctgaatattgaactggaagcagcacatcattaggctttatgactgggtgtgtgttgtgtgtatgtaatacataatgtttattgtacagatgtgtggggtttgtgttttatgatacattacagccaaattatttgttggtttatggacatactgccctttcattttttttcttttccagtgtttaggtgatctcaaattaggaaatgcatttaaccatgtaaaagatgagtgctaaagtaagctttttagggccctttgccaataggtagtcattcaatctggtattgatcttttcacaaataacagaactgagaaacttttatatataactgatgatcacataaaacagatttgcataaaattaccatgattgctttatgtttatatttaacttgtatttttgtacaaacaagattgtgtaagatatatttgaagtttcagtgatttaacagtctttccaacttttcatgatttttatgagcacagactttcaagaaaatacttgaaaataaattacattgccttttgtccattaatcagcaaataaaacatggccttaacaaagttgtttgtgttattgtacaatttgaaaattatgtcgggacataccctatagaattactaaccttactgccccttgtagaatatgtattaatcattctacattaaagaaaataatggttcttactggaatgtctaggcactgtacagttattatatatcttggttgttgtattgtaccagtgaaatgccaaatttgaaaggcctgtactgcaattttatatgtcagagattgcctgtggctctaatatgcacctcaagattttaaggagataatgtttttagagagaatttctgcttccactatagaatatatacataaatgtaaaatacttacaaaagtggaagtagtgtattttaaagtaattacacttctgaatttatttttcatattctatagttggtatgacttaaatgaattactggagtgggtagtgagtgtacttaaatgtttcaattctgttatattttttattaagtttttaaaaaattaaattggatattaaattgtatggacatcatttattaattttaaactgaatgccctcaataagtaatactgaagcacattcttaaatgaagataaattatctccaatgaaaagcatgacatgtgtttcaatagaagaatcttaagttggctaaattcaaagtgcttgacatcaaaatgttctagagtgattagctactagattctgaatcagacatcacatctgactagagaccagtttctttcgaatgattcttttatgtatgtagatctgttcttctgaggcagcggttggccaactatagcccaaaggccaaatttggacttctttttataaatgcagattgtctatggctgctttcccactactccagcctaaggtaaacagctgcaatagaagccaaatgagaatcgcaaagcccaaaatgtttattaacctgccctttacacaaaatcacacaaaaagtttcctgatctctgttctaagaaaaggagtgtgccttgcatttaaaaggaaatgttggtttctagggaagggaggaggctaaataattgatacggaattttcctcttttgtcttcttttttctcacttaagaatccgatactggaagactgatttagaaaagtttttaacatgacattaaatgtgaaattttaaaaattgaaaagccataaatcatctgttttaaatagttacatgagaaaatgatcactagaataacctaattagaagtgttatcttcattaaatgttttttgtaagtggtattagaaagaatatgtttttcagatggttctttaaacatgtagtgagaacaataagcattattcacttttagtaagtcttctgtaatccatgatataaaataattttaaaatgattttttaatgtatttgagtaaagatgagtagtattaagaaaaacacacatttcttcacaaaatgtgctaaggggcgtgtaaagaatcaaaagaaactattaccaataatagttttgataatcacccataattttgtgtttaaacattgaaattatagtacagacagtattctctgtgttctgtgaatttcagcagcttcagaatagagtttaatttagaaatttgcagtgaaaaaagctatctctttgttcacaaccataaatcaggagatggagattaattctattggctcttagtcacttggaactgattaattctgactttctgtcactaagcacttggtatttggccatctccattctgagcaccaaacggttaacacgaatgtccactagaactctgctgtgtgtcacccttaaatcagtctaaatcttccagacaaaagcaaatggcatttatggatttaagtcattagattttcaactgacattaattaatccctcttgattgattatatcatcaagtatttatatcttaaataggaggtaggatttctgtgttaagactcttatttgtaccctataattaaagtaaaatgttttttatgagtatcccttgttttcccttcttaaattgttatcaaacaatttttataatgaaatctatcttggaaaattagaaagaaaaatggcaaggtatttattgttctgtttgccataatttagaactcacacttaagtattttgtagttttacattcctttttaacccattcagtggagaatgtcagcttttctcccaagttgtatgttaagtctattctaatatgtactcaacatcaagttataaacatgtaataaacatggaaataaagtttagctctattaaaaaaaaaaaaaaaaaaaaaaaaaaaaaaaaaaaaaaaaaaaaaaaaaaaaaaaaaaacaaaaaaaaaaaaaaaaaaaaaaaaacaaaaaaaaaaaaaaaaaaggaggagggggggggcaggcgaactaaatcatcccccgacaggaggacaacaccaagtccagccgccgccgcagccacgtttctgtgatgagaagggggcggcctgctcacaggggggctggagatgtagttacaaaaatgagaggaggacgagggggtgctattgatcaaaaaacaaaagacagacactacggggagagcaaaaaagtagtcattctttgagatataccaatttttggtaggaaacaataaccatccttatccttgggaacgagtggtgtacactgataacacactgggggaaacgaaaaaaatcatagccaataaaaggataatctgatgcccatgccgaggacataataaaaaacatattgctcgatgttgaactgtgggaaaaaaaacagagtactattttatgtcggcgcgtaaaaagtatgtagtccgaggtgatgattttactacaaacatttccc

SEQ ID NO: 430783 - DNA, 4410 bp, Homo sapiens
ggccccagcggactcccgggcgccggtgctcggggctcggggctcggggcttgggcgtcgccggcgagcgcatgcccttccctgaagcgcggcctcttggcctggagctgggaccagttaggtaacggccccggggacccgcagtggagagtgagcggggctttccccgccgggccagcccggcgcgctcgcccctgcctgggcaggttactcactataaacaatatccacccaacacaagcaaagtttattcctactttgaatgccgtgaaaagaagacagaaaactccaaattaaggaaggtgaaatatgaggaaacagtattttatgggttgcagtacattcttaataagtacttaaaaggtaaagtagtaaccaaagagaaaatccaggaagccaaagatgtctacaaagaacatttccaagatgatgtctttaatgaaaagggatggaactacattcttgagaagtatgatgggcatcttccaatagaaataaaagctgttcctgagggctttgtcattcccagaggaaatgttctcttcacggtggaaaacacagatccagagtgttactggcttacaaattggattgagactattcttgttcagtcctggtatccaatcacagtggccacaaattctagagagcagaagaaaatattggccaaatatttgttagaaacttctggtaacttagatggtctggaatacaagttacatgattttggctacagaggagtctcttcccaagagactgctggcataggagcatctgctcacttggttaacttcaaaggaacagatacagtagcaggacttgctctaattaaaaaatattatggaacgaaagatcctgttccaggctattctgttccagcagcagaacacagtaccataacagcttgggggaaagaccatgaaaaagatgcttttgaacatattgtaacacagttttcatcagtgcctgtatctgtggtcagcgatagctatgacatttataatgcgtgtgagaaaatatggggtgaagatctaagacatttaatagtatcgagaagtacacaggcaccactaataatcagacctgattctggaaaccctcttgacactgtgttaaaggttttggagattttaggtaagaagtttcctgttactgagaactcaaagggttacaagttgctgccaccttatcttagagttattcaaggggatggagtagatattaataccttacaagagattgtagaaggcatgaaacaaaaaatgtggagtattgaaaatattgccttcggttctggtggaggtttgctacagaagttgacaagagatctcttgaattgttccttcaagtgtagctatgttgtaactaatggccttgggattaacgtcttcaaggacccagttgctgatcccaacaaaaggtccaaaaagggccgattatctttacataggacgccagcagggaattttgttacactggaggaaggaaaaggagaccttgaggaatatggtcaggatcttctccatactgtcttcaagaatggcaaggtgacaaaaagctattcatttgatgaaataagaaaaaatgcacagctgaatattgaactggaagcagcacatcattaggctttatgactgggtgtgtgttgtgtgtatgtaatacataatgtttattgtacagatgtgtggggtttgtgttttatgatacattacagccaaattatttgttggtttatggacatactgccctttcattttttttcttttccagtgtttaggtgatctcaaattaggaaatgcatttaaccatgtaaaagatgagtgctaaagtaagctttttagggccctttgccaataggtagtcattcaatctggtattgatcttttcacaaataacagaactgagaaacttttatatataactgatgatcacataaaacagatttgcataaaattaccatgattgctttatgtttatatttaacttgtatttttgtacaaacaagattgtgtaagatatatttgaagtttcagtgatttaacagtctttccaacttttcatgatttttatgagcacagactttcaagaaaatacttgaaaataaattacattgccttttgtccattaatcagcaaataaaacatggccttaacaaagttgtttgtgttattgtacaatttgaaaattatgtcgggacataccctatagaattactaaccttactgccccttgtagaatatgtattaatcattctacattaaagaaaataatggttcttactggaatgtctaggcactgtacagttattatatatcttggttgttgtattgtaccagtgaaatgccaaatttgaaaggcctgtactgcaattttatatgtcagagattgcctgtggctctaatatgcacctcaagattttaaggagataatgtttttagagagaatttctgcttccactatagaatatatacataaatgtaaaatacttacaaaagtggaagtagtgtattttaaagtaattacacttctgaatttatttttcatattctatagttggtatgacttaaatgaattactggagtgggtagtgagtgtacttaaatgtttcaattctgttatattttttattaagtttttaaaaaattaaattggatattaaattgtatggacatcatttattaattttaaactgaatgccctcaataagtaatactgaagcacattcttaaatgaagataaattatctccaatgaaaagcatgacatgtgtttcaatagaagaatcttaagttggctaaattcaaagtgcttgacatcaaaatgttctagagtgattagctactagattctgaatcagacatcacatctgactagagaccagtttctttcgaatgattcttttatgtatgtagatctgttcttctgaggcagcggttggccaactatagcccaaaggccaaatttggacttctttttataaatgcagattgtctatggctgctttcccactactccagcctaaggtaaacagctgcaatagaagccaaatgagaatcgcaaagcccaaaatgtttattaacctgccctttacacaaaatcacacaaaaagtttcctgatctctgttctaagaaaaggagtgtgccttgcatttaaaaggaaatgttggtttctagggaagggaggaggctaaataattgatacggaattttcctcttttgtcttcttttttctcacttaagaatccgatactggaagactgatttagaaaagtttttaacatgacattaaatgtgaaattttaaaaattgaaaagccataaatcatctgttttaaatagttacatgagaaaatgatcactagaataacctaattagaagtgttatcttcattaaatgttttttgtaagtggtattagaaagaatatgtttttcagatggttctttaaacatgtagtgagaacaataagcattattcacttttagtaagtcttctgtaatccatgatataaaataattttaaaatgattttttaatgtatttgagtaaagatgagtagtattaagaaaaacacacatttcttcacaaaatgtgctaaggggcgtgtaaagaatcaaaagaaactattaccaataatagttttgataatcacccataattttgtgtttaaacattgaaattatagtacagacagtattctctgtgttctgtgaatttcagcagcttcagaatagagtttaatttagaaatttgcagtgaaaaaagctatctctttgttcacaaccataaatcaggagatggagattaattctattggctcttagtcacttggaactgattaattctgactttctgtcactaagcacttggtatttggccatctccattctgagcaccaaacggttaacacgaatgtccactagaactctgctgtgtgtcacccttaaatcagtctaaatcttccagacaaaagcaaatggcatttatggatttaagtcattagattttcaactgacattaattaatccctcttgattgattatatcatcaagtatttatatcttaaataggaggtaggatttctgtgttaagactcttatttgtaccctataattaaagtaaaatgttttttatgagtatcccttgttttcccttcttaaattgttatcaaacaatttttataatgaaatctatcttggaaaattagaaagaaaaatggcaaggtatttattgttctgtttgccataatttagaactcacacttaagtattttgtagttttacattcctttttaacccattcagtggagaatgtcagcttttctcccaagttgtatgttaagtctattctaatatgtactcaacatcaagttataaacatgtaataaacatggaaataaagtttagctctatta

SEQ ID NO: 430784 - DNA, 2824 bp, Homo sapiens
gctgccgcgccccgccctttctcggcccccggagggtgacggggtgaaggcgggggaaccgaggtggggagtccgccagagctcccagactgcgagcacgcgagccgccgcagccgtcacccgcgccgcgtcacggctcccgggcccgccctcctctgacccctcccctctctccgtttccccctctccccctcctccgccgaccgagcagtgacttaagcaacggagcgcggtgaagctcatttttctccttcctcgcagccgcgccagggagctcgcggcgcgcggcccctgtcctccggcccgagatgaatcctgcggcagaagccgagttcaacatcctcctggccaccgactcctacaaggttactcactataaacaatatccacccaacacaagcaaagtttattcctactttgaatgccgtgaaaagaagacagaaaactccaaattaaggaaggtgaaatatgaggaaacagtattttatgggttgcagtacattcttaataagtacttaaaaggtaaagtagtaaccaaagagaaaatccaggaagccaaagatgtctacaaagaacatttccaagatgatgtctttaatgaaaagggatggaactacattcttgagaagtatgatgggcatcttccaatagaaataaaagctgttcctgagggctttgtcattcccagaggaaatgttctcttcacggtggaaaacacagatccagagtgttactggcttacaaattggattgagactattcttgttcagtcctggtatccaatcacagtggccacaaattctagagagcagaagaaaatattggccaaatatttgttagaaacttctggtaacttagatggtctggaatacaagttacatgattttggctacagaggagtctcttcccaagagactgctggcataggagcatctgctcacttggttaacttcaaaggaacagatacagtagcaggacttgctctaattaaaaaatattatggaacgaaagatcctgttccaggctattctgttccagcagcagaacacagtaccataacagcttgggggaaagaccatgaaaaagatgcttttgaacatattgtaacacagttttcatcagtgcctgtatctgtggtcagcgatagctatgacatttataatgcgtgtgagaaaatatggggtgaagatctaagacatttaatagtatcgagaagtacacaggcaccactaataatcagacctgattctggaaaccctcttgacactgtgttaaaggttttggagattttaggtaagaagtttcctgttactgagaactcaaagggttacaagttgctgccaccttatcttagagttattcaaggggatggagtagatattaataccttacaagagattgtagaaggcatgaaacaaaaaatgtggagtattgaaaatattgccttcggttctggtggaggtttgctacagaagttgacaagagatctcttgaattgttccttcaagtgtagctatgttgtaactaatggccttgggattaacgtcttcaaggacccagttgctgatcccaacaaaaggtccaaaaagggccgattatctttacataggacgccagcagggaattttgttacactggaggaaggaaaaggagaccttgaggaatatggtcaggatcttctccatactgtcttcaagaatggcaaggtgacaaaaagctattcatttgatgaaataagaaaaaatgcacagctgaatattgaactggaagcagcacatcattaggctttatgactgggtgtgtgttgtgtgtatgtaatacataatgtttattgtacagatgtgtggggtttgtgttttatgatacattacagccaaattatttgttggtttatggacatactgccctttcattttttttcttttccagtgtttaggtgatctcaaattaggaaatgcatttaaccatgtaaaagatgagtgctaaagtaagctttttagggccctttgccaataggtagtcattcaatctggtattgatcttttcacaaataacagaactgagaaacttttatatataactgatgatcacataaaacagatttgcataaaattaccatgattgctttatgtttatatttaacttgtatttttgtacaaacaagattgtgtaagatatatttgaagtttcagtgatttaacagtctttccaacttttcatgatttttatgagcacagactttcaagaaaatacttgaaaataaattacattgccttttgtccattaatcagcaaataaaacatggccttaacaaagttgtttgtgttattgtacaatttgaaaattatgtcgggacataccctatagaattactaaccttactgccccttgtagaatatgtattaatcattctacattaaagaaaataatggttcttactggaatgtctaggcactgtacagttattatatatcttggttgttgtattgtaccagtgaaatgccaaatttgaaaggcctgtactgcaattttatatgtcagagattgcctgtggctctaatatgcacctcaagattttaaggagataatgtttttagagagaatttctgcttccactatagaatatatacataaatgtaaaatacttacaaaagtggaagtagtgtattttaaagtaattacacttctgaatttatttttcatattctatagttggtatgacttaaatgaattactggagtgggtagtgagtgtacttaaatgtttcaattctgttatattttttattaagtttttaaaaaattaaattggatattaaattgta

SEQ ID NO: 430785 - DNA, 4214 bp, Homo sapiens
  misc_feature (46)..(46): n is a, c, g, or t
  misc_feature (50)..(50): n is a, c, g, or t
gactcgtagatatctccagttcaaactgcagactacacaacgcgangttnagttcctagctttgaaatgtctgtgacattgaagacacccctgggcgaaataagaggtgaaatatgaggaaacagtattttatgggttgcagtacattcttaataagtacttaaaaggtaaagtagtaaccaaagagaaaatccaggaagccaaagatgtctacaaagaacatttccaagatgatgtctttaatgaaaagggatggaactacattcttgagaagtatgatgggcatcttccaatagaaataaaagctgttcctgagggctttgtcattcccagaggaaatgttctcttcacggtggaaaacacagatccagagtgttactggcttacaaattggattgagactattcttgttcagtcctggtatccaatcacagtggccacaaattctagagagcagaagaaaatattggccaaatatttgttagaaacttctggtaacttagatggtctggaatacaagttacatgattttggctacagaggagtctcttcccaagagactgctggcataggagcatctgctcacttggttaacttcaaaggaacagatacagtagcaggacttgctctaattaaaaaatattatggaacgaaagatcctgttccaggctattctgttccagcagcagaacacagtaccataacagcttgggggaaagaccatgaaaaagatgcttttgaacatattgtaacacagttttcatcagtgcctgtatctgtggtcagcgatagctatgacatttataatgcgtgtgagaaaatatggggtgaagatctaagacatttaatagtatcgagaagtacacaggcaccactaataatcagacctgattctggaaaccctcttgacactgtgttaaaggttttggagattttaggtaagaagtttcctgttactgagaactcaaagggttacaagttgctgccaccttatcttagagttattcaaggggatggagtagatattaataccttacaagagattgtagaaggcatgaaacaaaaaatgtggagtattgaaaatattgccttcggttctggtggaggtttgctacagaagttgacaagagatctcttgaattgttccttcaagtgtagctatgttgtaactaatggccttgggattaacgtcttcaaggacccagttgctgatcccaacaaaaggtccaaaaagggccgattatctttacataggacgccagcagggaattttgttacactggaggaaggaaaaggagaccttgaggaatatggtcaggatcttctccatactgtcttcaagaatggcaaggtgacaaaaagctattcatttgatgaaataagaaaaaatgcacagctgaatattgaactggaagcagcacatcattaggctttatgactgggtgtgtgttgtgtgtatgtaatacataatgtttattgtacagatgtgtggggtttgtgttttatgatacattacagccaaattatttgttggtttatggacatactgccctttcattttttttcttttccagtgtttaggtgatctcaaattaggaaatgcatttaaccatgtaaaagatgagtgctaaagtaagctttttagggccctttgccaataggtagtcattcaatctggtattgatcttttcacaaataacagaactgagaaacttttatatataactgatgatcacataaaacagatttgcataaaattaccatgattgctttatgtttatatttaacttgtatttttgtacaaacaagattgtgtaagatatatttgaagtttcagtgatttaacagtctttccaacttttcatgatttttatgagcacagactttcaagaaaatacttgaaaataaattacattgccttttgtccattaatcagcaaataaaacatggccttaacaaagttgtttgtgttattgtacaatttgaaaattatgtcgggacataccctatagaattactaaccttactgccccttgtagaatatgtattaatcattctacattaaagaaaataatggttcttactggaatgtctaggcactgtacagttattatatatcttggttgttgtattgtaccagtgaaatgccaaatttgaaaggcctgtactgcaattttatatgtcagagattgcctgtggctctaatatgcacctcaagattttaaggagataatgtttttagagagaatttctgcttccactatagaatatatacataaatgtaaaatacttacaaaagtggaagtagtgtattttaaagtaattacacttctgaatttatttttcatattctatagttggtatgacttaaatgaattactggagtgggtagtgagtgtacttaaatgtttcaattctgttatattttttattaagtttttaaaaaattaaattggatattaaattgtatggacatcatttattaattttaaactgaatgccctcaataagtaatactgaagcacattcttaaatgaagataaattatctccaatgaaaagcatgacatgtgtttcaatagaagaatcttaagttggctaaattcaaagtgcttgacatcaaaatgttctagagtgattagctactagattctgaatcagacatcacatctgactagagaccagtttctttcgaatgattcttttatgtatgtagatctgttcttctgaggcagcggttggccaactatagcccaaaggccaaatttggacttctttttataaatgcagattgtctatggctgctttcccactactccagcctaaggtaaacagctgcaatagaagccaaatgagaatcgcaaagcccaaaatgtttattaacctgccctttacacaaaatcacacaaaaagtttcctgatctctgttctaagaaaaggagtgtgccttgcatttaaaaggaaatgttggtttctagggaagggaggaggctaaataattgatacggaattttcctcttttgtcttcttttttctcacttaagaatccgatactggaagactgatttagaaaagtttttaacatgacattaaatgtgaaattttaaaaattgaaaagccataaatcatctgttttaaatagttacatgagaaaatgatcactagaataacctaattagaagtgttatcttcattaaatgttttttgtaagtggtattagaaagaatatgtttttcagatggttctttaaacatgtagtgagaacaataagcattattcacttttagtaagtcttctgtaatccatgatataaaataattttaaaatgattttttaatgtatttgagtaaagatgagtagtattaagaaaaacacacatttcttcacaaaatgtgctaaggggcgtgtaaagaatcaaaagaaactattaccaataatagttttgataatcacccataattttgtgtttaaacattgaaattatagtacagacagtattctctgtgttctgtgaatttcagcagcttcagaatagagtttaatttagaaatttgcagtgaaaaaagctatctctttgttcacaaccataaatcaggagatggagattaattctattggctcttagtcacttggaactgattaattctgactttctgtcactaagcacttggtatttggccatctccattctgagcaccaaacggttaacacgaatgtccactagaactctgctgtgtgtcacccttaaatcagtctaaatcttccagacaaaagcaaatggcatttatggatttaagtcattagattttcaactgacattaattaatccctcttgattgattatatcatcaagtatttatatcttaaataggaggtaggatttctgtgttaagactcttatttgtaccctataattaaagtaaaatgttttttatgagtatcccttgttttcccttcttaaattgttatcaaacaatttttataatgaaatctatcttggaaaattagaaagaaaaatggcaaggtatttattgttctgtttgccataatttagaactcacacttaagtattttgtagttttacattcctttttaacccattcagtggagaatgtcagcttttctcccaagttgtatgttaagtctattctaatatgtactcaacatcaagttataaacatgtaataaacatggaaataaagtttagctctatta

SEQ ID NO: 430786 - DNA, 4991 bp, Homo sapiens
atagtgttgactgaggttgtctttattagaagtctcagccatgcctccagtttcgagatgaatctcaattcacaagttccactatgaatctcaattcacaagttccactaccaccaccaccatcactgcccccagatagaatgagacttctaataacttgaaagacaagtctataaatatcctgtaatcgttttcactgtatcactttttcctggctacttttatccgataaaaacctcaatttatttttaagctattaaacatgcggacaaagggaatcttagttttatgcaaaaacgcaaccacgcatgagaactgcgcaagtctttcttggaatggtctgtatttgggtgaagtcatcagacgtcattacacttctttattttggggttgccaactcgtttcccaggatttaaagactataacgatgataaaagtcagtgtcgcaccctgtcaaaggcttggcccgttgccttttccttcccggcaatactcggttcaattaggtcttgtcccctcattatctgtgaggactgaattccacccccgcttttcaacgcaggctctttgctcgggaaaagtcaaaccatctctcaaaggatcaaagagctcagccatagacagagccgccggaggaaagcggagtcgctgcatcagatgaaaggggcccctcagcctcactcctcaccgcagctcctgggatcttaaagacagggtcaggaggatcaggagggacaagagggatggaggcgaaaggctggatccttaatccaggccggagacaaagccgcgccagggagctcgcggcgcgcggcccctgtcctccggcccgagatgaatcctgcggcagaagccgagttcaacatcctcctggccaccgactcctacaaggttactcactataaacaatatccacccaacacaagcaaagtttattcctactttgaatgccgtgaaaagaagacagaaaactccaaattaaggaaggtgaaatatgaggaaacagtattttatgggttgcagtacattcttaataagtacttaaaagaagtatgatgggcatcttccaatagaaataaaagctgttcctgagggctttgtcattcccagaggaaatgttctcttcacggtggaaaacacagatccagagtgttactggcttacaaattggattgagactattcttgttcagtcctggtatccaatcacagtggccacaaattctagagagcagaagaaaatattggccaaatatttgttagaaacttctggtaacttagatggtctggaatacaagttacatgattttggctacagaggagtctcttcccaagagactgctggcataggagcatctgctcacttggttaacttcaaaggaacagatacagtagcaggacttgctctaattaaaaaatattatggaacgaaagatcctgttccaggctattctgttccagcagcagaacacagtaccataacagcttgggggaaagaccatgaaaaagatgcttttgaacatattgtaacacagttttcatcagtgcctgtatctgtggtcagcgatagctatgacatttataatgcgtgtgagaaaatatggggtgaagatctaagacatttaatagtatcgagaagtacacaggcaccactaataatcagacctgattctggaaaccctcttgacactgtgttaaaggttttggagattttaggtaagaagtttcctgttactgagaactcaaagggttacaagttgctgccaccttatcttagagttattcaaggggatggagtagatattaataccttacaagagattgtagaaggcatgaaacaaaaaatgtggagtattgaaaatattgccttcggttctggtggaggtttgctacagaagttgacaagagatctcttgaattgttccttcaagtgtagctatgttgtaactaatggccttgggattaacgtcttcaaggacccagttgctgatcccaacaaaaggtccaaaaagggccgattatctttacataggacgccagcagggaattttgttacactggaggaaggaaaaggagaccttgaggaatatggtcaggatcttctccatactgtcttcaagaatggcaaggtgacaaaaagctattcatttgatgaaataagaaaaaatgcacagctgaatattgaactggaagcagcacatcattaggctttatgactgggtgtgtgttgtgtgtatgtaatacataatgtttattgtacagatgtgtggggtttgtgttttatgatacattacagccaaattatttgttggtttatggacatactgccctttcattttttttcttttccagtgtttaggtgatctcaaattaggaaatgcatttaaccatgtaaaagatgagtgctaaagtaagctttttagggccctttgccaataggtagtcattcaatctggtattgatcttttcacaaataacagaactgagaaacttttatatataactgatgatcacataaaacagatttgcataaaattaccatgattgctttatgtttatatttaacttgtatttttgtacaaacaagattgtgtaagatatatttgaagtttcagtgatttaacagtctttccaacttttcatgatttttatgagcacagactttcaagaaaatacttgaaaataaattacattgccttttgtccattaatcagcaaataaaacatggccttaacaaagttgtttgtgttattgtacaatttgaaaattatgtcgggacataccctatagaattactaaccttactgccccttgtagaatatgtattaatcattctacattaaagaaaataatggttcttactggaatgtctaggcactgtacagttattatatatcttggttgttgtattgtaccagtgaaatgccaaatttgaaaggcctgtactgcaattttatatgtcagagattgcctgtggctctaatatgcacctcaagattttaaggagataatgtttttagagagaatttctgcttccactatagaatatatacataaatgtaaaatacttacaaaagtggaagtagtgtattttaaagtaattacacttctgaatttatttttcatattctatagttggtatgacttaaatgaattactggagtgggtagtgagtgtacttaaatgtttcaattctgttatattttttattaagtttttaaaaaattaaattggatattaaattgtatggacatcatttattaattttaaactgaatgccctcaataagtaatactgaagcacattcttaaatgaagataaattatctccaatgaaaagcatgacatgtgtttcaatagaagaatcttaagttggctaaattcaaagtgcttgacatcaaaatgttctagagtgattagctactagattctgaatcagacatcacatctgactagagaccagtttctttcgaatgattcttttatgtatgtagatctgttcttctgaggcagcggttggccaactatagcccaaaggccaaatttggacttctttttataaatgcagattgtctatggctgctttcccactactccagcctaaggtaaacagctgcaatagaagccaaatgagaatcgcaaagcccaaaatgtttattaacctgccctttacacaaaatcacacaaaaagtttcctgatctctgttctaagaaaaggagtgtgccttgcatttaaaaggaaatgttggtttctagggaagggaggaggctaaataattgatacggaattttcctcttttgtcttcttttttctcacttaagaatccgatactggaagactgatttagaaaagtttttaacatgacattaaatgtgaaattttaaaaattgaaaagccataaatcatctgttttaaatagttacatgagaaaatgatcactagaataacctaattagaagtgttatcttcattaaatgttttttgtaagtggtattagaaagaatatgtttttcagatggttctttaaacatgtagtgagaacaataagcattattcacttttagtaagtcttctgtaatccatgatataaaataattttaaaatgattttttaatgtatttgagtaaagatgagtagtattaagaaaaacacacatttcttcacaaaatgtgctaaggggcgtgtaaagaatcaaaagaaactattaccaataatagttttgataatcacccataattttgtgtttaaacattgaaattatagtacagacagtattctctgtgttctgtgaatttcagcagcttcagaatagagtttaatttagaaatttgcagtgaaaaaagctatctctttgttcacaaccataaatcaggagatggagattaattctattggctcttagtcacttggaactgattaattctgactttctgtcactaagcacttggtatttggccatctccattctgagcaccaaacggttaacacgaatgtccactagaactctgctgtgtgtcacccttaaatcagtctaaatcttccagacaaaagcaaatggcatttatggatttaagtcattagattttcaactgacattaattaatccctcttgattgattatatcatcaagtatttatatcttaaataggaggtaggatttctgtgttaagactcttatttgtaccctataattaaagtaaaatgttttttatgagtatcccttgttttcccttcttaaattgttatcaaacaatttttataatgaaatctatcttggaaaattagaaagaaaaatggcaaggtatttattgttctgtttgccataatttagaactcacacttaagtattttgtagttttacattcctttttaacccattcagtggagaatgtcagcttttctcccaagttgtatgttaagtctattctaatatgtactcaacatcaagttataaacatgtaataaacatggaaataaagtttagctctatta

SEQ ID NO: 430787 - DNA, 4524 bp, Homo sapiens
gctgccgcgccccgccctttctcggcccccggagggtgacggggtgaaggcgggggaaccgaggtggggagtccgccagagctcccagactgcgagcacgcgagccgccgcagccgtcacccgcgccgcgtcacggctcccgggcccgccctcctctgacccctcccctctctccgtttccccctctccccctcctccgccgaccgagcagtgacttaagcaacggagcgcggtgaagctcatttttctccttcctcgcagccgcgccagggagctcgcggcgcgcggcccctgtcctccggcccgagatgaatcctgcggcagaagccgagttcaacatcctcctggccaccgactcctacaaggttactcactataaacaatatccacccaacacaagcaaagtttattcctactttgaatgccgtgaaaagaagacagaaaactccaaattaaggaaggtgaaatatgaggaaacagtattttatgggttgcagtacattcttaataagtacttaaaaggtaaagtagtaaccaaagagaaaatccaggaagccaaagatgtctacaaagaacatttccaagatgatgtctttaatgaaaagggatggaactacattcttgagaagtatgatgggcatcttccaatagaaataaaagctgttcctgagggctttgtcattcccagaggaaatgttctcttcacggtgactattcttgttcagtcctggtatccaatcacagtggccacaaattctagagagcagaagaaaatattggccaaatatttgttagaaacttctggtaacttagatggtctggaatacaagttacatgattttggctacagaggagtctcttcccaagagactgctggcataggagcatctgctcacttggttaacttcaaaggaacagatacagtagcaggacttgctctaattaaaaaatattatggaacgaaagatcctgttccaggctattctgttccagcagcagaacacagtaccataacagcttgggggaaagaccatgaaaaagatgcttttgaacatattgtaacacagttttcatcagtgcctgtatctgtggtcagcgatagctatgacatttataatgcgtgtgagaaaatatggggtgaagatctaagacatttaatagtatcgagaagtacacaggcaccactaataatcagacctgattctggaaaccctcttgacactgtgttaaaggttttggagattttaggtaagaagtttcctgttactgagaactcaaagggttacaagttgctgccaccttatcttagagttattcaaggggatggagtagatattaataccttacaagagattgtagaaggcatgaaacaaaaaatgtggagtattgaaaatattgccttcggttctggtggaggtttgctacagaagttgacaagagatctcttgaattgttccttcaagtgtagctatgttgtaactaatggccttgggattaacgtcttcaaggacccagttgctgatcccaacaaaaggtccaaaaagggccgattatctttacataggacgccagcagggaattttgttacactggaggaaggaaaaggagaccttgaggaatatggtcaggatcttctccatactgtcttcaagaatggcaaggtgacaaaaagctattcatttgatgaaataagaaaaaatgcacagctgaatattgaactggaagcagcacatcattaggctttatgactgggtgtgtgttgtgtgtatgtaatacataatgtttattgtacagatgtgtggggtttgtgttttatgatacattacagccaaattatttgttggtttatggacatactgccctttcattttttttcttttccagtgtttaggtgatctcaaattaggaaatgcatttaaccatgtaaaagatgagtgctaaagtaagctttttagggccctttgccaataggtagtcattcaatctggtattgatcttttcacaaataacagaactgagaaacttttatatataactgatgatcacataaaacagatttgcataaaattaccatgattgctttatgtttatatttaacttgtatttttgtacaaacaagattgtgtaagatatatttgaagtttcagtgatttaacagtctttccaacttttcatgatttttatgagcacagactttcaagaaaatacttgaaaataaattacattgccttttgtccattaatcagcaaataaaacatggccttaacaaagttgtttgtgttattgtacaatttgaaaattatgtcgggacataccctatagaattactaaccttactgccccttgtagaatatgtattaatcattctacattaaagaaaataatggttcttactggaatgtctaggcactgtacagttattatatatcttggttgttgtattgtaccagtgaaatgccaaatttgaaaggcctgtactgcaattttatatgtcagagattgcctgtggctctaatatgcacctcaagattttaaggagataatgtttttagagagaatttctgcttccactatagaatatatacataaatgtaaaatacttacaaaagtggaagtagtgtattttaaagtaattacacttctgaatttatttttcatattctatagttggtatgacttaaatgaattactggagtgggtagtgagtgtacttaaatgtttcaattctgttatattttttattaagtttttaaaaaattaaattggatattaaattgtatggacatcatttattaattttaaactgaatgccctcaataagtaatactgaagcacattcttaaatgaagataaattatctccaatgaaaagcatgacatgtgtttcaatagaagaatcttaagttggctaaattcaaagtgcttgacatcaaaatgttctagagtgattagctactagattctgaatcagacatcacatctgactagagaccagtttctttcgaatgattcttttatgtatgtagatctgttcttctgaggcagcggttggccaactatagcccaaaggccaaatttggacttctttttataaatgcagattgtctatggctgctttcccactactccagcctaaggtaaacagctgcaatagaagccaaatgagaatcgcaaagcccaaaatgtttattaacctgccctttacacaaaatcacacaaaaagtttcctgatctctgttctaagaaaaggagtgtgccttgcatttaaaaggaaatgttggtttctagggaagggaggaggctaaataattgatacggaattttcctcttttgtcttcttttttctcacttaagaatccgatactggaagactgatttagaaaagtttttaacatgacattaaatgtgaaattttaaaaattgaaaagccataaatcatctgttttaaatagttacatgagaaaatgatcactagaataacctaattagaagtgttatcttcattaaatgttttttgtaagtggtattagaaagaatatgtttttcagatggttctttaaacatgtagtgagaacaataagcattattcacttttagtaagtcttctgtaatccatgatataaaataattttaaaatgattttttaatgtatttgagtaaagatgagtagtattaagaaaaacacacatttcttcacaaaatgtgctaaggggcgtgtaaagaatcaaaagaaactattaccaataatagttttgataatcacccataattttgtgtttaaacattgaaattatagtacagacagtattctctgtgttctgtgaatttcagcagcttcagaatagagtttaatttagaaatttgcagtgaaaaaagctatctctttgttcacaaccataaatcaggagatggagattaattctattggctcttagtcacttggaactgattaattctgactttctgtcactaagcacttggtatttggccatctccattctgagcaccaaacggttaacacgaatgtccactagaactctgctgtgtgtcacccttaaatcagtctaaatcttccagacaaaagcaaatggcatttatggatttaagtcattagattttcaactgacattaattaatccctcttgattgattatatcatcaagtatttatatcttaaataggaggtaggatttctgtgttaagactcttatttgtaccctataattaaagtaaaatgttttttatgagtatcccttgttttcccttcttaaattgttatcaaacaatttttataatgaaatctatcttggaaaattagaaagaaaaatggcaaggtatttattgttctgtttgccataatttagaactcacacttaagtattttgtagttttacattcctttttaacccattcagtggagaatgtcagcttttctcccaagttgtatgttaagtctattctaatatgtactcaacatcaagttataaacatgtaataaacatggaaataaagtttagctctatta

SEQ ID NO: 430788 - DNA, 5482 bp, Homo sapiens
tttttttttttaagcttttgagtgtttcacacaaggtatgttacagaagacaagtgcctaagtcagaactatgagaaatattgccatctgacaggttagattaaagaaggagagcacagcatctgggaagactgaaaagggaaccatagaaataggggaaaaatggtgaaacatgggagatgtcattgaagtcaagagaaagaaagcatcaggaaaattcaggtgtcatggagaaagcaagtaagatggggacagtgaagtttgctagacatgatacaagtagatcgttaggtgacttactgatacaacgttataagtagtgaccccttaactgtaggagttaattcatacgttgtaaagttctccagtattggtattcattgatcttaattctctcctttttaaagagaaaagttgcagacctgaatatgaagaggagcttctcttcagtcatatcttaattttccatttagcctacagatgcatgaagtagagaattgacatcatagctactggcagcctctgtagctgttaagaagagtgttcactaatgagttttatataaacaggttctctctcaattttggattcgggtagtagtctttacaatcttgaaatgtgcatgctgcactaccccaggtataccattgacagtatggggaaaggttctaagtctagtcctttaaaaaaaaaaacacacacacacattgtataaagtgattatttcagacataaagtctgactcttcaaacagttatgagttaaacttatacctacttggggctttataataaatgaatgtgctatctttttattatttactgaggagaacagattagaggcggactagaaaattagggagaatgaccaattgcttggcataattaaatggtaattttcaaaattaagttgtttgagatcttttaaaattatttacattatatattaacaaatatttacacaggttgagcatcccaaatccaaaatgctccaaaatctgaaactttttgctcaaaggaaatgctcattggagcatttcagatttcagaactggatttcagatttcagaactggggatgcttaactgataagtataatgcacatattccaaaatctgaaaaaatttgaaattcagaatacttctggtcccaagcatttcaaataagcgatacccaatctataattacatattgaatacaaatctatcccgtaagaactgatattaaggacattgcaaaaatcactataaccattcttatccaatagaaactctcatactttattttccatcttaattatgttttgcttaaactaagtatttgaattcttattccctgggcatatattaattcgtagtagataatctgcaaacaaaatacatgacttcctattactagccacttgaaaatataacaggtagttgactatatgtatgtatggtatagtataaataattgcctctaagtataagattttgaaaggtaaaaaaacaaaatgtatgtctgtactattattggtatatagtttcaaaaattcacagaagggagccaggtgctctcattgcctaacaaaataatggaaatatgtattcattctaacatcttgacatacagtataaagggcactcagcaagtgctttttagttagactgattttaaatgagtagattcaggaataccagaaaacacacacacacacagataattggttgaaaatacgaggttagaaacttaaccattgaagaggagtaaggctacttaaagcgttaaaaactaattgggtaaggtatggttgacccagctacttcatttgccttacgatgtatattcattaaactaagtcactcaccttctctgtgatgttgatggtttggtatagtaaacatgagatatgattaaaggtgattcagggatagatcaagtgtctgcctaagtaaatctgtgttttcatttttttttctagtataccataacagcttgggggaaagaccatgaaaaagatgcttttgaacatattgtaacacagttttcatcagtgcctgtatctgtggtcagcgatagctatgacatttataatgcgtgtgagaaaatatggggtgaagatctaagacatttaatagtatcgagaagtacacaggcaccactaataatcagacctgattctggaaaccctcttgacactgtgttaaaggttttggagattttaggtaagaagtttcctgttactgagaactcaaagggttacaagttgctgccaccttatcttagagttattcaaggggatggagtagatattaataccttacaagagattgtagaaggcatgaaacaaaaaatgtggagtattgaaaatattgccttcggttctggtggaggtttgctacagaagttgacaagagatctcttgaattgttccttcaagtgtagctatgttgtaactaatggccttgggattaacgtcttcaaggacccagttgctgatcccaacaaaaggtccaaaaagggccgattatctttacataggacgccagcagggaattttgttacactggaggaaggaaaaggagaccttgaggaatatggtcaggatcttctccatactgtcttcaagaatggcaaggtgacaaaaagctattcatttgatgaaataagaaaaaatgcacagctgaatattgaactggaagcagcacatcattaggctttatgactgggtgtgtgttgtgtgtatgtaatacataatgtttattgtacagatgtgtggggtttgtgttttatgatacattacagccaaattatttgttggtttatggacatactgccctttcattttttttcttttccagtgtttaggtgatctcaaattaggaaatgcatttaaccatgtaaaagatgagtgctaaagtaagctttttagggccctttgccaataggtagtcattcaatctggtattgatcttttcacaaataacagaactgagaaacttttatatataactgatgatcacataaaacagatttgcataaaattaccatgattgctttatgtttatatttaacttgtatttttgtacaaacaagattgtgtaagatatatttgaagtttcagtgatttaacagtctttccaacttttcatgatttttatgagcacagactttcaagaaaatacttgaaaataaattacattgccttttgtccattaatcagcaaataaaacatggccttaacaaagttgtttgtgttattgtacaatttgaaaattatgtcgggacataccctatagaattactaaccttactgccccttgtagaatatgtattaatcattctacattaaagaaaataatggttcttactggaatgtctaggcactgtacagttattatatatcttggttgttgtattgtaccagtgaaatgccaaatttgaaaggcctgtactgcaattttatatgtcagagattgcctgtggctctaatatgcacctcaagattttaaggagataatgtttttagagagaatttctgcttccactatagaatatatacataaatgtaaaatacttacaaaagtggaagtagtgtattttaaagtaattacacttctgaatttatttttcatattctatagttggtatgacttaaatgaattactggagtgggtagtgagtgtacttaaatgtttcaattctgttatattttttattaagtttttaaaaaattaaattggatattaaattgtatggacatcatttattaattttaaactgaatgccctcaataagtaatactgaagcacattcttaaatgaagataaattatctccaatgaaaagcatgacatgtgtttcaatagaagaatcttaagttggctaaattcaaagtgcttgacatcaaaatgttctagagtgattagctactagattctgaatcagacatcacatctgactagagaccagtttctttcgaatgattcttttatgtatgtagatctgttcttctgaggcagcggttggccaactatagcccaaaggccaaatttggacttctttttataaatgcagattgtctatggctgctttcccactactccagcctaaggtaaacagctgcaatagaagccaaatgagaatcgcaaagcccaaaatgtttattaacctgccctttacacaaaatcacacaaaaagtttcctgatctctgttctaagaaaaggagtgtgccttgcatttaaaaggaaatgttggtttctagggaagggaggaggctaaataattgatacggaattttcctcttttgtcttcttttttctcacttaagaatccgatactggaagactgatttagaaaagtttttaacatgacattaaatgtgaaattttaaaaattgaaaagccataaatcatctgttttaaatagttacatgagaaaatgatcactagaataacctaattagaagtgttatcttcattaaatgttttttgtaagtggtattagaaagaatatgtttttcagatggttctttaaacatgtagtgagaacaataagcattattcacttttagtaagtcttctgtaatccatgatataaaataattttaaaatgattttttaatgtatttgagtaaagatgagtagtattaagaaaaacacacatttcttcacaaaatgtgctaaggggcgtgtaaagaatcaaaagaaactattaccaataatagttttgataatcacccataattttgtgtttaaacattgaaattatagtacagacagtattctctgtgttctgtgaatttcagcagcttcagaatagagtttaatttagaaatttgcagtgaaaaaagctatctctttgttcacaaccataaatcaggagatggagattaattctattggctcttagtcacttggaactgattaattctgactttctgtcactaagcacttggtatttggccatctccattctgagcaccaaacggttaacacgaatgtccactagaactctgctgtgtgtcacccttaaatcagtctaaatcttccagacaaaagcaaatggcatttatggatttaagtcattagattttcaactgacattaattaatccctcttgattgattatatcatcaagtatttatatcttaaataggaggtaggatttctgtgttaagactcttatttgtaccctataattaaagtaaaatgttttttatgagtatcccttgttttcccttcttaaattgttatcaaacaatttttataatgaaatctatcttggaaaattagaaagaaaaatggcaaggtatttattgttctgtttgccataatttagaactcacacttaagtattttgtagttttacattcctttttaacccattcagtggagaatgtcagcttttctcccaagttgtatgttaagtctattctaatatgtactcaacatcaagttataaacatgtaataaacatggaaataaagtttagctctatta

SEQ ID NO: 430789 - DNA, 2315 bp, Homo sapiens
gctgccgcgccccgccctttctcggcccccggagggtgacggggtgaaggcgggggaaccgaggtggggagtccgccagagctcccagactgcgagcacgcgagccgccgcagccgtcacccgcgccgcgtcacggctcccgggcccgccctcctctgacccctcccctctctccgtttccccctctccccctcctccgccgaccgagcagtgacttaagcaacggagcgcggtgaagctcatttttctccttcctcgcagccgcgccagggagctcgcggcgcgcggcccctgtcctccggcccgagatgaatcctgcggcagaagccgagttcaacatcctcctggccaccgactcctacaaggttactcactataaacaatatccacccaacacaagcaaagtttattcctactttgaatgccgtgaaaagaagacagaaaactccaaattaaggaaggtgaaatatgaggaaacagtattttatgggttgcagtacattcttaataagtacttaaaaggtaaagtagtaaccaaagagaaaatccaggaagccaaagatgtctacaaagaacatttccaagatgatgtctttaatgaaaagggatggaactacattcttgagaagtatgatgggcatcttccaatagaaataaaagctgttcctgagggctttgtcattcccagaggaaatgttctcttcacggtggaaaacacagatccagagtgttactggcttacaaattggattgagactattcttgttcagtcctggtatccaatcacagtggccacaaattctagagagcagaagaaaatattggccaaatatttgttagaaacttctggtaacttagatggtctggaatacaagttacatgattttggctacagaggagtctcttcccaagagactgctggcataggagcatctgctcacttggttaacttcaaaggaacagatacagtagcaggacttgctctaattaaaaaatattatggaacgaaagatcctgttccaggctattctgttccagcagcagaacacagtaccataacagcttgggggaaagaccatgaaaaagatgcttttgaacatattgtaacacagttttcatcagtgcctgtatctgtggtcagcgatagctatgacatttataatgcgtgtgagaaaatatggggtgaagatctaagacatttaatagtatcgagaagtacacaggcaccactaataatcagacctgattctggaaaccctcttgacactgtgttaaaggttttggagattttaggtaagaagtttcctgttactgagaactcaaagggttacaagttgctgccaccttatcttagagttattcaaggggatggagtagatattaataccttacaagagattgtagaaggcatgaaacaaaaaatgtggagtattgaaaatattgccttcggttctggtggaggtttgctacagaagttgacaagagatctcttgaattgttccttcaagtgtagctatgttgtaactaatggccttgggattaacgtcttcaaggacccagttgctgatcccaacaaaaggtccaaaaagggccgattatctttacataggacgccagcagggaattttgttacactggaggaaggaaaaggagaccttgaggaatatggtcaggatcttctccatactgtcttcaagaatggcaaggtgacaaaaagctattcatttgatgaaataagaaaaaatgcacagctgaatattgaactggaagcagcacatcattaggctttatgactgggtgtgtgttgtgtgtatgtaatacataatgtttattgtacagatgtgtggggtttgtgttttatgatacattacagccaaattatttgttggtttatggacatactgccctttcattttttttcttttccagtgtttaggtgatctcaaattaggaaatgcatttaaccatgtaaaagatgagtgctaaagtaagctttttagggccctttgccaataggtagtcattcaatctggtattgatcttttcacaaataacagaactgagaaacttttatatataactgatgatcacataaaacagatttgcataaaattaccatgattgctttatgtttatatttaacttgtatttttgtacaaacaagattgtgtaagatatatttgaagtttcagtgatttaacagtctttccaacttttcatgatttttatgagcacagactttcaagaaaatacttgaaaataaattacattgccttttgtccattaatcagcaaataaaacatggccttaacaaa

SEQ ID NO: 430790 - DNA, 4428 bp, Homo sapiens
ctcaggggccttgggtacctttaggttcaggtacaataaagacatgagactggatttgcgtgcatcctaaaagaatcacttttaaataagttttatatgttttcatcttgattcttctagattcatcttgattcaaattagatggttggcatttaaaaagaaagttgcatttctaaatgtagatttgtttaaaaatgaagttgcttgggatttgttgggttttttcctttgcagtgttgaaaacaaagaaagtcaattcgagactattaaaaaagtcaatttgagactatttggtgagaatgtggtaactttgatacacataaggctgttacacttatgattttctaataacttctgaaagttctgtttaaaacagagtcagcctttccagttgctttctgtttgactattctcatgaaataaatggttaccaaacttcacttgccacattctatcatcaaagtgattgaatatattaaggcagatgctaggtaaataaacttgactttggtgaaagaaatacaaatgacattggtaataaacacatctttaaagttgtatgtcccttgaaagaactcttttagaactgttcatacaggtctctctagctggtttataactaatcattctcccaaaaatgatacagtaatcttaacacccacagcacctgtgcataattttgtttctggcactggtatatcagccagaataaaatgactctaccagtataccaactgttatataggagaagtattttatactcttttgccaccaatatctttgattcttacatgttccattacatatgacatgtaattatacagtgtattgtgacttattggtgatgattacagtcattcctagagtctagtaaattggctcccattgcttgtgttgctgagatctggacaataacttaacgaggtgaatgagagaagttgactcaagtaatcttagatatttatagctagttttttctcactttctctcatttccttcactccccgaatcctaccagaaccacagtgacagcaatgcagattcaggaactatgcatgaaatcctctccttccacacatatccatcttttgggggtgggtgggtctttaaaaacaaaatgcgggctataattatttattgaccgtgttataaaacagtcttggatgcttcattcatcaatattgtcccttgaaaataatctccattctcttccaaattaaggtttggtttggttttgttttgttttaatcttctagattgtagaaggcatgaaacaaaaaatgtggagtattgaaaatattgccttcggttctggtggaggtttgctacagaagttgacaagagatctcttgaattgttccttcaagtgtagctatgttgtaactaatggccttgggattaacgtcttcaaggacccagttgctgatcccaacaaaaggtccaaaaagggccgattatctttacataggacgccagcagggaattttgttacactggaggaaggaaaaggagaccttgaggaatatggtcaggatcttctccatactgtcttcaagaatggcaaggtgacaaaaagctattcatttgatgaaataagaaaaaatgcacagctgaatattgaactggaagcagcacatcattaggctttatgactgggtgtgtgttgtgtgtatgtaatacataatgtttattgtacagatgtgtggggtttgtgttttatgatacattacagccaaattatttgttggtttatggacatactgccctttcattttttttcttttccagtgtttaggtgatctcaaattaggaaatgcatttaaccatgtaaaagatgagtgctaaagtaagctttttagggccctttgccaataggtagtcattcaatctggtattgatcttttcacaaataacagaactgagaaacttttatatataactgatgatcacataaaacagatttgcataaaattaccatgattgctttatgtttatatttaacttgtatttttgtacaaacaagattgtgtaagatatatttgaagtttcagtgatttaacagtctttccaacttttcatgatttttatgagcacagactttcaagaaaatacttgaaaataaattacattgccttttgtccattaatcagcaaataaaacatggccttaacaaagttgtttgtgttattgtacaatttgaaaattatgtcgggacataccctatagaattactaaccttactgccccttgtagaatatgtattaatcattctacattaaagaaaataatggttcttactggaatgtctaggcactgtacagttattatatatcttggttgttgtattgtaccagtgaaatgccaaatttgaaaggcctgtactgcaattttatatgtcagagattgcctgtggctctaatatgcacctcaagattttaaggagataatgtttttagagagaatttctgcttccactatagaatatatacataaatgtaaaatacttacaaaagtggaagtagtgtattttaaagtaattacacttctgaatttatttttcatattctatagttggtatgacttaaatgaattactggagtgggtagtgagtgtacttaaatgtttcaattctgttatattttttattaagtttttaaaaaattaaattggatattaaattgtatggacatcatttattaattttaaactgaatgccctcaataagtaatactgaagcacattcttaaatgaagataaattatctccaatgaaaagcatgacatgtgtttcaatagaagaatcttaagttggctaaattcaaagtgcttgacatcaaaatgttctagagtgattagctactagattctgaatcagacatcacatctgactagagaccagtttctttcgaatgattcttttatgtatgtagatctgttcttctgaggcagcggttggccaactatagcccaaaggccaaatttggacttctttttataaatgcagattgtctatggctgctttcccactactccagcctaaggtaaacagctgcaatagaagccaaatgagaatcgcaaagcccaaaatgtttattaacctgccctttacacaaaatcacacaaaaagtttcctgatctctgttctaagaaaaggagtgtgccttgcatttaaaaggaaatgttggtttctagggaagggaggaggctaaataattgatacggaattttcctcttttgtcttcttttttctcacttaagaatccgatactggaagactgatttagaaaagtttttaacatgacattaaatgtgaaattttaaaaattgaaaagccataaatcatctgttttaaatagttacatgagaaaatgatcactagaataacctaattagaagtgttatcttcattaaatgttttttgtaagtggtattagaaagaatatgtttttcagatggttctttaaacatgtagtgagaacaataagcattattcacttttagtaagtcttctgtaatccatgatataaaataattttaaaatgattttttaatgtatttgagtaaagatgagtagtattaagaaaaacacacatttcttcacaaaatgtgctaaggggcgtgtaaagaatcaaaagaaactattaccaataatagttttgataatcacccataattttgtgtttaaacattgaaattatagtacagacagtattctctgtgttctgtgaatttcagcagcttcagaatagagtttaatttagaaatttgcagtgaaaaaagctatctctttgttcacaaccataaatcaggagatggagattaattctattggctcttagtcacttggaactgattaattctgactttctgtcactaagcacttggtatttggccatctccattctgagcaccaaacggttaacacgaatgtccactagaactctgctgtgtgtcacccttaaatcagtctaaatcttccagacaaaagcaaatggcatttatggatttaagtcattagattttcaactgacattaattaatccctcttgattgattatatcatcaagtatttatatcttaaataggaggtaggatttctgtgttaagactcttatttgtaccctataattaaagtaaaatgttttttatgagtatcccttgttttcccttcttaaattgttatcaaacaatttttataatgaaatctatcttggaaaattagaaagaaaaatggcaaggtatttattgttctgtttgccataatttagaactcacacttaagtattttgtagttttacattcctttttaacccattcagtggagaatgtcagcttttctcccaagttgtatgttaagtctattctaatatgtactcaacatcaagttataaacatgtaataaacatggaaataaagtttagctctatta

SEQ ID NO: 430791 - DNA, 3020 bp, Homo sapiens
gctgccgcgccccgccctttctcggcccccggagggtgacggggtgaaggcgggggaaccgaggtggggagtccgccagagctcccagactgcgagcacgcgagccgccgcagccgtcacccgcgccgcgtcacggctcccgggcccgccctcctctgacccctcccctctctccgtttccccctctccccctcctccgccgaccgagcagtgacttaagcaacggagcgcggtgaagctcatttttctccttcctcgcagccgcgccagggagctcgcggcgcgcggcccctgtcctccggcccgagatgaatcctgcggcagaagccgagttcaacatcctcctggccaccgactcctacaaggttactcactataaacaatatccacccaacacaagcaaagtttattcctactttgaatgccgtgaaaagaagacagaaaactccaaattaaggaaggtgaaatatgaggaaacagtattttatgggttgcagtacattcttaataagtacttaaaaggtaaagtagtaaccaaagagaaaatccaggaagccaaagatgtctacaaagaacatttccaagatgatgtctttaatgaaaagggatggaactacattcttgagaagtatgatgggcatcttccaatagaaataaaagctgttcctgagggctttgtcattcccagaggaaatgttctcttcacggtggaaaacacagatccagagtgttactggcttacaaattggattgagactattcttgttcagtcctggtatccaatcacagtggccacaaattctagagagcagaagaaaatattggccaaatatttgttagaaacttctggtaacttagatggtctggaatacaagttacatgattttggctacagaggagtctcttcccaagagactgctggcataggagcatctgctcacttggttaacttcaaaggaacagatacagtagcaggacttgctctaattaaaaaatattatggaacgaaagatcctgttccaggctattctgttccagcagcagaacacagtaccataacagcttgggggaaagaccatgaaaaagatgcttttgaacatattgtaacacagttttcatcagtgcctgtatctgtggtcagcgatagctatgacatttataatgcgtgtgagaaaatatggggtgaagatctaagacatttaatagtatcgagaagtacacaggcaccactaataatcagacctgattctggaaaccctcttgacactgtgttaaaggttttggagattttaggtaagaagtttcctgttactgagaactcaaagggttacaagttgctgccaccttatcttagagttattcaaggggatggagtagatattaataccttacaagagattgtagaaggcatgaaacaaaaaatgtggagtattgaaaatattgccttcggttctggtggaggtttgctacagaagttgacaagagatctcttgaattgttccttcaagtgtagctatgttgtaactaatggccttgggattaacgtcttcaaggacccagttgctgatcccaacaaaaggtccaaaaagggccgattatctttacataggacgccagcagggaattttgttacactggaggaaggaaaaggagaccttgaggaatatggtcaggatcttctccatactgtcttcaagaatggcaaggtgacaaaaagctattcatttgatgaaataagaaaaaatgcacagctgaatattgaactggaagcagcacatcattaggctttatgactgggtgtgtgttgtgtgtatgtaatacataatgtttattgtacagatgtgtggggtttgtgttttatgatacattacagccaaattatttgttggtttatggacatactgccctttcattttttttcttttccagtgtttaggtgatctcaaattaggaaatgcatttaaccatgtaaaagatgagtgctaaagtaagctttttagggccctttgccaataggtagtcattcaatctggtattgatcttttcacaaataacagaactgagaaacttttatatataactgatgatcacataaaacagatttgcataaaattaccatgattgctttatgtttatatttaacttgtatttttgtacaaacaagattgtgtaagatatatttgaagtttcagtgatttaacagtctttccaacttttcatgatttttatgagcacagactttcaagaaaatacttgaaaataaattacattgccttttgtccattaatcagcaaataaaacatggccttaacaaagttgtttgtgttattgtacaatttgaaaattatgtcgggacataccctatagaattactaaccttactgccccttgtagaatatgtattaatcattctacattaaagaaaataatggttcttactggaaaaaaaaaaaaaaaaaaaaaaaaaaaaaaaaaaaaaaaaaaaaaaaaaaaaaaaaaaaacaaaaaaaaaaaaaaaaaaaaaaaaacaaaaaaaaaaaaaaaaaaggaggagggggggggcaggcgaactaaatcatcccccgacaggaggacaacaccaagtccagccgccgccgcagccacgtttctgtgatgagaagggggcggcctgctcacaggggggctggagatgtagttacaaaaatgagaggaggacgagggggtgctattgatcaaaaaacaaaagacagacactacggggagagcaaaaaagtagtcattctttgagatataccaatttttggtaggaaacaataaccatccttatccttgggaacgagtggtgtacactgataacacactgggggaaacgaaaaaaatcatagccaataaaaggataatctgatgcccatgccgaggacataataaaaaacatattgctcgatgttgaactgtgggaaaaaaaacagagtactattttatgtcggcgcgtaaaaagtatgtagtccgaggtgatgattttactacaaacatttccc

SEQ ID NO: 430792 - DNA, 3673 bp, Homo sapiens
tgatctttctttggaaagttctgggattgactcatttgttgctgcttgttccactgccacttgtttctgtttctttgctgcctacctttctgatgtagaaacactctgctgtcttcaggttctctaagacttttgcttctgacaataacaaggcaaaagtaaaaagtaccaaaagagggatacgttatgaaataggaaagcctttaccttagtaatactcttgttccctctccaaagattgtgtgtgtggttttggcgtagttggtatagttgggcttttcttcaacagcatgtacatgctgtgcttactgtcagtttaaaggcagtttgtaatataaagagataccttaagggtcacatgttagaatgctcacagacttcctacaaatggagtattaggtgttcttcagtggcaaaaaggatatccaagatgtcatactttttctttattacaaacgactatccttcaaaacaggctaaagtgttatgtttctgaaagccagatgtggattggttcagttatacctattaagtgcttaaaacttaaatgtaaattatgtatgtgcttttttgtaagggagtgtttagacatttctgatgattagtcttctacttgtctaactttcttaatttggatttcagattaacgtcttcaaggacccagttgctgatcccaacaaaaggtccaaaaagggccgattatctttacataggacgccagcagggaattttgttacactggaggaaggaaaaggagaccttgaggaatatggtcaggatcttctccatactgtcttcaagaatggcaaggtgacaaaaagctattcatttgatgaaataagaaaaaatgcacagctgaatattgaactggaagcagcacatcattaggctttatgactgggtgtgtgttgtgtgtatgtaatacataatgtttattgtacagatgtgtggggtttgtgttttatgatacattacagccaaattatttgttggtttatggacatactgccctttcattttttttcttttccagtgtttaggtgatctcaaattaggaaatgcatttaaccatgtaaaagatgagtgctaaagtaagctttttagggccctttgccaataggtagtcattcaatctggtattgatcttttcacaaataacagaactgagaaacttttatatataactgatgatcacataaaacagatttgcataaaattaccatgattgctttatgtttatatttaacttgtatttttgtacaaacaagattgtgtaagatatatttgaagtttcagtgatttaacagtctttccaacttttcatgatttttatgagcacagactttcaagaaaatacttgaaaataaattacattgccttttgtccattaatcagcaaataaaacatggccttaacaaagttgtttgtgttattgtacaatttgaaaattatgtcgggacataccctatagaattactaaccttactgccccttgtagaatatgtattaatcattctacattaaagaaaataatggttcttactggaatgtctaggcactgtacagttattatatatcttggttgttgtattgtaccagtgaaatgccaaatttgaaaggcctgtactgcaattttatatgtcagagattgcctgtggctctaatatgcacctcaagattttaaggagataatgtttttagagagaatttctgcttccactatagaatatatacataaatgtaaaatacttacaaaagtggaagtagtgtattttaaagtaattacacttctgaatttatttttcatattctatagttggtatgacttaaatgaattactggagtgggtagtgagtgtacttaaatgtttcaattctgttatattttttattaagtttttaaaaaattaaattggatattaaattgtatggacatcatttattaattttaaactgaatgccctcaataagtaatactgaagcacattcttaaatgaagataaattatctccaatgaaaagcatgacatgtgtttcaatagaagaatcttaagttggctaaattcaaagtgcttgacatcaaaatgttctagagtgattagctactagattctgaatcagacatcacatctgactagagaccagtttctttcgaatgattcttttatgtatgtagatctgttcttctgaggcagcggttggccaactatagcccaaaggccaaatttggacttctttttataaatgcagattgtctatggctgctttcccactactccagcctaaggtaaacagctgcaatagaagccaaatgagaatcgcaaagcccaaaatgtttattaacctgccctttacacaaaatcacacaaaaagtttcctgatctctgttctaagaaaaggagtgtgccttgcatttaaaaggaaatgttggtttctagggaagggaggaggctaaataattgatacggaattttcctcttttgtcttcttttttctcacttaagaatccgatactggaagactgatttagaaaagtttttaacatgacattaaatgtgaaattttaaaaattgaaaagccataaatcatctgttttaaatagttacatgagaaaatgatcactagaataacctaattagaagtgttatcttcattaaatgttttttgtaagtggtattagaaagaatatgtttttcagatggttctttaaacatgtagtgagaacaataagcattattcacttttagtaagtcttctgtaatccatgatataaaataattttaaaatgattttttaatgtatttgagtaaagatgagtagtattaagaaaaacacacatttcttcacaaaatgtgctaaggggcgtgtaaagaatcaaaagaaactattaccaataatagttttgataatcacccataattttgtgtttaaacattgaaattatagtacagacagtattctctgtgttctgtgaatttcagcagcttcagaatagagtttaatttagaaatttgcagtgaaaaaagctatctctttgttcacaaccataaatcaggagatggagattaattctattggctcttagtcacttggaactgattaattctgactttctgtcactaagcacttggtatttggccatctccattctgagcaccaaacggttaacacgaatgtccactagaactctgctgtgtgtcacccttaaatcagtctaaatcttccagacaaaagcaaatggcatttatggatttaagtcattagattttcaactgacattaattaatccctcttgattgattatatcatcaagtatttatatcttaaataggaggtaggatttctgtgttaagactcttatttgtaccctataattaaagtaaaatgttttttatgagtatcccttgttttcccttcttaaattgttatcaaacaatttttataatgaaatctatcttggaaaattagaaagaaaaatggcaaggtatttattgttctgtttgccataatttagaactcacacttaagtattttgtagttttacattcctttttaacccattcagtggagaatgtcagcttttctcccaagttgtatgttaagtctattctaatatgtactcaacatcaagttataaacatgtaataaacatggaaataaagtttagctctatta

SEQ ID NO: 430793 - DNA, 2454 bp, Homo sapiens
gctgccgcgccccgccctttctcggcccccggagggtgacggggtgaaggcgggggaaccgaggtggggagtccgccagagctcccagactgcgagcacgcgagccgccgcagccgtcacccgcgccgcgtcacggctcccgggcccgccctcctctgacccctcccctctctccgtttccccctctccccctcctccgccgaccgagcagtgacttaagcaacggagcgcggtgaagctcatttttctccttcctcgcagccgcgccagggagctcgcggcgcgcggcccctgtcctccggcccgagatgaatcctgcggcagaagccgagttcaacatcctcctggccaccgactcctacaaggttactcactataaacaatatccacccaacacaagcaaagtttattcctactttgaatgccgtgaaaagaagacagaaaactccaaattaaggaaggtgaaatatgaggaaacagtattttatgggttgcagtacattcttaataagtacttaaaaggtaaagtagtaaccaaagagaaaatccaggaagccaaagatgtctacaaagaacatttccaagatgatgtctttaatgaaaagggatggaactacattcttgagaagtatgatgggcatcttccaatagaaataaaagctgttcctgagggctttgtcattcccagaggaaatgttctcttcacggtggaaaacacagatccagagtgttactggcttacaaattggattgagactattcttgttcagtcctggtatccaatcacagtggccacaaattctagagagcagaagaaaatattggccaaatatttgttagaaacttctggtaacttagatggtctggaatacaagttacatgattttggctacagaggagtctcttcccaagagactgctggcataggagcatctgctcacttggttaacttcaaaggaacagatacagtagcaggacttgctctaattaaaaaatattatggaacgaaagatcctgttccaggctattctgttccagcagcagaacacagtaccataacagcttgggggaaagaccatgaaaaagatgcttttgaacatattgtaacacagttttcatcagtgcctgtatctgtggtcagcgatagctatgacatttataatgcgtgtgagaaaatatggggtgaagatctaagacatttaatagtatcgagaagtacacaggcaccactaataatcagacctgattctggaaaccctcttgacactgtgttaaaggttttggagattttaggtaagaagtttcctgttactgagaactcaaagggttacaagttgctgccaccttatcttagagttattcaaggggatggagtagatattaataccttacaagagattgtagaaggcatgaaacaaaaaatgtggagtattgaaaatattgccttcggttctggtggaggtttgctacagaagttgacaagagatctcttgaattgttccttcaagtgtagctatgttgtaactaatggccttgggattaacgtcttcaaggacccagttgctgatcccaacaaaaggtccaaaaagggccgattatctttacataggacgccagcagggaattttgttacactggaggaaggaaaaggagaccttgaggaatatggtcaggatcttctccatactgtcttcaagaatggcaaggtgacaaaaagctattcatttgatgaaataagaaaaaatgcacagctgaatattgaactggaagcagcacatcattaggctttatgactgggtgtgtgttgtgtgtatgtaatacataatgtttattgtacagatgtgtggggtttgtgttttatgatacattacagccaaattatttgttggtttatggacatactgccctttcattttttttcttttccagtgtttaggtgatctcaaattaggaaatgcatttaaccatgtaaaagatgagtgctaaagtaagctttttagggccctttgccaataggtagtcattcaatctggtattgatcttttcacaaataacagaactgagaaacttttatatataactgatgatcacataaaacagatttgcataaaattaccatgattgctttatgtttatatttaacttgtatttttgtacaaacaagattgtgtaagatatatttgaagtttcagtgatttaacagtctttccaacttttcatgatttttatgagcacagactttcaagaaaatacttgaaaataaattacattgccttttgtccattaatcagcaaataaaacatggccttaacaaaaaagcaacacaccacaaaaacatgttttgggcgcccggggccccgaaaaggttctaaacactcgtgtgggcagggcccacctggttaacaacagggcaaacgggtcccagaaaaccgggcaaaaaagggtggtactcca

SEQ ID NO: 430794 - DNA, 2891 bp, Homo sapiens
gctgccgcgccccgccctttctcggcccccggagggtgacggggtgaaggcgggggaaccgaggtggggagtccgccagagctcccagactgcgagcacgcgagccgccgcagccgtcacccgcgccgcgtcacggctcccgggcccgccctcctctgacccctcccctctctccgtttccccctctccccctcctccgccgaccgagcagtgacttaagcaacggagcgcggtgaagctcatttttctccttcctcgcagccgcgccagggagctcgcggcgcgcggcccctgtcctccggcccgagatgaatcctgcggcagaagccgagttcaacatcctcctggccaccgactcctacaaggttactcactataaacaatatccacccaacacaagcaaagtttattcctactttgaatgccgtgaaaagaagacagaaaactccaaattaaggaaggtgaaatatgaggaaacagtattttatgggttgcagtacattcttaataagtacttaaaaggtaaagtagtaaccaaagagaaaatccaggaagccaaagatgtctacaaagaacatttccaagatgatgtctttaatgaaaagggatggaactacattcttgagaagtatgatgggcatcttccaatagaaataaaagctgttcctgagggctttgtcattcccagaggaaatgttctcttcacggtggaaaacacagatccagagtgttactggcttacaaattggattgagactattcttgttcagtcctggtatccaatcacagtggccacaaattctagagagcagaagaaaatattggccaaatatttgttagaaacttctggtaacttagatggtctggaatacaagttacatgattttggctacagaggagtctcttcccaagagactgctggcataggagcatctgctcacttggttaacttcaaaggaacagatacagtagcaggacttgctctaattaaaaaatattatggaacgaaagatcctgttccaggctattctgttccagcagcagaacacagtaccataacagcttgggggaaagaccatgaaaaagatgcttttgaacatattgtaacacagttttcatcagtgcctgtatctgtggtcagcgatagctatgacatttataatgcgtgtgagaaaatatggggtgaagatctaagacatttaatagtatcgagaagtacacaggcaccactaataatcagacctgattctggaaaccctcttgacactgtgttaaaggttttggagattttaggtaagaagtttcctgttactgagaactcaaagggttacaagttgctgccaccttatcttagagttattcaaggggatggagtagatattaataccttacaagagattgtagaaggcatgaaacaaaaaatgtggagtattgaaaatattgccttcggttctggtggaggtttgctacagaagttgacaagagatctcttgaattgttccttcaagtgtagctatgttgtaactaatggccttgggattaacgtcttcaaggacccagttgctgatcccaacaaaaggtccaaaaagggccgattatctttacataggacgccagcagggaattttgttacactggaggaaggaaaaggagaccttgaggaatatggtcaggatcttctccatactgtcttcaagaatggcaaggtgacaaaaagctattcatttgatgaaataagaaaaaatgcacagctgaatattgaactggaagcagcacatcattaggctttatgactgggtgtgtgttgtgtgtatgtaatacataatgtttattgtacagatgtgtggggtttgtgttttatgatacattacagccaaattatttgttggtttatggacatactgccctttcattttttttcttttccagtgtttaggtgatctcaaattaggaaatgcatttaaccatgtaaaagatgagtgctaaagtaagctttttagggccctttgccaataggtagtcattcaatctggtattgatcttttcacaaataacagaactgagaaacttttatatataactgatgatcacataaaacagatttgcataaaattaccatgattgctttatgtttatatttaacttgtatttttgtacaaacaagattgtgtaagatatatttgaagtttcagtgatttaacagtctttccaacttttcatgatttttatgagcacagactttcaagaaaatacttgaaaataaattacattgccttttgtccattaatcagcaaataaaacatggccttaacaaaaaaaaaaaaaaaaaaaaaaaaaaaaaaaaaaaaaaaaaaaaaaaaaaaaaaaaaaaaacaaaaaaaaaaaaaaaaaaaaaaaaacaaaaaaaaaaaaaaaaaaggaggagggggggggcaggcgaactaaatcatcccccgacaggaggacaacaccaagtccagccgccgccgcagccacgtttctgtgatgagaagggggcggcctgctcacaggggggctggagatgtagttacaaaaatgagaggaggacgagggggtgctattgatcaaaaaacaaaagacagacactacggggagagcaaaaaagtagtcattctttgagatataccaatttttggtaggaaacaataaccatccttatccttgggaacgagtggtgtacactgataacacactgggggaaacgaaaaaaatcatagccaataaaaggataatctgatgcccatgccgaggacataataaaaaacatattgctcgatgttgaactgtgggaaaaaaaacagagtactattttatgtcggcgcgtaaaaagtatgtagtccgaggtgatgattttactacaaacatttccc

SEQ ID NO: 430795 - DNA, 3470 bp, Homo sapiens
aacagaatctttaacccagtcactgtgtgttagtcaagaatgcaatacttgtttttctttgtttctgttttgggattggcttttggctttttgtgggttttctagacccaaatttagcactagcaaatttcttaaacttccatttgataagtttaatcactgttgagtttgttggccaggaacaaggcagggtttaccaggcttttttgctgcacactcacaatgattacagttctccctaggcacccaggcatcttccttcagcctgaggaaaaaaaagattggtcagctaggtttcttggttttcctttaagaaaactggtttaagaatgtagtattaaggtcattccttttcatagaagttaaatatttctacataccaggcaactcagtgattggccattttagatagtaccttgttccactagcattttttatgcatcaaatcatctcacaatgttgaacaccattggcatctctgtatttgactggttggttagtctaattcatcaaaccaggattcaggtattttgcttaataatgtaatataatcatgaaatttccatttatgcaggatcttctccatactgtcttcaagaatggcaaggtgacaaaaagctattcatttgatgaaataagaaaaaatgcacagctgaatattgaactggaagcagcacatcattaggctttatgactgggtgtgtgttgtgtgtatgtaatacataatgtttattgtacagatgtgtggggtttgtgttttatgatacattacagccaaattatttgttggtttatggacatactgccctttcattttttttcttttccagtgtttaggtgatctcaaattaggaaatgcatttaaccatgtaaaagatgagtgctaaagtaagctttttagggccctttgccaataggtagtcattcaatctggtattgatcttttcacaaataacagaactgagaaacttttatatataactgatgatcacataaaacagatttgcataaaattaccatgattgctttatgtttatatttaacttgtatttttgtacaaacaagattgtgtaagatatatttgaagtttcagtgatttaacagtctttccaacttttcatgatttttatgagcacagactttcaagaaaatacttgaaaataaattacattgccttttgtccattaatcagcaaataaaacatggccttaacaaagttgtttgtgttattgtacaatttgaaaattatgtcgggacataccctatagaattactaaccttactgccccttgtagaatatgtattaatcattctacattaaagaaaataatggttcttactggaatgtctaggcactgtacagttattatatatcttggttgttgtattgtaccagtgaaatgccaaatttgaaaggcctgtactgcaattttatatgtcagagattgcctgtggctctaatatgcacctcaagattttaaggagataatgtttttagagagaatttctgcttccactatagaatatatacataaatgtaaaatacttacaaaagtggaagtagtgtattttaaagtaattacacttctgaatttatttttcatattctatagttggtatgacttaaatgaattactggagtgggtagtgagtgtacttaaatgtttcaattctgttatattttttattaagtttttaaaaaattaaattggatattaaattgtatggacatcatttattaattttaaactgaatgccctcaataagtaatactgaagcacattcttaaatgaagataaattatctccaatgaaaagcatgacatgtgtttcaatagaagaatcttaagttggctaaattcaaagtgcttgacatcaaaatgttctagagtgattagctactagattctgaatcagacatcacatctgactagagaccagtttctttcgaatgattcttttatgtatgtagatctgttcttctgaggcagcggttggccaactatagcccaaaggccaaatttggacttctttttataaatgcagattgtctatggctgctttcccactactccagcctaaggtaaacagctgcaatagaagccaaatgagaatcgcaaagcccaaaatgtttattaacctgccctttacacaaaatcacacaaaaagtttcctgatctctgttctaagaaaaggagtgtgccttgcatttaaaaggaaatgttggtttctagggaagggaggaggctaaataattgatacggaattttcctcttttgtcttcttttttctcacttaagaatccgatactggaagactgatttagaaaagtttttaacatgacattaaatgtgaaattttaaaaattgaaaagccataaatcatctgttttaaatagttacatgagaaaatgatcactagaataacctaattagaagtgttatcttcattaaatgttttttgtaagtggtattagaaagaatatgtttttcagatggttctttaaacatgtagtgagaacaataagcattattcacttttagtaagtcttctgtaatccatgatataaaataattttaaaatgattttttaatgtatttgagtaaagatgagtagtattaagaaaaacacacatttcttcacaaaatgtgctaaggggcgtgtaaagaatcaaaagaaactattaccaataatagttttgataatcacccataattttgtgtttaaacattgaaattatagtacagacagtattctctgtgttctgtgaatttcagcagcttcagaatagagtttaatttagaaatttgcagtgaaaaaagctatctctttgttcacaaccataaatcaggagatggagattaattctattggctcttagtcacttggaactgattaattctgactttctgtcactaagcacttggtatttggccatctccattctgagcaccaaacggttaacacgaatgtccactagaactctgctgtgtgtcacccttaaatcagtctaaatcttccagacaaaagcaaatggcatttatggatttaagtcattagattttcaactgacattaattaatccctcttgattgattatatcatcaagtatttatatcttaaataggaggtaggatttctgtgttaagactcttatttgtaccctataattaaagtaaaatgttttttatgagtatcccttgttttcccttcttaaattgttatcaaacaatttttataatgaaatctatcttggaaaattagaaagaaaaatggcaaggtatttattgttctgtttgccataatttagaactcacacttaagtattttgtagttttacattcctttttaacccattcagtggagaatgtcagcttttctcccaagttgtatgttaagtctattctaatatgtactcaacatcaagttataaacatgtaataaacatggaaataaagtttagctctatta

SEQ ID NO: 430796 - DNA, 2696 bp, Homo sapiens
gctgccgcgccccgccctttctcggcccccggagggtgacggggtgaaggcgggggaaccgaggtggggagtccgccagagctcccagactgcgagcacgcgagccgccgcagccgtcacccgcgccgcgtcacggctcccgggcccgccctcctctgacccctcccctctctccgtttccccctctccccctcctccgccgaccgagcagtgacttaagcaacggagcgcggtgaagctcatttttctccttcctcgcagccgcgccagggagctcgcggcgcgcggcccctgtcctccggcccgagatgaatcctgcggcagaagccgagttcaacatcctcctggccaccgactcctacaaggttactcactataaacaatatccacccaacacaagcaaagtttattcctactttgaatgccgtgaaaagaagacagaaaactccaaattaaggaaggtgaaatatgaggaaacagtattttatgggttgcagtacattcttaataagtacttaaaaggtaaagtagtaaccaaagagaaaatccaggaagccaaagatgtctacaaagaacatttccaagatgatgtctttaatgaaaagggatggaactacattcttgagaagtatgatgggcatcttccaatagaaataaaagctgttcctgagggctttgtcattcccagaggaaatgttctcttcacggtggaaaacacagatccagagtgttactggcttacaaattggattgagactattcttgttcagtcctggtatccaatcacagtggccacaaattctagagagcagaagaaaatattggccaaatatttgttagaaacttctggtaacttagatggtctggaatacaagttacatgattttggctacagaggagtctcttcccaagagactgctggcataggagcatctgctcacttggttaacttcaaaggaacagatacagtagcaggacttgctctaattaaaaaatattatggaacgaaagatcctgttccaggctattctgttccagcagcagaacacagtaccataacagcttgggggaaagaccatgaaaaagatgcttttgaacatattgtaacacagttttcatcagtgcctgtatctgtggtcagcgatagctatgacatttataatgcgtgtgagaaaatatggggtgaagatctaagacatttaatagtatcgagaagtacacaggcaccactaataatcagacctgattctggaaaccctcttgacactgtgttaaaggttttggagattttaggtaagaagtttcctgttactgagaactcaaagggttacaagttgctgccaccttatcttagagttattcaaggggatggagtagatattaataccttacaagagattgtagaaggcatgaaacaaaaaatgtggagtattgaaaatattgccttcggttctggtggaggtttgctacagaagttgacaagagatctcttgaattgttccttcaagtgtagctatgttgtaactaatggccttgggattaacgtcttcaaggacccagttgctgatcccaacaaaaggtccaaaaagggccgattatctttacataggacgccagcagggaattttgttacactggaggaaggaaaaggagaccttgaggaatatggtcaggtatgtatctatgctgattggtttttttaagcaatagtaggttggctcaccaaattaataagaaaggaggtttttatgttattgtttttgtggaagacaaagtattatattttattataaaatgtccaattgctgacctggcctaccaaaataagatacaaaacaagtgtctacgtcataaacacggggcctgtgtatacatagggagaaatattacgtaagtatagtgattgacagcaagtttgtatacactttatccaaaagcaaactatgttactttaatataaaatgtgaaaacaaggtgacttgatttggattacataataaatggtgaaaccttgatttaaccaagttttctgattcaaatcaaccaaactagaaaaatttacagtacactaaagtagttcatatgatctaatggtctttagcatacaaaagtacatttatatttgtgaactcaagttaaaaaatttttggtttttaagccacttgatcaaaaaaaactttagacagaactattcatgaatattcatattattagaaaaaagtacactaaacatgagtgcactattacttcctattttgattctttatactacatcacaattactgcttataacatgttacttttacatttattaaggttttgagccagaattgaaataactttgttaccgttaatgaaaaaatatgtttgtaaatcaaacttttagaattagatccctttatatagcctgttaggcaattatttgagtaagctttgtgtaactcttgtacctactaagattttggcagatttagtttatcctagatgagctaaagtcacttcaaactaaaagtaaaaatctaagtgtgatttttaaaagacactgatttaagagtatgtgaatgatagtagaataaactagaaaataattcataatcatctaggcaatttgatttaagagtaggaactagtattcccttaaatttaaatttgtgaaagaaaatgctacagctaaagcactgtggtttgaagcaaca

SEQ ID NO: 430797 - DNA, 3088 bp, Homo sapiens
gctgccgcgccccgccctttctcggcccccggagggtgacggggtgaaggcgggggaaccgaggtggggagtccgccagagctcccagactgcgagcacgcgagccgccgcagccgtcacccgcgccgcgtcacggctcccgggcccgccctcctctgacccctcccctctctccgtttccccctctccccctcctccgccgaccgagcagtgacttaagcaacggagcgcggtgaagctcatttttctccttcctcgcagccgcgccagggagctcgcggcgcgcggcccctgtcctccggcccgagatgaatcctgcggcagaagccgagttcaacatcctcctggccaccgactcctacaaggttactcactataaacaatatccacccaacacaagcaaagtttattcctactttgaatgccgtgaaaagaagacagaaaactccaaattaaggaaggtgaaatatgaggaaacagtattttatgggttgcagtacattcttaataagtacttaaaaggtaaagtagtaaccaaagagaaaatccaggaagccaaagatgtctacaaagaacatttccaagatgatgtctttaatgaaaagggatggaactacattcttgagaagtatgatgggcatcttccaatagaaataaaagctgttcctgagggctttgtcattcccagaggaaatgttctcttcacggtggaaaacacagatccagagtgttactggcttacaaattggattgagactattcttgttcagtcctggtatccaatcacagtggccacaaattctagagagcagaagaaaatattggccaaatatttgttagaaacttctggtaacttagatggtctggaatacaagttacatgattttggctacagaggagtctcttcccaagagactgctggcataggagcatctgctcacttggttaacttcaaaggaacagatacagtagcaggacttgctctaattaaaaaatattatggaacgaaagatcctgttccaggctattctgttccagcagcagaacacagtaccataacagcttgggggaaagaccatgaaaaagatgcttttgaacatattgtaacacagttttcatcagtgcctgtatctgtggtcagcgatagctatgacatttataatgcgtgtgagaaaatatggggtgaagatctaagacatttaatagtatcgagaagtacacaggcaccactaataatcagacctgattctggaaaccctcttgacactgtgttaaaggttttggagattttaggtaagaagtttcctgttactgagaactcaaagggttacaagttgctgccaccttatcttagagttattcaaggggatggagtagatattaataccttacaagaggtatgtgttttatattaaaagtttcaataaggcatttcttataattaagtttgtttatgtttgataaagaacacaatataaatacaattttaagtctttgtaagtgtttatgttggtataaatctctgtgcattgcttaaagtttagaaataatagtagtttaaaatacagaggtgccagccaagccatacttactcttccagttgtcattggccaccctgaatgatgaatctaaagaagtatcattgtgaaacaaggaaatgtcagtcaagaaatattccttggaatataaaacaaagccttgactctgctggcataggtctgagttttcataaactggagcttcacaaatctgtaaaactcataatattaatgggtgctttttcagaaattatagaatagctgccacctcttctaaattaagcattgactgtcatcagtattagatttagccagatagtataagtgttatgcaggcgtacctcattttattgtgctttgcaaacattgcatttttttacaaattgaaggttgtggccaccctgtgttgagcaagtctgttggtgctatttttccaacatgtattcacttcatgtctgtgtgacacatactggtaaattctcacaatatttcagactttgtcattatatctgttatggtgatctgtgattagtgatcttcgatgttactactgtgattgttttagggcaccacagggcacacccagataaggcagtgaacctaattgataaatactgtgtgtgttgtgactccttcaccagttacccattccctttctctgctcacttcaagtttccctatgccctgagacacaacagtatttaaattaggtcaattaataaccccacagtggcctctgagtattcaagtgaatggaaaagtcacatccctctcattttaaatcaaaacctagacatgattaagtttagtgaggaaggcatgctgaaagctaaaataggcctcttaaggcaaacagtaggccaagttgtgaatgcaaaggaaaagttcttgaagaaaaatcaaagtgctactccactaagcatatgaataagaaagtgaaacagctttattgctgctagggagaaagtttgaatggtctgaatagaagatcaaagcaaccacaacatttccttaggctaaagcctaatccagagcaaggccctcgtttcaattctgtgaagcctaagagaggtgatgaagctgcagaagaaaaattggaagctagcagaggttggttcctgtggtttagggaaagaagccatctccatgagtgcagaatgaagcagcaagtgctgatgtagaagctgctgcaagttacccagaagatctagctaagatcattgatgcaggtgactaaacagattgtcagtgtagaggaaacagccttccattggaagaaggtgccgtctaggactttcataactagagagaagacaacatctgctttgaaaggacatgctaactctcattagtggataatgcagctggtcacttttaagtggaagctagtgctcatttatcattctgataatcctaggacccttagaatttgctgaatctactctgcctgtgctttataaatggaacaacaaagcctggatgacagcatgtctgtttacatcatagtgtactgagtattttaagcccactgttgggaccgactgctcagg

SEQ ID NO: 430798 - DNA, 1597 bp, Homo sapiens
gctgccgcgccccgccctttctcggcccccggagggtgacggggtgaaggcgggggaaccgaggtggggagtccgccagagctcccagactgcgagcacgcgagccgccgcagccgtcacccgcgccgcgtcacggctcccgggcccgccctcctctgacccctcccctctctccgtttccccctctccccctcctccgccgaccgagcagtgacttaagcaacggagcgcggtgaagctcatttttctccttcctcgcagccgcgccagggagctcgcggcgcgcggcccctgtcctccggcccgagatgaatcctgcggcagaagccgagttcaacatcctcctggccaccgactcctacaaggttactcactataaacaatatccacccaacacaagcaaagtttattcctactttgaatgccgtgaaaagaagacagaaaactccaaattaaggaaggtgaaatatgaggaaacagtattttatgggttgcagtacattcttaataagtacttaaaaggtaaagtagtaaccaaagagaaaatccaggaagccaaagatgtctacaaagaacatttccaagatgatgtctttaatgaaaagggatggaactacattcttgagaagtatgatgggcatcttccaatagaaataaaagctgttcctgagggctttgtcattcccagaggaaatgttctcttcacggtggaaaacacagatccagagtgttactggcttacaaattggattgagactattcttgttcagtcctggtatccaatcacagtggccacaaattctagagagcagaagaaaatattggccaaatatttgttagaaacttctggtaacttagatggtctggaatacaagttacatgattttggctacagaggagtctcttcccaagagactgctggcataggagcatctgctcacttggttaacttcaaaggaacagatacagtagcaggacttgctctaattaaaaaatattatggaacgaaagatcctgttccaggctattctgttccagcagcagaacacagtaccataacagcttgggggaaagaccatgaaaaagatgcttttgaacatattgtaacacagttttcatcagtgcctgtatctgtggtcagcgatagctatgacatttataatgcgtgtgagaaaatatggggtgaagatctaagacatttaatagtatcgagaagtacacaggcaccactaataatcagacctgattctggaaaccctcttgacactgtgttaaaggttttggagattttaggtaagaagtttcctgttactgagaactcaaagggttacaagttgctgccaccttatcttagagttattcaaggggatggagtagatattaataccttacaagagattgtagaaggcatgaaacaaaaaatgtggagtattgaaaatattgccttcggttctggtggaggtttgctacagaagttgacaagagatctcttgaattgttccttcaagtgtagctatgttgtaactaatggccttggggaattaaccttccttccaagggaaccccattttgcctgaattccccaaccaaaaaaggt

SEQ ID NO: 430799 - DNA, 3034 bp, Homo sapiens
gctgccgcgccccgccctttctcggcccccggagggtgacggggtgaaggcgggggaaccgaggtggggagtccgccagagctcccagactgcgagcacgcgagccgccgcagccgtcacccgcgccgcgtcacggctcccgggcccgccctcctctgacccctcccctctctccgtttccccctctccccctcctccgccgaccgagcagtgacttaagcaacggagcgcggtgaagctcatttttctccttcctcgcagccgcgccagggagctcgcggcgcgcggcccctgtcctccggcccgagatgaatcctgcggcagaagccgagttcaacatcctcctggccaccgactcctacaaggttactcactataaacaatatccacccaacacaagcaaagtttattcctactttgaatgccgtgaaaagaagacagaaaactccaaattaaggaaggtgaaatatgaggaaacagtattttatgggttgcagtacattcttaataagtacttaaaaggtaaagtagtaaccaaagagaaaatccaggaagccaaagatgtctacaaagaacatttccaagatgatgtctttaatgaaaagggatggaactacattcttgagaagtatgatgggcatcttccaatagaaataaaagctgttcctgagggctttgtcattcccagaggaaatgttctcttcacggtggaaaacacagatccagagtgttactggcttacaaattggattgagactattcttgttcagtcctggtatccaatcacagtggccacaaattctagagagcagaagaaaatattggccaaatatttgttagaaacttctggtaacttagatggtctggaatacaagttacatgattttggctacagaggagtctcttcccaagagactgctggcataggagcatctgctcacttggttaacttcaaaggaacagatacagtagcaggacttgctctaattaaaaaatattatggaacgaaagatcctgttccaggctattctgttccagcagcagaacacagtaccataacagcttgggggaaagaccatgaaaaagatgcttttgaacatattgtaacacagttttcatcagtgcctgtatctgtggtcagcgatagctatgacatttataatgcgtgtgagaaaatatggggtgaagatctaagacatttaatagtatcgagaagtacacaggcaccactaataatcagacctgattctggaaaccctcttgacactgtgttaaaggttttggagattttaggtaagaagtttcctgttactgagaactcaaagggttacaagttgctgccaccttatcttagagttattcaaggggatggagtagatattaataccttacaagaggtatgtgttttatattaaaagtttcaataaggcatttcttataattaagtttgtttatgtttgataaagaacacaatataaatacaattttaagtctttgtaagtgtttatgttggtataaatctctgtgcattgcttaaagtttagaaataatagtagtttaaaatacagaggtgccagccaagccatacttactcttccagttgtcattggccaccctgaatgatgaatctaaagaagtatcattgtgaaacaaggaaatgtcagtcaagaaatattccttggaatataaaacaaagccttgactctgctggcataggtctgagttttcataaactggagcttcacaaatctgtaaaactcataatattaatgggtgctttttcagaaattatagaatagctgccacctcttctaaattaagcattgactgtcatcagtattagatttagccagatagtataagtgttatgcaggcgtacctcattttattgtgctttgcaaacattgcatttttttacaaattgaaggttgtggccaccctgtgttgagcaagtctgttggtgctatttttccaacatgtattcacttcatgtctgtgtgacacatactggtaaattctcacaatatttcagactttgtcattatatctgttatggtgatctgtgattagtgatcttcgatgttactactgtgattgttttagggcaccacagggcacacccagataaggcagtgaacctaattgataaatactgtgtgtgttgtgactccttcaccagttacccattccctttctctgctcacttcaagtttccctatgccctgagacacaacagtatttaaattaggtcaattaataaccccacagtggcctctgagtattcaagtgaatggaaaagtcacatccctctcattttaaatcaaaacctagacatgattaagtttagtgaggaaggcatgctgaaagctaaaataggcctcttaaggcaaacagtaggccaagttgtgaatgcaaaggaaaagttcttgaagaaaaatcaaagtgctactccactaagcatatgaataagaaagtgaaacagctttattgctgctagggagaaagtttgaatggtctgaatagaagatcaaagcaaccacaacatttccttaggctaaagcctaatccagagcaaggccctcgtttcaattctgtgaagcctaagagaggtgatgaagctgcagaagaccatgagtgcagaatgaagcagcaagtgctgatgtagaagctgctgcaagttacccagaagatctagctaagatcattgatgcaggtgactaaacagattgtcagtgtagaggaaacagccttccattggaagaaggtgccgtctaggactttcataactagagagaagacaacatctgctttgaaaggacatgctaactctcattagtggataatgcagctggtcacttttaagtggaagctagtgctcatttatcattctgataatcctaggacccttagaatttgctgaatctactctgcctgtgctttataaatggaacaacaaagcctggatgacagcatgtctgtttacatcatagtgtactgagtattttaagcccactgttgggaccgactgctcagg

SEQ ID NO: 430800 - DNA, 3033 bp, Homo sapiens
gctgccgcgccccgccctttctcggcccccggagggtgacggggtgaaggcgggggaaccgaggtggggagtccgccagagctcccagactgcgagcacgcgagccgccgcagccgtcacccgcgccgcgtcacggctcccgggcccgccctcctctgacccctcccctctctccgtttccccctctccccctcctccgccgaccgagcagtgacttaagcaacggagcgcggtgaagctcatttttctccttcctcgcagccgcgccagggagctcgcggcgcgcggcccctgtcctccggcccgagatgaatcctgcggcagaagccgagttcaacatcctcctggccaccgactcctacaaggttactcactataaacaatatccacccaacacaagcaaagtttattcctactttgaatgccgtgaaaagaagacagaaaactccaaattaaggaaggtgaaatatgaggaaacagtattttatgggttgcagtacattcttaataagtacttaaaaggtaaagtagtaaccaaagagaaaatccaggaagccaaagatgtctacaaagaacatttccaagatgatgtctttaatgaaaagggatggaactacattcttgagaagtatgatgggcatcttccaatagaaataaaagctgttcctgagggctttgtcattcccagaggaaatgttctcttcacggtggaaaacacagatccagagtgttactggcttacaaattggattgagactattcttgttcagtcctggtatccaatcacagtggccacaaattctagagagcagaagaaaatattggccaaatatttgttagaaacttctggtaacttagatggtctggaatacaagttacatgattttggctacagaggagtctcttcccaagagactgctggcataggagcatctgctcacttggttaacttcaaaggaacagatacagtagcaggacttgctctaattaaaaaatattatggaacgaaagatcctgttccaggctattctgttccagcagcagaacacagtaccataacagcttgggggaaagaccatgaaaaagatgcttttgaacatattgtaacacagttttcatcagtgcctgtatctgtggtcagcgatagctatgacatttataatgcgtgtgagaaaatatggggtgaagatctaagacatttaatagtatcgagaagtacacaggcaccactaataatcagacctgattctggaaaccctcttgacactgtgttaaaggttttggagattttaggtaagaagtttcctgttactgagaactcaaagggttacaagttgctgccaccttatcttagagttattcaaggggatggagtagatattaataccttacaagaggtatgtgttttatattaaaagtttcaataaggcatttcttataattaagtttgtttatgtttgataaagaacacaatataaatacaattttaagtctttgtaagtgtttatgttggtataaatctctgtgcattgcttaaagtttagaaataatagtagtttaaaatacagaggtgccagccaagccatacttactcttccagttgtcattggccaccctgaatgatgaatctaaagaagtatcattgtgaaacaaggaaatgtcagtcaagaaatattccttggaatataaaacaaagccttgactctgctggcataggtctgagttttcataaactggagcttcacaaatctctcttctaaattaagcattgactgtcatcagtattagatttagccagatagtataagtgttatgcaggcgtacctcattttattgtgctttgcaaacattgcatttttttacaaattgaaggttgtggccaccctgtgttgagcaagtctgttggtgctatttttccaacatgtattcacttcatgtctgtgtgacacatactggtaaattctcacaatatttcagactttgtcattatatctgttatggtgatctgtgattagtgatcttcgatgttactactgtgattgttttagggcaccacagggcacacccagataaggcagtgaacctaattgataaatactgtgtgtgttgtgactccttcaccagttacccattccctttctctgctcacttcaagtttccctatgccctgagacacaacagtatttaaattaggtcaattaataaccccacagtggcctctgagtattcaagtgaatggaaaagtcacatccctctcattttaaatcaaaacctagacatgattaagtttagtgaggaaggcatgctgaaagctaaaataggcctcttaaggcaaacagtaggccaagttgtgaatgcaaaggaaaagttcttgaagaaaaatcaaagtgctactccactaagcatatgaataagaaagtgaaacagctttattgctgctagggagaaagtttgaatggtctgaatagaagatcaaagcaaccacaacatttccttaggctaaagcctaatccagagcaaggccctcgtttcaattctgtgaagcctaagagaggtgatgaagctgcagaagaaaaattggaagctagcagaggttggttcctgtggtttagggaaagaagccatctccatgagtgcagaatgaagcagcaagtgctgatgtagaagctgctgcaagttacccagaagatctagctaagatcattgatgcaggtgactaaacagattgtcagtgtagaggaaacagccttccattggaagaaggtgccgtctaggactttcataactagagagaagacaacatctgctttgaaaggacatgctaactctcattagtggataatgcagctggtcacttttaagtggaagctagtgctcatttatcattctgataatcctaggacccttagaatttgctgaatctactctgcctgtgctttataaatggaacaacaaagcctggatgacagcatgtctgtttacatcatagtgtactgagtattttaagcccactgttgggaccgactgctcagg

SEQ ID NO: 430801 - DNA, 1183 bp, Homo sapiens
gctgccgcgccccgccctttctcggcccccggagggtgacggggtgaaggcgggggaaccgaggtggggagtccgccagagctcccagactgcgagcacgcgagccgccgcagccgtcacccgcgccgcgtcacggctcccgggcccgccctcctctgacccctcccctctctccgtttccccctctccccctcctccgccgaccgagcagtgacttaagcaacggagcgcggtgaagctcatttttctccttcctcgcagccgcgccagggagctcgcggcgcgcggcccctgtcctccggcccgagatgaatcctgcggcagaagccgagttcaacatcctcctggccaccgactcctacaaggttactcactataaacaatatccacccaacacaagcaaagtttattcctactttgaatgccgtgaaaagaagacagaaaactccaaattaaggaaggtgaaatatgaggaaacagtattttatgggttgcagtacattcttaataagtacttaaaaggtaaagtagtaaccaaagagaaaatccaggaagccaaagatgtctacaaagaacatttccaagatgatgtctttaatgaaaagggatggaactacattcttgagaagtatgatgggcatcttccaatagaaataaaagctgttcctgagggctttgtcattcccagaggaaatgttctcttcacggtggaaaacacagatccagagtgttactggcttacaaattggattgagactattcttgttcagtcctggtatccaatcacagtggccacaaattctagagagcagaagaaaatattggccaaatatttgttagaaacttctggtaacttagatggtctggaatacaagttacatgattttggctacagaggagtctcttcccaagagactgctggcataggagcatctgctcacttggttaacttcaaaggaacagatacagtagcaggacttgctctaattaaaaaatattatggaacgaaagatcctgttccaggctattctgttccagcagcagaacacaggtaaaaaattctgttcattttttaaaactactaattttttcactcttgtatttgtaactcagtgacattttacctaactgcagagccaggtacctacagtacatcttcatgaacttgagcaacacaaattca

SEQ ID NO: 430802 - DNA, 2148 bp, Homo sapiens
gaacggagatcacaccaatgcactccagtcctggagtgacagagcaagacgccgtctcaaaaaaaacagacattacccattactctacctttaataagattcaaaattatataccataacagcttgggggaaagaccatgaaaaagatgcttttgaacatattgtaacacagttttcatcagtgcctgtatctgtggtcagcgatagctatgacatttataatgcgtgtgagaaaatatggggtgaagatctaagacatttaatagtatcgagaagtacacaggcaccactaataatcagacctgattctggaaaccctcttgacactgtgttaaaggttttggagattttaggtaagaagtttcctgttactgagaactcaaagggttacaagttgctgccaccttatcttagagttattcaaggggatggagtagatattaataccttacaagaggtatgtgttttatattaaaagtttcaataaggcatttcttataattaagtttgtttatgtttgataaagaacacaatataaatacaattttaagtctttgtaagtgtttatgttggtataaatctctgtgcattgcttaaagtttagaaataatagtagtttaaaatacagaggtgccagccaagccatacttactcttccagttgtcattggccaccctgaatgatgaatctaaagaagtatcattgtgaaacaaggaaatgtcagtcaagaaatattccttggaatataaaacaaagccttgactctgctggcataggtctgagttttcataaactggagcttcacaaatctgtaaaactcataatattaatgggtgctttttcagaaattatagaatagctgccacctcttctaaattaagcattgactgtcatcagtattagatttagccagatagtataagtgttatgcaggcgtacctcattttattgtgctttgcaaacattgcatttttttacaaattgaaggttgtggccaccctgtgttgagcaagtctgttggtgctatttttccaacatgtattcacttcatgtctgtgtgacacatactggtaaattctcacaatatttcagactttgtcattatatctgttatggtgatctgtgattagtgatcttcgatgttactactgtgattgttttagggcaccacagggcacacccagataaggcagtgaacctaattgataaatactgtgtgtgttgtgactccttcaccagttacccattccctttctctgctcacttcaagtttccctatgccctgagacacaacagtatttaaattaggtcaattaataaccccacagtggcctctgagtattcaagtgaatggaaaagtcacatccctctcattttaaatcaaaacctagacatgattaagtttagtgaggaaggcatgctgaaagctaaaataggcctcttaaggcaaacagtaggccaagttgtgaatgcaaaggaaaagttcttgaagaaaaatcaaagtgctactccactaagcatatgaataagaaagtgaaacagctttattgctgctagggagaaagtttgaatggtctgaatagaagatcaaagcaaccacaacatttccttaggctaaagcctaatccagagcaaggccctcgtttcaattctgtgaagcctaagagaggtgatgaagctgcagaagaaaaattggaagctagcagaggttggttcctgtggtttagggaaagaagccatctccatgagtgcagaatgaagcagcaagtgctgatgtagaagctgctgcaagttacccagaagatctagctaagatcattgatgcaggtgactaaacagattgtcagtgtagaggaaacagccttccattggaagaaggtgccgtctaggactttcataactagagagaagacaacatctgctttgaaaggacatgctaactctcattagtggataatgcagctggtcacttttaagtggaagctagtgctcatttatcattctgataatcctaggacccttagaatttgctgaatctactctgcctgtgctttataaatggaacaacaaagcctggatgacagcatgtctgtttacatcatagtgtactgagtattttaagcccactgttgggaccgactgctcagg

SEQ ID NO: 430803 - DNA, 933 bp, Homo sapiens
gctgccgcgccccgccctttctcggcccccggagggtgacggggtgaaggcgggggaaccgaggtggggagtccgccagagctcccagactgcgagcacgcgagccgccgcagccgtcacccgcgccgcgtcacggctcccgggcccgccctcctctgacccctcccctctctccgtttccccctctccccctcctccgccgaccgagcagtgacttaagcaacggagcgcggtgaagctcatttttctccttcctcgcagccgcgccagggagctcgcggcgcgcggcccctgtcctccggcccgagatgaatcctgcggcagaagccgagttcaacatcctcctggccaccgactcctacaaggttactcactataaacaatatccacccaacacaagcaaagtttattcctactttgaatgccgtgaaaagaagacagaaaactccaaattaaggaaggtgaaatatgaggaaacagtattttatgggttgcagtacattcttaataagtacttaaaaggtaaagtagtaaccaaagagaaaatccaggaagccaaagatgtctacaaagaacatttccaagatgatgtctttaatgaaaagggatggaactacattcttgagaagtatgatgggcatcttccaatagaaataaaagctgttcctgagggctttgtcattcccagaggaaatgttctcttcacggtggaaaacacagatccagagtgttactggcttacaaattggattgaggtaaattgtttttttaattcttatttaacattaattgaataaagaccattgaactgagattacagtttagaatttgttactaataaagctatataatctcctataatttacttaacctttccaggcttcaatttcctcatctataaaatgacagactaaataatctttaaggtttctt

SEQ ID NO: 430804 - DNA, 1030 bp, Homo sapiens
gctgccgcgccccgccctttctcggcccccggagggtgacggggtgaaggcgggggaaccgaggtggggagtccgccagagctcccagactgcgagcacgcgagccgccgcagccgtcacccgcgccgcgtcacggctcccgggcccgccctcctctgacccctcccctctctccgtttccccctctccccctcctccgccgaccgagcagtgacttaagcaacggagcgcggtgaagctcatttttctccttcctcgcagccgcgccagggagctcgcggcgcgcggcccctgtcctccggcccgagatgaatcctgcggcagaagccgagttcaacatcctcctggccaccgactcctacaaggttactcactataaacaatatccacccaacacaagcaaagtttattcctactttgaatgccgtgaaaagaagacagaaaactccaaattaaggaaggtgaaatatgaggaaacagtattttatgggttgcagtacattcttaataagtacttaaaaggtaaagtagtaaccaaagagaaaatccaggaagccaaagatgtctacaaagaacatttccaagatgatgtctttaatgaaaagggatggaactacattcttgagaagtatgatgggcatcttccaatagaaataaaagctgttcctgagggctttgtcattcccagaggaaatgttctcttcacggtgactattcttgttcagtcctggtatccaatcacagtggccacaaattctagagagcagaagaaaatattggccaaatatttgttagaaacttctggtaacttagatggtctggaatacaagttacatgattttggctacagaggagtctcttcccaagagactgctggcataggagcatctgctcacttggttaacttcaaaggaacagatacagtagcaggacttgctctaattaaaaaatattatggaacgaaagatcctgttccaggctattctgttccagcagcagaacacagcaggatatctatcctatggattga

SEQ ID NO: 430805 - DNA, 473 bp, Homo sapiens
  misc_feature (250)..(250): n is a, c, g, or t
gttgagctccaactccaggccccatggggttgcaccaagctgctcaacctcacctgtttcttgaaattttgctgccttccactaggcagatgggtccagcaggagacattggagcaccaaatggaaaagctcttccttccttcccctcttcctgtacatcagaaagaatgcattagaaactcaaggagtgagcatttgggcttcctaagggtgagacagtgtggggctcctgtggggagatgggtactcntgtacccagtgtggcctcctgctcccaccgctttccagctgtggggcttttccttgtggaaattactgtccaagtttgatttttccatctgtaaaaggaggcaagtaagggttggtatgacttaaatgaattactggagtgggtagtgagtgtacttaaatgtttcaattctgttatattttttattaagtttttaaaaaattaaattggatattaaattgta

SEQ ID NO: 430806 - DNA, 5095 bp, Homo sapiens
atagtgttgactgaggttgtctttattagaagtctcagccatgcctccagtttcgagatgaatctcaattcacaagttccactatgaatctcaattcacaagttccactaccaccaccaccatcactgcccccagatagaatgagacttctaataacttgaaagacaagtctataaatatcctgtaatcgttttcactgtatcactttttcctggctacttttatccgataaaaacctcaatttatttttaagctattaaacatgcggacaaagggaatcttagttttatgcaaaaacgcaaccacgcatgagaactgcgcaagtctttcttggaatggtctgtatttgggtgaagtcatcagacgtcattacacttctttattttggggttgccaactcgtttcccaggatttaaagactataacgatgataaaagtcagtgtcgcaccctgtcaaaggcttggcccgttgccttttccttcccggcaatactcggttcaattaggtcttgtcccctcattatctgtgaggactgaattccacccccgcttttcaacgcaggctctttgctcgggaaaagtcaaaccatctctcaaaggatcaaagagctcagccatagacagagccgccggaggaaagcggagtcgctgcatcagatgaaaggggcccctcagcctcactcctcaccgcagctcctgggatcttaaagacagggtcaggaggatcaggagggacaagagggatggaggcgaaaggctggatccttaatccaggccggagacaaagccgcgccagggagctcgcggcgcgcggcccctgtcctccggcccgagatgaatcctgcggcagaagccgagttcaacatcctcctggccaccgactcctacaaggttactcactataaacaatatccacccaacacaagcaaagtttattcctactttgaatgccgtgaaaagaagacagaaaactccaaattaaggaaggtgaaatatgaggaaacagtattttatgggttgcagtacattcttaataagtacttaaaaggtaaagtagtaaccaaagagaaaatccaggaagccaaagatgtctacaaagaacatttccaagatgatgtctttaatgaaaagggatggaactacattcttgagaagtatgatgggcatcttccaatagaaataaaagctgttcctgagggctttgtcattcccagaggaaatgttctcttcacggtggaaaacacagatccagagtgttactggcttacaaattggattgagactattcttgttcagtcctggtatccaatcacagtggccacaaattctagagagcagaagaaaatattggccaaatatttgttagaaacttctggtaacttagatggtctggaatacaagttacatgattttggctacagaggagtctcttcccaagagactgctggcataggagcatctgctcacttggttaacttcaaaggaacagatacagtagcaggacttgctctaattaaaaaatattatggaacgaaagatcctgttccaggctattctgttccagcagcagaacacagtaccataacagcttgggggaaagaccatgaaaaagatgcttttgaacatattgtaacacagttttcatcagtgcctgtatctgtggtcagcgatagctatgacatttataatgcgtgtgagaaaatatggggtgaagatctaagacatttaatagtatcgagaagtacacaggcaccactaataatcagacctgattctggaaaccctcttgacactgtgttaaaggttttggagattttaggtaagaagtttcctgttactgagaactcaaagggttacaagttgctgccaccttatcttagagttattcaaggggatggagtagatattaataccttacaagagattgtagaaggcatgaaacaaaaaatgtggagtattgaaaatattgccttcggttctggtggaggtttgctacagaagttgacaagagatctcttgaattgttccttcaagtgtagctatgttgtaactaatggccttgggattaacgtcttcaaggacccagttgctgatcccaacaaaaggtccaaaaagggccgattatctttacataggacgccagcagggaattttgttacactggaggaaggaaaaggagaccttgaggaatatggtcaggatcttctccatactgtcttcaagaatggcaaggtgacaaaaagctattcatttgatgaaataagaaaaaatgcacagctgaatattgaactggaagcagcacatcattaggctttatgactgggtgtgtgttgtgtgtatgtaatacataatgtttattgtacagatgtgtggggtttgtgttttatgatacattacagccaaattatttgttggtttatggacatactgccctttcattttttttcttttccagtgtttaggtgatctcaaattaggaaatgcatttaaccatgtaaaagatgagtgctaaagtaagctttttagggccctttgccaataggtagtcattcaatctggtattgatcttttcacaaataacagaactgagaaacttttatatataactgatgatcacataaaacagatttgcataaaattaccatgattgctttatgtttatatttaacttgtatttttgtacaaacaagattgtgtaagatatatttgaagtttcagtgatttaacagtctttccaacttttcatgatttttatgagcacagactttcaagaaaatacttgaaaataaattacattgccttttgtccattaatcagcaaataaaacatggccttaacaaagttgtttgtgttattgtacaatttgaaaattatgtcgggacataccctatagaattactaaccttactgccccttgtagaatatgtattaatcattctacattaaagaaaataatggttcttactggaatgtctaggcactgtacagttattatatatcttggttgttgtattgtaccagtgaaatgccaaatttgaaaggcctgtactgcaattttatatgtcagagattgcctgtggctctaatatgcacctcaagattttaaggagataatgtttttagagagaatttctgcttccactatagaatatatacataaatgtaaaatacttacaaaagtggaagtagtgtattttaaagtaattacacttctgaatttatttttcatattctatagttggtatgacttaaatgaattactggagtgggtagtgagtgtacttaaatgtttcaattctgttatattttttattaagtttttaaaaaattaaattggatattaaattgtatggacatcatttattaattttaaactgaatgccctcaataagtaatactgaagcacattcttaaatgaagataaattatctccaatgaaaagcatgacatgtgtttcaatagaagaatcttaagttggctaaattcaaagtgcttgacatcaaaatgttctagagtgattagctactagattctgaatcagacatcacatctgactagagaccagtttctttcgaatgattcttttatgtatgtagatctgttcttctgaggcagcggttggccaactatagcccaaaggccaaatttggacttctttttataaatgcagattgtctatggctgctttcccactactccagcctaaggtaaacagctgcaatagaagccaaatgagaatcgcaaagcccaaaatgtttattaacctgccctttacacaaaatcacacaaaaagtttcctgatctctgttctaagaaaaggagtgtgccttgcatttaaaaggaaatgttggtttctagggaagggaggaggctaaataattgatacggaattttcctcttttgtcttcttttttctcacttaagaatccgatactggaagactgatttagaaaagtttttaacatgacattaaatgtgaaattttaaaaattgaaaagccataaatcatctgttttaaatagttacatgagaaaatgatcactagaataacctaattagaagtgttatcttcattaaatgttttttgtaagtggtattagaaagaatatgtttttcagatggttctttaaacatgtagtgagaacaataagcattattcacttttagtaagtcttctgtaatccatgatataaaataattttaaaatgattttttaatgtatttgagtaaagatgagtagtattaagaaaaacacacatttcttcacaaaatgtgctaaggggcgtgtaaagaatcaaaagaaactattaccaataatagttttgataatcacccataattttgtgtttaaacattgaaattatagtacagacagtattctctgtgttctgtgaatttcagcagcttcagaatagagtttaatttagaaatttgcagtgaaaaaagctatctctttgttcacaaccataaatcaggagatggagattaattctattggctcttagtcacttggaactgattaattctgactttctgtcactaagcacttggtatttggccatctccattctgagcaccaaacggttaacacgaatgtccactagaactctgctgtgtgtcacccttaaatcagtctaaatcttccagacaaaagcaaatggcatttatggatttaagtcattagattttcaactgacattaattaatccctcttgattgattatatcatcaagtatttatatcttaaataggaggtaggatttctgtgttaagactcttatttgtaccctataattaaagtaaaatgttttttatgagtatcccttgttttcccttcttaaattgttatcaaacaatttttataatgaaatctatcttggaaaattagaaagaaaaatggcaaggtatttattgttctgtttgccataatttagaactcacacttaagtattttgtagttttacattcctttttaacccattcagtggagaatgtcagcttttctcccaagttgtatgttaagtctattctaatatgtactcaacatcaagttataaacatgtaataaacatggaaataaagtttagctctatta

SEQ ID NO: 430807 - DNA, 4288 bp, Homo sapiens
gctgccgcgccccgccctttctcggcccccggagggtgacggggtgaaggcgggggaaccgaggtggggagtccgccagagctcccagactgcgagcacgcgagccgccgcagccgtcacccgcgccgcgtcacggctcccgggcccgccctcctctgacccctcccctctctccgtttccccctctccccctcctccgccgaccgagcagtgacttaagcaacggagcgcggtgaagctcatttttctccttcctcgcagccgcgccagggagctcgcggcgcgcggcccctgtcctccggcccgagatgaatcctgcggcagaagccgagttcaacatcctcctggccaccgactcctacaaggttactcactataaacaatatccacccaacacaagcaaagtttattcctactttgaatgccgtgaaaagaagacagaaaactccaaattaaggaaggtgaaatatgaggaaacagtattttatgggttgcagtacattcttaataagtacttaaaaggtaaagtagtaaccaaagagaaaatccaggaagccaaagatgtctacaaagaacatttccaagatgatgtctttaatgaaaagggatggaactacattcttgagaagtatgatgggcatcttccaatagaaataaaagctgttcctgagggctttgtcattcccagaggaaatgttctcttcacggtggaaaacacagatccagagtgttactggcttacaaattggattgagactattcttgttcagtcctggtatccaatcacagtggccacaaattctagagagcagaagaaaatattggccaaatatttgttagaaacttctggtaacttagatggtctggaatacaagttacatgattttggctacagaggagtctcttcccaagagactgctggcataggagcatctgctcacttggttaacttcaaaggaacagatacagtagcaggacttgctctaattaaaaaatattatggaacgaaagatcctgttccaggctattctgttccagcagcagaacacagtaccataacagcttgggggaaagaccatgaaaaagatgcttttgaacatattgtaacacagttttcatcagtgcctgtatctgtggtcagcgatagctatgacatttataatgcgtgtgagaaaatatggggtgaagatctaagacatttaatagtatcgagaagtacacaggcaccactaataatcagacctgattctggaaaccctcttgacactgtgttaaaggttttggagattttaggtaagaagtttcctgttactgagaactcaaagggttacaagttgctgccaccttatcttagagttattcaaggggatggagtagatattaataccttacaagagattgtagaaggcatgaaacaaaaaatgtggagtattgaaaatattgccttcggttctggtggaggtttgctacagaagttgacaagagatctcttgaattgttccttcaagtgtagctatgttgtaactaatggccttgggattaacgtcttcaaggacccagttgctgatcccaacaaaaggtccaaaaagggccgattatctttacataggacgccagcagggaattttgttacactggaggaaggaaaaggagaccttgaggaatatggtcaggatcttctccatactgtcttcaagaatggcaaggtgacaaaaagctattcatttgatgaaataagaaaaaatgcacagctgaatattgaactggaagcagcacatcattaggctttatgactgggtgtgtgttgtgtgtatgtaatacataatgtttattgtacagatgtgtggggtttgtgttttatgatacattacagccaaattatttgttggtttatggacatactgccctttcattttttttcttttccagtgtttaggtgatctcaaattaggaaatgcatttaaccatgtaaaagatgagtgctaaagtaagctttttagggccctttgccaataggtagtcattcaatctggtattgatcttttcacaaataacagaactgagaaacttttatatataactgatgatcacataaaacagatttgcataaaattaccatgattgctttatgtttatatttaacttgtatttttgtacaaacaagattgtgtaagatatatttgaagtttcagtgatttaacagtctttccaacttttcatgatttttatgagcacagactttcaagaaaatacttgaaaataaattacattgccttttgtccattaatcagcaaataaaacatggccttaacaaagttgtttgtgttattgtacaatttgaaaattatgtcgggacataccctatagaattactaaccttactgccccttgtagaatatgtattaatcattctacattaaagaaaataatggttcttactggaatgtctaggcactgtacagttattatatatcttggttgttgtattgtaccagtgaaatgccaaatttgaaaggcctgtactgcaattttatatgtcagagattgcctgtggctctaatatgcacctcaagattttaaggagataatgtttttagagagaatttctgcttccactatagaatatatacataaatgtaaaatacttacaaaagtggaagtagtgtattttaaagtaattacacttctgaatttatttttcatattctatagttggtatgacttaaatgaattactggagtgggtagtgagtgtacttaaatgtttcaattctgttatattttttattaagtttttaaaaaattaaattggatattaaattgtatggacatcatttattaattttaaactgaatgccctcaataagtaatactgaagcacattcttaaatgaagataaattatctccaatgaaaagcatgacatgtgtttcaatagaagaatcttaagttggctaaattcaaagtgcttgacatcaaaatgttctagagtgattagctactagattctgaatcagacatcacatctgactagagaccagtttctttcgaatgattcttttatgtatgtagatctgttcttctgaggcagcggttggccaactatagcccaaaggccaaatttggacttctttttataaatgcagattgtctatggctgctttcccactactccagcctaaggtaaacagctgcaatagaagccaaatgagaatcgcaaagcccaaaatgtttattaacctgccctttacacaaaatcacacaaaaagtttcctgatctctgttctaagaaaaggagtgtgccttgcatttaaaaggaaatgttggtttctagggaagggaggaggctaaataattgatacggaattttcctcttttgtcttcttttttctcacttaagaatccgatactggaagactgatttagaaaagtttttaacatgacattaaatgtgaaattttaaaaattgaaaagccataaatcatctgttttaaatagttacatgagaaaatgatcactagaataacctaattagaagtgttatcttcattaaatgttttttgtaagtggtattagaaagaatatgtttttcagatggttctttaaacatgtagtgagaacaataagcattattcacttttagtaagtcttctgtaatccatgatataaaataattttaaaatgattttttaatgtatttgagtaaagatgagtagtattaagaaaaacacacatttcttcacaaaatgtgctaaggggcgtgtaaagaatcaaaagaaactattaccaataatagttttgataatcacccataattttgtgtttaaacattgaaattatagtacagacagtattctctgtgttctgtgaatttcagcagcttcagaatagagtttaatttagaaatttgcagtgaaaaaagctatctctttgttcacaaccataaatcaggagatggagattaattctattggctcttagtcacttggaactgattaattctgactttctgtcactaagcacttggtatttggccatctccattctgagcaccaaacggttaacacgaatgtccactagaactctgctgtgtgtcacccttaaatcagtctaaatcttccagacaaaagcaaatggcatttatggatttaagtcattagattttcaactgacattaattaatccctcttgattgattatatcatcaagtatttatatcttaaataggaggtaggccctttatattcccacccttgtttggcgcgcggagagggggtgatttgggttttt

SEQ ID NO: 430808 - DNA, 5032 bp, Homo sapiens
atagtgttgactgaggttgtctttattagaagtctcagccatgcctccagtttcgagatgaatctcaattcacaagttccactatgaatctcaattcacaagttccactaccaccaccaccatcactgcccccagatagaatgagacttctaataacttgaaagacaagtctataaatatcctgtaatcgttttcactgtatcactttttcctggctacttttatccgataaaaacctcaatttatttttaagctattaaacatgcggacaaagggaatcttagttttatgcaaaaacgcaaccacgcatgagaactgcgcaagtctttcttggaatggtctgtatttgggtgaagtcatcagacgtcattacacttctttattttggggttgccaactcgtttcccaggatttaaagactataacgatgataaaagtcagtgtcgcaccctgtcaaaggcttggcccgttgccttttccttcccggcaatactcggttcaattaggtcttgtcccctcattatctgtgaggactgaattccacccccgcttttcaacgcaggctctttgctcgggaaaagtcaaaccatctctcaaaggatcaaagagctcagccatagacagagccgccggaggaaagcggagtcgctgcatcagatgaaaggggcccctcagcctcactcctcaccgcagctcctgggatcttaaagacagggtcaggaggatcaggagggacaagagggatggaggcgaaaggctggatccttaatccaggccggagacaaagccgcgccagggagctcgcggcgcgcggcccctgtcctccggcccgagatgaatcctgcggcagaagccgagttcaacatcctcctggccaccgactcctacaaggttactcactataaacaatatccacccaacacaagcaaagtttattcctactttgaatgccgtgaaaagaagacagaaaactccaaattaaggagtaaagtagtaaccaaagagaaaatccaggaagccaaagatgtctacaaagaacatttccaagatgatgtctttaatgaaaagggatggaactacattcttgagaagtatgatgggcatcttccaatagaaataaaagctgttcctgagggctttgtcattcccagaggaaatgttctcttcacggtggaaaacacagatccagagtgttactggcttacaaattggattgagactattcttgttcagtcctggtatccaatcacagtggccacaaattctagagagcagaagaaaatattggccaaatatttgttagaaacttctggtaacttagatggtctggaatacaagttacatgattttggctacagaggagtctcttcccaagagactgctggcataggagcatctgctcacttggttaacttcaaaggaacagatacagtagcaggacttgctctaattaaaaaatattatggaacgaaagatcctgttccaggctattctgttccagcagcagaacacagtaccataacagcttgggggaaagaccatgaaaaagatgcttttgaacatattgtaacacagttttcatcagtgcctgtatctgtggtcagcgatagctatgacatttataatgcgtgtgagaaaatatggggtgaagatctaagacatttaatagtatcgagaagtacacaggcaccactaataatcagacctgattctggaaaccctcttgacactgtgttaaaggttttggagattttaggtaagaagtttcctgttactgagaactcaaagggttacaagttgctgccaccttatcttagagttattcaaggggatggagtagatattaataccttacaagagattgtagaaggcatgaaacaaaaaatgtggagtattgaaaatattgccttcggttctggtggaggtttgctacagaagttgacaagagatctcttgaattgttccttcaagtgtagctatgttgtaactaatggccttgggattaacgtcttcaaggacccagttgctgatcccaacaaaaggtccaaaaagggccgattatctttacataggacgccagcagggaattttgttacactggaggaaggaaaaggagaccttgaggaatatggtcaggatcttctccatactgtcttcaagaatggcaaggtgacaaaaagctattcatttgatgaaataagaaaaaatgcacagctgaatattgaactggaagcagcacatcattaggctttatgactgggtgtgtgttgtgtgtatgtaatacataatgtttattgtacagatgtgtggggtttgtgttttatgatacattacagccaaattatttgttggtttatggacatactgccctttcattttttttcttttccagtgtttaggtgatctcaaattaggaaatgcatttaaccatgtaaaagatgagtgctaaagtaagctttttagggccctttgccaataggtagtcattcaatctggtattgatcttttcacaaataacagaactgagaaacttttatatataactgatgatcacataaaacagatttgcataaaattaccatgattgctttatgtttatatttaacttgtatttttgtacaaacaagattgtgtaagatatatttgaagtttcagtgatttaacagtctttccaacttttcatgatttttatgagcacagactttcaagaaaatacttgaaaataaattacattgccttttgtccattaatcagcaaataaaacatggccttaacaaagttgtttgtgttattgtacaatttgaaaattatgtcgggacataccctatagaattactaaccttactgccccttgtagaatatgtattaatcattctacattaaagaaaataatggttcttactggaatgtctaggcactgtacagttattatatatcttggttgttgtattgtaccagtgaaatgccaaatttgaaaggcctgtactgcaattttatatgtcagagattgcctgtggctctaatatgcacctcaagattttaaggagataatgtttttagagagaatttctgcttccactatagaatatatacataaatgtaaaatacttacaaaagtggaagtagtgtattttaaagtaattacacttctgaatttatttttcatattctatagttggtatgacttaaatgaattactggagtgggtagtgagtgtacttaaatgtttcaattctgttatattttttattaagtttttaaaaaattaaattggatattaaattgtatggacatcatttattaattttaaactgaatgccctcaataagtaatactgaagcacattcttaaatgaagataaattatctccaatgaaaagcatgacatgtgtttcaatagaagaatcttaagttggctaaattcaaagtgcttgacatcaaaatgttctagagtgattagctactagattctgaatcagacatcacatctgactagagaccagtttctttcgaatgattcttttatgtatgtagatctgttcttctgaggcagcggttggccaactatagcccaaaggccaaatttggacttctttttataaatgcagattgtctatggctgctttcccactactccagcctaaggtaaacagctgcaatagaagccaaatgagaatcgcaaagcccaaaatgtttattaacctgccctttacacaaaatcacacaaaaagtttcctgatctctgttctaagaaaaggagtgtgccttgcatttaaaaggaaatgttggtttctagggaagggaggaggctaaataattgatacggaattttcctcttttgtcttcttttttctcacttaagaatccgatactggaagactgatttagaaaagtttttaacatgacattaaatgtgaaattttaaaaattgaaaagccataaatcatctgttttaaatagttacatgagaaaatgatcactagaataacctaattagaagtgttatcttcattaaatgttttttgtaagtggtattagaaagaatatgtttttcagatggttctttaaacatgtagtgagaacaataagcattattcacttttagtaagtcttctgtaatccatgatataaaataattttaaaatgattttttaatgtatttgagtaaagatgagtagtattaagaaaaacacacatttcttcacaaaatgtgctaaggggcgtgtaaagaatcaaaagaaactattaccaataatagttttgataatcacccataattttgtgtttaaacattgaaattatagtacagacagtattctctgtgttctgtgaatttcagcagcttcagaatagagtttaatttagaaatttgcagtgaaaaaagctatctctttgttcacaaccataaatcaggagatggagattaattctattggctcttagtcacttggaactgattaattctgactttctgtcactaagcacttggtatttggccatctccattctgagcaccaaacggttaacacgaatgtccactagaactctgctgtgtgtcacccttaaatcagtctaaatcttccagacaaaagcaaatggcatttatggatttaagtcattagattttcaactgacattaattaatccctcttgattgattatatcatcaagtatttatatcttaaataggaggtaggatttctgtgttaagactcttatttgtaccctataattaaagtaaaatgttttttatgagtatcccttgttttcccttcttaaattgttatcaaacaatttttataatgaaatctatcttggaaaattagaaagaaaaatggcaaggtatttattgttctgtttgccataatttagaactcacacttaagtattttgtagttttacattcctttttaacccattcagtggagaatgtcagcttttctcccaagttgtatgttaagtctattctaatatgtactcaacatcaagttataaacatgtaataaacatggaaataaagtttagctctatta

SEQ ID NO: 430809 - DNA, 6088 bp, Homo sapiens
ataaaggttttaaatagtctataccgtatactaaaactaaattaatatttaggactgaaataacatattgattaagtaccagctatgtacccaaaaaatgctgggcacagaagttagagtaagatgttttacttaaagggcctttgagtgagagttggcaattcattctgaactaaccactaatatcattaagaattagtgctgagttggtagcaggaaataggtaattctgtctaaaggaatcatgaaatggaaaataaataagcttttaataaggagaaggaagagctgaagaaatggcacagtgttcttagaatgacagatagtcctatggggactgcagcataaaagtgaaaaatgtataagataaacctttagatggtaagcaaggcaagattctcaaattctgtatgaatcagctccacctccgccccatggacagtagatgaccgttaatggcttttaaggaaagatgcaacctggaaaaaaagaaaaaaaacttgttttagaatggtaaccactggcaatatgaagaataattagactaaagaagagaggtaggataatcatgggcattggcagtggaattgaaagagtaatttcagaagcagaatggtcagatgttggaggtgattggttatagagtttaagaattgtactgattttctattgtgtaacaaactaccccaaaacttaatggcttaaagcaactattatttctcctgattctgtggttgactggatggtcgtctgctgctcttgcttagacttaggcatctgcatttagctgagggttcagccagggctggacatcctttaatggcctcattcccatgtctggggcctcaggtcagatagctgggactaccgggtctcactccagaagaggcttcttcagagcatggtagtcttggggttctaagagaatgagagtagaagctgcaaaacctcttgaaactggggcttgggagtcacacatgactttctccacattctgttcgtcaaaagcgaatcataaggacagcacagactcaagggataagaaaggagattccatctcttgatgagaagagctgcaaaggccatatttaatcagtcacaggagtctaatgctacaaagtagttttttaaaaagatgactagattggcaagttcaaggttaatctttttatttgttttatttatatatcacttagctggtattcagtaaaagcttgctttgtaaaatttagttaatatctttttggttcagcacagacattgcatcatcttagcagctctttttcaaacagatttgaagctgcttcaaataacaatctggtttataaaatgaaaatagaaaattatgatcttagaatgaagaagtgaatttctaagccatgataattattacggttgctgtgattagacagacttttctgtggagcttcctgacaaccaagaaaaaaggggaaatcaaggaactgttcttatcagaaagtaggaacccagcaattctttcattttctcattgggaacttaatagtcactgaattacaaagtagacagtgaccttgattatacaacatatgcggaagtgtttcctgtaacttacgtgagtattttatcaaatacttatatatttgataaaagctaagtacataaagcataactcagtagatagaattctctagtagtaagctaaagtgcttcaagtattagttgtcatattaatccaagagaaaattagatctgagactacctcgaggagtaaacgaacaacttctttaaaccaatactagtcaaaatgcagtccacggaccaatgctggttcatgccctatttgatccaagtccacattaagtacagaaatgaagagtaagcatttagaaacttggggcaatttgacattgcctcaacatccaagtttcagtgtcctttataaactattgatccatgacagatcatgaaactttctaaaaattgatccttttatcacatagtctttcaaaatattatttgcttctttgaagctttggatagaaacttgataatgtgaagttctctgctatgtggacctggtgtgcttatcttctttgttgctgatttgagagctgagctatgtactatatctggaatgcacacagcaggcatcctgctgcgcagttctgtgtctagttaatagtatggaagttcaggaacatacctccaaaaaaaaaaaaaagctaggattttcctcagaaagaatgcagtattttatgtcttaatatttgtggttaattttgttactacagaactattcttgttcagtcctggtatccaatcacagtggccacaaattctagagagcagaagaaaatattggccaaatatttgttagaaacttctggtaacttagatggtctggaatacaagttacatgattttggctacagaggagtctcttcccaagagactgctggcataggagcatctgctcacttggttaacttcaaaggaacagatacagtagcaggacttgctctaattaaaaaatattatggaacgaaagatcctgttccaggctattctgttccagcagcagaacacagtaccataacagcttgggggaaagaccatgaaaaagatgcttttgaacatattgtaacacagttttcatcagtgcctgtatctgtggtcagcgatagctatgacatttataatgcgtgtgagaaaatatggggtgaagatctaagacatttaatagtatcgagaagtacacaggcaccactaataatcagacctgattctggaaaccctcttgacactgtgttaaaggttttggagattttaggtaagaagtttcctgttactgagaactcaaagggttacaagttgctgccaccttatcttagagttattcaaggggatggagtagatattaataccttacaagagattgtagaaggcatgaaacaaaaaatgtggagtattgaaaatattgccttcggttctggtggaggtttgctacagaagttgacaagagatctcttgaattgttccttcaagtgtagctatgttgtaactaatggccttgggattaacgtcttcaaggacccagttgctgatcccaacaaaaggtccaaaaagggccgattatctttacataggacgccagcagggaattttgttacactggaggaaggaaaaggagaccttgaggaatatggtcaggatcttctccatactgtcttcaagaatggcaaggtgacaaaaagctattcatttgatgaaataagaaaaaatgcacagctgaatattgaactggaagcagcacatcattaggctttatgactgggtgtgtgttgtgtgtatgtaatacataatgtttattgtacagatgtgtggggtttgtgttttatgatacattacagccaaattatttgttggtttatggacatactgccctttcattttttttcttttccagtgtttaggtgatctcaaattaggaaatgcatttaaccatgtaaaagatgagtgctaaagtaagctttttagggccctttgccaataggtagtcattcaatctggtattgatcttttcacaaataacagaactgagaaacttttatatataactgatgatcacataaaacagatttgcataaaattaccatgattgctttatgtttatatttaacttgtatttttgtacaaacaagattgtgtaagatatatttgaagtttcagtgatttaacagtctttccaacttttcatgatttttatgagcacagactttcaagaaaatacttgaaaataaattacattgccttttgtccattaatcagcaaataaaacatggccttaacaaagttgtttgtgttattgtacaatttgaaaattatgtcgggacataccctatagaattactaaccttactgccccttgtagaatatgtattaatcattctacattaaagaaaataatggttcttactggaatgtctaggcactgtacagttattatatatcttggttgttgtattgtaccagtgaaatgccaaatttgaaaggcctgtactgcaattttatatgtcagagattgcctgtggctctaatatgcacctcaagattttaaggagataatgtttttagagagaatttctgcttccactatagaatatatacataaatgtaaaatacttacaaaagtggaagtagtgtattttaaagtaattacacttctgaatttatttttcatattctatagttggtatgacttaaatgaattactggagtgggtagtgagtgtacttaaatgtttcaattctgttatattttttattaagtttttaaaaaattaaattggatattaaattgtatggacatcatttattaattttaaactgaatgccctcaataagtaatactgaagcacattcttaaatgaagataaattatctccaatgaaaagcatgacatgtgtttcaatagaagaatcttaagttggctaaattcaaagtgcttgacatcaaaatgttctagagtgattagctactagattctgaatcagacatcacatctgactagagaccagtttctttcgaatgattcttttatgtatgtagatctgttcttctgaggcagcggttggccaactatagcccaaaggccaaatttggacttctttttataaatgcagattgtctatggctgctttcccactactccagcctaaggtaaacagctgcaatagaagccaaatgagaatcgcaaagcccaaaatgtttattaacctgccctttacacaaaatcacacaaaaagtttcctgatctctgttctaagaaaaggagtgtgccttgcatttaaaaggaaatgttggtttctagggaagggaggaggctaaataattgatacggaattttcctcttttgtcttcttttttctcacttaagaatccgatactggaagactgatttagaaaagtttttaacatgacattaaatgtgaaattttaaaaattgaaaagccataaatcatctgttttaaatagttacatgagaaaatgatcactagaataacctaattagaagtgttatcttcattaaatgttttttgtaagtggtattagaaagaatatgtttttcagatggttctttaaacatgtagtgagaacaataagcattattcacttttagtaagtcttctgtaatccatgatataaaataattttaaaatgattttttaatgtatttgagtaaagatgagtagtattaagaaaaacacacatttcttcacaaaatgtgctaaggggcgtgtaaagaatcaaaagaaactattaccaataatagttttgataatcacccataattttgtgtttaaacattgaaattatagtacagacagtattctctgtgttctgtgaatttcagcagcttcagaatagagtttaatttagaaatttgcagtgaaaaaagctatctctttgttcacaaccataaatcaggagatggagattaattctattggctcttagtcacttggaactgattaattctgactttctgtcactaagcacttggtatttggccatctccattctgagcaccaaacggttaacacgaatgtccactagaactctgctgtgtgtcacccttaaatcagtctaaatcttccagacaaaagcaaatggcatttatggatttaagtcattagattttcaactgacattaattaatccctcttgattgattatatcatcaagtatttatatcttaaataggaggtaggatttctgtgttaagactcttatttgtaccctataattaaagtaaaatgttttttatgagtatcccttgttttcccttcttaaattgttatcaaacaatttttataatgaaatctatcttggaaaattagaaagaaaaatggcaaggtatttattgttctgtttgccataatttagaactcacacttaagtattttgtagttttacattcctttttaacccattcagtggagaatgtcagcttttctcccaagttgtatgttaagtctattctaatatgtactcaacatcaagttataaacatgtaataaacatggaaataaagtttagctctatta

SEQ ID NO: 430810 - DNA, 4515 bp, Homo sapiens
gctgccgcgccccgccctttctcggcccccggagggtgacggggtgaaggcgggggaaccgaggtggggagtccgccagagctcccagactgcgagcacgcgagccgccgcagccgtcacccgcgccgcgtcacggctcccgggcccgccctcctctgacccctcccctctctccgtttccccctctccccctcctccgccgaccgagcagtgacttaagcaacggagcgcggtgaagctcatttttctccttcctcgcagccgcgccagggagctcgcggcgcgcggcccctgtcctccggcccgagatgaatcctgcggcagaagccgagttcaacatcctcctggccaccgactcctacaaggttactcactataaacaatatccacccaacacaagcaaagtttattcctactttgaatgccgtgaaaagaagacagaaaactccaaattaaggaaggtgaaatatgaggaaacagtattttatgggttgcagtacattcttaataagtacttaaaaggtaaagtagtaaccaaagagaaaatccaggaagccaaagatgtctacaaagaacatttccaagatgatgtctttaatgaaaagggatggaactacattcttgagaagtatgatgggcatcttccaatagaaataaaagctgttcctgagggctttgtcattcccagaggaaatgttctcttcacggtggaaaacacagatccagagtgttactggcttacaaattggattgagactattcttgttcagtcctggtatccaatcacagtggccacaaattctagagagcagaagtacaagttacatgattttggctacagaggagtctcttcccaagagactgctggcataggagcatctgctcacttggttaacttcaaaggaacagatacagtagcaggacttgctctaattaaaaaatattatggaacgaaagatcctgttccaggctattctgttccagcagcagaacacagtaccataacagcttgggggaaagaccatgaaaaagatgcttttgaacatattgtaacacagttttcatcagtgcctgtatctgtggtcagcgatagctatgacatttataatgcgtgtgagaaaatatggggtgaagatctaagacatttaatagtatcgagaagtacacaggcaccactaataatcagacctgattctggaaaccctcttgacactgtgttaaaggttttggagattttaggtaagaagtttcctgttactgagaactcaaagggttacaagttgctgccaccttatcttagagttattcaaggggatggagtagatattaataccttacaagagattgtagaaggcatgaaacaaaaaatgtggagtattgaaaatattgccttcggttctggtggaggtttgctacagaagttgacaagagatctcttgaattgttccttcaagtgtagctatgttgtaactaatggccttgggattaacgtcttcaaggacccagttgctgatcccaacaaaaggtccaaaaagggccgattatctttacataggacgccagcagggaattttgttacactggaggaaggaaaaggagaccttgaggaatatggtcaggatcttctccatactgtcttcaagaatggcaaggtgacaaaaagctattcatttgatgaaataagaaaaaatgcacagctgaatattgaactggaagcagcacatcattaggctttatgactgggtgtgtgttgtgtgtatgtaatacataatgtttattgtacagatgtgtggggtttgtgttttatgatacattacagccaaattatttgttggtttatggacatactgccctttcattttttttcttttccagtgtttaggtgatctcaaattaggaaatgcatttaaccatgtaaaagatgagtgctaaagtaagctttttagggccctttgccaataggtagtcattcaatctggtattgatcttttcacaaataacagaactgagaaacttttatatataactgatgatcacataaaacagatttgcataaaattaccatgattgctttatgtttatatttaacttgtatttttgtacaaacaagattgtgtaagatatatttgaagtttcagtgatttaacagtctttccaacttttcatgatttttatgagcacagactttcaagaaaatacttgaaaataaattacattgccttttgtccattaatcagcaaataaaacatggccttaacaaagttgtttgtgttattgtacaatttgaaaattatgtcgggacataccctatagaattactaaccttactgccccttgtagaatatgtattaatcattctacattaaagaaaataatggttcttactggaatgtctaggcactgtacagttattatatatcttggttgttgtattgtaccagtgaaatgccaaatttgaaaggcctgtactgcaattttatatgtcagagattgcctgtggctctaatatgcacctcaagattttaaggagataatgtttttagagagaatttctgcttccactatagaatatatacataaatgtaaaatacttacaaaagtggaagtagtgtattttaaagtaattacacttctgaatttatttttcatattctatagttggtatgacttaaatgaattactggagtgggtagtgagtgtacttaaatgtttcaattctgttatattttttattaagtttttaaaaaattaaattggatattaaattgtatggacatcatttattaattttaaactgaatgccctcaataagtaatactgaagcacattcttaaatgaagataaattatctccaatgaaaagcatgacatgtgtttcaatagaagaatcttaagttggctaaattcaaagtgcttgacatcaaaatgttctagagtgattagctactagattctgaatcagacatcacatctgactagagaccagtttctttcgaatgattcttttatgtatgtagatctgttcttctgaggcagcggttggccaactatagcccaaaggccaaatttggacttctttttataaatgcagattgtctatggctgctttcccactactccagcctaaggtaaacagctgcaatagaagccaaatgagaatcgcaaagcccaaaatgtttattaacctgccctttacacaaaatcacacaaaaagtttcctgatctctgttctaagaaaaggagtgtgccttgcatttaaaaggaaatgttggtttctagggaagggaggaggctaaataattgatacggaattttcctcttttgtcttcttttttctcacttaagaatccgatactggaagactgatttagaaaagtttttaacatgacattaaatgtgaaattttaaaaattgaaaagccataaatcatctgttttaaatagttacatgagaaaatgatcactagaataacctaattagaagtgttatcttcattaaatgttttttgtaagtggtattagaaagaatatgtttttcagatggttctttaaacatgtagtgagaacaataagcattattcacttttagtaagtcttctgtaatccatgatataaaataattttaaaatgattttttaatgtatttgagtaaagatgagtagtattaagaaaaacacacatttcttcacaaaatgtgctaaggggcgtgtaaagaatcaaaagaaactattaccaataatagttttgataatcacccataattttgtgtttaaacattgaaattatagtacagacagtattctctgtgttctgtgaatttcagcagcttcagaatagagtttaatttagaaatttgcagtgaaaaaagctatctctttgttcacaaccataaatcaggagatggagattaattctattggctcttagtcacttggaactgattaattctgactttctgtcactaagcacttggtatttggccatctccattctgagcaccaaacggttaacacgaatgtccactagaactctgctgtgtgtcacccttaaatcagtctaaatcttccagacaaaagcaaatggcatttatggatttaagtcattagattttcaactgacattaattaatccctcttgattgattatatcatcaagtatttatatcttaaataggaggtaggatttctgtgttaagactcttatttgtaccctataattaaagtaaaatgttttttatgagtatcccttgttttcccttcttaaattgttatcaaacaatttttataatgaaatctatcttggaaaattagaaagaaaaatggcaaggtatttattgttctgtttgccataatttagaactcacacttaagtattttgtagttttacattcctttttaacccattcagtggagaatgtcagcttttctcccaagttgtatgttaagtctattctaatatgtactcaacatcaagttataaacatgtaataaacatggaaataaagtttagctctatta

SEQ ID NO: 430811 - DNA, 3276 bp, Homo sapiens
ggctgcaggaattggcacgagcatcaatattgtcccttgaaaataatctccattctcttccaaattaaggtttggtttggttttgttttgttttaatcttctagattgtagaaggcatgaaacaaaaaatgtggagtattgaaaatattgccttcggttctggtggaggtttgctacagaagttgacaagagatctcttgaattgttccttcaagtgtagctatgttgtaactaatggccttgggattaacgtcttcaaggacccagttgctgatcccaacaaaaggtccaaaaagggccgattatctttacataggacgccagcagggaattttgttacactggaggaaggaaaaggagaccttgaggaatatggtcaggatcttctccatactgtcttcaagaatggcaaggtgacaaaaagctattcatttgatgaaataagaaaaaatgcacagctgaatattgaactggaagcagcacatcattaggctttatgactgggtgtgtgttgtgtgtatgtaatacataatgtttattgtacagatgtgtggggtttgtgttttatgatacattacagccaaattatttgttggtttatggacatactgccctttcattttttttcttttccagtgtttaggtgatctcaaattaggaaatgcatttaaccatgtaaaagatgagtgctaaagtaagctttttagggccctttgccaataggtagtcattcaatctggtattgatcttttcacaaataacagaactgagaaacttttatatataactgatgatcacataaaacagatttgcataaaattaccatgattgctttatgtttatatttaacttgtatttttgtacaaacaagattgtgtaagatatatttgaagtttcagtgatttaacagtctttccaacttttcatgatttttatgagcacagactttcaagaaaatacttgaaaataaattacattgccttttgtccattaatcagcaaataaaacatggccttaacaaagttgtttgtgttattgtacaatttgaaaattatgtcgggacataccctatagaattactaaccttactgccccttgtagaatatgtattaatcattctacattaaagaaaataatggttcttactggaatgtctaggcactgtacagttattatatatcttggttgttgtattgtaccagtgaaatgccaaatttgaaaggcctgtactgcaattttatatgtcagagattgcctgtggctctaatatgcacctcaagattttaaggagataatgtttttagagagaatttctgcttccactatagaatatatacataaatgtaaaatacttacaaaagtggaagtagtgtattttaaagtaattacacttctgaatttatttttcatattctatagttggtatgacttaaatgaattactggagtgggtagtgagtgtacttaaatgtttcaattctgttatattttttattaagtttttaaaaaattaaattggatattaaattgtatggacatcatttattaattttaaactgaatgccctcaataagtaatactgaagcacattcttaaatgaagataaattatctccaatgaaaagcatgacatgtgtttcaatagaagaatcttaagttggctaaattcaaagtgcttgacatcaaaatgttctagagtgattagctactagattctgaatcagacatcacatctgactagagaccagtttctttcgaatgattcttttatgtatgtagatctgttcttctgaggcagcggttggccaactatagcccaaaggccaaatttggacttctttttataaatgcagattgtctatggctgctttcccactactccagcctaaggtaaacagctgcaatagaagccaaatgagaatcgcaaagcccaaaatgtttattaacctgccctttacacaaaatcacacaaaaagtttcctgatctctgttctaagaaaaggagtgtgccttgcatttaaaaggaaatgttggtttctagggaagggaggaggctaaataattgatacggaattttcctcttttgtcttcttttttctcacttaagaatccgatactggaagactgatttagaaaagtttttaacatgacattaaatgtgaaattttaaaaattgaaaagccataaatcatctgttttaaatagttacatgagaaaatgatcactagaataacctaattagaagtgttatcttcattaaatgttttttgtaagtggtattagaaagaatatgtttttcagatggttctttaaacatgtagtgagaacaataagcattattcacttttagtaagtcttctgtaatccatgatataaaataattttaaaatgattttttaatgtatttgagtaaagatgagtagtattaagaaaaacacacatttcttcacaaaatgtgctaaggggcgtgtaaagaatcaaaagaaactattaccaataatagttttgataatcacccataattttgtgtttaaacattgaaattatagtacagacagtattctctgtgttctgtgaatttcagcagcttcagaatagagtttaatttagaaatttgcagtgaaaaaagctatctctttgttcacaaccataaatcaggagatggagattaattctattggctcttagtcacttggaactgattaattctgactttctgtcactaagcacttggtatttggccatctccattctgagcaccaaacggttaacacgaatgtccactagaactctgctgtgtgtcacccttaaatcagtctaaatcttccagacaaaagcaaatggcatttatggatttaagtcattagattttcaactgacattaattaatccctcttgattgattatatcatcaagtatttatatcttaaataggaggtaggatttctgtgttaagactcttatttgtaccctataattaaagtaaaatgttttttatgagtatcccttgttttcccttcttaaattgttatcaaacaatttttataatgaaatctatcttggaaaattagaaagaaaaatggcaaggtatttattgttctgtttgccataatttagaactcacacttaagtattttgtagttttacattcctttttaacccattcagtggagaatgtcagcttttctcccaagttgtatgttaagtctattctaatatgtactcaacatcaagttataaacatgtaataaacatggaaataaagtttagctctatta

SEQ ID NO: 430812 - DNA, 553 bp, Homo sapiens
ctattacagtattaaacccttaatattatctacagggtagattcttttacctccattttacaaaccaggaaagtaaagaggctatataacttgcctacagccattagtgatggggctgggatttgaatccagtaaatctgatttgaggtgtctttgacaagctcaggcttgcagaggtggtttggggtgctcaaaattcccatcagccccagttgatttggtgttacatacaatcttacgtaagtactatgccaatacaccttcataaccaacccccagcctccccttccaagcgcatttgtaccactgagttctatatacagaagttgtagatctgtcactaccagactgtaacttaaatacaccatacagaatggagagcagtgttggactcacagttagtgttagttattattagtattgatactagtgttggtactattgctggttgacatgtgacagtacttagtaaactgcataaattgtgaggatcactattatcactcttattactagtaattgcaataaagttcagtggaagcaacaagagata

SEQ ID NO: 430813 - DNA, 348 bp, Homo sapiens
atcctcccgcctcagcctcccaaagtgctgggattacaggcatgacccaccgtgaccggcctattacagtattaaacccttaatattatctacagggtagattcttttacctccattttacaaaccaggaaagtaaagaggctatataacttgcctacagccattagtgatggggctgggatttgaatccagtaaatctgatttgaggtgtctttgacaagctcaggcttgcagaggtggtttggggtgctcaaaattcccatcagccccagttgatttggtgttacatacaatcttacgtaagtactatgccaatacaccttcataaccaacccccagcctcccctt

SEQ ID NO: 430814 - DNA, 405 bp, Homo sapiens
gatttgaggtgtctttgacaagctcaggcttgcagaggtggtttggggtgctcaaaattcccatcagccccagttgatttggtgttacatacaatcttacgtaagtactatgccaatacaccttcataaccaacccccagcctccccttccaagcgcatttgtaccactgagttctatatacagaagttgtagatctgtcactaccagactgtaacttaaatacaccatacagaatggagagcagtgttggactcacagttagtgttagttattattagtattgatactagtgttggtactattgctggttgacatgtgacagtacttagtaaactgcataaattgtgaggatcactattatcactcttattactagtaattgcaataaagttcagtggaagcaa

SEQ ID NO: 430815 - DNA, 622 bp, Homo sapiens
ggctggaggcacgtgaccggggcctgaagccggaagctacctatctggtagggagctcccccagcaccgaagactgcgatgacttctgcgctgacccaggggctggagcgaatcccagaccagctcggctacctggtactgagtgaaggtgcagtgctggcgtcatctggggacctggagaatgatgagcaggcagccagtgccatctctgagctggtcagcacagcctgcggtttccggctgcaccgcggcatgaatgtgcccttcaagcgcctgtctgtggtctttggagaacacacactgctggtgacggtgtcaggacagagggtgtttgtggtgaagaggcagaaccgaggtcgggagcccattgatgtctgagcctgccggagggcgagggtcggagaagcggattgggtcctgggcctctgtgatgaggcaggcacacctgtcggtcttggcttgctgctagaactagggccttctgctcgcccacctcccacccctacctggacgggcccaggcttggggactctgagctgtgttaaggagaacaagggcaaggagacctccctttgtgctccctcactccctaataaacatgagtctgatgttctccagccca

SEQ ID NO: 430816 - DNA, 731 bp, Homo sapiens
gggcagaggggggccgggaagggacctggctggggaatgagaaaacctggggccatcgtcaacccagagacttgggtttgcaggtgaagggtatcgggccgtccatccctctagcatgcttctcacgacttgcatctttacccactagacttctgcgctgacccaggggctggagcgaatcccagaccagctcggctacctggtactgagtgaaggtgcagtgctggcgggcagcaagtgtgaagacagaaaaagatggagccattaacagtcatctggggacctggagaatgatgagcaggcagccagtgccatctctgagctggtcagcacagcctgcggtttccggctgcaccgcggcatgaatgtgcccttcaagcgcctgtctgtggtctttggagaacacacactgctggtgacggtgtcaggacagagggtgtttgtggtgaagaggcagaaccgaggtcgggagcccattgatgtctgagcctgccggagggcgagggtcggagaagcggattgggtcctgggcctctgtgatgaggcaggcacacctgtcggtcttggcttgctgctagaactagggccttctgctcgcccacctcccacccctacctggacgggcccaggcttggggactctgagctgtgttaaggagaacaagggcaaggagacctccctttgtgctccctcactccctaataaacatgagtctgatgttctccagccca

SEQ ID NO: 430817 - DNA, 970 bp, Homo sapiens
ggctggaggcacgtgaccggggcctgaagccggaagctacctatctggtagggagctcccccagcaccgaagactgcgatgacttctgcgctgacccaggggctggagcgaatcccagaccagctcggctacctggtactgagtgaaggtgcagtgctggcgtcatctggggacctggagaatgatgagcaggcagccagtgccatctctgagctggtcagcacagcctgcggtttccggctgcaccgcggcatgaatgtgcccttcaagcgcctgtctggtgagcccctgcccctgcccttggtggtggtactgggagcggggggctacttccaggggcttctcggcttctcttcttccagcctcctaccatctcctggggtctctggtctggccactttcctccctttgggactccctggtatcagaattgtgaatgagaaggcaagagaaaggagatctagcagaggccactcatcttcaaatctctgagcctggaactatagaacttctttggctttgatcccagccaatgtgcgtgtggccccgccccatggagtctgttgcacccactaactctgtgctcccttccctctcctggggcgggggaaggtgtgtctctcctccatggtctttggagaacacacactgctggtgacggtgtcaggacagagggtgtttgtggtgaagaggcagaaccgaggtcgggagcccattgatgtctgagcctgccggagggcgagggtcggagaagcggattgggtcctgggcctctgtgatgaggcaggcacacctgtcggtcttggcttgctgctagaactagggccttctgctcgcccacctcccacccctacctggacgggcccaggcttggggactctgagctgtgttaaggagaacaagggcaaggagacctccctttgtgctccctcactccctaataaacatgagtctgatgttctccagccca

SEQ ID NO: 430818 - DNA, 742 bp, Homo sapiens
gtctgcaagaatcttcagcgtttttgcgtgatctaaaccctcagggcatccgactgcccctgcctgtacctcattgtcaaactccacgaagcgaggtcatgccgcccgggtaccagacggacctccttgaagccagggaactgattgaaaagcatggacagcatgagctcgttggtctcctctggcaggttggcgatgacaacttctgcgctgacccaggggctggagcgaatcccagaccagctcggctacctggtactgagtgaaggtgcagtgctggcgtcatctggggacctggagaatgatgagcaggcagccagtgccatctctgagctggtcagcacagcctgcggtttccggctgcaccgcggcatgaatgtgcccttcaagcgcctgtctgtggtctttggagaacacacactgctggtgacggtgtcaggacagagggtgtttgtggtgaagaggcagaaccgaggtcgggagcccattgatgtctgagcctgccggagggcgagggtcggagaagcggattgggtcctgggcctctgtgatgaggcaggcacacctgtcggtcttggcttgctgctagaactagggccttctgctcgcccacctcccacccctacctggacgggcccaggcttggggactctgagctgtgttaaggagaacaagggcaaggagacctccctttgtgctccctcactccctaataaacatgagtctgatgttctccagccca

SEQ ID NO: 430819 - DNA, 541 bp, Homo sapiens
ggctggaggcacgtgaccggggcctgaagccggaagctacctatctggtagggagctcccccagcaccgaagactgcgatgtcatctggggacctggagaatgatgagcaggcagccagtgccatctctgagctggtcagcacagcctgcggtttccggctgcaccgcggcatgaatgtgcccttcaagcgcctgtctgtggtctttggagaacacacactgctggtgacggtgtcaggacagagggtgtttgtggtgaagaggcagaaccgaggtcgggagcccattgatgtctgagcctgccggagggcgagggtcggagaagcggattgggtcctgggcctctgtgatgaggcaggcacacctgtcggtcttggcttgctgctagaactagggccttctgctcgcccacctcccacccctacctggacgggcccaggcttggggactctgagctgtgttaaggagaacaagggcaaggagacctccctttgtgctccctcactccctaataaacatgagtctgatgttctccagccca

SEQ ID NO: 430820 - DNA, 647 bp, Homo sapiens
ggctggaggcacgtgaccggggcctgaagccggaagctacctatctggtagggagctcccccagcaccgaagactgcgatgacttctgcgctgacccaggggctggagcgaatcccagaccagctcggctacctggtactgagtgaaggtgcagtgctggcgtcatctggggacctggagaatgatgagcaggcagccagtgccatctctgagctggtcagcacagcctgcggtttccggctgcaccgcggcatgaatgtgcccttcaagcgcctgtctgtggtctttggagaacacacactgctggtgacggtgtcaggacagagggtgtttgtggtgaagaggcagaaccgaggtcgggagcccattgatgtctgagcctgccggagggcgagggtcggagaagcggattgggtcctgggcctctgtgatgaggcaggcacacctgtcggtcttggcttgctgctagaactagggccttctgctcgcccacctcccacccctacctggacgggcccaggcttggggactctgagctgtgttaaggagaacaagggcaaggagacctccctttgtgctccctcactccctaataaacatgagtctgatgttctccagcccaaaacacgacacaaaatctcagcgct

SEQ ID NO: 430821 - DNA, 664 bp, Homo sapiens
  misc_feature (655)..(655): n is a, c, g, or t
ggctggaggcacgtgaccggggcctgaagccggaagctacctatctggtagggagctcccccagcaccgaagactgcgatgacttctgcgctgacccaggggctggagcgaatcccagaccagctcggctacctggtactgagtgaaggtgcagtgctggcgtcatctggggacctggagaatgatgagcaggcagccagtgccatctctgagctggtcagcacagcctgcggtttccggctgcaccgcggcatgaatgtgcccttcaagcgcctgtctgtggtctttggagaacacacactgctggtgacggtgtcaggacagagggtgtttgtggtgaagaggcagaaccgaggtcgggagcccattgatgtctgagcctgccggagggcgagggtcggagaagcggattgggtcctgggcctctgtgatgaggcaggcacacctgtcggtcttggcttgctgctagaactagggccttctgctcgcccacctcccacccctacctggacgggcccaggcttggggactctgagctgtgttaaggagaacaagggcaaggagacctccctttgtgctccctcactccctaataaacatgagtctgatgttctccagcccaaaaaaaaaacaacaaaaaacaaaaaaaaaaaanccccggggc

SEQ ID NO: 430822 - DNA, 766 bp, Homo sapiens
  misc_feature (31)..(31): n is a, c, g, or t
  misc_feature (40)..(40): n is a, c, g, or t
  misc_feature (46)..(46): n is a, c, g, or t
cgcgcccccccgagcccaaaaatacggctangtcgaggcngggtgntacttctgcgctgacccaggggctggagcgaatcccagaccagctcggctacctggtactgagtgaaggtgcagtgctggcgtcatctggggacctggagaatgatgagcaggcagccagtgccatctctgagctggtcagcacagcctgcggtttccggctgcaccgcggcatgaatgtgcccttcaagcgcctgtctgtggtctttggagaacacacactgctggtgacggtgtcaggacagagggtgtttgtggtgaagaggcagaaccgaggtcgggagcccattgatgtctgagcctgccggagggcgagggtcggagaagcggattgggtcctgggcctctgtgatgaggcaggcacacctgtcggtcttggcttgctgctagaactagggccttctgctcgcccacctcccacccctacctggacgggcccaggcttggggactctgagctgtgttaaggagaacaagggcaaggagacctccctttgtgctccctcactccctaataaacatgagtctgatgttctccagcccaaaaaaaaaaaacaaaaaaacaaaaaaacacaaccacacagcaaaaacagcacgagagagacaaaacaaagaaaaaacagccgggcgcattagtcgggggcacacaaaagagtacgggccagcgtcacaggtccacaccattttaacagagcacggcgcccaagggggaatatcggagg

SEQ ID NO: 430823 - DNA, 719 bp, Homo sapiens
gggcagaggggggccgggaagggacctggctggggaatgagaaaacctggggccatcgtcaacccagagacttgggtttgcaggtgaagggtatcgggccgtccatccctctagcatgcttctcacgacttgcatctttacccactagacttctgcgctgacccaggggctggagcgaatcccagaccagctcggctacctggtactgagtgaaggtgcagtgctggcgtcatctggggacctggagaatgatgagcaggcagccagtgccatctctgagctggtcagcacagcctgcggtttccggctgcaccgcggcatgaatgtgcccttcaagcgcctgtctgtggtctttggagaacacacactgctggtgacggtgtcaggacagagggtgtttgtggtgaagaggcagaaccgaggtcgggagcccattgatgtctgagcctgccggagggcgagggtcggagaagcggattgggtcctgggcctctgtgatgaggcaggcacacctgtcggtcttggcttgctgctagaactagggccttctgctcgcccacctcccacccctacctggacgggcccaggcttggggactctgagctgtgttaaggagaacaagggcaaggagacctccctttgtgctccctcactccctaataaacatgagtctgatgttctccagcccaaaagagaaagaaaagaaattctccagcgct

SEQ ID NO: 430824 - DNA, 270 bp, Homo sapiens
aaaccgcaggctgtgctgaccagctcagagatggcactggctgcctgctcatcattctccaggtcctgggcctctgtgatgaggcaggcacacctgtcggtcttggcttgctgctagaactagggccttctgctcgcccacctcccacccctacctggacgggcccaggcttggggactctgagctgtgttaaggagaacaagggcaaggagacctccctttgtgctccctcactccctaataaacatgagtctgatgttctccagccca

SEQ ID NO: 430825 - DNA, 607 bp, Homo sapiens
ggctggaggcacgtgaccggggcctgaagccggaagctacctatctggtagggagctcccccagcaccgaagactgcgatgacttctgcgctgacccaggggctggagcgaatcccagaccagctcggctacctggtactgagtgaaggtgcagtgctggcggtgcgttctgggaaagggagggggtcccttagtgcacacagcccggtaaccccttctaatattggcccttcttttctcggcttttatctggtttcctgcctggcatctattaggttggtacaaaagtatttgcagtttttgcaattactttcagtaatcagtctgtggaatcttattctcctaacggctgcgatttatttatttatagtttttgagactgagtttcgttcttgttgcccaagctggagtgcagtggtgcgacctcggctcactgcaacctccgcctccggggttcaagcgattctcctgcctcagcctcccgagtagctgggattataggcacgtgccaccatgctctgctaattttttgtatttttagtagaaacggggtttcaccgtgttggccaggctggtctcaaactcctgacctcaggtgatccagctg

SEQ ID NO: 430826 - DNA, 674 bp, Homo sapiens
gggcagaggggggccgggaagggacctggctggggaatgagaaaacctggggccatcgtcaacccagagacttgggtttgcaggtgaagggtatcgggccgtccatccctctagcatgcttctcacgacttgcatctttacccactagacttctgcgctgacccaggggctggagcgaatcccagaccagctcggctacctggtactgagtgaaggtgcagtgctggcggtgcgttctgggaaagggagggggtcccttagtgcacacagcccggtaaccccttctaatattggcccttcttttctcggcttttatctggtttcctgcctggcatctattaggttggtacaaaagtatttgcagtttttgcaattactttcagtaatcagtctgtggaatcttattctcctaacggctgcgatttatttatttatagtttttgagactgagtttcgttcttgttgcccaagctggagtgcagtggtgcgacctcggctcactgcaacctccgcctccggggttcaagcgattctcctgcctcagcctcccgagtagctgggattataggcacgtgccaccatgctctgctaattttttgtatttttagtagaaacggggtttcaccgtgttggccaggctggtctcaaactcctgacctcaggtgatccagctg

SEQ ID NO: 430827 - DNA, 921 bp, Homo sapiens
  misc_feature (373)..(373): n is a, c, g, or t
gggcagaggggggccgggaagggacctggctggggaatgagaaaacctggggccatcgtcaacccagagacttgggtttgcaggtgaagggtatcgggccgtccatccctctagcatgcttctcacgacttgcatctttacccactagacttctgcgctgacccaggggctggagcgaatcccagaccagctcggctacctggtactgagtgaaggtgcagtgctggcgtcatctggggacctggagaatgatgagcaggcagccagtgccatctctgagctggtcagcacagcctgcggtttccggctgcaccgcggcatgaatgtgcccttcaagcgcctgtctgtggtctttggagaacacacactgctngtgacgatgggcaaggtgaccaagtcgatggctggtgtggttaagtcgatggatgcgacattgaagaccatgaatctggagaagatttctgctttgatggacaaattcgagcaccagtttgagactctggacgtccagacgcagcaaatggaagacacgatgagcagcacgacgacgctcaccactccccagaaccaagtggatatgctgctccaggaaatggcagatgaggcgggcctcgacctcaacatggagctgccgcagggccagaccggctccgtgggcacgagcgtggcttcggcggagcaggatgaactgtctcagagactggcccgccttcgggatcaagtgtgacggcagaacccgctctgaggtttcctggccatagccaccctttgaaatgctctctgtgtgttagagagatactataccctagaaactctgaacacgccagaatgctgaaatggccttctacctttgggtttacagcccctccacactctgaaaaaaaaaaatgactagacagatacggaccaaagaaacagagg

SEQ ID NO: 430828 - DNA, 700 bp, Homo sapiens
ggctggaggcacgtgaccggggcctgaagccggaagctacctatctggtagggagctcccccagcaccgaagactgcgatggtgagtgaggacgcatgcgcgagaggacccgccgggggttcagcgtctctgctccccagtctgtgtggtttccccctgacttctgcgctgacccaggggctggagcgaatcccagaccagctcggctacctggtactgagtgaaggtgcagtgctggcgtcatctggggacctggagaatgatgagcaggcagccagtgccatctctgagctggtcagcacagcctgcggtttccggctgcaccgcggcatgaatgtgcccttcaagcgcctgtctgtggtctttggagaacacacactgctggtgacggtgtcaggacagagggtgtttgtggtgaagaggcagaaccgaggtcgggagcccattgatgtctgagcctgccggagggcgagggtcggagaagcggattgggtcctgggcctctgtgatgaggcaggcacacctgtcggtcttggcttgctgctagaactagggccttctgctcgcccacctcccacccctacctggacgggcccaggcttggggactctgagctgtgttaaggagaacaagggcaaggagacctccctttgtgctccctcactccctaataaacatgagtctgatgttctccagccca

SEQ ID NO: 430829 - DNA, 666 bp, Homo sapiens
ggctggaggcacgtgaccggggcctgaagccggaagctacctatctggtagggagctcccccagcaccgaagactgcgatgacttctgcgctgacccaggggctggagcgaatcccagaccagctcggctacctggtactgagtgaaggtgcagtgctggcgtcatctggggacctggagaatgatgagcaggcagccagtgccatctctgagctggtcagcacagcctgcggtttccggctgcaccgcggcatgaatgtgcccttcaagcgcctgtctgtggtctttggagaacacacactgctggtgacggtgtcaggacagagggtgtttgtggtgaagaggcagaaccgaggtcgggagcccattgatgtctgagcctgccggagggcgagggtcggagaagcggattgggtcctgggcctctgtgatgaggcaggcacacctgtcggtcttggcttgctgctagaactagggccttctgctcgcccacctcccacccctacctggacgggcccaggcttggggactctgagctgtgttaaggagaacaagggcaaggagacctccctttgtgctccctcactccctaataaacatgagtctgatgttctccagcccaaaaaaaaaacaaaccaaaccaccaatactaactaaacaaaaagg

SEQ ID NO: 430830 - DNA, 660 bp, Homo sapiens
ggctggaggcacgtgaccggggcctgaagccggaagctacctatctggtagggagctcccccagcaccgaagactgcgatgacttctgcgctgacccaggggctggagcgaatcccagaccagctcggctacctggtactgagtgaaggtgcagtgctggcgtcatctggggacctggagaatgatgagcaggcagccagtgccatctctgagctggtcagcacagcctgcggtttccggctgcaccgcggcatgaatgtgcccttcaagcgcctgtctgtggtctttggagaacacacactgctggtgacggtgtcaggacagagggtgtttgtggtgaagaggcagaaccgaggtcgggagcccattgatgtctgagcctgccggagggcgagggtcggagaagcggattgggtcctgggcctctgtgatgaggcaggcacacctgtcggtcttggcttgctgctagaactagggccttctgctcgcccacctcccacccctacctggacgggcccaggcttggggactctgagctgtgttaaggagaacaagggcaaggagacctccctttgtgctccctcactccctaataaacatgagtctgatgttctccagcccaaaaaaaacatctatcaatatatgacaacacacaaaaaa

SEQ ID NO: 430831 - DNA, 742 bp, Homo sapiens
  misc_feature (733)..(733): n is a, c, g, or t
ggctggaggcacgtgaccggggcctgaagccggaagctacctatctggtagggagctcccccagcaccgaagactgcgatggtgagtgaggacgcatgcgcgagaggacccgccgggggttcagcgtctctgctccccagtctgtgtggtttccccctgacttctgcgctgacccaggggctggagcgaatcccagaccagctcggctacctggtactgagtgaaggtgcagtgctggcgtcatctggggacctggagaatgatgagcaggcagccagtgccatctctgagctggtcagcacagcctgcggtttccggctgcaccgcggcatgaatgtgcccttcaagcgcctgtctgtggtctttggagaacacacactgctggtgacggtgtcaggacagagggtgtttgtggtgaagaggcagaaccgaggtcgggagcccattgatgtctgagcctgccggagggcgagggtcggagaagcggattgggtcctgggcctctgtgatgaggcaggcacacctgtcggtcttggcttgctgctagaactagggccttctgctcgcccacctcccacccctacctggacgggcccaggcttggggactctgagctgtgttaaggagaacaagggcaaggagacctccctttgtgctccctcactccctaataaacatgagtctgatgttctccagcccaaaaaaaaaacaacaaaaaacaaaaaaaaaaaanccccggggc

SEQ ID NO: 430832 - DNA, 854 bp, Homo sapiens
  misc_feature (306)..(306): n is a, c, g, or t
ggctggaggcacgtgaccggggcctgaagccggaagctacctatctggtagggagctcccccagcaccgaagactgcgatgacttctgcgctgacccaggggctggagcgaatcccagaccagctcggctacctggtactgagtgaaggtgcagtgctggcgtcatctggggacctggagaatgatgagcaggcagccagtgccatctctgagctggtcagcacagcctgcggtttccggctgcaccgcggcatgaatgtgcccttcaagcgcctgtctgtggtctttggagaacacacactgctngtgacgatgggcaaggtgaccaagtcgatggctggtgtggttaagtcgatggatgcgacattgaagaccatgaatctggagaagatttctgctttgatggacaaattcgagcaccagtttgagactctggacgtccagacgcagcaaatggaagacacgatgagcagcacgacgacgctcaccactccccagaaccaagtggatatgctgctccaggaaatggcagatgaggcgggcctcgacctcaacatggagctgccgcagggccagaccggctccgtgggcacgagcgtggcttcggcggagcaggatgaactgtctcagagactggcccgccttcgggatcaagtgtgacggcagaacccgctctgaggtttcctggccatagccaccctttgaaatgctctctgtgtgttagagagatactataccctagaaactctgaacacgccagaatgctgaaatggccttctacctttgggtttacagcccctccacactctgaaaaaaaaaaatgactagacagatacggaccaaagaaacagagg

SEQ ID NO: 430833 - DNA, 4414 bp, Homo sapiens
cagtgagaagacacccaatggaggctacaagcccaagctcaatacactcaagctctaccgcctgctccccatgcgggcagccaagcggccctacaagacctacagccagggagccccggaggctcccctttctccaaccctcaacacaccggcccctgtggcaatgccagccagcccgccgcctgggcctccacctgccccagagcctggccctccaccctctgtcatcacttttgcccacccagccccctctgtcattgtccatgggggcagtagcagtggtggaggggggagtgggacggccagcacaggagggtcccaagctgcctcggttatcacttacactgctcccccgaggccacccaagaaacgagaatacccacctcctccccctgagcctgcagccacacccaccagcccagccacagcagtcagcccagccaccgctgcagggccagccatggccaccaccacggaggaggccaagggccggaatccacgggctggaaggactctgacttacacagccaagccagtgggcgggattggtggaggtgggggtccccccacaggggctggccggggcccctctcagctgcaggctccacctccactgtgtcagatcactgtgcgaataggggaggaggccatcgtcaagcgccgcatctcagagactgacctgcgtcctggggagctgagcggagaggagatggaggagagtgaggaggacgaagaggaggaggacgaagaggaggaggaggaggatgaggaggaatcaaaggctggtggggaggaccagctctggaggccctactactcctacaagcctaagcgcaaggctggagctgctggaggtgccagtgtggggggcagtgggctgccccgaggccgccggccaccacgttggaggcagaagctggaacggaggagctgggaggaaaccccagcggccgagagcccagcgggacgtgcccgcacagagcggaggcaccgatgcggggactgtgcccagaccttcaccaccctgagaaagctgcggaagcaccaagaggcccacggtgggggctcccacagctcccgggccggacggaggccctccacccgctttacctgcccccactgcgccaaggtgtgcaagaccgcagctgccctgagccgccacgggcagaggcatgctgctgagcggcccgggggcaccccaacccctgtcattgcctattccaagggcagcgctggcaccaggcccggggatgtcaaggaggaagccccccaagagatgcaagtctcctcatccagcggtgaggcaggtggcgggagcactgctgctgaggaagcttccgagaccgcctcactccaggaccctatcatttcagggggtgaggagcccccagtagtggcaagcgggggcagctatgtatacccacctgtgcaggaatttccactggccttgattgggggcggccgggaacctggcggtggcaggggaaaatctgggagtgaagggccagtgggggctggtgagggggaccggatggaggggataggggctgccaaagtcactttctaccctgagccctacccgctcgtctatggcccccagctccttgccgcctacccttacaacttcagtaacttggccgctctcccggttgctctcaacatggtcctacctgatgagaagggtgcgggggcccttcccttcctaccaggggtctttggctacgcagtgaatcctcaagcagcaccccctgccccaccaacaccacctcccccaactcttcctccaccaattccccctaagggagaaggggaaagggcaggggttgagagaacccagaagggcgatgtggggtgaaccctggggctcaatccccctttcaccagatgccaccctccctgaaccccccaccactaccagctccctggcctccctgccccttgggagccccttcacactcttgtgcagggacttgggggcccctggagctcaggggtcaggctgctttgtgtgagatgtagttttcccatctcctgggaagggatctttcgaggttcccctctcagtcttcctccagggaatggcctccatgaggggcagggccagcttccatcccttctccagcccttggggcaactgagcaatatacttaacctgaatctctactcacagcccccaccagctctgaatgtctaacctgctcccctgattcgtaaacctaggggaaaccatctctctcacctaatgacccgccttgttctgaagctttctctaagcccttcccagttgcttcctagcacattccattctttgtggcccagggcctggaccagaccattgtgatacctgaccccgcccacctgggagtgtggctttgggtttcatccttccccagcgtgggtctctacgtccctgtttcccttgtatcaagacaccttcctcagcttccatgcctttggatcttccatgttcctccccatattcctggacttcggagatggcctctcccaagccaggtcaaggaggtttgggggagggttgcccctctgcccctctgttctgtggctgagcactttcccagtccagggcagggaaatattggccctatcttgacccccaaatccagtgagctccagattcttccaaggcaaaagaggtaagcagatcacacctctttctgcctctacatatggcctattctgggctagaccagatttgggggccaggagggaagaactccatatgggatggagaagggaatctactttctccctgtttttttttcctgatggtttctcccagactagaccaaatagccagaaaaatgataggggtcggatgggtgggtaagcccaggatttgcacatgaccttccatccttacctgtattcccatctccccagtgtcactcccctcaccaatcactccagatggttttgggggaaccattctactcttctggtgggctttggggtatccccaccaactttcccttcaaaatagcaccttacaccccatctttgactcagttccccacacccaaagatcccagcctagggatggggtacagggactttaaatagtccctaatccctaatttgcactagttaaccctggtcagggtccctgtatttccttccagtgggggagataaatgtttgctcctaattctctttgaaaactgggcctccctgctctgtgattggataaatatttcccatcccacccacctccccccaaaaaatagctcacaaggggagagccagtatgggggagcaaatttgacaaatgggaattagaggagtgcagttttaaaaggaaaagttgctgtcatcaaaatggcagccttttccccagctactgtttttggggccaagatggctgccctagcagcaatcactgccaagggcaagatcatggcttttggagggaggtgagtttagggagggccaggaccatcctcctacccctcataccctcccagcatatacaaaaggggaggttttagacaggctccctgaatgttaaccacagaggagtcactccttcattcctcctctgtctctttgcacttttcttggtcttggccacagcctgagtgacgaatttcctactgaatgtaccaagttccaatttttaagggggggaaaggtttcaaatggggaaaaacacacaaaaaaaaaatcactaaaaattcccacaaatcttgtttctggcactttagaaaaactgcaaaaaaatacgtaataaagaatacatatatatatatctacacacaaattatatatctatctatctatacagcggaaccacaagagagactgaggaaggcctggaggcaggggcagaggtgacgacagtgcccctatatccttaacccatactcctctgaggcaaacaggcatgggaaaatggaagggttgaggatggaccggagaattggaacttcagaataggtcaaaattccaaaaccatggacatttttttttgggagaattgagattgtagacattttttttttcttaaatatgatcaaggaaaatagcttccagaatgtggtggttctgggcaacaaatgagattgtggcgacgtggagattaaaatatatgtatttgagctggggaatttgaatattgtgagtttcagatgttggaaatttgggattttgcagttttgtcttttgaaaatgatcaagtcttgtcagttcgtgccctctttccccatgttccctgggaagacgggtggtggcagagtgagaaggccactggttctgtgccgcagcacgcaaaatttagaattctacagactagctctatacgtagtgaggacccagatttagagaaactgaccaatatttatctccgcatttgtgtgtgtgtccaactctgtaggccaataaaccaacaagacaaatg

SEQ ID NO: 430834 - DNA, 3771 bp, Homo sapiens
cagtgagaagacacccaatggaggctacaagcccaagctcaatacactcaagctctaccgcctgctccccatgcgggcagccaagcggccctacaagacctacagccagggagccccggaggctcccctttctccaaccctcaacacaccggcccctgtggcaatgccagccagcccgccgcctgggcctccacctgccccagagcctggccctccaccctctgtcatcacttttgcccacccagccccctctgtcattgtccatgggggcagtagcagtggtggaggggggagtgggacggccagcacaggagggtcccaagctgcctcggttatcacttacactgctcccccgaggccacccaagaaacgagaatacccacctcctccccctgagcctgcagccacacccaccagcccagccacagcagtcagcccagccaccgctgcagggccagccatggccaccaccacggaggaggccaagggccggaatccacgggctggaaggactctgacttacacagccaagccagtgggcgggattggtggaggtgggggtccccccacaggggctggccggggcccctctcagctgcaggctccacctccactgtgtcagatcactgtgcgaataggggaggaggccatcgtcaagcgccgcatctcagagactgacctgcgtcctggggagctgagcggagaggagatggaggagagtgaggaggacgaagaggaggaggacgaagaggaggaggaggaggatgaggaggaatcaaaggctggtggggaggaccagctctggaggccctactactcctacaagcctaagcgcaaggctggagctgctggaggtgccagtgtggggggcagtgggctgccccgaggccgccggccaccacgttggaggcagaagctggaacggaggagctgggaggaaaccccagcggccgagagcccagcgggacgtgcccgcacagagcggaggcaccgatgcggggactgtgcccagaccttcaccaccctgagaaagctgcggaagcaccaagaggcccacggtgggggctcccacagctcccgggccggacggaggccctccacccgctttacctgcccccactgcgccaaggtgtgcaagaccgcagctgccctgagccgccacgggcagaggcatgctgctgagcggcccgggggcaccccaacccctgtcattgcctattccaagggcagcgctggcaccaggcccggggatgtcaaggaggaagccccccaagagatgcaagtctcctcatccagcggtgaggcaggtggcgggagcactgctgctgaggaagcttccgagaccgcctcactccaggaccctatcatttcagggggtgaggagcccccagtagtggcaagcgggggcagctatgtatacccacctgtgcaggaatttccactggccttgattgggggcggccgggaacctggcggtggcaggggaaaatctgggagtgaagggccagtgggggctggtgagggggaccggatggaggggataggggctgccaaagtcactttctaccctgagccctacccgctcgtctatggcccccagctccttgccgcctacccttacaacttcagtaacttggccgctctcccggttgctctcaacatggtcctacctgatgagaagggtgcgggggcccttcccttcctaccaggggtctttggctacgcagtgaatcctcaagcagcaccccctgccccaccaacaccacctcccccaactcttcctccaccaattccccctaagggagaaggggaaagggcaggggttgagagaacccagaagggcgatgtggggtgaaccctggggctcaatccccctttcaccagatgccaccctccctgaaccccccaccactaccagctccctggcctccctgccccttgggagccccttcacactcttgtgcagggacttgggggcccctggagctcaggggtcaggctgctttgtgtgagatgtagttttcccatctcctgggaagggatctttcgaggttcccctctcagtcttcctccagggaatggcctccatgaggggcagggccagcttccatcccttctccagcccttggggcaactgagcaatatacttaacctgaatctctactcacagcccccaccagctctgaatgtctaacctgctcccctgattcgtaaacctaggggaaaccatctctctcacctaatgacccgccttgttctgaagctttctctaagcccttcccagttgcttcctagcacattccattctttgtggcccagggcctggaccagaccattgtgatacctgaccccgcccacctgggagtgtggctttgggtttcatccttccccagcgtgggtctctacgtccctgtttcccttgtatcaagacaccttcctcagcttccatgcctttggatcttccatgttcctccccatattcctggacttcggagatggcctctcccaagccaggtcaaggaggtttgggggagggttgcccctctgcccctctgttctgtggctgagcactttcccagtccagggcagggaaatattggccctatcttgacccccaaatccagtgagctccagattcttccaaggcaaaagaggtaagcagatcacacctctttctgcctctacatatggcctattctgggctagaccagatttgggggccaggagggaagaactccatatgggatggagaagggaatctactttctccctgtttttttttcctgatggtttctcccagactagaccaaatagccagaaaaatgataggggtcggatgggtgggtaagcccaggatttgcacatgaccttccatccttacctgtattcccatctccccagtgtcactcccctcaccaatcactccagatggttttgggggaaccattctactcttctggtgggctttggggtatccccaccaactttcccttcaaaatagcaccttacaccccatctttgactcagttccccacacccaaagatcccagcctagggatggggtacagggactttaaatagtccctaatccctaatttgcactagttaaccctggtcagggtccctgtatttccttccagtgggggagataaatgtttgctcctaattctctttgaaaactgggcctccctgctctgtgattggataaatatttcccatcccacccacctccccccaaaaaatagctcacaaggggagagccagtatgggggagcaaatttgacaaatgggaattagaggagtgcagttttaaaaggaaaagttgctgtcatcaaaatggcagccttttccccagctactgtttttggggccaagatggctgccctagcagcaatcactgccaagggcaagatcatggcttttggagggaggtgagtttagggagggccaggaccatcctcctacccctcataccctcccagcatatacaaaaggggaggttttagacaggctccctgaatgttaaccacagaggagtcactccttcattcctcctctgtctctttgcacttttcttggtcttggccacagcctgagtgacgaatttcctactgaatgtaccaagttccaatttttaagggggggaaaggtttcaaatggggaaaaacacacaaaaaaaaaatcactaaaaattcccacaaatcttgtttctggcactttagaaaaactgcaaaaaaatacgtaataaagaatacatatatatatatctac

SEQ ID NO: 430835 - DNA, 2276 bp, Homo sapiens
cagtgagaagacacccaatggaggctacaagcccaagctcaatacactcaagctctaccgcctgctccccatgcgggcagccaagcggccctacaagacctacagccagggagccccggaggctcccctttctccaaccctcaacacaccggcccctgtggcaatgccagccagcccgccgcctgggcctccacctgccccagagcctggccctccaccctctgtcatcacttttgcccacccagccccctctgtcattgtccatgggggcagtagcagtggtggaggggggagtgggacggccagcacaggagggtcccaagctgcctcggttatcacttacactgctcccccgaggccacccaagaaacgagaatacccacctcctccccctgagcctgcagccacacccaccagcccagccacagcagtcagcccagccaccgctgcagggccagccatggccaccaccacggaggaggccaagggccggaatccacgggctggaaggactctgacttacacagccaagccagtgggcgggattggtggaggtgggggtccccccacaggggctggccggggcccctctcagctgcaggctccacctccactgtgtcagatcactgtgcgaataggggaggaggccatcgtcaagcgccgcatctcagagactgacctgcgtcctggggagctgagcggagaggagatggaggagagtgaggaggacgaagaggaggaggacgaagaggaggaggaggaggatgaggaggaatcaaaggctggtggggaggaccagctctggaggccctactactcctacaagcctaagcgcaaggctggagctgctggaggtgccagtgtggggggcagtgggctgccccgaggccgccggccaccacgttggaggcagaagctggaacggaggagctgggaggaaaccccagcggccgagagcccagcgggacgtgcccgcacagagcggaggcaccgatgcggggactgtgcccagaccttcaccaccctgagaaagctgcggaagcaccaagaggcccacggtgggggctcccacagctcccgggccggacggaggccctccacccgctttacctgcccccactgcgccaaggtgtgcaagaccgcagctgccctgagccgccacgggcagaggcatgctgctgagcggcccgggggcaccccaacccctgtcattgcctattccaagggcagcgctggcaccaggcccggggatgtcaaggaggaagccccccaagagatgcaagtctcctcatccagcggtgaggcaggtggcgggagcactgctgctgaggaagcttccgagaccgcctcactccaggaccctatcatttcagggggtgaggagcccccagtagtggcaagcgggggcagctatgtatacccacctgtgcaggaatttccactggccttgattgggggcggccgggaacctggcggtggcaggggaaaatctgggagtgaagggccagtgggggctggtgagggggaccggatggaggggataggggctgccaaagtcactttctaccctgagccctacccgctcgtctatggcccccagctccttgccgcctacccttacaacttcagtaacttggccgctctcccggttgctctcaacatggtcctacctgatgagaagggtgcgggggcccttcccttcctaccaggggtctttggctacgcagtgaatcctcaagcagcaccccctgccccaccaacaccacctcccccaactcttcctccaccaattccccctaagggagaaggggaaagggcaggggttgagagaacccagaagggcgatgtggggtgaaccctggggctcaatccccctttcaccagatgccaccctccctgaaccccccaccactaccagctccctggcctccctgccccttgggagccccttcacactcttgtgcagggacttgggggcccctggagctcaggggtcaggctgctttgtgtgagatgtagttttcccatctcctgggaagggatctttcgaggttcccctctcagtcttcctccagggaatggcctccatgaggggcagggccagcttccatcccttctccagcccttggggcaactgagcaatatacttaacctgaatctctactcacagcccccaccagctctgaatgtctaacctgctcccctgattcgtaaacctaggggaaaccatctctctcacctaatgacccgcacaccagcaaagaacaagatcctct

SEQ ID NO: 430836 - DNA, 2225 bp, Homo sapiens
cagtgagaagacacccaatggaggctacaagcccaagctcaatacactcaagctctaccgcctgctccccatgcgggcagccaagcggccctacaagacctacagccagggagccccggaggctcccctttctccaaccctcaacacaccggcccctgtggcaatgccagccagcccgccgcctgggcctccacctgccccagagcctggccctccaccctctgtcatcacttttgcccacccagccccctctgtcattgtccatgggggcagtagcagtggtggaggggggagtgggacggccagcacaggagggtcccaagctgcctcggttatcacttacactgctcccccgaggccacccaagaaacgagaatacccacctcctccccctgagcctgcagccacacccaccagcccagccacagcagtcagcccagccaccgctgcagggccagccatggccaccaccacggaggaggccaagggccggaatccacgggctggaaggactctgacttacacagccaagccagtgggcgggattggtggaggtgggggtccccccacaggggctggccggggcccctctcagctgcaggctccacctccactgtgtcagatcactgtgcgaataggggaggaggccatcgtcaagcgccgcatctcagagactgacctgcgtcctggggagctgagcggagaggagatggaggagagtgaggaggacgaagaggaggaggacgaagaggaggaggaggaggatgaggaggaatcaaaggctggtggggaggaccagctctggaggccctactactcctacaagcctaagcgcaaggctggagctgctggaggtgccagtgtggggggcagtgggctgccccgaggccgccggccaccacgttggaggcagaagctggaacggaggagctgggaggaaaccccagcggccgagagcccagcgggacgtgcccgcacagagcggaggcaccgatgcggggactgtgcccagaccttcaccaccctgagaaagctgcggaagcaccaagaggcccacggtgggggctcccacagctcccgggccggacggaggccctccacccgctttacctgcccccactgcgccaaggtgtgcaagaccgcagctgccctgagccgccacgggcagaggcatgctgctgagcggcccgggggcaccccaacccctgtcattgcctattccaagggcagcgctggcaccaggcccggggatgtcaaggaggaagccccccaagagatgcaagtctcctcatccagcggtgaggcaggtggcgggagcactgctgctgaggaagcttccgagaccgcctcactccaggaccctatcatttcagggggtgaggagcccccagtagtggcaagcgggggcagctatgtatacccacctgtgcaggaatttccactggccttgattgggggcggccgggaacctggcggtggcaggggaaaatctgggagtgaagggccagtgggggctggtgagggggaccggatggaggggataggggctgccaaagtcactttctaccctgagccctacccgctcgtctatggcccccagctccttgccgcctacccttacaacttcagtaacttggccgctctcccggttgctctcaacatggtcctacctgatgagaagggtgcgggggcccttcccttcctaccaggggtctttggctacgcagtgaatcctcaagcagcaccccctgccccaccaacaccacctcccccaactcttcctccaccaattccccctaagggagaaggggaaagggcaggggttgagagaacccagaagggcgatgtggggtgaaccctggggctcaatccccctttcaccagatgccaccctccctgaaccccccaccactaccagctccctggcctccctgccccttgggagccccttcacactcttgtgcagggacttgggggcccctggagctcaggggtcaggctgctttgtgtgagatgtagttttcccatttgcttcctagcacattccattctttgtggcagagtgagaaggccactggttctgtgccgcagcacgcaaaatttagaattctacagactagctctatacgtagtgaggacccagatttagagaaactgaccaatatttatctccgcatttgtgtgtgtgtccaactctgtaggccaataaaccaacaagacaaatg

SEQ ID NO: 430837 - DNA, 342 bp, Homo sapiens
  misc_feature (11)..(11): n is a, c, g, or t
  misc_feature (94)..(94): n is a, c, g, or t
gataaatattnggtcagtttctctaaatctgggtcctcactacgtatagagctagtctgtagaattctaaattttgcgtgctgcggcacagaanccagtggccttctcactctgccaccacccgtcttcccagggaacatggggaaagagggcacgaactgacaagacttgatcattttcaaaagacaaaactgcaaaatcccaaatttccaacatctgaaactcacaatattcaaattccccagctcaaatacatatattttaatctccacgtcgccacaatctcatttgttgcccagaaccaccacattctggaagctagagattgttagcgcgtgctgt

SEQ ID NO: 430838 - DNA, 4434 bp, Homo sapiens
cagtgagaagacacccaatggaggctacaagcccaagctcaatacactcaagctctaccgcctgctccccatgcgggcagccaagcggccctacaagacctacagccagggagccccggaggctcccctttctccaaccctcaacacaccggcccctgtggcaatgccagccagcccgccgcctgggcctccacctgccccagagcctggccctccaccctctgtcatcacttttgcccacccagccccctctgtcattgtccatgggggcagtagcagtggtggaggggggagtgggacggccagcacaggagggtcccaagctgcctcggttatcacttacactgctcccccgaggccacccaagaaacgagaatacccacctcctccccctgagcctgcagccacacccaccagcccagccacagcagtcagcccagccaccgctgcagggccagccatggccaccaccacggaggaggccaagggccggaatccacgggctggaaggactctgacttacacagccaagccagtgggcgggattggtggaggtgggggtccccccacaggggctggccggggcccctctcagctgcaggctccacctccactgtgtcagatcactgtgcgaataggggaggaggccatcgtcaagcgccgcatctcagagactgacctgcgtcctggggagctgagcggagaggagatggaggagagtgaggaggacgaagaggaggaggacgaagaggaggaggaggaggatgaggaggaatcaaaggctggtggggaggaccagctctggaggccctactactcctacaagcctaagcgcaaggctggagctgctggaggtgccagtgtggggggcagtgggctgccccgaggccgccggccaccacgttggaggcagaagctggaacggaggagctgggaggaaaccccagcggccgagagcccagcgggacgtgcccgcacagagcggaggcaccgatgcggggactgtgcccagaccttcaccaccctgagaaagctgcggaagcaccaagaggcccacggtgggggctcccacagctcccgggccggacggaggccctccacccgctttacctgcccccactgcgccaaggtgtgcaagaccgcagctgccctgagccgccacgggcagaggcatgctgctgagcggcccgggggcaccccaacccctgtcattgcctattccaagggcagcgctggcaccaggcccggggatgtcaaggaggaagccccccaagagatgcaagtctcctcatccagcggtgaggcaggtggcgggagcactgctgctgaggaagcttccgagaccgcctcactccaggaccctatcatttcagggggtgaggagcccccagtagtggcaagcgggggcagctatgtatacccacctgtgcaggaatttccactggccttgattgggggcggccgggaacctggcggtggcaggggaaaatctgggagtgaagggccagtgggggctggtgagggggaccggatggaggggataggggctgccaaagtcactttctaccctgagccctacccgctcgtctatggcccccagctccttgccgcctacccttacaacttcagtaacttggccgctctcccggttgctctcaacatggtcctacctgatgagaagggtgcgggggcccttcccttcctaccaggggtctttggctacgcagtgaatcctcaagcagcaccccctgccccaccaacaccacctcccccaactcttcctccaccaattccccctaagggagaaggggaaagggcaggggttgagagaacccagaagggcgatgtggggtgaaccctggggctcaatccccctttcaccagatgccaccctccctgaaccccccaccactaccagctccctggcctccctgccccttgggagccccttcacactcttgtgcagggacttgggggcccctggagctcaggggtcaggctgctttgtgtgagatgtagttttcccatctcctgggaagggatctttcgaggttcccctctcagtcttcctccagggaatggcctccatgaggggcagggccagcttccatcccttctccagcccttggggcaactgagcaatatacttaacctgaatctctactcacagcccccaccagctctgaatgtctaacctgctcccctgattcgtaaacctaggggaaaccatctctctcacctaatgacccgccttgttctgaagctttctctaagcccttcccagttgcttcctagcacattccattctttgtggcccagggcctggaccagaccattgtgatacctgaccccgcccacctgggagtgtggctttgggtttcatccttccccagcgtgggtctctacgtccctgtttcccttgtatcaagacaccttcctcagcttccatgcctttggatcttccatgttcctccccatattcctggacttcggagatggcctctcccaagccaggtcaaggaggtttgggggagggttgcccctctgcccctctgttctgtggctgagcactttcccagtccagggcagggaaatattggccctatcttgacccccaaatccagtgagctccagattcttccaaggcaaaagaggtaagcagatcacacctctttctgcctctacatatggcctattctgggctagaccagatttgggggccaggagggaagaactccatatgggatggagaagggaatctactttctccctgtttttttttcctgatggtttctcccagactagaccaaatagccagaaaaatgataggggtcggatgggtgggtaagcccaggatttgcacatgaccttccatccttacctgtattcccatctccccagtgtcactcccctcaccaatcactccagatggttttgggggaaccattctactcttctggtgggctttggggtatccccaccaactttcccttcaaaatagcaccttacaccccatctttgactcagttccccacacccaaagatcccagcctagggatggggtacagggactttaaatagtccctaatccctaatttgcactagttaaccctggtcagggtccctgtatttccttccagtgggggagataaatgtttgctcctaattctctttgaaaactgggcctccctgctctgtgattggataaatatttcccatcccacccacctccccccaaaaaatagctcacaaggggagagccagtatgggggagcaaatttgacaaatgggaattagaggagtgcagttttaaaaggaaaagttgctgtcatcaaaatggcagccttttccccagctactgtttttggggccaagatggctgccctagcagcaatcactgccaagggcaagatcatggcttttggagggaggtgagtttagggagggccaggaccatcctcctacccctcataccctcccagcatatacaaaaggggaggttttagacaggctccctgaatgttaaccacagaggagtcactccttcattcctcctctgtctctttgcacttttcttggtcttggccacagcctgagtgacgaatttcctactgaatgtaccaagttccaatttttaagggggggaaaggtttcaaatggggaaaaacacacaaaaaaaaaatcactaaaaattcccacaaatcttgtttctggcactttagaaaaactgcaaaaaaatacgtaataaagaatacatatatatatatctacacacaaattatatatctatctatctatacagcggaaccacaagagagactgaggaaggcctggaggcaggggcagaggtgacgacagtgcccctatatccttaacccatactcctctgaggcaaacaggcatgggaaaatggaagggttgaggatggaccggagaattggaacttcagaataggtcaaaattccaaaaccatggacatttttttttgggagaattgagattgtagacattttttttttcttaaatatgatcaaggaaaatagcttccagaatgtggtggttctgggcaacaaatgagattgtggcgacgtggagattaaaatatatgtatttgagctggggaatttgaatattgtgagtttcagatgttggaaatttgggattttgcagttttgtcttttgaaaatgatcaagtcttgtcagttcgtgccctctttccccatgttccctgggaagacgggtggtggcagagtgagaaggccactggttctgtgccgcagcacgcaaaatttagaattctacagactagctctatacgtagtgaggacccagatttagagaaactgaccaatatttatctccgcatttgtgtgtgtgtccaactctgtaggccaataaaccaacaagacaaatgaactgtgctccacaaaaaaa

SEQ ID NO: 430839 - DNA, 4710 bp, Homo sapiens
cagtgagaagacacccaatggaggctacaagcccaagctcaatacactcaagctctaccgcctgctccccatgcgggcagccaagcggccctacaagacctacagccagggagccccggaggctcccctttctccaaccctcaacacaccggcccctgtggcaatgccagccagcccgccgcctgggcctccacctgccccagagcctggccctccaccctctgtcatcacttttgcccacccagccccctctgtcattgtccatgggggcagtagcagtggtggaggggggagtgggacggccagcacaggagggtcccaagctgcctcggttatcacttacactgctcccccgaggccacccaagaaacgagaatacccacctcctccccctgagcctgcagccacacccaccagcccagccacagcagtcagcccagccaccgctgcagggccagccatggccaccaccacggaggaggccaagggccggaatccacgggctggaaggactctgacttacacagccaagccagtgggcgggattggtggaggtgggggtccccccacaggggctggccggggcccctctcagctgcaggctccacctccactgtgtcagatcactgtgcgaataggggaggaggccatcgtcaagcgccgcatctcagagactgacctgcgtcctggggagctgagcggagaggagatggaggagagtgaggaggacgaagaggaggaggacgaagaggaggaggaggaggatgaggaggaatcaaaggctggtggggaggaccagctctggaggccctactactcctacaagcctaagcgcaaggctggagctgctggaggtgccagtgtggggggcagtgggctgccccgaggccgccggccaccacgttggaggcagaagctggaacggaggagctgggaggaaaccccagcggccgagagcccagcgggacgtgcccgcacagagcggaggcaccgatgcggggactgtgcccagaccttcaccaccctgagaaagctgcggaagcaccaagaggcccacggtgggggctcccacagctcccgggccggacggaggccctccacccgctttacctgcccccactgcgccaaggtgtgcaagaccgcagctgccctgagccgccacgggcagaggcatgctgctgagcggcccgggggcaccccaacccctgtcattgcctattccaagggcagcgctggcaccaggcccggggatgtcaaggaggaagccccccaagagatgcaagtctcctcatccagcggtgaggcaggtggcgggagcactgctgctgaggaagcttccgagaccgcctcactccaggaccctatcatttcagggggtgaggagcccccagtagtggcaagcgggggcagctatgtatacccacctgtgcaggaatttccactggccttgattgggggcggccgggaacctggcggtggcaggggaaaatctgggagtgaagggccagtgggggctggtgagggggaccggatggaggggataggggctgccaaagtcactttctaccctgagccctacccgctcgtctatggcccccagctccttgccgcctacccttacaacttcagtaacttggccgctctcccggttgctctcaacatggtcctacctgatgagaagggtgcgggggcccttcccttcctaccaggggtctttggctacgcagtgaatcctcaagcagcaccccctgccccaccaacaccacctcccccaactcttcctccaccaattccccctaagggagaaggggaaagggcaggggttgagagaacccagaagggcgatgtggggtgaaccctggggctcaatccccctttcaccagatgccaccctccctgaaccccccaccactaccagctccctggcctccctgccccttgggagccccttcacactcttgtgcagggacttgggggcccctggagctcaggggtcaggctgctttgtgtgagatgtagttttcccatctcctgggaagggatctttcgaggttcccctctcagtcttcctccagggaatggcctccatgaggggcagggccagcttccatcccttctccagcccttggggcaactgagcaatatacttaacctgaatctctactcacagcccccaccagctctgaatgtctaacctgctcccctgattcgtaaacctaggggaaaccatctctctcacctaatgacccgccttgttctgaagctttctctaagcccttcccagttgcttcctagcacattccattctttgtggcccagggcctggaccagaccattgtgatacctgaccccgcccacctgggagtgtggctttgggtttcatccttccccagcgtgggtctctacgtccctgtttcccttgtatcaagacaccttcctcagcttccatgcctttggatcttccatgttcctccccatattcctggacttcggagatggcctctcccaagccaggtcaaggaggtttgggggagggttgcccctctgcccctctgttctgtggctgagcactttcccagtccagggcagggaaatattggccctatcttgacccccaaatccagtgagctccagattcttccaaggcaaaagaggtaagcagatcacacctctttctgcctctacatatggcctattctgggctagaccagatttgggggccaggagggaagaactccatatgggatggagaagggaatctactttctccctgtttttttttcctgatggtttctcccagactagaccaaatagccagaaaaatgataggggtcggatgggtgggtaagcccaggatttgcacatgaccttccatccttacctgtattcccatctccccagtgtcactcccctcaccaatcactccagatggttttgggggaaccattctactcttctggtgggctttggggtatccccaccaactttcccttcaaaatagcaccttacaccccatctttgactcagttccccacacccaaagatcccagcctagggatggggtacagggactttaaatagtccctaatccctaatttgcactagttaaccctggtcagggtccctgtatttccttccagtgggggagataaatgtttgctcctaattctctttgaaaactgggcctccctgctctgtgattggataaatatttcccatcccacccacctccccccaaaaaatagctcacaaggggagagccagtatgggggagcaaatttgacaaatgggaattagaggagtgcagttttaaaaggaaaagttgctgtcatcaaaatggcagccttttccccagctactgtttttggggccaagatggctgccctagcagcaatcactgccaagggcaagatcatggcttttggagggaggtgagtttagggagggccaggaccatcctcctacccctcataccctcccagcatatacaaaaggggaggttttagacaggctccctgaatgttaaccacagaggagtcactccttcattcctcctctgtctctttgcacttttcttggtcttggccacagcctgagtgacgaatttcctactgaatgtaccaagttccaatttttaagggggggaaaggtttcaaatggggaaaaacacacaaaaaaaaaatcactaaaaattcccacaaatcttgtttctggcactttagaaaaactgcaaaaaaatacgtaataaagaatacatatatatatatctacacacaaattatatatctatctatctatacagcggaaccacaagagagactgaggaaggcctggaggcaggggcagaggtgacgacagtgcccctatatccttaacccatactcctctgaggcaaacaggcatgggaaaatggaagggttgaggatggaccggagaattggaacttcagaataggtcaaaattccaaaaccatggacatttttttttgggagaattgagattgtagacattttttttttcttaaatatgatcaaggaaaatagcttccagaatgtggtggttctgggcaacaaatgagattgtggcgacgtggagattaaaatatatgtatttgagctggggaatttgaatattgtgagtttcagatgttggaaatttgggattttgcagttttgtcttttgaaaatgatcaagtcttgtcagttcgtgccctctttccccatgttccctgggaagacgggtggtggcagagtgagaaggccactggttctgtgccgcagcacgcaaaatttagaattctacagactagctctatacgtagtgaggacccagatttagagaaactgaccaatatttatctccgcatttgtgtgtgtgtccaactctgtaggccaataaaccaacaagacaaatgttataagtcaaaaaattgcctttgtcctttaaaaaggtctttttttgacatagaaaaatattattcgggggggggccccgtacccaatttgccctatagtgagccggttaacaaattaatgggggtctttttaaataggggggacggggaaaaccctggggtttcccaacttaatcgctttttgaaaaatcccctttttttaaacttggggtaaaaaaaaaaagggcgggaccggattgcctttttccaaattttaacaatccttattggcgaatggggaaattctaaagcgtcaa

SEQ ID NO: 430840 - DNA, 4360 bp, Homo sapiens
cagtgagaagacacccaatggaggctacaagcccaagctcaatacactcaagctctaccgcctgctccccatgcgggcagccaagcggccctacaagacctacagccagggagccccggaggctcccctttctccaaccctcaacacaccggcccctgtggcaatgccagccagcccgccgcctgggcctccacctgccccagagcctggccctccaccctctgtcatcacttttgcccacccagccccctctgtcattgtccatgggggcagtagcagtggtggaggggggagtgggacggccagcacaggagggtcccaagctgcctcggttatcacttacactgctcccccgaggccacccaagaaacgagaatacccacctcctccccctgagcctgcagccacacccaccagcccagccacagcagtcagcccagccaccgctgcagggccagccatggccaccaccacggaggaggccaagggccggaatccacgggctggaaggactctgacttacacagccaagccagtgggcgggattggtggaggtgggggtccccccacaggggctggccggggcccctctcagctgcaggctccacctccactgtgtcagatcactgtgcgaataggggaggaggccatcgtcaagcgccgcatctcagagactgacctgcgtcctggggagctgagcggagaggagatggaggagagtgaggaggacgaagaggaggaggacgaagaggaggaggaggaggatgaggaggaatcaaaggctggtggggaggaccagctctggaggccctactactcctacaagcctaagcgcaaggctggagctgctggaggtgccagtgtggggggcagtgggctgccccgaggccgccggccaccacgttggaggcagaagctggaacggaggagctgggaggaaaccccagcggccgagagcccagcgggacgtgcccgcacagagcggaggcaccgatgcggggactgtgcccagaccttcaccaccctgagaaagctgcggaagcaccaagaggcccacggtgggggctcccacagctcccgggccggacggaggccctccacccgctttacctgcccccactgcgccaaggtgtgcaagaccgcagctgccctgagccgccacgggcagaggcatgctgctgagcggcccgggggcaccccaacccctgtcattgcctattccaagggcagcgctggcaccaggcccggggatgtcaaggaggaagccccccaagagatgcaagtctcctcatccagcggtgaggcaggtggcgggagcactgctgctgaggaagcttccgagaccgcctcactccaggaccctatcatttcagggggtgaggagcccccagtagtggcaagcgggggcagctatgtatacccacctgtgcaggaatttccactggccttgattgggggcggccgggaacctggcggtggcaggggaaaatctgggagtgaagggccagtgggggctggtgagggggaccggatggaggggataggggctgccaaagtcactttctaccctgagccctacccgctcgtctatggcccccagctccttgccgcctacccttacaacttcagtaacttggccgctctcccggttgctctcaacatggtcctacctgatgagaagggtgcgggggcccttcccttcctaccaggggtctttggctacgcagtgaatcctcaagcagcaccccctgccccaccaacaccacctcccccaactcttcctccaccaattccccctaagggagaaggggaaagggcaggggttgagagaacccagaagggcgatgtggggtgaaccctggggctcaatccccctttcaccagatgccaccctccctgaaccccccaccactaccagctccctggcctccctgccccttgggagccccttcacactcttgtgcagggacttgggggcccctggagctcaggggtcaggctgctttgtgtgagatgtagttttcccatctcctgggaagggatctttcgaggttcccctctcagtcttcctccagggaatggcctccatgaggggcagggccagcttccatcccttctccagcccttggggcaactgagcaatatacttaacctgaatctctactcacagcccccaccagctctgaatgtctaacctgctcccctgattcgtaaacctaggggaaaccatctctctcacctaatgacccgccttgttctgaagctttctctaagcccttcccagttgcttcctagcacattccattctttgtggcccagggcctggaccagaccattgtgatacctgaccccgcccacctgggagtgtggctttgggtttcatccttccccagcgtgggtctctacgtccctgtttcccttgtatcaagacaccttcctcagcttccatgcctttggatcttccatgttcctccccatattcctggacttcggagatggcctctcccaagccaggtcaaggaggtttgggggagggttgcccctctgcccctctgttctgtggctgagcactttcccagtccagggcagggaaatattggccctatcttgacccccaaatccagtgagctccagattcttccaaggcaaaagaggtaagcagatcacacctctttctgcctctacatatggcctattctgggctagaccagatttgggggccaggagggaagaactccatatgggatggagaagggaatctactttctccctgtttttttttcctgatggtttctcccagactagaccaaatagccagaaaaatgataggggtcggatgggtgggtaagcccaggatttgcacatgaccttccatccttacctgtattcccatctccccagtgtcactcccctcaccaatcactccagatggttttgggggaaccattctactcttctggtgggctttggggtatccccaccaactttcccttcaaaatagcaccttacaccccatctttgactcagttccccacacccaaagatcccagcctagggatggggtacagggactttaaatagtccctaatccctaatttgcactagttaaccctggtcagggtccctgtatttccttccagtgggggagataaatgtttgctcctaattctctttgaaaactgggcctccctgctctgtgattggataaatatttcccatcccacccacctccccccaaaaaatagctcacaaggggagagccagtatgggggagcaaatttgacaaatgggaattagaggagtgcagttttaaaaggaaaagttgctgtcatcaaaatggcagccttttccccagctactgtttttggggccaagatggctgccctagcagcaatcactgccaagggcaagatcatggcttttggagggaggtgagtttagggagggccaggaccatcctcctacccctcataccctcccagcatatacaaaaggggaggttttagacaggctccctgaatgttaaccacagaggagtcactccttcattcctcctctgtctctttgcacttttcttggtcttggccacagcctgagtgacgaatttcctactgaatgtaccaagttccaatttttaagggggggaaaggtttcaaatggggaaaaacacacaaaaaaaaaatcactaaaaattcccacaaatcttgtttctggcactttagaaaaactgcaaaaaaatacgtaataaagaatacatatatatatatctacacacaaattatatatctatctatctatacagcggaaccacaagagagactgaggaaggcctggaggcaggggcagaggtgacgacagtgcccctatatccttaacccatactcctctgaggcaaacaggcatgggaaaatggaagggttgaggatggaccggagaattggaacttcagaataggtcaaaattccaaaaccatggacatttttttttgggagaattgagattgtagacattttttttttcttaaatatgatcaaggaaaatagcttccagaatgtggtggttctgggcaacaaatgagattgtggcgacgtggagattaaaatatatgtatttgagctggggaatttgaatattgtgagtttcagatgttggaaatttgggattttgcagttttgtcttttgaaaatgatcaagtcttgtcagttcgtgccctctttccccatgttccctgggaagacgggtggtggcagagtgagaaggccactggttctgtgccgcagcacgcgaaactgaccaatatttatctccgcatttgtgtgtgtgtccaactctgtaggccaataaaccaacaagacaaatg

SEQ ID NO: 430841 - DNA, 1819 bp, Homo sapiens
  misc_feature (11)..(11): n is a, c, g, or t
  misc_feature (94)..(94): n is a, c, g, or t
gataaatattnggtcagtttctctaaatctgggtcctcactacgtatagagctagtctgtagaattctaaattttgcgtgctgcggcacagaanccagtggccttctcactctgccaccacccgtcttcccagggaacatggggaaagagggcacgaactgacaagacttgatcattttcaaaagacaaaactgcaaaatcccaaatttccaacatctgaaactcacaatattcaaattccccagctcaaatacatatattttaatctccacgtcgccacaatctcatttgttgcccagaaccaccacattctggaagctattttccttgatcatatttaagaaaaaaaaaatgtctacaatctcaattctcccaaaaaaaaatgtccatggttttggaattttgacctattctgaagttccaattctccggtccatcctcaacccttccattttcccatgcctgtttgcctcagaggagtatgggttaaggatataggggcactgtcgtcacctctgcccctgcctccaggccttcctcagtctctcttgtggttccgctgtatagatagatagatatataatttgtgtgtagatatatatatatgtattctttattacgtatttttttgcagtttttctaaagtgccagaaacaagatttgtgggaatttttagtgattttttttttgtgtgtttttccccatttgaaacctttcccccccttaaaaattggaacttggtacattcagtaggaaattcgtcactcaggctgtggccaagaccaagaaaagtgcaaagagacagaggaggaatgaaggagtgactcctctgtggttaacattcagggagcctgtctaaaacctccccttttgtatatgctgggagggtatgaggggtaggaggatgttaaccacagaggagtcactccttcattcctcctctgtctctttgcacttttcttggtcttggccacagcctgagtgacgaatttcctactgaatgtaccaagttccaatttttaagggggggaaaggtttcaaatggggaaaaacacacaaaaaaaaaatcactaaaaattcccacaaatcttgtttctggcactttagaaaaactgcaaaaaaatacgtaataaagaatacatatatatatatctacacacaaattatatatctatctatctatacagcggaaccacaagagagactgaggaaggcctggaggcaggggcagaggtgacgacagtgcccctatatccttaacccatactcctctgaggcaaacaggcatgggaaaatggaagggttgaggatggaccggagaattggaacttcagaataggtcaaaattccaaaaccatggacatttttttttgggagaattgagattgtagacattttttttttcttaaatatgatcaaggaaaatagcttccagaatgtggtggttctgggcaacaaatgagattgtggcgacgtggagattaaaatatatgtatttgagctggggaatttgaatattgtgagtttcagatgttggaaatttgggattttgcagttttgtcttttgaaaatgatcaagtcttgtcagttcgtgccctctttccccatgttccctgggaagacgggtggtggcagagtgagaaggccactggttctgtgccgcagcacgcaaaatttagaattctacagactagctctatacgtagtgaggacccagatttagagaaactgaccaatatttatctccgcatttgtgtgtgtgtccaactctgtaggccaataaaccaacaagacaaatgaactgtgctccacaaaaaaa

SEQ ID NO: 430842 - DNA, 956 bp, Homo sapiens
  misc_feature (11)..(11): n is a, c, g, or t
  misc_feature (94)..(94): n is a, c, g, or t
  misc_feature (950)..(950): n is a, c, g, or t
gataaatattnggtcagtttctctaaatctgggtcctcactacgtatagagctagtctgtagaattctaaattttgcgtgctgcggcacagaanccagtggccttctcactctgccaccacccgtcttcccagggaacatggggaaagagggcacgaactgacaagacttgatcattttcaaaagacaaaactgcaaaatcccaaatttccaacatctgaaactcacaatattcaaattccccagctcaaatacatatattttaatctccacgtcgccacaatctcatttgttgcccagaaccaccacattctggaagctattttccttgatcatatttaagaaaaaaaaaatgtctacaatctcaattctcccaaaaaaaaatgtccatggttttggaattttgacctattctgaagttccaattctccggtccatcctcaacccttccattttcccatgcctgtttgcctcagaggagtatgggttaaggatataggggcactgtcgtcacctctgcccctgcctccaggccttcctcagtctctcttgtggttccgctgtatagatagatagatatataatttgtgtgtagatatatatatatgtattctttattacgtatttttttgcagtttttctaaagtgccagaaacaagatttgtgggaatttttagtgattttttttttgtgtgtttttccccatttgaaacctttcccccccttaaaaattggaacttggtacattcagtaggaaattcgtcactcaggctgtggccaagaccaagaaaagtgcaaagagacagaggaggaatgaaggagtgactcctctgtggttaacattcagggagcctgtctaaaacctccccttttgtatatgctgggagggtatgaggggtaggaggatggtcctggccctccctaaactcacctccctccaaaagccatgantcttgc

SEQ ID NO: 430843 - DNA, 2817 bp, Homo sapiens
cagtgagaagacacccaatggaggctacaagcccaagctcaatacactcaagctctaccgcctgctccccatgcgggcagccaagcggccctacaagacctacagccagggagccccggaggctcccctttctccaaccctcaacacaccggcccctgtggcaatgccagccagcccgccgcctgggcctccacctgccccagagcctggccctccaccctctgtcatcacttttgcccacccagccccctctgtcattgtccatgggggcagtagcagtggtggaggggggagtgggacggccagcacaggagggtcccaagctgcctcggttatcacttacactgctcccccgaggccacccaagaaacgagaatacccacctcctccccctgagcctgcagccacacccaccagcccagccacagcagtcagcccagccaccgctgcagggccagccatggccaccaccacggaggaggccaagggccggaatccacgggctggaaggactctgacttacacagccaagccagtgggcgggattggtggaggtgggggtccccccacaggggctggccggggcccctctcagctgcaggctccacctccactgtgtcagatcactgtgcgaataggggaggaggccatcgtcaagcgccgcatctcagagactgacctgcgtcctggggagctgagcggagaggagatggaggagagtgaggaggacgaagaggaggaggacgaagaggaggaggaggaggatgaggaggaatcaaaggctggtggggaggaccagctctggaggccctactactcctacaagcctaagcgcaaggctggagctgctggaggtgccagtgtggggggcagtgggctgccccgaggccgccggccaccacgttggaggcagaagctggaacggaggagctgggaggaaaccccagcggccgagagcccagcgggacgtgcccgcacagagcggaggcaccgatgcggggactgtgcccagaccttcaccaccctgagaaagctgcggaagcaccaagaggcccacggtgggggctcccacagctcccgggccggacggaggccctccacccgctttacctgcccccactgcgccaaggtgtgcaagaccgcagctgccctgagccgccacgggcagaggcatgctgctgagcggcccgggggcaccccaacccctgtcattgcctattccaagggcagcgctggcaccaggcccggggatgtcaaggaggaagccccccaagagatgcaagtctcctcatccagcggtgaggcaggtggcgggagcactgctgctgaggaagcttccgagaccgcctcactccaggaccctatcatttcagggggtgaggagcccccagtagtggcaagcgggggcagctatgtatacccacctgtgcaggaatttccactggccttgattgggggcggccgggaacctggcggtggcaggggaaaatctgggagtgaagggccagtgggggctggtgagggggaccggatggaggggataggggctgccaaagtcactttctaccctgagccctacccgctcgtctatggcccccagctccttgccgcctacccttacaacttcagtaacttggccgctctcccggttgctctcaacatggtcctacctgatgagaagggtgcgggggcccttcccttcctaccaggggtctttggctacgcagtgaatcctcaagcagcaccccctgccccaccaacaccacctcccccaactcttcctccaccaattccccctaagggagaaggggaaagggcaggggttgagagaacccagaagggcgatgtggggtgaaccctggggctcaatccccctttcaccagatgccaccctccctgaaccccccaccactaccagctccctggcctccctgccccttgggagccccttcacactcttgtgcagggacttgggggcccctggagctcaggggtcaggctgctttgtgtgagatgtagttttcccatctcctgggaagggatctttcgaggttcccctctcagtcttcctccagggaatggcctccatgaggggcagggccagcttccatcccttctccagcccttggggcaactgagcaatatacttaacctgaatctctactcacagcccccaccagctctgaatgtctaacctgctcccctgattcgtaaacctaggggaaaccatctctctcacctaatgacccgccttgttctgaagctttctctaagcccttcccagttgcttcctagcacattccattctttgtggcccagggcctggaccagaccattgtgatacctgaccccgcccacctgggagtgtggctttgggtttcatccttccccagcgtgggtctctacgtccctgtttcccttgtatcaagacaccttcctcagcttccatgcctttggatcttccatgttcctccccatattcctggacttcggagatggcctctcccaagccaggtcaaggaggtttgggggagggttgcccctctgcccctctgttctgtggctgagcactttcccagtccagggcagggaaatattggccctatcttgacccccaaatccagtgagctccagattcttccaaggcaaaagaggtaagcagatcacacctctttctgcctctacatatggcctattctgggctagaccagatttgggggccaggagggaagaactccatatgggatgaaaggactcgacatgaatcatgtcgagtgctttcatcccagcctaagagacagagcaagactccatctc

SEQ ID NO: 430844 - DNA, 2566 bp, Homo sapiens
aggtcggagtcgggactacgcttagcgctcgctcgcggggagaccggcagcggtcttctgtttggtctcttgacaagggggcgggacttccgcagaaagcaagattgggcctatccgcgatgagaacggcgtggagggggaattaaggctggaactggagagggaggggtctgcggtcagtcggacgcggcgctggaaatccggcggaggacctagaagtagcgggagcgatctgtgggcggggcgaacggcctgccggccgacggctcccacatcaggacgagaaggagccctcgagttaccgtgggagctgtgggagctgccctgtgactcttaggaagatgccgtaccttggctccgaggacgtggtgaaggagctgaagaaggctctgtgcaatcctcacattcaagctgataggctgcgctaccggaatgtcatccagcgagtgattaggtacatgactcaaggcttggacatgtctggtgtttttatggaaatggtgaaggccagtgccactgtagatattgtccagaagaagttggtttatctgtacatgtgcacatatgctcccctgaaaccagatctggctctcctggccatcaatacgctgtgcaaagactgctcagaccccaatccaatggtgcgagggctggcgttacggagcatgtgtagcctcaggatgcctggtgtgcaggagtatatacaacagcctattctcaatggtctgcgggataaggcttcatatgtcaggagagtggcagtccttggatgtgccaagatgcataatcttcatggagactctgaagtagatggtgccctggtaaatgaattatacagtttgctgcgtgaccaggatccaattgtagttgtgaactgcttgaggtctctagaggaaattctgaaacaggaaggaggcgttgtcatcaataagcccattgctcaccatctcttaaatcgaatgtcaaaactggaccaatggggccaggctgaagtattgaactttctgctacgctaccaaccccgcagtgaggaagaactatttgacattctcaatctgttggatagtttcctcaagagcagtagcccaggtgtggtgatgggagctaccaaactttttctgatcttggcaaaaatgtttccccacgtacaaactgatgtccttgtgcgggtcaagggacctttgctagctgcctgttcttcagagagccgtgagctctgttttgttgctctttgtcatgtacgccagatcttgcatagtttaccaggtcactttagcagccactacaaaaagtttttttgctcctactcggagccccactacatcaaactacagaaagtggaggtgctgtgtgaactggtgaacgatgagaatgtgcagcaggtgctagaggagcttcgagggtactgcacggatgtgtctgcggactttgcacaggctgccatctttgccataggtggcattgccaggacttacacagatcaatgtgttcagattttaacagagttgctgggtcttcgacaagagcacattaccacagtggtggtgcagactttccgagacctggtttggttgtgtcctcagtgtactgaagctgtatgtcaggccctgcccggctgtgaagagaacattcaagatagtgaggggaagcaagcacttatttggctacttggtgtccatggggaaagaattcctaatgctccttatgtgttagaggactttgttgagaatgtgaagtcggaaacatttccagctgttaagatggagctgctcactgctttgctgcgccttttcctctcccgacctgctgagtgccaggacatgctaggacgtttgttgtattactgcatagaggaagaaaaagatatggctgtacgggaccgaggtctcttctattatcgcctcctcttagttggcattgatgaagttaagcggattctgtgtagccctaaatctgaccctactcttggacttttggaggatccggcagaaagacctgtgaatagctgggcctcagacttcaacacactggtgccagtgtatggcaaagcccactgggcaactatctctaaatgccagggggcagagcgttgtgacccagagcttcctaaaacttcatcctttgccgcatcaggacccttgattcctgaagagaacaaggagagggtacaagaactccctgattctggagccctcatgctagtccccaatcgccagcttactgctgattattttgagaaaacttggcttagccttaaagttgctcatcagcaagtgttgccttggcggggagaattccatcctgacaccctccagatggctcttcaagtagtgaacatccagaccatcgcaatgagtagggctgggtctcggccatggaaagcatacctcagtgctcaggatgatactggctgtctgttcttaacagaactgctattggagcctggaaactcagaaatgcagatctctgtgaaacaaaatgaagcaagaacggagacgctgaatagttttatttctgtattagaaactgtgattggaacaattgaagaaataaaatcataacagag

SEQ ID NO: 430845 - DNA, 565 bp, Homo sapiens
acagcaatactaccccacatttgcatacagctttatgttttacaaagtgctttttcatacattagttcatttatcctcatgtcaatctgataagagcaatatgcattcaagaaattattgcttatttcattacatttcttagataaccattgaccacacctccaaaacccattttacagaaatccagccagaatcatgagtctgaatacatgactgttcttaagattcctgcctacctggaggctctaatcctgtgctcttgtaccctggcctgtattgtagtggtggtgcagactttccgagacctggtttggttgtgtcctcagtgtactgaagctgtatgtcaggccctgcccggctgtgaagagaacattcaagatagtgaggtagactgtaattctcctttacttctaggtagggggagaatgcttgaaaccctgccctttgaaatggaatctaattattctctctaccctgtgtttgaagtgggcactcttcgaattgattgccaccttagattctcttttggatatagatggcatataaattataaaaacaagattta

SEQ ID NO: 430846 - DNA, 2405 bp, Homo sapiens
ggcgtggaagtgtgtcagggccagcgtgccggccctacggaagccgagcctgaggcgagatctcgccttttgtattttcactgactcatatttcctttactcaggctcccacatcaggacgagaaggagccctcgagttaccgtgggagctgtgggagctgccctgtgactcttaggaagatgccgtaccttggctccgaggacgtggtgaaggagctgaagaaggctctgtgcaatcctcacattcaagctgataggctgcgctaccggaatgtcatccagcgagtgattaggtacatgactcaaggcttggacatgtctggtgtttttatggaaatggtgaaggccagtgccactgtagatattgtccagaagaagttggtttatctgtacatgtgcacatatgctcccctgaaaccagatctggctctcctggccatcaatacgctgtgcaaagactgctcagaccccaatccaatggtgcgagggctggcgttacggagcatgtgtagcctcaggatgcctggtgtgcaggagtatatacaacagcctattctcaatggtctgcgggataaggcttcatatgtcaggagagtggcagtccttggatgtgccaagatgcataatcttcatggagactctgaagtagatggtgccctggtaaatgaattatacagtttgctgcgtgaccaggatccaattgtagttgtgaactgcttgaggtctctagaggaaattctgaaacaggaaggaggcgttgtcatcaataagcccattgctcaccatctcttaaatcgaatgtcaaaactggaccaatggggccaggctgaagtattgaactttctgctacgctaccaaccccgcagtgaggaagaactatttgacattctcaatctgttggatagtttcctcaagagcagtagcccaggtgtggtgatgggagctaccaaactttttctgatcttggcaaaaatgtttccccacgtacaaactgatgtccttgtgcgggtcaagggacctttgctagctgcctgttcttcagagagccgtgagctctgttttgttgctctttgtcatgtacgccagatcttgcatagtttaccaggtcactttagcagccactacaaaaagtttttttgctcctactcggagccccactacatcaaactacagaaagtggaggtgctgtgtgaactggtgaacgatgagaatgtgcagcaggtgctagaggagcttcgagggtactgcacggatgtgtctgcggactttgcacaggctgccatctttgccataggtggcattgccaggacttacacagatcaatgtgttcagattttaacagagttgctgggtcttcgacaagagcacattaccacagtggtggtgcagactttccgagacctggtttggttgtgtcctcagtgtactgaagctgtatgtcaggccctgcccggctgtgaagagaacattcaagatagtgaggggaagcaagcacttatttggctacttggtgtccatggggaaagaattcctaatgctccttatgtgttagaggactttgttgagaatgtgaagtcggaaacatttccagctgttaagatggagctgctcactgctttgctgcgccttttcctctcccgacctgctgagtgccaggacatgctaggacgtttgttgtattactgcatagaggaagaaaaagatatggctgtacgggaccgaggtctcttctattatcgcctcctcttagttggcattgatgaagttaagcggattctgtgtagccctaaatctgaccctactcttggacttttggaggatccggcagaaagacctgtgaatagctgggcctcagacttcaacacactggtgccagtgtatggcaaagcccactgggcaactatctctaaatgccagggggcagagcgttgtgacccagagcttcctaaaacttcatcctttgccgcatcaggacccttgattcctgaagagaacaaggagagggtacaagaactccctgattctggagccctcatgctagtccccaatcgccagcttactgctgattattttgagaaaacttggcttagccttaaagttgctcatcagcaagtgttgccttggcggggagaattccatcctgacaccctccagatggctcttcaagtagtgaacatccagaccatcgcaatgagtagggctgggtctcggccatggaaagcatacctcagtgctcaggatgatactggctgtctgttcttaacagaactgctattggagcctggaaactcagaaatgcagatctctgtgaaacaaaatgaagcaagaacggagacgctgaatagttttatttctgtattagaaactgtgattggaacaattgaagaaataaaatcataacagag

SEQ ID NO: 430847 - DNA, 2587 bp, Homo sapiens
aggtcggagtcgggactacgcttagcgctcgctcgcggggagaccggcagcggtcttctgtttggtctcttgacaagggggcgggacttccgcagaaagcaagattgggcctatccgcgatgagaacggcgtggagggggaattaaggctggaactggagagggaggggtctgcggtcagtcggacgcggcgctggaaatccggcggaggacctagaagtagcgggagcgatctgtgggcggggcgaacggcctgccggccgacggtagggcctgaagagcctagggctcccacatcaggacgagaaggagccctcgagttaccgtgggagctgtgggagctgccctgtgactcttaggaagatgccgtaccttggctccgaggacgtggtgaaggagctgaagaaggctctgtgcaatcctcacattcaagctgataggctgcgctaccggaatgtcatccagcgagtgattaggtacatgactcaaggcttggacatgtctggtgtttttatggaaatggtgaaggccagtgccactgtagatattgtccagaagaagttggtttatctgtacatgtgcacatatgctcccctgaaaccagatctggctctcctggccatcaatacgctgtgcaaagactgctcagaccccaatccaatggtgcgagggctggcgttacggagcatgtgtagcctcaggatgcctggtgtgcaggagtatatacaacagcctattctcaatggtctgcgggataaggcttcatatgtcaggagagtggcagtccttggatgtgccaagatgcataatcttcatggagactctgaagtagatggtgccctggtaaatgaattatacagtttgctgcgtgaccaggatccaattgtagttgtgaactgcttgaggtctctagaggaaattctgaaacaggaaggaggcgttgtcatcaataagcccattgctcaccatctcttaaatcgaatgtcaaaactggaccaatggggccaggctgaagtattgaactttctgctacgctaccaaccccgcagtgaggaagaactatttgacattctcaatctgttggatagtttcctcaagagcagtagcccaggtgtggtgatgggagctaccaaactttttctgatcttggcaaaaatgtttccccacgtacaaactgatgtccttgtgcgggtcaagggacctttgctagctgcctgttcttcagagagccgtgagctctgttttgttgctctttgtcatgtacgccagatcttgcatagtttaccaggtcactttagcagccactacaaaaagtttttttgctcctactcggagccccactacatcaaactacagaaagtggaggtgctgtgtgaactggtgaacgatgagaatgtgcagcaggtgctagaggagcttcgagggtactgcacggatgtgtctgcggactttgcacaggctgccatctttgccataggtggcattgccaggacttacacagatcaatgtgttcagattttaacagagttgctgggtcttcgacaagagcacattaccacagtggtggtgcagactttccgagacctggtttggttgtgtcctcagtgtactgaagctgtatgtcaggccctgcccggctgtgaagagaacattcaagatagtgaggggaagcaagcacttatttggctacttggtgtccatggggaaagaattcctaatgctccttatgtgttagaggactttgttgagaatgtgaagtcggaaacatttccagctgttaagatggagctgctcactgctttgctgcgccttttcctctcccgacctgctgagtgccaggacatgctaggacgtttgttgtattactgcatagaggaagaaaaagatatggctgtacgggaccgaggtctcttctattatcgcctcctcttagttggcattgatgaagttaagcggattctgtgtagccctaaatctgaccctactcttggacttttggaggatccggcagaaagacctgtgaatagctgggcctcagacttcaacacactggtgccagtgtatggcaaagcccactgggcaactatctctaaatgccagggggcagagcgttgtgacccagagcttcctaaaacttcatcctttgccgcatcaggacccttgattcctgaagagaacaaggagagggtacaagaactccctgattctggagccctcatgctagtccccaatcgccagcttactgctgattattttgagaaaacttggcttagccttaaagttgctcatcagcaagtgttgccttggcggggagaattccatcctgacaccctccagatggctcttcaagtagtgaacatccagaccatcgcaatgagtagggctgggtctcggccatggaaagcatacctcagtgctcaggatgatactggctgtctgttcttaacagaactgctattggagcctggaaactcagaaatgcagatctctgtgaaacaaaatgaagcaagaacggagacgctgaatagttttatttctgtattagaaactgtgattggaacaattgaagaaataaaatcataacagag

SEQ ID NO: 430848 - DNA, 3488 bp, Homo sapiens
ggcgtggaagtgtgtcagggccagcgtgccggccctacggaagccgagcctgaggcgagatctcgccttttgtattttcactgactcatatttcctttactcaggctcccacatcaggacgagaaggagccctcgagttaccgtgggagctgtgggagctgccctgtgactcttaggaagatgccgtaccttggctccgaggacgtggtgaaggagctgaagaaggctctgtgcaatcctcacattcaagctgataggctgcgctaccggaatgtcatccagcgagtgattaggtacatgactcaaggcttggacatgtctggtgtttttatggaaatggtgaaggccagtgccactgtagatattgtccagaagaagttggtttatctgtacatgtgcacatatgctcccctgaaaccagatctggctctcctggccatcaatacgctgtgcaaagactgctcagaccccaatccaatggtgcgagggctggcgttacggagcatgtgtagcctcaggatgcctggtgtgcaggagtatatacaacagcctattctcaatggtctgcgggataaggcttcatatgtcaggagagtggcagtccttggatgtgccaagatgcataatcttcatggagactctgaagtagatggtgccctggtaaatgaattatacagtttgctgcgtgaccaggatccaattgtagttgtgaactgcttgaggtctctagaggaaattctgaaacaggaaggaggcgttgtcatcaataagcccattgctcaccatctcttaaatcgaatgtcaaaactggaccaatggggccaggctgaagtattgaactttctgctacgctaccaaccccgcagtgaggaagaactatttgacattctcaatctgttggatagtttcctcaagagcagtagcccaggtgtggtgatgggagctaccaaactttttctgatcttggcaaaaatgtttccccacgtacaaactgatgtccttgtgcgggtcaagggacctttgctagctgcctgttcttcagagagccgtgagctctgttttgttgctctttgtcatgtacgccagatcttgcatagtttaccaggtcactttagcagccactacaaaaagtttttttgctcctactcggagccccactacatcaaactacagaaagtggaggtgctgtgtgaactggtgaacgatgagaatgtgcagcaggtgctagaggagcttcgagggtactgcacggatgtgtctgcggactttgcacaggctgccatctttgccataggtggcattgccaggacttacacagatcaatgtgttcagattttaacagagttgctgggtcttcgacaagagcacattaccacagtggtggtgcagactttccgagacctggtttggttgtgtcctcagtgtactgaagctgtatgtcaggccctgcccggctgtgaagagaacattcaagatagtgaggggaagcaagcacttatttggctacttggtgtccatggggaaagaattcctaatgctccttatgtgttagaggactttgttgagaatgtgaagtcggaaacatttccagctgttaagatggagctgctcactgctttgctgcgccttttcctctcccgacctgctgagtgccaggacatgctaggacgtttgttgtattactgcataggtgggtttttcagaaggaaatagtatttgccatgacccatagtaaaaattcttaatagctttcattgtttggtgagtcacgtctgggacccgagaagaaaatgtgaatgcttcctaggttttcctctctccttcatttttttctcctattatggttggcacaagagtaggaggaaagtggttttgtttttaatgaagtcaatctgttgtcttacctcagaggaagaaaaagatatggctgtacgggaccgaggtctcttctattatcgcctcctcttagttggcattgatgaagttaagcggattctgtgtagccctaaatctgaccctactcttggacttttggaggatccggcagaaagacctgtgaatagctgggcctcagacttcaacacactggtgccagtgtatggcaaagcccactgggcaactatctctaaatgccagggggcagagcgttgtgacccagagcttcctaaaacttcatcctttgccgcatcaggtaaaaacagtccttaccttaaatcttgtcatgataaatctttaccttttcaatgattggtggaaagtagagtatcttagcactaaacctcagactgttgcctgaatttgaagcatttgtgagcaagaaagaggttcgtcactggttatttcagccatttgtccaaaaataaaagtcacattgtgtacatttgggaatttggataaaaaacttagctcctacagattaagaacatctttcacacaagttttctgtctcttttaggacccttgattcctgaagagaacaaggagagggtacaagaactccctgattctggagccctcatgctagtccccaatcgccagcttactgctgattattttgagaaaacttggcttagccttaaagttgctcatcagcaagtgttgccttggcggggagaattccatcctgacaccctccagatggctcttcaagtagtgaacatccagaccatcgcaatgagtagggctgggtctcggccatggaaagcatacctcagtgctcaggatgatactggctgtctgttcttaacagaactgctattggagcctggaaactcagaaatgcagatctctgtgaaacaaaatgaagcaagaacggagacgctgaatagttttatttctgtattagaaactgtgattggaacaattgaagaaataaaatcataacagagtcttgttgcttgtctagagtaagatgaataactattacactttcttagtctttcctattagagctgccagtaagtccagataatatcagatacaaaggagagtggaaaatctagaaatcaggattcttaagtttttggccaaagaacattgattcattcctttcattcctattggcaattgaccccatttttcagtgatgatgttgtagaggttaatgttggtaaggagatgcgttgaggatgggatttggattatttcctaatcaattttaggaattgtgttagtaattaaagatggctgatgtgtggaaactgataggggtcatcatttgtgggggtcatcttttcttccctggattattatagtaaattcctaactgttctcatatttccaatcatgcttttaggccagattccaaagtccttaatgtcatctaaagtacctctttggtgtcaagtcttgccactcccaaaatgacttcttttctggcagaagcaaaccatttgcattgcagttccctttatacacctgcttctttcacctctgtgttaacttaaacctgcttttatttattgcctggaacattttctcaccctcat

SEQ ID NO: 430849 - DNA, 2341 bp, Homo sapiens
aggtcggagtcgggactacgcttagcgctcgctcgcggggagaccggcagcggtcttctgtttggtctcttgacaagggggcgggacttccgcagaaagcaagattgggcctatccgcgatgagaacggcgtggagggggaattaaggctggaactggagagggaggggtctgcggtcagtcggacgcggcgctggaaatccggcggaggacctagaagtagcgggagcgatctgtgggcggggcgaacggcctgccggccgacggctcccacatcaggacgagaaggagccctcgagttaccgtgggagctgtgggagctgccctgtgactcttaggaagatgccgtaccttggctccgaggacgtggtgaaggagctgaagaaggctctgtgcaatcctcacattcaagctgataggctgcgctaccggaatgtcatccagcgagtgattaggatgcctggtgtgcaggagtatatacaacagcctattctcaatggtctgcgggataaggcttcatatgtcaggagagtggcagtccttggatgtgccaagatgcataatcttcatggagactctgaagtagatggtgccctggtaaatgaattatacagtttgctgcgtgaccaggatccaattgtagttgtgaactgcttgaggtctctagaggaaattctgaaacaggaaggaggcgttgtcatcaataagcccattgctcaccatctcttaaatcgaatgtcaaaactggaccaatggggccaggctgaagtattgaactttctgctacgctaccaaccccgcagtgaggaagaactatttgacattctcaatctgttggatagtttcctcaagagcagtagcccaggtgtggtgatgggagctaccaaactttttctgatcttggcaaaaatgtttccccacgtacaaactgatgtccttgtgcgggtcaagggacctttgctagctgcctgttcttcagagagccgtgagctctgttttgttgctctttgtcatgtacgccagatcttgcatagtttaccaggtcactttagcagccactacaaaaagtttttttgctcctactcggagccccactacatcaaactacagaaagtggaggtgctgtgtgaactggtgaacgatgagaatgtgcagcaggtgctagaggagcttcgagggtactgcacggatgtgtctgcggactttgcacaggctgccatctttgccataggtggcattgccaggacttacacagatcaatgtgttcagattttaacagagttgctgggtcttcgacaagagcacattaccacagtggtggtgcagactttccgagacctggtttggttgtgtcctcagtgtactgaagctgtatgtcaggccctgcccggctgtgaagagaacattcaagatagtgaggggaagcaagcacttatttggctacttggtgtccatggggaaagaattcctaatgctccttatgtgttagaggactttgttgagaatgtgaagtcggaaacatttccagctgttaagatggagctgctcactgctttgctgcgccttttcctctcccgacctgctgagtgccaggacatgctaggacgtttgttgtattactgcatagaggaagaaaaagatatggctgtacgggaccgaggtctcttctattatcgcctcctcttagttggcattgatgaagttaagcggattctgtgtagccctaaatctgaccctactcttggacttttggaggatccggcagaaagacctgtgaatagctgggcctcagacttcaacacactggtgccagtgtatggcaaagcccactgggcaactatctctaaatgccagggggcagagcgttgtgacccagagcttcctaaaacttcatcctttgccgcatcaggacccttgattcctgaagagaacaaggagagggtacaagaactccctgattctggagccctcatgctagtccccaatcgccagcttactgctgattattttgagaaaacttggcttagccttaaagttgctcatcagcaagtgttgccttggcggggagaattccatcctgacaccctccagatggctcttcaagtagtgaacatccagaccatcgcaatgagtagggctgggtctcggccatggaaagcatacctcagtgctcaggatgatactggctgtctgttcttaacagaactgctattggagcctggaaactcagaaatgcagatctctgtgaaacaaaatgaagcaagaacggagacgctgaatagttttatttctgtattagaaactgtgattggaacaattgaagaaataaaatcataacagag

SEQ ID NO: 430850 - DNA, 2277 bp, Homo sapiens
ggcgtggaagtgtgtcagggccagcgtgccggccctacggaagccgagcctgaggcgagatctcgccttttgtattttcactgactcatatttcctttactcaggctcccacatcaggacgagaaggagccctcgagttaccgtgggagctgtgggagctgccctgtgactcttaggaagatgccgtaccttggctccgaggacgtggtgaaggagctgaagaaggctctgtgcaatcctcacattcaagctgataggctgcgctaccggaatgtcatccagcgagtgattagatctggctctcctggccatcaatacgctgtgcaaagactgctcagaccccaatccaatggtgcgagggctggcgttacggagcatgtgtagcctcaggatgcctggtgtgcaggagtatatacaacagcctattctcaatggtctgcgggataaggcttcatatgtcaggagagtggcagtccttggatgtgccaagatgcataatcttcatggagactctgaagtagatggtgccctggtaaatgaattatacagtttgctgcgtgaccaggatccaattgtagttgtgaactgcttgaggtctctagaggaaattctgaaacaggaaggaggcgttgtcatcaataagcccattgctcaccatctcttaaatcgaatgtcaaaactggaccaatggggccaggctgaagtattgaactttctgctacgctaccaaccccgcagtgaggaagaactatttgacattctcaatctgttggatagtttcctcaagagcagtagcccaggtgtggtgatgggagctaccaaactttttctgatcttggcaaaaatgtttccccacgtacaaactgatgtccttgtgcgggtcaagggacctttgctagctgcctgttcttcagagagccgtgagctctgttttgttgctctttgtcatgtacgccagatcttgcatagtttaccaggtcactttagcagccactacaaaaagtttttttgctcctactcggagccccactacatcaaactacagaaagtggaggtgctgtgtgaactggtgaacgatgagaatgtgcagcaggtgctagaggagcttcgagggtactgcacggatgtgtctgcggactttgcacaggctgccatctttgccataggtggcattgccaggacttacacagatcaatgtgttcagattttaacagagttgctgggtcttcgacaagagcacattaccacagtggtggtgcagactttccgagacctggtttggttgtgtcctcagtgtactgaagctgtatgtcaggccctgcccggctgtgaagagaacattcaagatagtgaggggaagcaagcacttatttggctacttggtgtccatggggaaagaattcctaatgctccttatgtgttagaggactttgttgagaatgtgaagtcggaaacatttccagctgttaagatggagctgctcactgctttgctgcgccttttcctctcccgacctgctgagtgccaggacatgctaggacgtttgttgtattactgcatagaggaagaaaaagatatggctgtacgggaccgaggtctcttctattatcgcctcctcttagttggcattgatgaagttaagcggattctgtgtagccctaaatctgaccctactcttggacttttggaggatccggcagaaagacctgtgaatagctgggcctcagacttcaacacactggtgccagtgtatggcaaagcccactgggcaactatctctaaatgccagggggcagagcgttgtgacccagagcttcctaaaacttcatcctttgccgcatcaggacccttgattcctgaagagaacaaggagagggtacaagaactccctgattctggagccctcatgctagtccccaatcgccagcttactgctgattattttgagaaaacttggcttagccttaaagttgctcatcagcaagtgttgccttggcggggagaattccatcctgacaccctccagatggctcttcaagtagtgaacatccagaccatcgcaatgagtagggctgggtctcggccatggaaagcatacctcagtgctcaggatgatactggctgtctgttcttaacagaactgctattggagcctggaaactcagaaatgcagatctctgtgaaacaaaatgaagcaagaacggagacgctgaatagttttatttctgtattagaaactgtgattggaacaattgaagaaataaaatcataacagag

SEQ ID NO: 430851 - DNA, 2077 bp, Homo sapiens
aatacggctagtacgaggccggggtgaatcggccgagggtcagcaagaagttggtttatctgtacatgtgcacatatgctcccctgaaaccagatctggctctcctggccatcaatacgctgtgcaaagactgctcagaccccaatccaatggtgcgagggctggcgttacggagcatgtgtagcctcaggatgcctggtgtgcaggagtatatacaacagcctattctcaatggtctgcgggataaggcttcatatgtcaggagagtggcagtccttggatgtgccaagatgcataatcttcatggagactctgaagtagatggtgccctggtaaatgaattatacagtttgctgcgtgaccaggatccaattgtagttgtgaactgcttgaggtctctagaggaaattctgaaacaggaaggaggcgttgtcatcaataagcccattgctcaccatctcttaaatcgaatgtcaaaactggaccaatggggccaggctgaagtattgaactttctgctacgctaccaaccccgcagtgaggaagaactatttgacattctcaatctgttggatagtttcctcaagagcagtagcccaggtgtggtgatgggagctaccaaactttttctgatcttggcaaaaatgtttccccacgtacaaactgatgtccttgtgcgggtcaagggacctttgctagctgcctgttcttcagagagccgtgagctctgttttgttgctctttgtcatgtacgccagatcttgcatagtttaccaggtcactttagcagccactacaaaaagtttttttgctcctactcggagccccactacatcaaactacagaaagtggaggtgctgtgtgaactggtgaacgatgagaatgtgcagcaggtgctagaggagcttcgagggtactgcacggatgtgtctgcggactttgcacaggctgccatctttgccataggtggcattgccaggacttacacagatcaatgtgttcagattttaacagagttgctgggtcttcgacaagagcacattaccacagtggtggtgcagactttccgagacctggtttggttgtgtcctcagtgtactgaagctgtatgtcaggccctgcccggctgtgaagagaacattcaagatagtgaggggaagcaagcacttatttggctacttggtgtccatggggaaagaattcctaatgctccttatgtgttagaggactttgttgagaatgtgaagtcggaaacatttccagctgttaagatggagctgctcactgctttgctgcgccttttcctctcccgacctgctgagtgccaggacatgctaggacgtttgttgtattactgcatagaggaagaaaaagatatggctgtacgggaccgaggtctcttctattatcgcctcctcttagttggcattgatgaagttaagcggattctgtgtagccctaaatctgaccctactcttggacttttggaggatccggcagaaagacctgtgaatagctgggcctcagacttcaacacactggtgccagtgtatggcaaagcccactgggcaactatctctaaatgccagggggcagagcgttgtgacccagagcttcctaaaacttcatcctttgccgcatcaggacccttgattcctgaagagaacaaggagagggtacaagaactccctgattctggagccctcatgctagtccccaatcgccagcttactgctgattattttgagaaaacttggcttagccttaaagttgctcatcagcaagtgttgccttggcggggagaattccatcctgacaccctccagatggctcttcaagtagtgaacatccagaccatcgcaatgagtagggctgggtctcggccatggaaagcatacctcagtgctcaggatgatactggctgtctgttcttaacagaactgctattggagcctggaaactcagaaatgcagatctctgtgaaacaaaatgaagcaagaacggagacgctgaatagttttatttctgtattagaaactgtgattggaacaattgaagaaataaaatcataacagag

SEQ ID NO: 430852 - DNA, 2669 bp, Homo sapiens
ggcgtggaagtgtgtcagggccagcgtgccggccctacggaagccgagcctgaggcgagatctcgccttttgtattttcactgactcatatttcctttactcaggctcccacatcaggacgagaaggagccctcgagttaccgtgggagctgtgggagctgccctgtgactcttaggaagatgccgtaccttggctccgaggacgtggtgaaggagctgaagaaggctctgtgcaatcctcacattcaagctgataggctgcgctaccggaatgtcatccagcgagtgattaggtacatgactcaaggcttggacatgtctggtgtttttatggaaatggtgaaggccagtgccactgtagatattgtccagaagaagttggtttatctgtacatgtgcacatatgctcccctgaaaccagatctggctctcctggccatcaatacgctgtgcaaagactgctcagaccccaatccaatggtgcgagggctggcgttacggagcatgtgtagcctcaggatgcctggtgtgcaggagtatatacaacagcctattctcaatggtctgcgggataaggcttcatatgtcaggagagtggcagtccttggatgtgccaagatgcataatcttcatggagactctgaagtagatggtgccctggtaaatgaattatacagtttgctgcgtgaccaggatccaattgtagttgtgaactgcttgaggtctctagaggaaattctgaaacaggaaggaggcgttgtcatcaataagcccattgctcaccatctcttaaatcgaatgtcaaaactggaccaatggggccaggctgaagtattgaactttctgctacgctaccaaccccgcagtgaggaagaactatttgacattctcaatctgttggatagtttcctcaagagcagtagcccaggtgtggtgatgggagctaccaaactttttctgatcttggcaaaaatgtttccccacgtacaaactgatgtccttgtgcgggtcaagggacctttgctagctgcctgttcttcagagagccgtgagctctgttttgttgctctttgtcatgtacgccagatcttgcatagtttaccaggtcactttagcagccactacaaaaagtttttttgctcctactcggagccccactacatcaaactacagaaagtggaggtgctgtgtgaactggtgaacgatgagaatgtgcagcaggtgctagaggagcttcgagggtactgcacggatgtgtctgcggactttgcacaggctgccatctttgccataggtggcattgccaggacttacacagatcaatgtgttcagattttaacagagttgctgggtcttcgacaagagcacattaccacagtggtggtgcagactttccgagacctggtttggttgtgtcctcagtgtactgaagctgtatgtcaggccctgcccggctgtgaagagaacattcaagatagtgaggggaagcaagcacttatttggctacttggtgtccatggggaaagaattcctaatgctccttatgtgttagaggactttgttgagaatgtgaagtcggaaacatttccagctgttaagatggagctgctcactgctttgctgcgccttttcctctcccgacctgctgagtgccaggacatgctaggacgtttgttgtattactgcatagaggaagaaaaagatatggctgtacgggaccgaggtctcttctattatcgcctcctcttagttggcattgatgaagttaagcggattctgtgtagccctaaatctgaccctactcttggacttttggaggatccggcagaaagacctgtgaatagctgggcctcagacttcaacacactggtgccagtgtatggcaaagcccactgggcaactatctctaaatgccagggggcagagcgttgtgacccagagcttcctaaaacttcatcctttgccgcatcaggtaaaaacagtccttaccttaaatcttgtcatgataaatctttaccttttcaatgattggtggaaagtagagtatcttagcactaaacctcagactgttgcctgaatttgaagcatttgtgagcaagaaagaggttcgtcactggttatttcagccatttgtccaaaaataaaagtcacattgtgtacatttgggaatttggataaaaaacttagctcctacagattaagaacatctttcacacaagttttctgtctcttttaggacccttgattcctgaagagaacaaggagagggtacaagaactccctgattctggagccctcatgctagtccccaatcgccagcttactgctgattattttgagaaaacttggcttagccttaaagttgctcatcagcaagtgttgccttggcggggagaattccatcctgacaccctccagatggctcttcaagtagtgaacatccagaccatcgcaatgagtagggctgggtctcggccatggaaagcatacctcagtgctcaggatgatactggctgtctgttcttaacagaactgctattggagcctggaaactcagaaatgcagatctctgtgaaacaaaatgaagcaagaacggagacgctgaatagttttatttctgtattagaaactgtgattggaacaattgaagaaataaaatcataacagag

SEQ ID NO: 430853 - DNA, 1884 bp, Homo sapiens
gtgtcttaaaatgtaaggaacctggacccagtgtatgctgatcatgtctttggtcttagaggagtgtgcatttgtattaacaactcatcttggaattttaagccttttttgtgtaaactttaaatagtacatgaaaagtgacttaattatggcacagcctatttttaagaattctccctttgctatgatgaacaaccacctggtcatatggcagtggcatggaaatggtcctaattttgttgctaaaatagctcttttgttttgttttttggatagaatgtcaaaactggaccaatggggccaggctgaagtattgaactttctgctacgctaccaaccccgcagtgaggaagaactatttgacattctcaatctgttggatagtttcctcaagagcagtagcccaggtgtggtgatgggagctaccaaactttttctgatcttggcaaaaatgtttccccacgtacaaactgatgtccttgtgcgggtcaagggacctttgctagctgcctgttcttcagagagccgtgagctctgttttgttgctctttgtcatgtacgccagatcttgcatagtttaccaggtcactttagcagccactacaaaaagtttttttgctcctactcggagccccactacatcaaactacagaaagtggaggtgctgtgtgaactggtgaacgatgagaatgtgcagcaggtgctagaggagcttcgagggtactgcacggatgtgtctgcggactttgcacaggctgccatctttgccataggtggcattgccaggacttacacagatcaatgtgttcagattttaacagagttgctgggtcttcgacaagagcacattaccacagtggtggtgcagactttccgagacctggtttggttgtgtcctcagtgtactgaagctgtatgtcaggccctgcccggctgtgaagagaacattcaagatagtgaggggaagcaagcacttatttggctacttggtgtccatggggaaagaattcctaatgctccttatgtgttagaggactttgttgagaatgtgaagtcggaaacatttccagctgttaagatggagctgctcactgctttgctgcgccttttcctctcccgacctgctgagtgccaggacatgctaggacgtttgttgtattactgcatagaggaagaaaaagatatggctgtacgggaccgaggtctcttctattatcgcctcctcttagttggcattgatgaagttaagcggattctgtgtagccctaaatctgaccctactcttggacttttggaggatccggcagaaagacctgtgaatagctgggcctcagacttcaacacactggtgccagtgtatggcaaagcccactgggcaactatctctaaatgccagggggcagagcgttgtgacccagagcttcctaaaacttcatcctttgccgcatcaggacccttgattcctgaagagaacaaggagagggtacaagaactccctgattctggagccctcatgctagtccccaatcgccagcttactgctgattattttgagaaaacttggcttagccttaaagttgctcatcagcaagtgttgccttggcggggagaattccatcctgacaccctccagatggctcttcaagtagtgaacatccagaccatcgcaatgagtagggctgggtctcggccatggaaagcatacctcagtgctcaggatgatactggctgtctgttcttaacagaactgctattggagcctggaaactcagaaatgcagatctctgtgaaacaaaatgaagcaagaacggagacgctgaatagttttatttctgtattagaaactgtgattggaacaattgaagaaataaaatcataacagag

SEQ ID NO: 430854 - DNA, 1186 bp, Homo sapiens
gtgctcgcttcggcagcacatatactaaaattggaacgatacagagaagattagcatggcccctgcgcaaggatgacacgcaaattcgtgaagcgttccatatttttgttcagattttaacagagttgctgggtcttcgacaagagcacattaccacagtggtggtgcagactttccgagacctggtttggttgtgtcctcagtgtactgaagctgtatgtcaggccctgcccggctgtgaagagaacattcaagatagtgaggggaagcaagcacttatttggctacttggtgtccatggggaaagaattcctaatgctccttatgtgttagaggactttgttgagaatgtgaagtcggaaacatttccagctgttaagatggagctgctcactgctttgctgcgccttttcctctcccgacctgctgagtgccaggacatgctaggacgtttgttgtattactgcatagaggaagaaaaagatatggctgtacgggaccgaggtctcttctattatcgcctcctcttagttggcattgatgaagttaagcggattctgtgtagccctaaatctgaccctactcttggacttttggaggatccggcagaaagacctgtgaatagctgggcctcagacttcaacacactggtgccagtgtatggcaaagcccactgggcaactatctctaaatgccagggggcagagcgttgtgacccagagcttcctaaaacttcatcctttgccgcatcaggacccttgattcctgaagagaacaaggagagggtacaagaactccctgattctggagccctcatgctagtccccaatcgccagcttactgctgattattttgagaaaacttggcttagccttaaagttgctcatcagcaagtgttgccttggcggggagaattccatcctgacaccctccagatggctcttcaagtagtgaacatccagaccatcgcaatgagtagggctgggtctcggccatggaaagcatacctcagtgctcaggatgatactggctgtctgttcttaacagaactgctattggagcctggaaactcagaaatgcagatctctgtgaaacaaaatgaagcaagaacggagacgctgaatagttttatttctgtattagaaactgtgattggaacaattgaagaaataaaatcataacagag

SEQ ID NO: 430855 - DNA, 1309 bp, Homo sapiens
acagcaatactaccccacatttgcatacagctttatgttttacaaagtgctttttcatacattagttcatttatcctcatgtcaatctgataagagcaatatgcattcaagaaattattgcttatttcattacatttcttagataaccattgaccacacctccaaaacccattttacagaaatccagccagaatcatgagtctgaatacatgactgttcttaagattcctgcctacctggaggctctaatcctgtgctcttgtaccctggcctgtattgtagtggtggtgcagactttccgagacctggtttggttgtgtcctcagtgtactgaagctgtatgtcaggccctgcccggctgtgaagagaacattcaagatagtgaggggaagcaagcacttatttggctacttggtgtccatggggaaagaattcctaatgctccttatgtgttagaggactttgttgagaatgtgaagtcggaaacatttccagctgttaagatggagctgctcactgctttgctgcgccttttcctctcccgacctgctgagtgccaggacatgctaggacgtttgttgtattactgcatagaggaagaaaaagatatggctgtacgggaccgaggtctcttctattatcgcctcctcttagttggcattgatgaagttaagcggattctgtgtagccctaaatctgaccctactcttggacttttggaggatccggcagaaagacctgtgaatagctgggcctcagacttcaacacactggtgccagtgtatggcaaagcccactgggcaactatctctaaatgccagggggcagagcgttgtgacccagagcttcctaaaacttcatcctttgccgcatcaggacccttgattcctgaagagaacaaggagagggtacaagaactccctgattctggagccctcatgctagtccccaatcgccagcttactgctgattattttgagaaaacttggcttagccttaaagttgctcatcagcaagtgttgccttggcggggagaattccatcctgacaccctccagatggctcttcaagtagtgaacatccagaccatcgcaatgagtagggctgggtctcggccatggaaagcatacctcagtgctcaggatgatactggctgtctgttcttaacagaactgctattggagcctggaaactcagaaatgcagatctctgtgaaacaaaatgaagcaagaacggagacgctgaatagttttatttctgtattagaaactgtgattggaacaattgaagaaataaaatcataacagag

SEQ ID NO: 430856 - DNA, 1284 bp, Homo sapiens
ctgatgtgcactctaggttagtaaccatttttgtgaaaaatttagagaaattctttgagcagcttccactgaaacactaaaacccaatagggccaaaggcccaaaacctgaggaaaccttatttattgcttaatccaacataggctatgaaagttttgagtttcctcttgtgtattagaatttcattcctatttgttgtagagagtatagtacggggaatcagtaaattaaatgaagtaaactaaagattacaccttttctgctggcactaagcgaaaagcaaaaccagtggctgtctattatctcctgtgttttagacagtcaagtgttgagcacttgctcttattcctttattctctaggggaagcaagcacttatttggctacttggtgtccatggggaaagaattcctaatgctccttatgtgttagaggactttgttgagaatgtgaagtcggaaacatttccagctgttaagatggagctgctcactgctttgctgcgccttttcctctcccgacctgctgagtgccaggacatgctaggacgtttgttgtattactgcatagaggaagaaaaagatatggctgtacgggaccgaggtctcttctattatcgcctcctcttagttggcattgatgaagttaagcggattctgtgtagccctaaatctgaccctactcttggacttttggaggatccggcagaaagacctgtgaatagctgggcctcagacttcaacacactggtgccagtgtatggcaaagcccactgggcaactatctctaaatgccagggggcagagcgttgtgacccagagcttcctaaaacttcatcctttgccgcatcaggacccttgattcctgaagagaacaaggagagggtacaagaactccctgattctggagccctcatgctagtccccaatcgccagcttactgctgattattttgagaaaacttggcttagccttaaagttgctcatcagcaagtgttgccttggcggggagaattccatcctgacaccctccagatggctcttcaagtagtgaacatccagaccatcgcaatgagtagggctgggtctcggccatggaaagcatacctcagtgctcaggatgatactggctgtctgttcttaacagaactgctattggagcctggaaactcagaaatgcagatctctgtgaaacaaaatgaagcaagaacggagacgctgaatagttttatttctgtattagaaactgtgattggaacaattgaagaaataaaatcataacagag

SEQ ID NO: 430857 - DNA, 1519 bp, Homo sapiens
ggcgtggaagtgtgtcagggccagcgtgccggccctacggaagccgagcctgaggcgagatctcgccttttgtattttcactgactcatatttcctttactcaggctcccacatcaggacgagaaggagccctcgagttaccgtgggagctgtgggagctgccctgtgactcttaggaagatgccgtaccttggctccgaggacgtggtgaaggagctgaagaaggctctgtgcaatcctcacattcaagctgataggctgcgctaccggaatgtcatccagcgagtgattaggtacatgactcaaggcttggacatgtctggtgtttttatggaaatggtgaaggccagtgccactgtagatattgtccagaagaagttggtttatctgtacatgtgcacatatgctcccctgaaaccagatctggctctcctggccatcaatacgctgtgcaaagactgctcagaccccaatccaatggtgcgagggctggcgttacggagcatgtgtagcctcaggatgcctggtgtgcaggagtatatacaacagcctattctcaatggtctgcgggataaggcttcatatgtcaggagagtggcagtccttggatgtgccaagatgcataatcttcatggagactctgaagtagatggtgccctggtaaatgaattatacagtttgctgcgtgaccaggatccaattgtagttgtgaactgcttgaggtctctagaggaaattctgaaacaggaaggaggcgttgtcatcaataagcccattgctcaccatctcttaaatcgaatgtcaaaactggaccaatggggccaggctgaagtattgaactttctgctacgctaccaaccccgcagtgaggaagaactatttgacattctcaatctgttggatagtttcctcaagagcagtagcccaggtgtggtgatgggagctaccaaactttttctgatcttggcaaaaatgtttccccacgtacaaactgatgtccttgtgcgggtcaagggacctttgctagctgcctgttcttcagagagccgtgagctctgttttgttgctctttgtcatgtacgccagatcttgcatagtttaccaggtcactttagcagccactacaaaaagtttttttgctcctactcggagccccactacatcaaactacagaaagtggaggtgctgtgtgaactggtgaacgatgagaatgtgcagcaggtgctagaggagcttcgagggtactgcacggatgtgtctgcggactttgcacaggctgccatctttgccatagactttttcatagtaccctgtctggaatttgaaaggctggagtgactcaaaaactgaaaacagctgttgagccaagttttgaaggatttcaagtacaggaggaggagcaaccctcatatttggaataaagcatggttattttaggggcagagaagagggagcaaagaggagacaagaaatccttaggagactgctgtcaagtgtcccccacaaaaatactccattg

SEQ ID NO: 430858 - DNA, 474 bp, Homo sapiens
agtcacatgaccaagtgttgatttttctggaggaaaaattttatggaaatgatataggggaaaggtgggaggagatgaaagaacaggcaagagctgtcagggttaaatccaggtggcccagggctagctggctctaacaactagcatgacagcctccaatcagaaaggcaggtaaggggacagggtgaggagaatgggcagatactgacagaaattaaagtaaagggattgtgaaagtaaagagctcttcctgattctcatcttctcttttttctattacaaggcattgaacttggcacttcctgtattctttgtgatcactattgagtgcattagttaacacccaaggggatggcttgattgggaatgtagtgaaaggagctgatctactgtattgtaatgtaaaacagctacagccagttattttgtaagattataagttgttcattaaaaaatcagcacacaaaatatgaa

SEQ ID NO: 430859 - DNA, 1993 bp, Homo sapiens
agtcacatgaccaagtgttgatttttctggaggaaaaattttatggaaatgatataggggaaaggtgggaggagatgaaagaacaggcaagagctgtcagggttaaatccaggcccgggcatgagaatggaagtgatcagggagactcggtccttgttccaagtctccaaagaagaccaaagtgggtcccttgagcaatgaagaatctgagataaattctcttcaagtatcatgtacaaaatctgtgagccagagattttgacttgagcaagccatggaaatgcatggagcaagggtgacactctgtggggagacagaagaatttcaactatttaatgtccattttgttgtttttaccctttcttatccaatagatggaatgcacatgaaatgaccatattaagcctctctctatttacatcccaggctcactgggatgtggtctactgcagttacattttcttgtaacggtttctggattagaccctagggaaagtgagtaaggagccagtttctgtttaacattctagttttactcattttaggaaggctgtgagtgaggcttgtctcctttaaagtttcttctccaatggaaaccaagaacagacaaaatttagagctcagctgtggtctcttctcatcttctgctcttttgctttgaccacagtttttctactcttcccatcaacactagagcaatggctgtgcaaataggaataggaaatactaccacaatgatagaaatattatccacactatcacgtagggaagaacaatatcctgaaagagaataaaacacgaataaggtgatgtacccacattaatctgtgggtttgtggaatgagggttgcaaagttattgggaaaaggaaagagcagagttcacccattcaaaaaaaaccttttgtctactaatctctagtgtaaagaaaatgtagttcagataccattcattgtcttgggtcatgcttagtgcccccaagaagacaaacatatttattcttgggattctgataggcttcaatatgcaaaggacaatggaaaagtttagacactctattttcaaaattttataaacttgttttattggggaaaatgtccaaattgctagacacattctaagttctgccttggagaatcctactttgtctgagattgaggcagaggaattgttatcctgggcattactcagctcaggaacatggagcctgtggttcatgccagtgtgtgtcttcatgcagtctctccacaagagcaacagtaagaacatttctgttttaaatttcattttaaaatattttattatctgcaattcaccactgctctgggaaagcaaaaggaaagttcctgttgtgtgtgaagagcctcttaggctataaggcttcccagccatagtcagctatagctattcagagacagcaggttcttccagtctttgttcctgggacctgatgttttgagcaactcaggtcactgataaagtggaaggactaagacactgtggtcacagatcccagcaacatcaactcacactcaatccatgtggtggtccacattctgctactcttatccacccatgtggtcattgagagcctttctcagagactcttctgtgtgtttgattgtgcccaggtggcccagggctagctggctctaacaactagcatgacagcctccaatcagaaaggcaggtaaggggacagggtgaggagaatgggcagatactgacagaaattaaagtaaagggattgtgaaagtaaagagctcttcctgattctcatcttctcttttttctattacaaggcattgaacttggcacttcctgtattctttgtgatcactattgagtgcattagttaacacccaaggggatggcttgattgggaatgtagtgaaaggagctgatctactgtattgtaatgtaaaacagctacagccagttattttgtaagattataagttgttcattaaaaaatcagcacacaaaatatgaa

SEQ ID NO: 430860 - DNA, 2445 bp, Homo sapiens
agtcacatgaccaagtgttgatttttctggaggaaaaattttatggaaatgatataggggaaaggtgggaggagatgaaagaacaggcaagagctgtcagggttaaatccaggcccgggcatgagaatggaagtgatcagggagactcggtccttgttccaagtctccaaagaagaccaaagtgggtcccttgagcaatgaagaatctgagataaattctcttcaagtatcatgtacaaaatctgtgagccagagattttgacttgagcaagccatggaaatgcatggagcaagggtgacactctgtggggagacagaagaatttcaactatttaatgtccattttgttgtttttaccctttcttatccaatagatggaatgcacatgaaatgaccatattaagcctctctctatttacatcccaggctcactgggatgtggtctactgcagttacattttcttgtaacggtttctggattagaccctagggaaagtgagtaaggagccagtttctgtttaacattctagttttactcattttaggaaggctgtgagtgaggcttgtctcctttaaagtttcttctccaatggaaaccaagaacagacaaaatttagagctcagctgtggtctcttctcatcttctgctcttttgctttgaccacagtttttctactcttcccatcaacactagagcaatggctgtgcaaataggaataggaaatactaccacaatgatagaaatattatccacactatcacgtagggaagaacaatatcctgaaagagaataaaacacgaataaggtgatgtacccacattaatctgtgggtttgtggaatgagggttgcaaagttattgggaaaaggaaagagcagagttcacccattcaaaaaaaaccttttgtctactaatctctagtgtaaagaaaatgtagttcagataccattcattgtcttgggtcatgcttagtgcccccaagaagacaaacatatttattcttgggattctgataggcttcaatatgcaaaggacaatggaaaagtttagacactctattttcaaaattttataaacttgttttattggggaaaatgtccaaattgctagacacattctaagttctgccttggagaatcctactttgtctgagattgaggcagaggaattgttatcctgggcattactcagctcaggaacatggagcctgtggttcatgccagtgtgtgtcttcatgcagtctctccacaagagcaacagtaagaacatttctgttttaaatttcattttaaaatattttattatctgcaattcaccactgctctgggaaagcaaaaggaaagttcctgttgtgtgtgaagagcctcttaggctataaggcttcccagccatagtcagctatagctattcagagacagcaggttcttccagtctttgttcctgggacctgatgttttgagcaactcaggtcactgataaagtggaaggactaagacactgtggtcacagatcccagcaacatcaactcacactcaatccatgtggtggtccacattctgctactcttatccacccatgtggtcattgagagcctttctcagagactcttctgtgtgtttgattgtgcccaggtggcccagggctagctggctctaacaactagcatgacagcctccaatcagaaaggcaggtaaggggacagggtgaggagaatgggcagatactgacagaaattaaagtaaagggattgtgaaagtaaagagctcttcctgattctcatcttctcttttttctattacaaggcattgaacttggcacttcctgtattctttgtgatcactattgagtgcattagttaacacccaaggggatggcttgattgggaatgtagtgaaaggagctgatctactgtattgtaatgtaaaacagctacagccagttattttgtaagattataagttgttcattaaaaaatcagcacacaaaatatgaaaaaaaaaaaaaaaaaaaaaaaaaaccaaaaaacacaaaaaacaacaaaaacaaaaaacaaaaaaccaaaaaaaaaaggagagaaagaaaaaaaaaaaaaaaaaaaaaaaagtgggagggcagccgcagcctgctaaacaaaacgtccatcacacacttgtggggggcggcgcacccgccaatggacgagcaatggtaatacgcgaagaaaagaggaaaagagtgacacaacaacacacccagggtgggggtgggctcataaccacacaaacagaacgaaagcgaccgggcgggtaaagaaaaagaagagtggtgccgaacacaacaagtcaccacacgagagggtctgctagacgagatcagtacagggagctcatacctgcacacaacggccaggcgactaggcgagagagcagaaagtatgaacaacggcgacaggggaggtgggggtga

SEQ ID NO: 430861 - DNA, 3141 bp, Homo sapiens
  misc_feature (2986)..(2986): n is a, c, g, or t
cgcgcgcaggaaggccgcctcattggtccgcgctgtcgggcttcggcggcttttctctttagcgctcagggcgctgacccactgctcttcctcttaagaaagtgctccattccttccggcgcccggagctgctggcccaaagggatccggagcgagctagggcagacaccatgaccacccttgatgataagttgctgggggagaaactgcagtactactatagcagcagtgaggatgaggacagtgaccacgaggacaaggaccgaggcagatgtgccccagccagcagttctgtgcctgcagaggctgagctggcaggcgaaggcatctcagttaacacaggcccaaaaggtgtgatcaatgactggcgccgcttcaagcagttggagacagagcagagggaggagcagtgccgggagatggaaaggctgatcaagaagctgtcaatgacttgcaggtcccatctggatgaagaggaggagcaacagaaacagaaagacctccaggagaagatcagtgggaagatgactctgaaggagtttgccataatgaatgaggaccaagatgatgaagagtttctgcagcagtaccggaagcagcgaatggaagagatgcggcagcagcttcacaaggggccccaattcaagcaggtttttgagatctccagtggagaagggtttttagacatgattgataaagaacagaaaagcattgtcatcatggttcatatttatgaggatggcattccagggaccgaagccatgaatggttgcatgatctgccttgccgcagagtacccagctgtcaagttctgcaaggtgaagagctcagttattggcgccagcagtcagttcaccaggaatgcccttcctgccctgctgatctataaggggggtgaattgatcggcaattttgttcgtgttactgaccagctgggggatgatttctttgctgtggaccttgaagcttttctccaggaatttggattactcccagaaaaggaagtcttggtgctgacatctgtgcgtaactctgccacgtgtcacagtgaggatagcgacctggaaatagattgaactgatagtctagttgcatagatttctcattgtttgggttggaatacacgtcattgtttatttttgttcctttgtcttctggcttttcagctgttctttgtagtcccttttattatgcataaaataaagaaattcttagattaaatcagaatgctgaataaccttgtagctagcaataaggtgacttacagttgtataaacaggaagccaggcttttgaactgtttacttaagattctgtggtgtgacatctctgttattgtttccagtcaatatttacaaagcatcctaaagacagggtcttggaaattgtcttcagatgatcttagaggtctctgccaagtctgagagtataattctgtaggtattgtgttatttgcaacgtaaatagtgcattttcttaatcaaatgattgtaaattatatttacttgtaatcagttccatagctttagacggtggttagattttttttttccccaccagggtcttgtttaaaggggtgagccaccgcacccagtcctgaggggtggcctctgctgctggatttcatgtcttcctccagcatgactaagtctggaacagcaggaagggttgatgcttactgacctggtgatgttagaagacaagtagtttatggatttaaacattagagctggagtggggctggaaatctttgtaaaggaagttctttcagtaagatgcccctgcttgtctttgtctcttttttgtttaacaaggtaactttttgtttaacaaggtaactttttgtttaacctagattttttttaaaacttttttttttttcatattggaaaagtaattcatattcagtagaggaaaactgaccaaaacagaagcaaaaataagaaaattaaaataatctctaatcctactacctagaataaaacactattaatattttggtctgtttcctgccaaggtgttttctgtgtatacatggatattttgtttgtttttaaacaaaacgatgggatcattctgaacatactgttctatagtatggtcagctaataatatatcagacctttttttatattattaaatattctacaactttttaaaaatgtctattaatattccatcgtatagatgtgatataatttgcttgatggttgtctcttaaaaagaaagatagcaaatactttttttaaattacaaaagtgatagatgttcattgtagaaaatgtaataaacactgttaagacttaaaagccatataattccaccaaccaaaattaatcccttttgtcatatttctagtcatttttatagcctttttttctatgtatttataataattatcatttgcgtttttttcctttttttaactttaaaaatgtatattctagggtcaggggaaatgtaatctggaattaaatattagccttaaaattcacaattttgattttcctggcttttcaggaattgactaactgtaaaagagtcttgaaagtatttagtcaacaaacagagtgcattttttttttttttgactaagaaagctcgttgtagtagaaagggtggaatgtattgaaaattattagaagcagggaagtattgttagtctagcttatttcctttcagtcttttttcaatatttttataaacattgagtacttactgaatttagttctgtgctcttccttatttagtgttgtatcataaatactttgatgtttcaaacattctaaataaataattttcagtggcttcataatatttcatcatttggatatataataatttatttaaccagtctctttatttttatttatttattttgtttgttttctttgagatggagtctcgctctgtcacccaggctggagtacaatagcgtgatctcggctcactgcaacctccacctcctgggttcaagcagttctccngcctcagcctcctgagtactgggcacggtgttgtacctctagtcccagctacttgggaggcttagtcaggaggatctcttgagcctgggaggtcaaggctgcagtgaaccatgattgcactccaacctgggcgacagagaccctgtctcaaaaaa

SEQ ID NO: 430862 - DNA, 1218 bp, Homo sapiens
cgcgcgcaggaaggccgcctcattggtccgcgctgtcgggcttcggcggcttttctctttagcgctcagggcgctgacccactgctcttcctcttaagaaagtgctccattccttccggcgcccggagctgctggcccaaagggatccggagcgagctagggcagacaccatgaccacccttgatgataagttgctgggggagaaactgcagtactactatagcagcagtgaggatgaggacagtgaccacgaggacaaggaccgaggcagatgtgccccagccagcagttctgtgcctgcagaggctgagctggcaggcgaaggcatctcagttaacacaggcccaaaaggtgtgatcaatgactggcgccgcttcaagcagttggagacagagcagagggaggagcagtgccgggagatggaaaggctgatcaagaagctgtcaatgacttgcaggtcccatctggatgaagaggaggagcaacagaaacagaaagacctccaggagaagatcagtgggaagatgactctgaaggagtttgccataatgaatgaggaccaagatgatgaagagtttctgcagcagtaccggaagcagcgaatggaagagatgcggcagcagcttcacaaggggccccaattcaagcaggtttttgagatctccagtggagaagggtttttagacatgattgataaagaacagaaaagcattgtcatcatggttcatatttatgaggatggcattccagggaccgaagccatgaatggttgcatgatctgccttgccgcagagtacccagctgtcaagttctgcaaggtgaagagctcagttattggcgccagcagtcagttcaccaggaatgcccttcctgccctgctgatctataaggggggtgaattgatcggcaattttgttcgtgttactgaccagctgggggatgatttctttgctgtggaccttgaagcttttctccaggaatttggattactcccagaaaaggaagtcttggtgctgacatctgtgcgtaactctgccacgtgtcacagtgaggatagcgacctggaaatagattgaactgatagtctagttgcatagatttctcattgtttgggttggaatacacgtcattgtttatttttgttcctttgtcttctggcttttcagctgttctttgtagtcccttttattatgcataaaataaagaaattcttagatt

SEQ ID NO: 430863 - DNA, 452 bp, Homo sapiens
aaaaaaagtagataaaatattgtcaagactgacaaaaagaaataagctcatgaagtgagattatatgatgctgcctatttggattgagaggaaatgtgatattgtagttaaaaacatgggtttttaaaatctagtttgagtactggtcttatgcttactgggtgaacttgttcaaataatgtcaagttttggaacctcatttataaagtggggctattaaaagtcccttcccgatggagttatggaattcagtgagatataatgcatgtaaagtacttagcatggtgccttatatattatcagcatgtagtacatgttaactgttttatttctttttatttttttggagacagggtatcaccctgtctcccaggccgggaggcggagcttgcagtgagccgagatcgcaccactgcactccagcctgggcgacagagcgagactccgtctca

SEQ ID NO: 430864 - DNA, 2815 bp, Homo sapiens
cgcgcgcaggaaggccgcctcattggtccgcgctgtcgggcttcggcggcttttctctttagcgctcagggcgctgacccactgctcttcctcttaagaaagtgctccattccttccggcgcccggagctgctggcccaaagggatccggagcgagctagggcagacaccatgaccacccttgatgataagttgctgggggagaaactgcagtactactatagcagcagtgaggatgaggacagtgaccacgaggacaaggaccgaggcagatgtgccccagccagcagttctgtgcctgcagaggctgagctggcaggcgaaggcatctcagttaacacaggcccaaaaggtgtgatcaatgactggcgccgcttcaagcagttggagacagagcagagggaggagcagtgccgggagatggaaaggctgatcaagaagctgtcaatgacttgcaggtcccatctggatgaagaggaggagcaacagaaacagaaagacctccaggagaagatcagtgggaagatgactctgaaggagtttgccataatgaatgaggaccaagatgatgaagagtttctgcagcagtaccggaagcagcgaatggaagagatgcggcagcagcttcacaaggggccccaattcaagcaggtttttgagatctccagtggagaagggtttttagacatgattgataaagaacagaaaagcattgtcatcatggttcatatttatgaggatggcattccagggaccgaagccatgaatggttgcatgatctgccttgccgcagagtacccagctgtcaagttctgcaaggtgaagagctcagttattggcgccagcagtcagttcaccaggaatgcccttcctgccctgctgatctataaggggggtgaattgatcggcaattttgttcgtgttactgaccagctgggggatgatttctttgctgtggaccttgaagcttttctccaggaatttggattactcccagaaaaggaagtcttggtgctgacatctgtgcgtaactctgccacgtgtcacagtgaggatagcgacctggaaatagattgaactgatagtctagttgcatagatttctcattgtttgggttggaatacacgtcattgtttatttttgttcctttgtcttctggcttttcagctgttctttgtagtcccttttattatgcataaaataaagaaattcttagattaaatcagaatgctgaataaccttgtagctagcaataaggtgacttacagttgtataaacaggaagccaggcttttgaactgtttacttaagattctgtggtgtgacatctctgttattgtttccagtcaatatttacaaagcatcctaaagacagggtcttggaaattgtcttcagatgatcttagaggtctctgccaagtctgagagtataattctgtaggtattgtgttatttgcaacgtaaatagtgcattttcttaatcaaatgattgtaaattatatttacttgtaatcagttccatagctttagacggtggttagattttttttttccccaccagggtcttgtttaaaggggtgagccaccgcacccagtcctgaggggtggcctctgctgctggatttcatgtcttcctccagcatgactaagtctggaacagcaggaagggttgatgcttactgacctggtgatgttagaagacaagtagtttatggatttaaacattagagctggagtggggctggaaatctttgtaaaggaagttctttcagtaagatgcccctgcttgtctttgtctcttttttgtttaacaaggtaactttttgtttaacaaggtaactttttgtttaacctagattttttttaaaacttttttttttttcatattggaaaagtaattcatattcagtagaggaaaactgaccaaaacagaagcaaaaataagaaaattaaaataatctctaatcctactacctagaataaaacactattaatattttggtctgtttcctgccaaggtgttttctgtgtatacatggatattttgtttgtttttaaacaaaacgatgggatcattctgaacatactgttctatagtatggtcagctaataatatatcagacctttttttatattattaaatattctacaactttttaaaaatgtctattaatattccatcgtatagatgtgatataatttgcttgatggttgtctcttaaaaagaaagatagcaaatactttttttaaattacaaaagtgatagatgttcattgtagaaaatgtaataaacactgttaagacttaaaagccatataattccaccaaccaaaattaatcccttttgtcatatttctagtcatttttatagcctttttttctatgtatttataataattatcatttgcgtttttttcctttttttaactttaaaaatgtatattctagggtcaggggaaatgtaatctggaattaaatattagccttaaaattcacaattttgattttcctggcttttcaggaattgactaactgtaaaagagtcttgaaagtatttagtcaacaaacagagtgcattttttttttttttgactaagaaagctcgttgtagtagaaagggtggaatgtattgaaaattattagaagcagggaagtattgttagtctagcttatttcctttcagtcttttttcaatatttttataaacattgagtacttactgaatttagttctgtgctcttccttatttagtgttgtatcataaatactttgatgtttcaaacattctaaataaataattttcagtggcttcataat

SEQ ID NO: 430865 - DNA, 2998 bp, Homo sapiens
cgcgcgcaggaaggccgcctcattggtccgcgctgtcgggcttcggcggcttttctctttagcgctcagggcgctgacccactgctcttcctcttaagaaagtgctccattccttccggcgcccggagctgctggcccaaagggatccggagcgagctagggcagacaccatgaccacccttgatgataagttgctgggggagaaactgcagtactactatagcagcagtgaggatgaggacagtgaccacgaggacaaggaccgaggcagatgtgccccagccagcagttctgtgcctgcagaggctgagctggcaggcgaaggcatctcagttaacacaggcccaaaaggtgtgatcaatgactggcgccgcttcaagcagttggagacagagcagagggaggagcagtgccgggagatggaaaggctgatcaagaagctgtcaatgacttgcaggtcccatctggatgaagaggaggagcaacagaaacagaaagacctccaggagaagatcagtgggaaggagagatgaggctttgccatgttggccaggctggtcttgaactcctgacctcaagtgatccgctcgtctcagcctcccaaagtgctaggattacaggcgtgagccaccgcgcccggcccatattaactgttatcacgagtgttcagttttcatatttatgctcacttgctggtccgcctgcagatgactctgaaggagtttgccataatgaatgaggaccaagatgatgaagagtttctgcagcagtaccggaagcagcgaatggaagagatgcggcagcagcttcacaaggggccccaattcaagcaggtttttgagatctccagtggagaagggtttttagacatgattgataaagaacagaaaagcattgtcatcatggttcatatttatgaggatggcattccagggaccgaagccatgaatggttgcatgatctgccttgccgcagagtacccagctgtcaagttctgcaaggtgaagagctcagttattggcgccagcagtcagttcaccaggaatgcccttcctgccctgctgatctataaggggggtgaattgatcggcaattttgttcgtgttactgaccagctgggggatgatttctttgctgtggaccttgaagcttttctccaggaatttggattactcccagaaaaggaagtcttggtgctgacatctgtgcgtaactctgccacgtgtcacagtgaggatagcgacctggaaatagattgaactgatagtctagttgcatagatttctcattgtttgggttggaatacacgtcattgtttatttttgttcctttgtcttctggcttttcagctgttctttgtagtcccttttattatgcataaaataaagaaattcttagattaaatcagaatgctgaataaccttgtagctagcaataaggtgacttacagttgtataaacaggaagccaggcttttgaactgtttacttaagattctgtggtgtgacatctctgttattgtttccagtcaatatttacaaagcatcctaaagacagggtcttggaaattgtcttcagatgatcttagaggtctctgccaagtctgagagtataattctgtaggtattgtgttatttgcaacgtaaatagtgcattttcttaatcaaatgattgtaaattatatttacttgtaatcagttccatagctttagacggtggttagattttttttttccccaccagggtcttgtttaaaggggtgagccaccgcacccagtcctgaggggtggcctctgctgctggatttcatgtcttcctccagcatgactaagtctggaacagcaggaagggttgatgcttactgacctggtgatgttagaagacaagtagtttatggatttaaacattagagctggagtggggctggaaatctttgtaaaggaagttctttcagtaagatgcccctgcttgtctttgtctcttttttgtttaacaaggtaactttttgtttaacaaggtaactttttgtttaacctagattttttttaaaacttttttttttttcatattggaaaagtaattcatattcagtagaggaaaactgaccaaaacagaagcaaaaataagaaaattaaaataatctctaatcctactacctagaataaaacactattaatattttggtctgtttcctgccaaggtgttttctgtgtatacatggatattttgtttgtttttaaacaaaacgatgggatcattctgaacatactgttctatagtatggtcagctaataatatatcagacctttttttatattattaaatattctacaactttttaaaaatgtctattaatattccatcgtatagatgtgatataatttgcttgatggttgtctcttaaaaagaaagatagcaaatactttttttaaattacaaaagtgatagatgttcattgtagaaaatgtaataaacactgttaagacttaaaagccatataattccaccaaccaaaattaatcccttttgtcatatttctagtcatttttatagcctttttttctatgtatttataataattatcatttgcgtttttttcctttttttaactttaaaaatgtatattctagggtcaggggaaatgtaatctggaattaaatattagccttaaaattcacaattttgattttcctggcttttcaggaattgactaactgtaaaagagtcttgaaagtatttagtcaacaaacagagtgcattttttttttttttgactaagaaagctcgttgtagtagaaagggtggaatgtattgaaaattattagaagcagggaagtattgttagtctagcttatttcctttcagtcttttttcaatatttttataaacattgagtacttactgaatttagttctgtgctcttccttatttagtgttgtatcataaatactttgatgtttcaaacattctaaataaataattttcagtggcttcataat

SEQ ID NO: 430866 - DNA, 2587 bp, Homo sapiens
aaaaaaagtagataaaatattgtcaagactgacaaaaagaaataagctcatgaagtgagattatatgatgctgcctatttggattgagaggaaatgtgatattgtagttaaaaacatgggtttttaaaatctagtttgagtagctggtcttgaactcctgacctcaagtgatccgctcgtctcagcctcccaaagtgctaggattacaggcgtgagccaccgcgcccggcccatattaactgttatcacgagtgttcagttttcatatttatgctcacttgctggtccgcctgcagatgactctgaaggagtttgccataatgaatgaggaccaagatgatgaagagtttctgcagcagtaccggaagcagcgaatggaagagatgcggcagcagcttcacaaggggccccaattcaagcaggtttttgagatctccagtggagaagggtttttagacatgattgataaagaacagaaaagcattgtcatcatggttcatatttatgaggatggcattccagggaccgaagccatgaatggttgcatgatctgccttgccgcagagtacccagctgtcaagttctgcaaggtgaagagctcagttattggcgccagcagtcagttcaccaggaatgcccttcctgccctgctgatctataaggggggtgaattgatcggcaattttgttcgtgttactgaccagctgggggatgatttctttgctgtggaccttgaagcttttctccaggaatttggattactcccagaaaaggaagtcttggtgctgacatctgtgcgtaactctgccacgtgtcacagtgaggatagcgacctggaaatagattgaactgatagtctagttgcatagatttctcattgtttgggttggaatacacgtcattgtttatttttgttcctttgtcttctggcttttcagctgttctttgtagtcccttttattatgcataaaataaagaaattcttagattaaatcagaatgctgaataaccttgtagctagcaataaggtgacttacagttgtataaacaggaagccaggcttttgaactgtttacttaagattctgtggtgtgacatctctgttattgtttccagtcaatatttacaaagcatcctaaagacagggtcttggaaattgtcttcagatgatcttagaggtctctgccaagtctgagagtataattctgtaggtattgtgttatttgcaacgtaaatagtgcattttcttaatcaaatgattgtaaattatatttacttgtaatcagttccatagctttagacggtggttagattttttttttccccaccagggtcttgtttaaaggggtgagccaccgcacccagtcctgaggggtggcctctgctgctggatttcatgtcttcctccagcatgactaagtctggaacagcaggaagggttgatgcttactgacctggtgatgttagaagacaagtagtttatggatttaaacattagagctggagtggggctggaaatctttgtaaaggaagttctttcagtaagatgcccctgcttgtctttgtctcttttttgtttaacaaggtaactttttgtttaacaaggtaactttttgtttaacctagattttttttaaaacttttttttttttcatattggaaaagtaattcatattcagtagaggaaaactgaccaaaacagaagcaaaaataagaaaattaaaataatctctaatcctactacctagaataaaacactattaatattttggtctgtttcctgccaaggtgttttctgtgtatacatggatattttgtttgtttttaaacaaaacgatgggatcattctgaacatactgttctatagtatggtcagctaataatatatcagacctttttttatattattaaatattctacaactttttaaaaatgtctattaatattccatcgtatagatgtgatataatttgcttgatggttgtctcttaaaaagaaagatagcaaatactttttttaaattacaaaagtgatagatgttcattgtagaaaatgtaataaacactgttaagacttaaaagccatataattccaccaaccaaaattaatcccttttgtcatatttctagtcatttttatagcctttttttctatgtatttataataattatcatttgcgtttttttcctttttttaactttaaaaatgtatattctagggtcaggggaaatgtaatctggaattaaatattagccttaaaattcacaattttgattttcctggcttttcaggaattgactaactgtaaaagagtcttgaaagtatttagtcaacaaacagagtgcattttttttttttttgactaagaaagctcgttgtagtagaaagggtggaatgtattgaaaattattagaagcagggaagtattgttagtctagcttatttcctttcagtcttttttcaatatttttataaacattgagtacttactgaatttagttctgtgctcttccttatttagtgttgtatcataaatactttgatgtttcaaacattctaaataaataattttcagtggcttcataat

SEQ ID NO: 430867 - DNA, 675 bp, Homo sapiens
cgcgcgcaggaaggccgcctcattggtccgcgctgtcgggcttcggcggcttttctctttagcgctcagggcgctgacccactgctcttcctcttaagaaagtgctccattccttccggcgcccggagctgctggcccaaagggatccggagcgagctagggcagacaccatgaccacccttgatgataagttgctgggggagaaactgcagtactactatagcagcagtgaggatgaggacagtgaccacgaggacaaggaccgaggcagatgtgccccagccagcagttctgtgcctgcagaggctgagctggcaggcgaaggcatctcagttaacacaggcccaaaaggtgtgatcaatgactggcgccgcttcaagcagttggagacagagcagagggaggagcagtgccgggagatggaaaggctgatcaagaagctgtcaatgacttgcaggtcccatctggatgaagaggaggagcaacagaaacagaaagacctccaggagaagatcagtgggaagaaatcttgggcaattctgtaagaagagaattgaagtaactgagaggaattttagggcacaggtttgctgaagactgtgctgaaaccacctttacagggaaatgatcttttaatttatttccacatctttctctattaaaaaaaaatcaatg

SEQ ID NO: 430868 - DNA, 730 bp, Homo sapiens
  misc_feature (432)..(432): n is a, c, g, or t
ctctacagaacggaaatgaacttcattcacccccaaacccacccacttaaatccaaagagagcttagggttattatgcatggacaggaacacattctaccaagaacacatgctcttaagagctagtagctcccagttagagtcaaaccagtcattgttatattatagattgaatccagcctctttctcccaaactgtggtcatcactgcatgaatccacactaaggtgtgtgaatgggaacctgcagattatctcctcctactgaaaatgctgcccaggggaatcttggaagctatggacagcatccaggcagagctggtcccactgttatctccagaagcaaatgcccaagctgtgctcagaactggaagcaatggatgaggatagacatagacactcctgtgtctcaaacatgcttctttattactctgntatgactctgtcttccctggggcaggaccccagcctgcctacatttgcagacagacacagtggcatgtggagacaacagtgtgtcccaatgacttttctttaccccctagctgtcggcagtactcagtggaagggtgatattatgacactgacactgctattttgaaacctggaggatggaaaggtgcaaaaatctatcaccagcaacaagaggtgcagactgtgttggtggcggtaattttgtccatcaaatgaatatgtgtgcaatcttcaggatttgcctactggccctacctct

SEQ ID NO: 430869 - DNA, 3265 bp, Homo sapiens
ctctacagaacggaaatgaacttcattcacccccaaacccacccacttaaatccaaagagagcttagggttattatgcatggacaggaacacattctaccaagaacacatgctcttaagagctagtagctcccagttagagtcaaaccagtcattgttatattatagattgaatccagcctctttctcccaaactgtggtcatcactgcatgaatccacactaaggtgtgtgaatgggaacctgcagattatctcctcctactgaaaatgctgcccaggggaatcttggaagctatggacagcatccaggcagagctggtcccactgttatctccagaagcaaatgcccaagctgtgctcagaactggaagcaatggatgacttgtatcaggtgcttgtttgagaggatatattgacattattgccatagtaagcttaaaaaaatgtgcccactcattcattctttgtccatggaccactaatcatgcattgtcatttccaaagataaggggaaacatatcacatatcattgaaatagaaattagggaaagtttgtcaatttgttttcactataaggcatcaatggcagaaactacatatgagtaattttcaaaatagaccattgcttaaatgtttaaatgaagctaaaacaagtatgaacccattggttagagtgcagtggcttctttcaggcagacagcagatgctctcagatttggtggtgagttttggccttggcatggttggcatggagtcagcacaggaagccgggaggtatgaaggggcatccacctgggtgaaactgtcttgccaagccaaagccccgaggcctgccctgaagcagctgtagtggaggagaggcctgggattccttagagtcacctttttacgaatgtaccgccactctgttagctcacaaggaaaataaggaaaagccaggcctcccacctcttgactcttgtgagagtgaagacaacatggggcatttagaaaatatatttttagtgtatgataatgtgggctggcccacacagcaatgagcccaaagaccccctcgctttgggaattattcatggccctgctcatcacagcctctgatatgcatgactgtaacctaggctgagccaagaatggagctcatgccagaaatggtcctaagcatgcacatggccccctggaatatcaaaatcctggggagaaagaaatcatctttgccttgggcagtgaagctggaatggcacatatctatctgttgccacatctcctgcctagtggagaagccttggaaggcaacagacactgagcaagcagcagggaggagaatgtcctggaagggcaggactctacccaagtccctaacatccccagactcttctcttccataaactctctaattactctgctgtttaaatcctggttttggtcaagccagtcaggttgcataaagaatatgaatacagtatgcatcaaagttgcttcccagaacaggaagcaaaacaaacaaacaaacaaacaaaatactgatatcagtacccagggtgcccaattaggtcacacccagtggctgcattgcagcccctgagctcctgctgcaccgtgtgtcctgctgcccgagtgggccccaccctgggttctgaagatgcccttcttaatggagagctcccgatggagggctccaggactgatgctctccctaaggaagggaggcctcagatttggagagggacaccaacaggaccagaggaggactgaggggcactggcaccaataagtggaagggaacagcgtggtaacaaaaaagagccatgccacttgcatgctggagggagtctttttgtgtcagcctaaagcttaggctggtgtccatgtggaacatgacatctttccagtatccctgatccaggaaactgcagtgagacccaggtgacccagctctgtgtcatttggagcccattaaaaagtgaggcagccacatggcggggacattgaccccactccagaccacactcccatctccatacataggatagaaactgttcatcaggaaggaaaaccaaacagaaatttgtggtctaggggaggggtctgcattcagcatggccatgctgggctggagtggctgtggggtgtccagatagatgggcatgtagactagtgctttctcaacctttaatgcatgcacaaatcatcgagatcttgttaaaatgtagatcctgggtgggcacggtggctcacgcctgtaatcccagcactttgggaggctgaggcgggcggatcatgaggtcaggagatcgagaccatcctggctaacacggtgaaaccctgtctctactaaaaatacaaaaaattagccaggcatggtggtgggtgcctgtagtcccagctactcgggaggctgaggcaggagaatggcatgaacccgggaggcggagcttgcagtgagccgagatcgtgctgctgcactccagcctgggcaatagagtgagattccgtctcaaaaaaaaaaaaaaaaaaatgtagatcctggctcaggaggtctgggataggacctgggattctgagtttctaacaagctcccagggatgtccatgcttctggtccctgaaccacactttgagtgacaaggatgtaaactgttggaaacatggatctggtgctcattgcgggaaagggggtgtcctcagggcataggtcacagccaaagccctgacagcgggcaagagtcccagggagaggctgcctgcacattgaggaggggaagggctgggcctgagcagtggggagcatccatgctggcaggtatgcagcaggcaaggagatccaggtggagatcagaggacagtgacagtcacagcagcaggggagagccaggagaaagctgctcctaggggtgtctcaaaggaagaagggctctgcagtgtgaactctgcagagggcagggagaatagaggttaagcctttgctcattctgaattaattgattactgctttttaaaagtgctttctttctctgggaaaaaaaacattccccagtgcctaaggctaacagacgtgggcgctgagctgtgtctggtctgctgagtgtattttccacagagcaatcctcatcttctcagggggtggggatttggacaagactcttcctgaacacgcagcgtggtggggaagggtggccatggaggttttctgttccttctgttgtcactggtgaaagacgacttggtgcccaatttctaataaacacaatgctattagcgtcactcca

SEQ ID NO: 430870 - DNA, 3389 bp, Homo sapiens
ctctacagaacggaaatgaacttcattcacccccaaacccacccacttaaatccaaagagagcttagggttattatgcatggacaggaacacattctaccaagaacacatgctcttaagagctagtagctcccagttagagtcaaaccagtcattgttatattatagattgaatccagcctctttctcccaaactgtggtcatcactgcatgaatccacactaaggtgtgtgaatgggaacctgcagattatctcctcctactgaaaatgctgcccaggggaatcttggaagctatggacagcatccaggcagagctggtcccactgttatctccagaagcaaatgcccaagctgtgctcagaactggaagcaatggatgacttgtatcaggtgcttgtttgagaggatatattgacattattgccatagtaagcttaaaaaaatgtgcccactcattcattctttgtccatggaccactaatcatgcattgtcatttccaaagataaggggaaacatatcacatatcattgaaatagaaattagggaaagtttgtcaatttgttttcactataaggcatcaatggcagaaactacatatgagtaattttcaaaatagaccattgcttaaatgtttaaatgaagctaaaacaagtatgaacccattggttagagtgcagtggcttctttcaggcagacagcagatgctctcagatttggtggtgagttttggccttggcatggttggcatggagtcagcacaggaagccgggaggtatgaaggggcatccacctgggtgaaactgtcttgccaagccaaagccccgaggcctgccctgaagcagctgtagtggaggagaggcctgggattccttagagtcacctttttacgaatgtaccgccactctgttagctcacaaggaaaataaggaaaagccaggcctcccacctcttgactcttgtgagagtgaagacaacatggggcatttagaaaatatatttttagtgtatgataatgtgggctggcccacacagcaatgagcccaaagaccccctcgctttgggaattattcatggccctgctcatcacagcctctgatatgcatgactgtaacctaggctgagccaagaatggagctcatgccagaaatggtcctaagcatgcacatggccccctggaatatcaaaatcctggggagaaagaaatcatctttgccttgggcagtgaagctggaatggcacatatctatctgttgccacatctcctgcctagtggagaagccttggaaggcaacagacactgagcaagcagcagggaggagaatgtcctggaagggcaggactctacccaagtccctaacatccccagactcttctcttccataaactctctaattactctgctgtttaaatcctggttttggtcaagccagtcaggttgcataaagaatatgaatacagtatgcatcaaagttgcttcccagaacaggaagcaaaacaaacaaacaaacaaacaaaatactgatatcagtacccagggtgcccaattaggtcacacccagtggctgcattgcagcccctgagctcctgctgcaccgtgtgtcctgctgcccgagtgggccccaccctgggttctgaagatgcccttcttaatggagagctcccgatggagggctccaggactgatgctctccctaaggaagggaggcctcagatttggagagggacaccaacaggaccagaggaggactgaggggcactggcaccaataagtggaagggaacagcgtggtaacaaaaaagagccatgccacttgcatgctggagggagtctttttgtgtcagcctaaagcttaggctggtgtccatgtggaacatgacatctttccagtatccctgatccaggaaactgcagtgagacccaggtgacccagctctgtgtcatttggagcccattaaaaagtgaggcagccacatggcggggacattgaccccactccagaccacactcccatctccatacataggatagaaactgttcatcaggaaggaaaaccaaacagaaatttgtggtctaggggaggggtctgcattcagcatggccatgctgggctggagtggctgtggggtgtccagatagatgggcatgtagactagtgctttctcaacctttaatgcatgcacaaatcatcgagatcttgttaaaatgtagatcctgggtgggcacggtggctcacgcctgtaatcccagcactttgggaggctgaggcgggcggatcatgaggtcaggagatcgagaccatcctggctaacacggtgaaaccctgtctctactaaaaatacaaaaaattagccaggcatggtggtgggtgcctgtagtcccagctactcgggaggctgaggcaggagaatggcatgaacccgggaggcggagcttgcagtgagccgagatcgtgctgctgcactccagcctgggcaatagagtgagattccgtctcaaaaaaaaaaaaaaaaaaatgtagatcctggctcaggaggtctgggataggacctgggattctgagtttctaacaagctcccagggatgtccatgcttctggtccctgaaccacactttgagtgacaaggatgtaaactgttggaaacatggatctggtgctcattgcgggaaagggggtgtcctcagggcataggtcacagccaaagccctgacagcgggcaagagtcccagggagaggctgcctgcacattgaggaggggaagggctgggcctgagcagtggggagcatccatgctggcaggtatgcagcaggcaaggagatccaggtggagatcagaggacagtgacagtcacagcagcaggggagagccaggagaaagctgctcctaggggtgtctcaaaggaagaagggctctgcagtgtgaactctgcagagggcagggagaatagaggttaagcctttgctcattctgaattaattgattactgctttttaaaagtgctttctttctctgggaaaaaaaacattccccagtgcctaaggctaacagacgtgggcgctgagctgtgtctggtctgctgagtgtattttccacagagcaatcctcatcttctcagggggtggggatttggacaagactcttcctgaacacgcagcgtggtggggaagggtggccatggaggttttctgttccttctgttgtcactggtgaaagacgacttggtgcccaatttctaataaacacaatgctattagcgtcactccaatttagtgtctgattgttaaatgttaatgtactgcactctacagttttaaatataattagagatgtttacagctttggttaaatgcaccttgttcttccacattaaactttattacaagcgtcc

SEQ ID NO: 430871 - DNA, 1008 bp, Homo sapiens
gcggccgcgggcgccgccgcctcctcctccatggctgtttacccggctgcattgtgggagtttgacctccgccgccgccaaccgccgcctcagcttgcgccgccgccgccgccgccgccgccgcgcacgccatgggagccgtgactgacgacgaagttatacggaagcgtctcctcattgatggagatggtgctggagatgatcggagaattaatctgctagtgaagagtttcattaaatggtgcaactctgggtcccaggaagagggatatagccagtaccaacgtatgctgagcacgctgtctcaatgtgaattttcaatgggcaaaactttactagtatatgatatgaatctcagagaaatggaaaattatgaaaaaatttacaaggaaatagaatgtagcatagctggagcacatgaaaaaattgctgagtgcaaaaagcaaattcttcaagcaaaacgaatacgaaaaaatcgccaagaatatgatgctttggcaaaagtgattcagcaccatccagacaggcatgagacattaaaggaactagaggctctgggaaaagaattagagcatctttcacacattaaagaaagtgttgaagataagctggaattgagacggaaacagtttcatgttcttcttagtaccatccatgaacttcagcaaacattggaaaatgatgaaaaactctcagaggtagaagaagctcaggaagcaagcatggaaacagatcctaagccatagacaggctaattgcccaccactcccaggaatattgaaatagctacatgaccataatgtgtttaaaatgtggtatgctcttgagatatttaaagttttggcagtaaaatactctgtttttaagtatgaatgtatttcattcatatttcctctcacaaaggaaaatgacttcagtatagatttgtttttattaaaatgcattttttattcttaagtggtaggaagcaacatccaaaaatgcttaataaaatgcttttaagctgca

SEQ ID NO: 430872 - DNA, 890 bp, Homo sapiens
gcggccgcgggcgccgccgcctcctcctccatggctgtttacccggctgcattgtgggagtttgacctccgccgccgccaaccgccgcctcagcttgcgccgccgccgccgccgccgccgccgcgcacgccatgggagccgtgactgacgatatagccagtaccaacgtatgctgagcacgctgtctcaatgtgaattttcaatgggcaaaactttactagtatatgatatgaatctcagagaaatggaaaattatgaaaaaatttacaaggaaatagaatgtagcatagctggagcacatgaaaaaattgctgagtgcaaaaagcaaattcttcaagcaaaacgaatacgaaaaaatcgccaagaatatgatgctttggcaaaagtgattcagcaccatccagacaggcatgagacattaaaggaactagaggctctgggaaaagaattagagcatctttcacacattaaagaaagtgttgaagataagctggaattgagacggaaacagtttcatgttcttcttagtaccatccatgaacttcagcaaacattggaaaatgatgaaaaactctcagaggtagaagaagctcaggaagcaagcatggaaacagatcctaagccatagacaggctaattgcccaccactcccaggaatattgaaatagctacatgaccataatgtgtttaaaatgtggtatgctcttgagatatttaaagttttggcagtaaaatactctgtttttaagtatgaatgtatttcattcatatttcctctcacaaaggaaaatgacttcagtatagatttgtttttattaaaatgcattttttattcttaagtggtaggaagcaacatccaaaaatgcttaataaaatgcttttaagctgca

SEQ ID NO: 430873 - DNA, 931 bp, Homo sapiens
agcggaactgccgcctcagcttgcgccgccgccgccgccgccgccgcgcacgccatgggagccgtgactgacgacgaagttatacggaagcgtctcctcattgatggagatggtgctggagatgatcggagaattaatctgctagtgaagagtttcattaaatggtgcaactctgggtcccaggaagagggatatagccagtaccaacgtatgctgagcacgctgtctcaatgtgaattttcaatgggcaaaactttactagtatatgatatgaatctcagagaaatggaaaattatgaaaaaatttacaaggaaatagaatgtagcatagctggagcacatgaaaaaattgctgagtgcaaaaagcaaattcttcaagcaaaacgaatacgaaaaaatcgccaagaatatgatgctttggcaaaagtgattcagcaccatccagacaggcatgagacattaaaggaactagaggctctgggaaaagaattagagcatctttcacacattaaagaaagtgttgaagataagctggaattgagacggaaacagtttcatgttcttcttagtaccatccatgaacttcagcaaacattggaaaatgatgaaaaactctcagaggtagaagaagctcaggaagcaagcatggaaacagatcctaagccatagacaggctaattgcccaccactcccaggaatattgaaatagctacatgaccataatgtgtttaaaatgtggtatgctcttgagatatttaaagttttggcagtaaaatactctgtttttaagtatgaatgtatttcattcatatttcctctcacaaaggaaaatgacttcagtatagatttgtttttattaaaatgcattttttattcttaagtggtaggaagcaacatccaaaaatgcttaataaaatgcttttaagctgca

SEQ ID NO: 430874 - DNA, 1042 bp, Homo sapiens
gcggccgcgggcgccgccgcctcctcctccatggctgtttacccggctgcattgtgggagtttgacctccgccgccgccaaccgccgcctcagcttgcgccgccgccgccgccgccgccgccgcgcacgccatgggagccgtgactgacgacgaagttatacggaagcgtctcctcattgatggagatggtgctggagatgatcggagaattaatctgctagtgaagagtttcattaaatggtgcaactctgggtcccaggaagagggatatagccagtaccaacgtatgctgagcacgctgtctcaatgtgaattttcaatgggcaaaactttactagtatatgatatgaatctcagagaaatggaaaattatgaaaaaatttacaaggaaatagaatgtagcatagctggagcacatgaaaaaattgctgagtgcaaaaagcaaattcttcaagcaaaacgaatacgaaaaaatcgccaagaatatgatgctttggcaaaagtgattcagcaccatccagacaggcatgagacattaaaggaactagaggctctgggaaaagaattagagcatctttcacacattaaagaaagtgttgaagataagctggaattgagacggaaacagtttcatgttcttcttagtaccatccatgaacttcagcaaacattggaaaatgatgaaaaactctcagaggtagaagaagctcaggaagcaagcatggaaacagatcctaagccatagacaggctaattgcccaccactcccaggaatattgaaatagctacatgaccataatgtgtttaaaatgtggtatgctcttgagatatttaaagttttggcagtaaaatactctgtttttaagtatgaatgtatttcattcatatttcctctcacaaaggaaaatgacttcagtatagatttgtttttattaaaatgcattttttattcttaagtggtaggaagcaacatccaaaaatgcttaataaaatgcttttaagctgcaatctgaaacttctccaactaggggtcacgactcg

SEQ ID NO: 430875 - DNA, 1204 bp, Homo sapiens
gcggccgcgggcgccgccgcctcctcctccatggctgtttacccggctgcattgtgggagtttgacctccgccgccgccaaccgccgcctcagcttgcgccgccgccgccgccgccgccgccgcgcacgccatgggagccgtgactgacgacgaagttatacggaagcgtctcctcattgatggagatggtgctggagatgatcggagaattaatctgctagtgaagagtttcattaaatggtgcaactctgggtcccaggaagagggatatagccagtaccaacgtatgctgagcacgctgtctcaatgtgaattttcaatgggcaaaactttactagtatatgatatgaatctcagagaaatggaaaattatgaaaaaatttacaaggaaatagaatgtagcatagctggagcacatgaaaaaattgctgagtgcaaaaagcaaattcttcaagcaaaacgaatacgaaaaaatcgccaagaatatgatgctttggcaaaagtgattcagcaccatccagacaggcatgagacattaaaggaactagaggctctgggaaaagaattagagcatctttcacacattaaagaaagtgttgaagataagctggaattgagacggaaacagtttcatgttcttcttagtaccatccatgaacttcagcaaacattggaaaatgatgaaaaactctcagaggtagaagaagctcaggaagcaagcatggaaacagatcctaagccatagacaggctaattgcccaccactcccaggaatattgaaatagctacatgaccataatgtgtttaaaatgtggtatgctcttgagatatttaaagttttggcagtaaaatactctgtttttaagtatgaatgtatttcattcatatttcctctcacaaaggaaaatgacttcagtatagatgttcggcgtgtgcagtatggtcgttcggcgtgtgcagtctggatgttcggcgtgtgcagtctggttattcggcgtgtgcatgcacacgccgagggtccatacacagaaagagagagagagagagagagagagagagagaggaaggacggggaaagagagaacagaagggaggactggtcgaagggccagtggagcaggtgtcttggagagacaggccatgaacttgcaaggggtctgaggggagccgcagagtcggtgagggttgaaagtctgtaaatgc

SEQ ID NO: 430876 - DNA, 1141 bp, Homo sapiens
agcgggtgactgacggtgaggccccgctcgccgccacacgcgcccgctgcacggcccgctgggcctcccctgagacccctggcctcccggcccgcttccgggaacccctcggcctccccggcctcttcgccagagcgcttcggccttcccgacctctccccggagccccgggcctccccggctgcttccctgagtccttcctcctctcgccagagcccgagcgcccctcggagaccctcggctttccccgtccgctctcccggaggcagcgcggggctataggacgaagttatacggaagcgtctcctcattgatggagatggtgctggagatgatcggagaattaatctgctagtgaagagtttcattaaatggtgcaactctgggtcccaggaagagggatatagccagtaccaacgtatgctgagcacgctgtctcaatgtgaattttcaatgggcaaaactttactagtatatgatatgaatctcagagaaatggaaaattatgaaaaaatttacaaggaaatagaatgtagcatagctggagcacatgaaaaaattgctgagtgcaaaaagcaaattcttcaagcaaaacgaatacgaaaaaatcgccaagaatatgatgctttggcaaaagtgattcagcaccatccagacaggcatgagacattaaaggaactagaggctctgggaaaagaattagagcatctttcacacattaaagaaagtgttgaagataagctggaattgagacggaaacagtttcatgttcttcttagtaccatccatgaacttcagcaaacattggaaaatgatgaaaaactctcagaggtagaagaagctcaggaagcaagcatggaaacagatcctaagccatagacaggctaattgcccaccactcccaggaatattgaaatagctacatgaccataatgtgtttaaaatgtggtatgctcttgagatatttaaagttttggcagtaaaatactctgtttttaagtatgaatgtatttcattcatatttcctctcacaaaggaaaatgacttcagtatagatttgtttttattaaaatgcattttttattcttaagtggtaggaagcaacatccaaaaatgcttaataaaatgcttttaagctgca

SEQ ID NO: 430877 - DNA, 942 bp, Homo sapiens
cgcggccgcccccggggagtaccgggagcgcggggagcgcgggtcccgccgccgccgcgcacgccatgggagccgtgactgacgacgaagttatacggaagcgtctcctcattgatggagatggtgctggagatgatcggagaattaatctgctagtgaagagtttcattaaatggtgcaactctgggtcccaggaagagggatatagccagtaccaacgtatgctgagcacgctgtctcaatgtgaattttcaatgggcaaaactttactagtatatgatatgaatctcagagaaatggaaaattatgaaaaaatttacaaggaaatagaatgtagcatagctggagcacatgaaaaaattgctgagtgcaaaaagcaaattcttcaagcaaaacgaatacgaaaaaatcgccaagaatatgatgctttggcaaaagtgattcagcaccatccagacaggcatgagacattaaaggaactagaggctctgggaaaagaattagagcatctttcacacattaaagaaagtgttgaagataagctggaattgagacggaaacagtttcatgttcttcttagtaccatccatgaacttcagcaaacattggaaaatgatgaaaaactctcagaggtagaagaagctcaggaagcaagcatggaaacagatcctaagccatagacaggctaattgcccaccactcccaggaatattgaaatagctacatgaccataatgtgtttaaaatgtggtatgctcttgagatatttaaagttttggcagtaaaatactctgtttttaagtatgaatgtatttcattcatatttcctctcacaaaggaaaatgacttcagtatagatttgtttttattaaaatgcattttttattcttaagtggtaggaagcaacatccaaaaatgcttaataaaatgcttttaagctgca

SEQ ID NO: 430878 - DNA, 914 bp, Homo sapiens
ggaccccgactgcgggcggcccgcagctcccgccgcacccccgcagccctggcggcacgaagttatacggaagcgtctcctcattgatggagatggtgctggagatgatcggagaattaatctgctagtgaagagtttcattaaatggtgcaactctgggtcccaggaagagggatatagccagtaccaacgtatgctgagcacgctgtctcaatgtgaattttcaatgggcaaaactttactagtatatgatatgaatctcagagaaatggaaaattatgaaaaaatttacaaggaaatagaatgtagcatagctggagcacatgaaaaaattgctgagtgcaaaaagcaaattcttcaagcaaaacgaatacgaaaaaatcgccaagaatatgatgctttggcaaaagtgattcagcaccatccagacaggcatgagacattaaaggaactagaggctctgggaaaagaattagagcatctttcacacattaaagaaagtgttgaagataagctggaattgagacggaaacagtttcatgttcttcttagtaccatccatgaacttcagcaaacattggaaaatgatgaaaaactctcagaggtagaagaagctcaggaagcaagcatggaaacagatcctaagccatagacaggctaattgcccaccactcccaggaatattgaaatagctacatgaccataatgtgtttaaaatgtggtatgctcttgagatatttaaagttttggcagtaaaatactctgtttttaagtatgaatgtatttcattcatatttcctctcacaaaggaaaatgacttcagtatagatttgtttttattaaaatgcattttttattcttaagtggtaggaagcaacatccaaaaatgcttaataaaatgcttttaagctgca

SEQ ID NO: 430879 - DNA, 919 bp, Homo sapiens
gcggccgcgggcgccgccgcctcctcctccatggctgtttacccggctgcattgtgggagtttgacctccgccgccgccaaccgccgcctcagcttgcgccgccgccgccgccgccgccgccgcgcacgccatgggagccgtgactgacgacgaagttatacggaagcgtctcctcattgatggagatggtgctggagatgatcggagaattaatctgctagtgaagagtttcattaaatggtgcaactctgggtcccaggaagagggatatagccagtaccaacgtatgctgagcacgctgtctcaatgtgaattttcaatgggcaaaactttactagtatatgatatgaatctcagagaaatggaaaattatgaaaaaatttacaaggaaatagaatgtagcatagctggagcacatgaaaaaattgctgagtgcaaaaagcaaattcttcaagcaaaacgaatacgaaaaaatcgccaagaatatgatgctttggcaaaagtgattcagcaccatccagacaggcatgagacattaaaggaactagaggctctgggaaaagaattagagcatctttcacacattaaagaaagtgttgaagataagctggaattgagacggaaacagtttcatgttcttcttagtaccatccatgaacttcagcaaacattggaaaatgatgaaaaactctcagaggtagaagaagctcaggaagcaagcatggaaacagatcctaagccatagacaggctaattgcccaccactcccaggaatattgaaatagctacatgaccataatgtgtttaaaatgtggtatgctcttgagatatttaaagttttggcagtaaaatacttggactctgggcactgtttggactctgggcactgtttggactctgggcactgtttgtactctg

SEQ ID NO: 430880 - DNA, 1114 bp, Homo sapiens
agcgggtgactgacggtgaggccccgctcgccgccacacgcgcccgctgcacggcccgctgggcctcccctgagacccctggcctcccggcccgcttccgggaacccctcggcctccccggcctcttcgccagagcgcttcggccttcccgacctctccccggagccccgggcctccccggctgcttccctgagtccttcctcctctcgccagagcccgagcgcccctcggagaccctcggctttccccgtccgctctcccggaggcagcgcggggctataggacgaagttatacggaagcgtctcctcattgatggagatggtgctggagatgatcggagaattaatctgctagtgaagagtttcattaaatgatatagccagtaccaacgtatgctgagcacgctgtctcaatgtgaattttcaatgggcaaaactttactagtatatgatatgaatctcagagaaatggaaaattatgaaaaaatttacaaggaaatagaatgtagcatagctggagcacatgaaaaaattgctgagtgcaaaaagcaaattcttcaagcaaaacgaatacgaaaaaatcgccaagaatatgatgctttggcaaaagtgattcagcaccatccagacaggcatgagacattaaaggaactagaggctctgggaaaagaattagagcatctttcacacattaaagaaagtgttgaagataagctggaattgagacggaaacagtttcatgttcttcttagtaccatccatgaacttcagcaaacattggaaaatgatgaaaaactctcagaggtagaagaagctcaggaagcaagcatggaaacagatcctaagccatagacaggctaattgcccaccactcccaggaatattgaaatagctacatgaccataatgtgtttaaaatgtggtatgctcttgagatatttaaagttttggcagtaaaatactctgtttttaagtatgaatgtatttcattcatatttcctctcacaaaggaaaatgacttcagtatagatttgtttttattaaaatgcattttttattcttaagtggtaggaagcaacatccaaaaatgcttaataaaatgcttttaagctgca

SEQ ID NO: 430881 - DNA, 715 bp, Homo sapiens
gagatgaggtgatcagaatggagagtgtagggtaataggtgtaagtaacatttggaggctatcaggtggtaagagtgacagcttttttacttgggtgactgagttgatggtgatttatttagcaggataaagaatacaggggcaacatagggaaaccccatctctaccaaaaatacaaaaattagccaagaatatgatgctttggcaaaagtgattcagcaccatccagacaggcatgagacattaaaggaactagaggctctgggaaaagaattagagcatctttcacacattaaagaaagtgttgaagataagctggaattgagacggaaacagtttcatgttcttcttagtaccatccatgaacttcagcaaacattggaaaatgatgaaaaactctcagaggtagaagaagctcaggaagcaagcatggaaacagatcctaagccatagacaggctaattgcccaccactcccaggaatattgaaatagctacatgaccataatgtgtttaaaatgtggtatgctcttgagatatttaaagttttggcagtaaaatactctgtttttaagtatgaatgtatttcattcatatttcctctcacaaaggaaaatgacttcagtatagatttgtttttattaaaatgcattttttattcttaagtggtaggaagcaacatccaaaaatgcttaataaaatgcttttaagctgca

SEQ ID NO: 430882 - DNA, 2223 bp, Homo sapiens
gtcacagcctggtgaggagggggctgcagttcctcaggaaactgccagtggacaaattcataaacaagagctccagttccctggaacctgagtcgggagacctgcagctcactttctccctgtttgctggccagcagggtttgtggccgcctctgctgtgacgccacagcctggtgaggagggggctgcagttcctcaggaaactgccagtggacaaagtcataaacaagagttccagttccctggaacctgagtcgggaggcctgcaactcactttctccctgtttgctggcccagacaggcctgtgctagagggctggatagtgtggtagtgtggtggatagagtgctgcctctatccacaacgcagccatatgctgactgaagataactttgtgtctggaagagccctctgatttcttacactaatggccttacacgacatggaggattttacatttgatggaacaaagcgcttaagtgtcaactacgtgaagggaattcttcaaccgacagacacctgtgacatctgggataagatctggaacttccaagccaagcctgatgacctgcttatttctacctatcctaaagcaggaacaacatggactcaggagatagtggaattaatacaaaatgaaggtgatgtggagaaaagtaaacgggcaccgactcatcaacgatttcctttcctcgaaatgaaaatcccatccttaggatctggtttggaacaagctcatgcaatgccctcaccacggatcctgaaaacacatcttccctttcacttgctgccaccatccttgctagagaaaaactgtaagataatctatgtagcaagaaatcccaaggacaacatggtgtcctattaccatttccaaagaatgaataaagctcttcctgctccaggaacatgggaagagtattttgagacttttctggctgggaaagtgtgctggggctcctggcatgaacatgtgaaaggatggtgggaagccaaagacaaacaccgtattctctatctcttctatgaggacatgaagaagaacccaaagcatgaaattcagaagctggcagaatttattgggaagaaattagatgacaaagttctagataaaattgtccattacacttcgtttgatgtcatgaaacagaatccaatggcaaactattcatcgattcctgctgaaatcatggaccactccatttctccattcatgagaaaaggggcagtgggagactggaagaaacacttcaccgtggctcagaatgagagatttgatgaagattacaagaagaaaatgactgataccagactaactttccacttccagttctagtaaggaagaaaaactgaaaatgttttagtttattacccagtatatttgggtaataatgaaagtttaattctcataacaaatgatatcagattccagttatcagaatagtttactgtgtttgctcttattcactctactaaaaaattattttaaaaggctggaggcaaggtggtgacaggcagcagggtggcgacatggagagagggaagctcaataaatcactaggtacaatcctggtatcattgccaattatcatcatatttacattttctacaatcatgtgcttattaacatattggaaatgcttcagtcctcacatgataatacactaacattttcagattaagttttggttcaagttaatttttttttttttttttttgagacggagtctcgctctgtcgcccaggctggagtgcagtggcacgatctcggctcactgcaagctctgcttcctgggttcacgccattcccctgcctcagcctcccgagtagctgggactatgggcgcccaccaccactcccggctaatttttttttttgtattcttagtagagacgaggtttcaccgtgttagccaggatgttctcgatctcctgaccccatgatccacccgcctcagcctagacctgctgatccagggtgtgtgtgagttgagggtgggtggaggggtttgcagtgtgggaatgtggccctgcagttgacctgagctgcttcacatggttgtccattctggggcttaaagaactgggaccagaccaagtagaggccttggtgctggttggggtggggcctgcagagtcttagttactgatttcattttcaataaatgtaggtttgttacatgagtttcccaattaaaaaaaaaatgacttcttgtccagtgc

SEQ ID NO: 430883 - DNA, 876 bp, Homo sapiens
gtcacagcctggtgaggagggggctgcagttcctcaggaaactgccagtggacaaattcataaacaagagctccagttccctggaacctgagtcgggagacctgcagctcactttctccctgtttgctggccagcagggtttgtggccgcctctgctgtgacgccacagcctggtgaggagggggctgcagttcctcaggaaactgccagtggacaaagtcataaacaagagttccagttccctggaacctgagtcgggaggcctgcaactcactttctccctgtttgctggcccagacaggcctgtgctagagggctggatagtgtggtagtgtggtggatagagtgctgcctctatccacaacgcagccatatgctgactgaagataactttgtgtctggaagagccctctgatttcttacactaatggccttacacgacatggaggattttacatttgatggaacaaagcgcttaagtgtcaactacgtgaagggaattcttcaaccgacagacacctgtgacatctgggataagatctggaacttccaagccaagcctgatgacctgcttatttctacctatcctaaagcaggaacaacatggactcaggagatagtggaattaatacaaaatgaaggtgatgtggagaaaagtaaacgggcaccgactcatcaacgatttcctttcctcgaaatgaaaatcccatccttaggatctggtgagtataaatagccacacttcactacagtcctaaaatgcacttaggatttttactgtctttgcacctttcgaaattataggctttcaaacaattattggtaagtttcatggttttgtctttttttaactgtgtctggccattgttatactcc

SEQ ID NO: 430884 - DNA, 1444 bp, Homo sapiens
gtcacagcctggtgaggagggggctgcagttcctcaggaaactgccagtggacaaattcataaacaagagctccagttccctggaacctgagtcgggagacctgcagctcactttctccctgtttgctggccagcagggtttgtggccgcctctgctgtgacgccacagcctggtgaggagggggctgcagttcctcaggaaactgccagtggacaaagtcataaacaagagttccagttccctggaacctgagtcgggaggcctgcaactcactttctccctgtttgctggcccagacaggcctgtgctagagggctggatagtgtggtagtgtggtggatagagtgctgcctctatccacaacgcagccatatgctgactgaagataactttgtgtctggaagagccctctgatttcttacactaatggccttacacgacatggaggattttacatttgatggaacaaagcgcttaagtgtcaactacgtgaagggaattcttcaaccgacagacacctgtgacatctgggataagatctggaacttccaagccaagcctgatgacctgcttatttctacctatcctaaagcaggaacaacatggactcaggagatagtggaattaatacaaaatgaaggtgatgtggagaaaagtaaacgggcaccgactcatcaacgatttcctttcctcgaaatgaaaatcccatccttaggatctgtgtgctggggctcctggcatgaacatgtgaaaggatggtgggaagccaaagacaaacaccgtattctctatctcttctatgaggacatgaagaagaacccaaagcatgaaattcagaagctggcagaatttattgggaagaaattagatgacaaagttctagataaaattgtccattacacttcgtttgatgtcatgaaacagaatccaatggcaaactattcatcgattcctgctgaaatcatggaccactccatttctccattcatgagaaaaggggcagtgggagactggaagaaacacttcaccgtggctcagaatgagagatttgatgaagattacaagaagaaaatgactgataccagactaactttccacttccagttctagtaaggaagaaaaactgaaaatgttttagtttattacccagtatatttgggtaataatgaaagtttaattctcataacaaatgatatcagattccagttatcagaatagtttactgtgtttgctcttattcactctactaaaaaattattttaaaaggctggaggcaaggtggtgacaggcagcctgggtgacagagcaagactccatctcaaaaaaaaaaaaaaaaaaaaaagtctcccataaccaggatgacaagaatgcagcctcagaaaaaatgaactgtatgaaatgtatctaccctaacatgacttgcctgggcagtaacagcaaaaa

SEQ ID NO: 430885 - DNA, 330 bp, Homo sapiens
acccaaagcatgaaattcagaagctggcagaatttattgggaagaaattagatgacaaagttctagataaaattgtccattacacttcgtttgatgtcatgaaacagaatccaatggcaaactattcatcgattcctgctgaaatcatggaccactccatttctccattcatgagaaaaggtttttatagtttattttcattataatcttaaaagaactgtcaaatattttaaagcatttgaggagttttctttcctgtgtctaggaaaaataatatctgtaataaatgatttggggaaaagaagtatttaagaagccactgataaaatg

SEQ ID NO: 430886 - DNA, 2883 bp, Homo sapiens
tggaggtggagccttttttgctcacggcagcaagttcccttctcctttctctcccccggcggcgtgtgcattggctcttcaagctgcctgtgctgctccgtggagtgaaaaaggcagggtgtgctcgcagactgtgctataaactgcaatttctatttggggtcctcacggagaagaacaccaggaaagacagacaggaccagtgccatgggccagctttgctgctttcctttctcaagagatgaaggaaaaatcagtgaaaagaacggaggggagcccgatgacgctgaactagtaaggctcagtaagaggctggtggagaacgcggtgctcaaggctgtccagcagtatctggaggaaacacagaataaaaacaagccgggggaggggagctctgtgaaaaccgaagcagctgatcagaatggcaatgacaatgagaacaacaggaaatgagcccggaacgcaggcccccatgtctctgtgcaaagcctccctgcttccctctgctgagtctagggactgacttgcagcgtgctgtttaagttaagtttctctggtgcaatctgtgaagattgcctaatacttttcatgatcgatgtgttcgcattgctgaaacacaacagaagaaaaatggagtgctgggactggcagaggaaattaattgatgaaagaagaatggcccaagtttcattcgccctcagccacgcacaagggaaagggaactttgggttatgcctcctggacgcaaattaaaggccgagaaagaggccttgccatcaatggaatactgccatttatattgcttagcagggcatttgactactttatctgaggccagaactctcacacacagctatcaagtgctaagtttaaaataatcactgttggaattgtcatctgtacaattagtccataatgtttcatgtttgtcctaagtgtgctgttgctatgcagtgtgatctttatttatagtaaattatgtttcatgtaaatgatatatttttggtgaaatgcaaccttttctataaaatgtgggcaacattttaaagtttttttaaaatcctattttgataagtcagtatgccatatttaatgaaatgttattatataatttttttttcttaggcaagaaacctattggaattcgagacttaattaatgaagctttgcatcgagaaacgatgggtctgaagtccaaagtgaaacagataaaggaacttttattaaagcctgagactcaggccagaattaggagggagctttttgaaggaagacttattaacaacagtaattcagcaaatgacgttgatttcagcacaactttgacataagctctacattgcgattgtgacaacatagcttatgaaatcttttcagcttattaagtagctctttggtaaacaccaaagaagtttctgatagtgtctgcacaacagcaaaccaacatttggtgaggaattagcaatttcttgccaaagaaaattgattctgcccaattattttttgagctacacttgtgttttagaatatctgtttctgtaatattgagagttattttatagaaatgatttcttaattagctgttgtgagatatttctcgggtccttgcagaaaaaaacatacagactgtgaacaaatcattcacaaacagaataaaacagagccaacaacagtattttaagggtcacttgcctcctgttgacacaattgttgctaaatcaaaagaagcgttgtccaggtgtgtctacatctagtgttacttttaatgagaatttgaatgtttattgaacaatagtacttgaatgaacatttataaatgtaattattgcgatcactggttaagaatgttttatatatccttataatatttttcactgatcaaaatgttgttctgctttttcatttcttaaggaatacatgtttgggatttttattttttacgtgtccgaagataagctccaggtcttatcgtatcccttgccatctgaacttgtttgcactgcttctgtttgaaagagcatcttgaaaaacttccccggtatgatgattgttggtaacaactttttctatagtcattgatggagtagatcatgatggaggggaaatcactggagatcaaatatgtaaaatcatttcaaatataaaatccagtttactcatggattttagctattttttcactgggtaaattatactacatttatttacaaatgagtttatgcattttcatggctcttaataaacatattgttttcccttgttggaattccccctcaaaatgtataacaaatctgtttacttcccttcacctgcacagcttaccacccttgtataagatattgtctgttgccaagaatcttgcaccagactagtggttctcaaagtgtgatccctggacccgcagcatctgcagcacctgggaaataataagaaatacaaattctgaaatattgaatcagaaactctgaaggtggaggccagcaatttgtgttttaataagccctcctgtgattctgatgcattcctgaagactaacatgccttctgcttcatttttgtctcagatcacactatcttacaaatgaaaactttccaatgggccgggagcagaggctcgtgcctgtaatcccagcaattcgggaggctgaggcgggtggatcacttgaagccaagagtttgagaccaatctggtcagcatggcaaaacctgtctctgctaaaaacaaaaaacaaaaactagctgggtgtgatggcacacacctgtagtcccagctactcagggggctgaggcaggagaattgcttgagcctgggaggcggaggttgcagtgagccgagatcgcatcagtgcattccatcctgggcgacagagtgagaccctgtctc

SEQ ID NO: 430887 - DNA, 3729 bp, Homo sapiens
tttcaagtgaaaggtttttatttttttaaactaagtaaatttctttttctcccaatttactcactgcagtaccttatactacaagaaccagcaactggtttcctcttaatgtctaaacataacatcattgttaaaaattagagactttgtcacaatttgcagtttttaaaagtaaggtaaataaagtatctcattatacagaagtacaaggtctcgttcttgtacatttcgctcttcccaaatattctgcaatcagaaccctgattgcaaaactaagcacatggattctcaaaagacaccaggccagagaattctttcatcctagtcccaatctcgcccttgaaagcgtgggaggggcaaggctgcgccacgggaaataaatgagggctgccaaaggccgtcggaggccgcggggctcggcaggcaggcgaagacccagcgtcgcattgcagagtcgagacgacctgggctgccgtgacgccgcagtcgccggccctagtttcccccgccctgcccgagcgcgtccgcgcctctcgcccgaatccgggtaccaccggcgactcgggtcggccccttctggcttgttccggcgtccggcctggcatgcgggtgctgcggctgctgcggctgccgccgccgctgctgccgctgccgcgggggctgcggcttgggaagctccgcgcttccgcaggcctggcctccgccgcccgggcccccgcagcctgtcgctggaccccgcgccggcccagcgcaccgccctcaggccccgagccccgccctggcctccgcctcggcctcgcctccagccccgggacgcggcccgccaccgccgctgccgccagcccagacgcgccgcccgcatgcgccgcgaccatggagcgccccgaagcgggaggaattaattccaatgagtgtgaaaatgtatcaagaaaaaagaaaatgtcagaggaatttgaagccaatactatggattctctggtagacatgccatttgctactgtagatattcaggatgactgtggaatcactgatgaacctcaaataaatttgaagagaagtcaagaaaatgaatgggtcaagagtgatcaagtaaagaagaggaaaaaaaagagaaaagattatcaacccaactatttcctgtccattccaatcaccaacaaagagattataaaaggaattaagatcctgcagaatgcaataatacaacaagatgagcgactggccaaagcaatggtcagtgatggttcctttcatattaccctgctggtgatgcaattattaaatgaagatgaagtaaacattggtattgatgctcttttggaattgaaaccattcatagaagaactcctccagggaaaacatttgactttgccctttcaagggattggtacttttggaaatcaggttggatttgtgaagctggcagaaggagatcatgtaaactcacttttggagatagcagagactgcaaataggacatttcaagaaaaaggcatcctggtaggagagagcagaagttttaaacctcatttgaccttcatgaagttgtcaaaatcaccgtggctccgtaagaatggagtgaaaaaaatagatcctgatttatatgaaaagtttatcagtcacagatttggagaagaaatattatatcgcatagatctttgctccatgctgaagaaaaaacaaagtaatggttattatcactgtgaatcttccattgtgattggtgaaaagaacggaggggagcccgatgacgctgaactagtaaggctcagtaagaggctggtggagaacgcggtgctcaaggctgtccagcagtatctggaggaaacacagaataaaaacaagccgggggaggggagctctgtgaaaaccgaagcagctgatcagaatggcaatgacaatgagaacaacaggaaatgagcccggaacgcaggcccccatgtctctgtgcaaagcctccctgcttccctctgctgagtctagggactgacttgcagcgtgctgtttaagttaagtttctctggtgcaatctgtgaagattgcctaatacttttcatgatcgatgtgttcgcattgctgaaacacaacagaagaaaaatggagtgctgggactggcagaggaaattaattgatgaaagaagaatggcccaagtttcattcgccctcagccacgcacaagggaaagggaactttgggttatgcctcctggacgcaaattaaaggccgagaaagaggccttgccatcaatggaatactgccatttatattgcttagcagggcatttgactactttatctgaggccagaactctcacacacagctatcaagtgctaagtttaaaataatcactgttggaattgtcatctgtacaattagtccataatgtttcatgtttgtcctaagtgtgctgttgctatgcagtgtgatctttatttatagtaaattatgtttcatgtaaatgatatatttttggtgaaatgcaaccttttctataaaatgtgggcaacattttaaagtttttttaaaatcctattttgataagtcagtatgccatatttaatgaaatgttattatataatttttttttcttaggcaagaaacctattggaattcgagacttaattaatgaagctttgcatcgagaaacgatgggtctgaagtccaaagtgaaacagataaaggaacttttattaaagcctgagactcaggccagaattaggagggagctttttgaaggaagacttattaacaacagtaattcagcaaatgacgttgatttcagcacaactttgacataagctctacattgcgattgtgacaacatagcttatgaaatcttttcagcttattaagtagctctttggtaaacaccaaagaagtttctgatagtgtctgcacaacagcaaaccaacatttggtgaggaattagcaatttcttgccaaagaaaattgattctgcccaattattttttgagctacacttgtgttttagaatatctgtttctgtaatattgagagttattttatagaaatgatttcttaattagctgttgtgagatatttctcgggtccttgcagaaaaaaacatacagactgtgaacaaatcattcacaaacagaataaaacagagccaacaacagtattttaagggtcacttgcctcctgttgacacaattgttgctaaatcaaaagaagcgttgtccaggtgtgtctacatctagtgttacttttaatgagaatttgaatgtttattgaacaatagtacttgaatgaacatttataaatgtaattattgcgatcactggttaagaatgttttatatatccttataatatttttcactgatcaaaatgttgttctgctttttcatttcttaaggaatacatgtttgggatttttattttttacgtgtccgaagataagctccaggtcttatcgtatcccttgccatctgaacttgtttgcactgcttctgtttgaaagagcatcttgaaaaacttccccggtatgatgattgttggtaacaactttttctatagtcattgatggagtagatcatgatggaggggaaatcactggagatcaaatatgtaaaatcatttcaaatataaaatccagtttactcatggattttagctattttttcactgggtaaattatactacatttatttacaaatgagtttatgcattttcatggctcttaataaacatattgttttcccttgtt

SEQ ID NO: 430888 - DNA, 3369 bp, Homo sapiens
tgcgcttcccagcacagctcaatgctaactgcggaagcgggctgtgaacatggtccggtttccccggatgcacttcttcatgcccggctttgccccattgaccagccggggcagccagcagtaccgggcgctgaccgtgcccgagctcacccagcagatgtttgatgccaagaacatgatggctgcctgcgacccccgccatggccgctacctgacggttgccgccgtgttcaggggccgcatgtccatgaaggaggtggatgagcaaatgcttaatgtccaaaacaaaaacagcagctattttgttgagtggatccccaacaatgtgaaaccggctgtctgtgacatcccacctcgggggctaaaaatgtccgccaccttcattggcaacagcacggccatccaggagctgttcaagcgcatctccgcctcggcctcgcctccagccccgggacgcggcccgccaccgccgctgccgccagcccagacgcgccgcccgcatgcgccgcgaccatggagcgccccgaagcgggaggaattaattccaatgagtgtgaaaatgtatcaagaaaaaagaaaatgtcagaggaatttgaagccaatactatggattctctggtagacatgccatttgctactgtagatattcaggatgactgtggaatcactgatgaacctcaaataaatttgaagagaagtcaagaaaatgaatgggtcaagagtgatcaagtaaagaagaggaaaaaaaagagaaaagattatcaacccaactatttcctgtccattccaatcaccaacaaagagattataaaaggaattaagatcctgcagaatgcaataatacaacaagatgagcgactggccaaagcaatggtcagtgatggttcctttcatattaccctgctggtgatgcaattattaaatgaagatgaagtaaacattggtattgatgctcttttggaattgaaaccattcatagaagaactcctccagggaaaacatttgactttgccctttcaagggattggtacttttggaaatcaggttggatttgtgaagctggcagaaggagatcatgtaaactcacttttggagatagcagagactgcaaataggacatttcaagaaaaaggcatcctggtaggagagagcagaagttttaaacctcatttgaccttcatgaagttgtcaaaatcaccgtggctccgtaagaatggagtgaaaaaaatagatcctgatttatatgaaaagtttatcagtcacagatttggagaagaaatattatatcgcatagatctttgctccatgctgaagaaaaaacaaagtaatggttattatcactgtgaatcttccattgtgattggtgaaaagaacggaggggagcccgatgacgctgaactagtaaggctcagtaagaggctggtggagaacgcggtgctcaaggctgtccagcagtatctggaggaaacacagaataaaaacaagccgggggaggggagctctgtgaaaaccgaagcagctgatcagaatggcaatgacaatgagaacaacaggaaatgagcccggaacgcaggcccccatgtctctgtgcaaagcctccctgcttccctctgctgagtctagggactgacttgcagcgtgctgtttaagttaagtttctctggtgcaatctgtgaagattgcctaatacttttcatgatcgatgtgttcgcattgctgaaacacaacagaagaaaaatggagtgctgggactggcagaggaaattaattgatgaaagaagaatggcccaagtttcattcgccctcagccacgcacaagggaaagggaactttgggttatgcctcctggacgcaaattaaaggccgagaaagaggccttgccatcaatggaatactgccatttatattgcttagcagggcatttgactactttatctgaggccagaactctcacacacagctatcaagtgctaagtttaaaataatcactgttggaattgtcatctgtacaattagtccataatgtttcatgtttgtcctaagtgtgctgttgctatgcagtgtgatctttatttatagtaaattatgtttcatgtaaatgatatatttttggtgaaatgcaaccttttctataaaatgtgggcaacattttaaagtttttttaaaatcctattttgataagtcagtatgccatatttaatgaaatgttattatataatttttttttcttaggcaagaaacctattggaattcgagacttaattaatgaagctttgcatcgagaaacgatgggtctgaagtccaaagtgaaacagataaaggaacttttattaaagcctgagactcaggccagaattaggagggagctttttgaaggaagacttattaacaacagtaattcagcaaatgacgttgatttcagcacaactttgacataagctctacattgcgattgtgacaacatagcttatgaaatcttttcagcttattaagtagctctttggtaaacaccaaagaagtttctgatagtgtctgcacaacagcaaaccaacatttggtgaggaattagcaatttcttgccaaagaaaattgattctgcccaattattttttgagctacacttgtgttttagaatatctgtttctgtaatattgagagttattttatagaaatgatttcttaattagctgttgtgagatatttctcgggtccttgcagaaaaaaacatacagactgtgaacaaatcattcacaaacagaataaaacagagccaacaacagtattttaagggtcacttgcctcctgttgacacaattgttgctaaatcaaaagaagcgttgtccaggtgtgtctacatctagtgttacttttaatgagaatttgaatgtttattgaacaatagtacttgaatgaacatttataaatgtaattattgcgatcactggttaagaatgttttatatatccttataatatttttcactgatcaaaatgttgttctgctttttcatttcttaaggaatacatgtttgggatttttattttttacgtgtccgaagataagctccaggtcttatcgtatcccttgccatctgaacttgtttgcactgcttctgtttgaaagagcatcttgaaaaacttccccggtatgatgattgttggtaacaactttttctatagtcattgatggagtagatcatgatggaggggaaatcactggagatcaaatatgtaaaatcatttcaaatataaaatccagtttactcatggattttagctattttttcactgggtaaattatactacatttatttacaaatgagtttatgcattttcatggctcttaataaacatattgttttcccttgtt

SEQ ID NO: 430889 - DNA, 2747 bp, Homo sapiens
tttcaagtgaaaggtttttatttttttaaactaagtaaatttctttttctcccaatttactcactgcagtaccttatactacaagaaccagcaactggtttcctcttaatgtctaaacataacatcattgttaaaaattagagactttgtcacaatttgcagtttttaaaagtaaggtaaataaagtatctcattatacagaagtacaaggtctcgttcttgtacatttcgctcttcccaaatattctgcaatcagaaccctgattgcaaaactaagcacatggattctcaaaagacaccaggccagagaattctttcatcctagtcccaatctcgcccttgaaagcgtgggaggggcaaggctgcgccacgggaaataaatgagggctgccaaaggccgtcggaggccgcggggctcggcaggcaggcgaagacccagcgtcgcattgcagagtcgagacgacctgggctgccgtgacgccgcagtcgccggccctagtttcccccgccctgcccgagcgcgtccgcgcctctcgcccgaatccgggtaccaccggcgactcgggtcggccccttctggcttgttccggcgtccggcctggcatgcgggtgctgcggctgctgcggctgccgccgccgctgctgccgctgccgcgggggctgcggcttgggaagctccgcgcttccgcaggcctggcctccgccgcccgggcccccgcagcctgtcgctggaccccgcgccggcccagcgcaccgccctcaggccccgagccccgccctggcctccgcctcggcctcgcctccagccccgggacgcggcccgccaccgccgctgccgccagcccagacgcgccgcccgcatgcgccgcgaccatggagcgccccgaagcgggaggaattaattccaatgagtgtgaaaatgtatcaagaaaaaagaaaatgtcagaggaatttgaagccaatactatggattctctggtagacatgccatttgctactgtagatattcaggatgactgtggaatcactgatgaacctcaaataaatttgaagagaagtcaagaaaatgaatgggtcaagagtgatcaagtaaagaagaggaaaaaaaagagaaaagattatcaacccaactatttcctgtccattccaatcaccaacaaagagattataaaaggaattaagatcctgcagaatgcaataatacaacaagatgagcgactggccaaagcaatggtcagtgatggttcctttcatattaccctgctggtgatgcaattattaaatgaagatgaagtaaacattggtattgatgctcttttggaattgaaaccattcatagaagaactcctccagggaaaacatttgactttgccctttcaagggattggtacttttggaaatcaggttggatttgtgaagctggcagaaggagatcatgtaaactcacttttggagatagcagggagtgaaaaaaatagatcctgatttatatgaaaagtttatcagtcacagatttggagaagaaatattatatcgcatagatctttgctccatgctgaagaaaaaacaaagtaatggttattatcactgtgaatcttccattgtgattggcaagaaacctattggaattcgagacttaattaatgaagctttgcatcgagaaacgatgggtctgaagtccaaagtgaaacagataaaggaacttttattaaagcctgagactcaggccagaattaggagggagctttttgaaggaagacttattaacaacagtaattcagcaaatgacgttgatttcagcacaactttgacataagctctacattgcgattgtgacaacatagcttatgaaatcttttcagcttattaagtagctctttggtaaacaccaaagaagtttctgatagtgtctgcacaacagcaaaccaacatttggtgaggaattagcaatttcttgccaaagaaaattgattctgcccaattattttttgagctacacttgtgttttagaatatctgtttctgtaatattgagagttattttatagaaatgatttcttaattagctgttgtgagatatttctcgggtccttgcagaaaaaaacatacagactgtgaacaaatcattcacaaacagaataaaacagagccaacaacagtattttaagggtcacttgcctcctgttgacacaattgttgctaaatcaaaagaagcgttgtccaggtgtgtctacatctagtgttacttttaatgagaatttgaatgtttattgaacaatagtacttgaatgaacatttataaatgtaattattgcgatcactggttaagaatgttttatatatccttataatatttttcactgatcaaaatgttgttctgctttttcatttcttaaggaatacatgtttgggatttttattttttacgtgtccgaagataagctccaggtcttatcgtatcccttgccatctgaacttgtttgcactgcttctgtttgaaagagcatcttgaaaaacttccccggtatgatgattgttggtaacaactttttctatagtcattgatggagtagatcatgatggaggggaaatcactggagatcaaatatgtaaaatcatttcaaatataaaatccagtttactcatggattttagctattttttcactgggtaaattatactacatttatttacaaatgagtttatgcattttcatggctcttaataaacatattgttttcccttgtt

SEQ ID NO: 430890 - DNA, 2995 bp, Homo sapiens
tttcaagtgaaaggtttttatttttttaaactaagtaaatttctttttctcccaatttactcactgcagtaccttatactacaagaaccagcaactggtttcctcttaatgtctaaacataacatcattgttaaaaattagagactttgtcacaatttgcagtttttaaaagtaaggtaaataaagtatctcattatacagaagtacaaggtctcgttcttgtacatttcgctcttcccaaatattctgcaatcagaaccctgattgcaaaactaagcacatggattctcaaaagacaccaggccagagaattctttcatcctagtcccaatctcgcccttgaaagcgtgggaggggcaaggctgcgccacgggaaataaatgagggctgccaaaggccgtcggaggccgcggggctcggcaggcaggcgaagacccagcgtcgcattgcagagtcgagacgacctgggctgccgtgacgccgcagtcgccggccctagtttcccccgccctgcccgagcgcgtccgcgcctctcgcccgaatccgggtaccaccggcgactcgggtcggccccttctggcttgttccggcgtccggcctggcatgcgggtgctgcggctgctgcggctgccgccgccgctgctgccgctgccgcgggggctgcggcttgggaagctccgcgcttccgcaggcctggcctccgccgcccgggcccccgcagcctgtcgctggaccccgcgccggcccagcgcaccgccctcaggccccgagccccgccctggcctccgcctcggcctcgcctccagccccgggacgcggcccgccaccgccgctgccgccagcccagacgcgccgcccgcatgcgccgcgaccatggagcgccccgaagcgggaggaattaattccaatgagtgtgaaaatgtatcaagaaaaaagaaaatgtcagaggaatttgaagccaatactatggattctctggtagacatgccatttgctactgtagatattcaggatgactgtggaatcactgatgaacctcaaataaatttgaagagaagtcaagaaaatgaatgggtcaagagtgatcaagtaaagaagaggaaaaaaaagagaaaagattatcaacccaactatttcctgtccattccaatcaccaacaaagagaggagcaggtgctgagagaggaagggagatggtggaccaggtctgtggggatttctcctggatgcagattctgtttttctaatgtgtgcatttggacttctttgcaactcttcatggtaatgcccctccccacagattataaaaggaattaagatcctgcagaatgcaataatacaacaagatgagcgactggccaaagcaatggtcagtgatggttcctttcatattaccctgctggtgatgcaattattaaatgaagatgaagtaaacattggtattgatgctcttttggaattgaaaccattcatagaagaactcctccagggaaaacatttgactttgccctttcaagggattggtacttttggaaatcaggttggatttgtgaagctggcagaaggagatcatgtaaactcacttttggagatagcagagactgcaaataggacatttcaagaaaaaggcatcctggtaggagagagcagaagttttaaacctcatttgaccttcatgaagttgtcaaaatcaccgtggctccgtaagaatggagtgaaaaaaatagatcctgatttatatgaaaagtttatcagtcacagatttggagaagaaatattatatcgcatagatctttgctccatgctgaagaaaaaacaaagtaatggttattatcactgtgaatcttccattgtgattggcaagaaacctattggaattcgagacttaattaatgaagctttgcatcgagaaacgatgggtctgaagtccaaagtgaaacagataaaggaacttttattaaagcctgagactcaggccagaattaggagggagctttttgaaggaagacttattaacaacagtaattcagcaaatgacgttgatttcagcacaactttgacataagctctacattgcgattgtgacaacatagcttatgaaatcttttcagcttattaagtagctctttggtaaacaccaaagaagtttctgatagtgtctgcacaacagcaaaccaacatttggtgaggaattagcaatttcttgccaaagaaaattgattctgcccaattattttttgagctacacttgtgttttagaatatctgtttctgtaatattgagagttattttatagaaatgatttcttaattagctgttgtgagatatttctcgggtccttgcagaaaaaaacatacagactgtgaacaaatcattcacaaacagaataaaacagagccaacaacagtattttaagggtcacttgcctcctgttgacacaattgttgctaaatcaaaagaagcgttgtccaggtgtgtctacatctagtgttacttttaatgagaatttgaatgtttattgaacaatagtacttgaatgaacatttataaatgtaattattgcgatcactggttaagaatgttttatatatccttataatatttttcactgatcaaaatgttgttctgctttttcatttcttaaggaatacatgtttgggatttttattttttacgtgtccgaagataagctccaggtcttatcgtatcccttgccatctgaacttgtttgcactgcttctgtttgaaagagcatcttgaaaaacttccccggtatgatgattgttggtaacaactttttctatagtcattgatggagtagatcatgatggaggggaaatcactggagatcaaatatgtaaaatcatttcaaatataaaatccagtttactcatggattttagctattttttcactgggtaaattatactacatttatttacaaatgagtttatgcattttcatggctcttaataaacatattgttttcccttgtt

SEQ ID NO: 430891 - DNA, 1997 bp, Homo sapiens
tggaggtggagccttttttgctcacggcagcaagttcccttctcctttctctcccccggcggcgtgtgcattggctcttcaagctgcctgtgctgctccgtggagtgaaaaaggcagggtgtgctcgcagactgtgctataaactgcaatttctatttggggtcctcacggagaagaacaccaggaaagacagacaggaccagtgccatgggccagctttgctgctttcctttctcaagagatgaaggaaaaatcagtgaaaagaacggaggggagcccgatgacgctgaactagtaaggctcagtaagaggctggtggagaacgcggtgctcaaggctgtccagcagtatctggaggaaacacagaataaaaacaagccgggggaggggagctctgtgaaaaccgaagcagctgatcagaatggcaatgacaatgagaacaacaggaaatgagcccggaacgcaggcccccatgtctctgtgcaaagcctccctgcttccctctgctgagtctagggactgacttgcagcgtgctgtttaagttaagtttctctggtgcaatctgtgaagattgcctaatacttttcatgatcgatgtgttcgcattgctgaaacacaacagaagaaaaatggagtgctgggactggcagaggaaattaattgatgaaagaagaatggcccaagtttcattcgccctcagccacgcacaagggaaagggaactttgggttatgcctcctggacgcaaattaaaggccgagaaagaggccttgccatcaatggaatactgccatttatattgcttagcagggcatttgactactttatctgaggccagaactctcacacacagctatcaagcaagaaacctattggaattcgagacttaattaatgaagctttgcatcgagaaacgatgggtctgaagtccaaagtgaaacagataaaggaacttttattaaagcctgagactcaggccagaattaggagggagctttttgaaggaagacttattaacaacagtaattcagcaaatgacgttgatttcagcacaactttgacataagctctacattgcgattgtgacaacatagcttatgaaatcttttcagcttattaagtagctctttggtaaacaccaaagaagtttctgatagtgtctgcacaacagcaaaccaacatttggtgaggaattagcaatttcttgccaaagaaaattgattctgcccaattattttttgagctacacttgtgttttagaatatctgtttctgtaatattgagagttattttatagaaatgatttcttaattagctgttgtgagatatttctcgggtccttgcagaaaaaaacatacagactgtgaacaaatcattcacaaacagaataaaacagagccaacaacagtattttaagggtcacttgcctcctgttgacacaattgttgctaaatcaaaagaagcgttgtccaggtgtgtctacatctagtgttacttttaatgagaatttgaatgtttattgaacaatagtacttgaatgaacatttataaatgtaattattgcgatcactggttaagaatgttttatatatccttataatatttttcactgatcaaaatgttgttctgctttttcatttcttaaggaatacatgtttgggatttttattttttacgtgtccgaagataagctccaggtcttatcgtatcccttgccatctgaacttgtttgcactgcttctgtttgaaagagcatcttgaaaaacttccccggtatgatgattgttggtaacaactttttctatagtcattgatggagtagatcatgatggaggggaaatcactggagatcaaatatgtaaaatcatttcaaatataaaatccagtttactcatggattttagctattttttcactgggtaaattatactacatttatttacaaatgagtttatgcattttcatggctcttaataaacatattgttttcccttgtt

SEQ ID NO: 430892 - DNA, 1357 bp, Homo sapiens
tcttcctgtcgctcttcaaggtttccaaaagaccatctttcagcagttgcctcaattaaggccttggaaccaggagtgaaaaaaatagatcctgatttatatgaaaagtttatcagtcacagatttggagaagaaatattatatcgcatagatctttgctccatgctgaagaaaaaacaaagtaatggttattatcactgtgaatcttccattgtgattggcaagaaacctattggaattcgagacttaattaatgaagctttgcatcgagaaacgatgggtctgaagtccaaagtgaaacagataaaggaacttttattaaagcctgagactcaggccagaattaggagggagctttttgaaggaagacttattaacaacagtaattcagcaaatgacgttgatttcagcacaactttgacataagctctacattgcgattgtgacaacatagcttatgaaatcttttcagcttattaagtagctctttggtaaacaccaaagaagtttctgatagtgtctgcacaacagcaaaccaacatttggtgaggaattagcaatttcttgccaaagaaaattgattctgcccaattattttttgagctacacttgtgttttagaatatctgtttctgtaatattgagagttattttatagaaatgatttcttaattagctgttgtgagatatttctcgggtccttgcagaaaaaaacatacagactgtgaacaaatcattcacaaacagaataaaacagagccaacaacagtattttaagggtcacttgcctcctgttgacacaattgttgctaaatcaaaagaagcgttgtccaggtgtgtctacatctagtgttacttttaatgagaatttgaatgtttattgaacaatagtacttgaatgaacatttataaatgtaattattgcgatcactggttaagaatgttttatatatccttataatatttttcactgatcaaaatgttgttctgctttttcatttcttaaggaatacatgtttgggatttttattttttacgtgtccgaagataagctccaggtcttatcgtatcccttgccatctgaacttgtttgcactgcttctgtttgaaagagcatcttgaaaaacttccccggtatgatgattgttggtaacaactttttctatagtcattgatggagtagatcatgatggaggggaaatcactggagatcaaatatgtaaaatcatttcaaatataaaatccagtttactcatggattttagctattttttcactgggtaaattatactacatttatttacaaatgagtttatgcattttcatggctcttaataaacatattgttttcccttgtt

SEQ ID NO: 430893 - DNA, 2331 bp, Homo sapiens
tggaggtggagccttttttgctcacggcagcaagttcccttctcctttctctcccccggcggcgtgtgcattggctcttcaagctgcctgtgctgctccgtggagtgaaaaaggcagggtgtgctcgcagactgtgctataaactgcaatttctatttggggtcctcacggagaagaacaccaggaaagacagacaggaccagtgccatgggccagctttgctgctttcctttctcaagagatgaaggaaaaatcagtgagttggaaagctcgtcctctgcagtcctacagagatacagcaaggatatacccagttggtcaagtggtgaaaagaacggaggggagcccgatgacgctgaactagtaaggctcagtaagaggctggtggagaacgcggtgctcaaggctgtccagcagtatctggaggaaacacagaataaaaacaagccgggggaggggagctctgtgaaaaccgaagcagctgatcagaatggcaatgacaatgagaacaacaggaaatgagcccggaacgcaggcccccatgtctctgtgcaaagcctccctgcttccctctgctgagtctagggactgacttgcagcgtgctgtttaagttaagtttctctggtgcaatctgtgaagattgcctaatacttttcatgatcgatgtgttcgcattgctgaaacacaacagaagaaaaatggagtgctgggactggcagaggaaattaattgatgaaagaagaatggcccaagtttcattcgccctcagccacgcacaagggaaagggaactttgggttatgcctcctggacgcaaattaaaggccgagaaagaggccttgccatcaatggaatactgccatttatattgcttagcagggcatttgactactttatctgaggccagaactctcacacacagctatcaagtgctaagtttaaaataatcactgttggaattgtcatctgtacaattagtccataatgtttcatgtttgtcctaagtgtgctgttgctatgcagtgtgatctttatttatagtaaattatgtttcatgtaaatgatatatttttggtgaaatgcaaccttttctataaaatgtgggcaacattttaaagtttttttaaaatcctattttgataagtcagtatgccatatttaatgaaatgttattatataatttttttttcttaggcaagaaacctattggaattcgagacttaattaatgaagctttgcatcgagaaacgatgggtctgaagtccaaagtgaaacagataaaggaacttttattaaagcctgagactcaggccagaattaggagggagctttttgaaggaagacttattaacaacagtaattcagcaaatgacgttgatttcagcacaactttgacataagctctacattgcgattgtgacaacatagcttatgaaatcttttcagcttattaagtagctctttggtaaacaccaaagaagtttctgatagtgtctgcacaacagcaaaccaacatttggtgaggaattagcaatttcttgccaaagaaaattgattctgcccaattattttttgagctacacttgtgttttagaatatctgtttctgtaatattgagagttattttatagaaatgatttcttaattagctgttgtgagatatttctcgggtccttgcagaaaaaaacatacagactgtgaacaaatcattcacaaacagaataaaacagagccaacaacagtattttaagggtcacttgcctcctgttgacacaattgttgctaaatcaaaagaagcgttgtccaggtgtgtctacatctagtgttacttttaatgagaatttgaatgtttattgaacaatagtacttgaatgaacatttataaatgtaattattgcgatcactggttaagaatgttttatatatccttataatatttttcactgatcaaaatgttgttctgctttttcatttcttaaggaatacatgtttgggatttttattttttacgtgtccgaagataagctccaggtcttatcgtatcccttgccatctgaacttgtttgcactgcttctgtttgaaagagcatcttgaaaaacttccccggtatgatgattgttggtaacaactttttctatagtcattgatggagtagatcatgatggaggggaaatcactggagatcaaatatgtaaaatcatttcaaatataaaatccagtttactcatggattttagctattttttcactgggtaaattatactacatttatttacaaatgagtttatgcattttcatggctcttaataaacatattgttttcccttgtt

SEQ ID NO: 430894 - DNA, 1393 bp, Homo sapiens
tggaggtggagccttttttgctcacggcagcaagttcccttctcctttctctcccccggcggcgtgtgcattggctcttcaagctgcctgtgctgctccgtggagtgaaaaaggcagggtgtgctcgcagactgtgctataaactgcaatttctatttggggtcctcacggagaagaacaccaggaaagacagacaggaccagtgccatgggccagctttgctgctttcctttctcaagagatgaaggaaaaatcagcaagaaacctattggaattcgagacttaattaatgaagctttgcatcgagaaacgatgggtctgaagtccaaagtgaaacagataaaggaacttttattaaagcctgagactcaggccagaattaggagggagctttttgaaggaagacttattaacaacagtaattcagcaaatgacgttgatttcagcacaactttgacataagctctacattgcgattgtgacaacatagcttatgaaatcttttcagcttattaagtagctctttggtaaacaccaaagaagtttctgatagtgtctgcacaacagcaaaccaacatttggtgaggaattagcaatttcttgccaaagaaaattgattctgcccaattattttttgagctacacttgtgttttagaatatctgtttctgtaatattgagagttattttatagaaatgatttcttaattagctgttgtgagatatttctcgggtccttgcagaaaaaaacatacagactgtgaacaaatcattcacaaacagaataaaacagagccaacaacagtattttaagggtcacttgcctcctgttgacacaattgttgctaaatcaaaagaagcgttgtccaggtgtgtctacatctagtgttacttttaatgagaatttgaatgtttattgaacaatagtacttgaatgaacatttataaatgtaattattgcgatcactggttaagaatgttttatatatccttataatatttttcactgatcaaaatgttgttctgctttttcatttcttaaggaatacatgtttgggatttttattttttacgtgtccgaagataagctccaggtcttatcgtatcccttgccatctgaacttgtttgcactgcttctgtttgaaagagcatcttgaaaaacttccccggtatgatgattgttggtaacaactttttctatagtcattgatggagtagatcatgatggaggggaaatcactggagatcaaatatgtaaaatcatttcaaatataaaatccagtttactcatggattttagctattttttcactgggtaaattatactacatttatttacaaatgagtttatgcattttcatggctcttaataaacatattgttttcccttgtt

SEQ ID NO: 430895 - DNA, 1711 bp, Homo sapiens
tggaggtggagccttttttgctcacggcagcaagttcccttctcctttctctcccccggcggcgtgtgcattggctcttcaagctgcctgtgctgctccgtggagtgaaaaaggcagggtgtgctcgcagactgtgctataaactgcaatttctatttggggtcctcacggagaagaacaccaggaaagacagacaggaccagtgccatgggccagctttgctgctttcctttctcaagagatgaaggaaaaatcagtgaaaagaacggaggggagcccgatgacgctgaactagtaaggctcagtaagaggctggtggagaacgcggtgctcaaggctgtccagcagtatctggaggaaacacagaataaaaacaagccgggggaggggagctctgtgaaaaccgaagcagctgatcagaatggcaatgacaatgagaacaacaggaaatgagcccggaacgcaggcccccatgtctctgtgcaaagcctccctgcttccctctgctgagtctagggactgacttgcagcgtgctgtttaagttaagtttctctggtgcaatctgtgaagattgcctaatacttttcatgatcgatgtgttcgcattgctgaaacacaacagaagaaaaatggagtgctgggactggcagaggaaattaattgatgaaagaagaatggcccaagtttcattcgccctcagccacgcacaagggaaagggaactttgggttatgcctcctggacgcaaattaaaggccgagaaagaggccttgccatcaatggaatactgccatttatattgcttagcagggcatttgactactttatctgaggccagaactctcacacacagctatcaagtgctaagtttaaaataatcactgttggaattgtcatctgtacaattagtccataatgtttcatgtttgtcctaagtgtgctgttgctatgcagtgtgatctttatttatagtaaattatgtttcatgtaaatgatatatttttggtgaaatgcaaccttttctataaaatgtgggcaacattttaaagtttttttaaaatcctattttgataagtcagtatgccatatttaatgaaatgttattatataatttttttttcttaggcaagaaacctattggaattcgagacttaattaatgaagctttgcatcgagaaacgatgggtctgaagtccaaagtgaaacagataaaggaacttttattaaagcctgagactcaggccagaattaggagggagctttttgaaggaagacttattaacaacagtaattcagcaaatgacgttgatttcagcacaactttgacataagctctacattgcgattgtgacaacatagcttatgaaatcttttcagcttattaagtagctctttggtaaacaccaaagaagtttctgatagtgtctgcacaacagcaaaccaacatttggtgaggaattagcaatttcttgccaaagaaaattgattctgcccaattattttttgagctacacttgtgttttagaatatctgtttctgtaatattgagagttattttatagaaatgatttcttaattagctgttgtgagatatttctcgggtccttgcagaaaaaaacatacagactgtgaacaaatcattcacaaacagaataaagacttagccgacaggccctcccttttctccccaactctctcccgcgccttataa

SEQ ID NO: 430896 - DNA, 379 bp, Homo sapiens
aaaatgaatgggtcaagagtgatcaagtaaagaagaggaaaaaaaagagaaaagattatcaacccaactatttcctgtccattccaatcaccaacaaagaggtgctatttttaaaaagttatttttactgtgaaattttattctaaatttaaagtacaactaaatgcttattagcccacttgctcttagcttttaagagtatttggtggcattttagcaggactgtccagggaatatttctgtttaagtaatagaaatgtatttaaacaacaggtttggaaaatatcatttgtttttctgagacagggtcttgctctggcacccaggctggagtgcagtggcacagtcatagctcactgcagctttgaactcctggact

SEQ ID NO: 430897 - DNA, 467 bp, Homo sapiens
aacattgtggtgccgggagctgtgcttcagatcatgagtcagctcactatggccctcaggccaaatctggttaaccaccctgctttgaaaataaagcaggaacacaactgtacccactcatttatgttttgtctacagcagagttgagtagttaacggcagagactatgtcatctgcaatgcctaaactatttactatgaggtcctttacagaaatgtttgcaaactcctgctttagatttgaaaatgacactgatgaatgattgctacttatatattgcttgtttttttttctgactgtattatctttgtttaaatgtattagacgtattgtttgacttttttcctctagtcactgatgaacctcaaataaatttgaagagaagtcaagaaaatgaatgggtcaagagtgatcaagtaaagaagaggaaaaaaaagagaaaagattatcaacccaactatttcctg

SEQ ID NO: 430898 - DNA, 2038 bp, Homo sapiens
tgtttaaggcagttgggttgccctcctgtccgtcagaggtgcagtaccagaggtggcgtgctgccgacttcgcgtttgccttgctggatgattccgcttgtttgccggctgcgtgagtgcttagagcttttcggtggaagatgccggacagtaacttcgcagagcgcagcgaggagcaggtgtctggtgctaaagtcatcgctcaggccctgaaaacgcaagatgtggagtacatatttggcatcgtaggcatcccagtgaccgaaatcgccattgctgcccagcagctaggcatcaagtacatcgggatgaggaatgagcaagcggcttgttatgctgcctccgcgattggatatctgacaagcaggccaggagtctgccttgttgtttctggcccaggtctcatccatgccttgggcggtatggcaaatgcaaacatgaactgctggcccttgcttgtgattggtggttcctctgaaagaaaccaagaaacaatgggagctttccaggagtttcctcaggttgaagcttgtagattatataccaagttctctgcccgcccaagcagcatagaagctattccttttgttattgaaaaggcagtgagaagcagtatctatggtcgtccaggtgcttgctatgttgacataccagcagattttgtgaaccttcaggtgaatgtgaattctataaagtacatggaacgctgcatgtcacctcctattagcatggcagaaacctctgctgtgtgcacggcggcttctgttattaggaatgccaaacaaccccttcttatcatcgggaaaggtgctgcttacgctcatgcagaagagagtatcaagaaattggtggagcaatataaactgccatttttgcccacccctatggggaagggtgttgtccctgacaaccatccatactgtgtaggtgcagccagatccagggctttgcaatttgctgatgtaattgtgttatttggtgccagactaaattggattttacattttggactgcctccaagatatcagccagatgtgaagtttatccaggttgatatctgtgcagaagaattggggaataatgtaaagcccgctgttactttgctaggaaacatacatgctgtcactaagcagcttttagaggaacttgataaaacaccatggcagtatcctccagagagcaagtggtggaaaactctgagagaaaaaatgaagagcaatgaagctgcatccaaggaactagcttctaaaaaatccctgcctatgaattattacacagtattctaccatgttcaagaacaactacctagagactgtttcgtggtaagtgaaggagcaaatactatggacattggacggactgtgcttcagaactaccttcctcgtcacaggcttgatgctggtactttcggaacaatgggagttggtttgggatttgctattgcagctgccgtggtggctaaagatagaagccctgggcaatggatcatctgtgtggaaggagacagtgcatttgggttttctggcatggaggtagaaaccatctgcaggtacaacttgccaatcatactgttggtagtgaataacaatggaatttaccaaggttttgatacagatacttggaaagaaatgttaaaatttcaagatgctactgcagtggtccctccaatgtgtttgctgccaaattcacattatgagcaagtcatgactgcatttggaggcaaagggtattttgtacaaacaccagaagaactccaaaaatccctgaggcagagcctagcagacacaactaaaccttctcttatcaacatcatgattgagccacaagccacacggaaggcccaggattttcattggctgacccgctctaatatgtaaataaagacgccagttggtggtcttgagttttctctttcttgcaagatgaaattttattttccacagcaaaattactctactgttaaaattgtgcaaaataaaataaacatttaaaatgacattttacagtaaaggaattgattaaaaacagaaaaagttag

SEQ ID NO: 430899 - DNA, 1810 bp, Homo sapiens
tgtttaaggcagttgggttgccctcctgtccgtcagaggtgcagtaccagaggtggcgtgctgccgacttcgcgtttgccttgctggatgattccgcttgtttgccggctgcgtgagtgcttagagcttttcggtggaagatgccggacagtaacttcgcagagcgcagcgaggagcaggtgtctggtgctaaagtcatcgctcaggccctgaaaacgcaagatgtggagtacatatttggcatcgtaggcatcccagtgaccgaaatcgccattgctgcccagcagctaggcatcaagtacatcgggatgaggaatgagcaagcggcttgttatgctgcctccgcgattggatatctgacaagcaggccaggagtctgccttgttgtttctggcccaggtctcatccatgccttgggcggtatggcaaatgcaaacatgaactgctggttgaagcttgtagattatataccaagttctctgcccgcccaagcagcatagaagctattccttttgttattgaaaaggcagtgagaagcagtatctatggtcgtccaggtgcttgctatgttgacataccagcagattttgtgaaccttcaggtgaatgtgaattctataaagtacatggaacgctgcatgtcacctcctattagcatggcagaaacctctgctgtgtgcacggcggcttctgttattaggaatgccaaacaaccccttcttatcatcgggaaaggtgctgcttacgctcatgcagaagagagtatcaagaaattggtggagcaatataaactgccatttttgcccacccctatggggaagggtgttgtccctgacaaccatccatactgtgtaggtgcagccagatccaggttgatatctgtgcagaagaattggggaataatgtaaagcccgctgttactttgctaggaaacatacatgctgtcactaagcagcttttagaggaacttgataaaacaccatggcagtatcctccagagagcaagtggtggaaaactctgagagaaaaaatgaagagcaatgaagctgcatccaaggaactagcttctaaaaaatccctgcctatgaattattacacagtattctaccatgttcaagaacaactacctagagactgtttcgtggtaagtgaaggagcaaatactatggacattggacggactgtgcttcagaactaccttcctcgtcacaggcttgatgctggtactttcggaacaatgggagttggtttgggatttgctattgcagctgccgtggtggctaaagatagaagccctgggcaatggatcatctgtgtggaaggagacagtgcatttgggttttctggcatggaggtagaaaccatctgcaggtacaacttgccaatcatactgttggtagtgaataacaatggaatttaccaaggttttgatacagatacttggaaagaaatgttaaaatttcaagatgctactgcagtggtccctccaatgtgtttgctgccaaattcacattatgagcaagtcatgactgcatttggaggcaaagggtattttgtacaaacaccagaagaactccaaaaatccctgaggcagagcctagcagacacaactaaaccttctcttatcaacatcatgattgagccacaagccacacggaaggcccaggattttcattggctgacccgctctaatatgtaaataaagacgccagttggtggtcttgagttttctctttcttgcaagatgaaattttattttccacagcaaaattactctactgttaaaattgtgcaaaataaaataaacattt

SEQ ID NO: 430900 - DNA, 1909 bp, Homo sapiens
tgtttaaggcagttgggttgccctcctgtccgtcagaggtgcagtaccagaggtggcgtgctgccgacttcgcgtttgccttgctggatgattccgcttgtttgccggctgcgtgagtgcttagagcttttcggtggaagatgccggacagtaacttcgcagagcgcagcgaggagcaggtgtctggtgctaaagtcatcgctcaggccctgaaaacgcaagatgtggagtacatatttggcatcgtaggcatcccagtgaccgaaatcgccattgctgcccagcagctaggcatcaagtacatcgggatgaggaatgagcaagcggcttgttatgctgcctccgcgattggatatctgacaagcaggccaggagtctgccttgttgtttctggcccaggtctcatccatgccttgggcggtatggcaaatgcaaacatgaactgctggcccttgcttgtgattggtggttcctctgaaagaaaccaagaaacaatgggagctttccaggagtttcctcaggttgaagcttgtagattatataccaagttctctgcccgcccaagcagcatagaagctattccttttgttattgaaaaggcagtgagaagcagtatctatggtcgtccaggtgcttgctatgttgacataccagcagattttgtgaaccttcaggtgaatgtgaattctataaagtacatggaacgctgcatgtcacctcctattagcatggcagaaacctctgctgtgtgcacggcggcttctgttattaggaatgccaaacaaccccttcttatcatcgggaaaggtgctgcttacgctcatgcagaagagagtatcaagaaattggtggagcaatataaactgccatttttgcccacccctatggggaagggtgttgtccctgacaaccatccatactgtgtaggtgcagccagatccagggctttgcaatttgctgatgtaattgtgttatttggtgccagactaaattggattttacattttggactgcctccaagatatcagccagatgtgaagtttatccaggttgatatctgtgcagaagaattggggaataatgtaaagcccgctgttactttgctaggaaacatacatgctgtcactaagcagcttttagaggaacttgataaaacaccatggcagtatcctccagagagcaagtggtggaaaactctgagagaaaaaatgaagagcaatgaagctgcatccaaggaactagcttctaaaaaatccctgcctatgaattattacacagtattctaccatgttcaagaacaactacctagagactgtttcgtggtaagtgaaggagcaaatactatggacattggacggactgtgcttcagaactaccttcctcgtcacaggcttgatgctggtactttcggaacaatgggagttggtttgggatttgctattgcagctgccgtggtggctaaagatagaagccctgggcaatggatcatctgtgtggaaggagacagtgcatttgggttttctggcatggaggtagaaaccatctgcaggtacaacttgccaatcatactgttggtagtgaataacaatggaatttaccaaggttttgatacagatacttggaaagaaatgttaaaatttcaagatgctactgcagtggtccctccaatgtgtttgctgccaaattcacattatgagcaagtcatgactgcatttggaggcaaagggtattttgtacaaacaccagaagaactccaaaaatccctgaggcagagcctagcagacacaactaaaccttctcttatcaacatcatgattgagccacaagccacacggaaggcccaggattttcattggctgacccgctctaatatgtaaataaagacgccagttggtggtcttgagttttc

SEQ ID NO: 430901 - DNA, 926 bp, Homo sapiens
gggctgttcacaggtcagccaacttctcagagtggccattttatagccatttggaaaccttgtagcttgtagttgttgcgtatttccaaataagtttgatagcatcttattaacattggttattttcattgtatcccaatttaatttgattatattcccatctacttttcaggaactagcttctaaaaaatccctgcctatgaattattacacagtattctaccatgttcaagaacaactacctagagactgtttcgtggtaagtgaaggagcaaatactatggacattggacggactgtgcttcagaactaccttcctcgtcacaggcttgatgctggtactttcggaacaatgggagttggtttgggatttgctattgcagctgccgtggtggctaaagatagaagccctgggcaatggatcatctgtgtggaaggagacagtgcatttgggttttctggcatggaggtagaaaccatctgcaggtacaacttgccaatcatactgttggtagtgaataacaatggaatttaccaaggttttgatacagatacttggaaagaaatgttaaaatttcaagatgctactgcagtggtccctccaatgtgtttgctgccaaattcacattatgagcaagtcatgactgcatttggaggcaaagggtattttgtacaaacaccagaagaactccaaaaatccctgaggcagagcctagcagacacaactaaaccttctcttatcaacatcatgattgagccacaagccacacggaaggcccaggattttcattggctgacccgctctaatatgtaaataaagacgccagttggtggtcttgagttttctctttcttgcaagatgaaattttattttccacagcaaaattactctactgttaaaattgtgcaaaataaaataaacattt

SEQ ID NO: 430902 - DNA, 507 bp, Homo sapiens
ttaacataactttgtttattggtgggtttgtggtcaaaaaaaagagaaaaaaaaaagggctggtggggtacaacttgccaatcatactgttggtagtgaataacaatggaatttaccaaggttttgatacagatacttggaaagaaatgttaaaatttcaagatgctactgcagtggtccctccaatgtgtttgctgccaaattcacattatgagcaagtcatgactgcatttggaggcaaagggtattttgtacaaacaccagaagaactccaaaaatccctgaggcagagcctagcagacacaactaaaccttctcttatcaacatcatgattgagccacaagccacacggaaggcccaggattttcattggctgacccgctctaatatgtaaataaagacgccagttggtggtcttgagttttctctttcttgcaagatgaaattttattttccacagcaaaattactctactgttaaaattgtgcaaaataaaataaacattt

SEQ ID NO: 430903 - DNA, 975 bp, Homo sapiens
gggctgttcacaggtcagccaacttctcagagtggccattttatagccatttggaaaccttgtagcttgtagttgttgcgtatttccaaataagtttgatagcatcttattaacattggttattttcattgtatcccaatttaatttgattatattcccatctacttttcaggaactagcttctaaaaaatccctgcctatgaattattacacagtattctaccatgttcaagaacaactacctagagactgtttcgtggtaagtgaaggagcaaatactatggacattggacggactgtgcttcagaactaccttcctcgtcacaggcttgatgctggtactttcggaacaatgggagttggtttgggatttgctattgcagctgccgtggtggctaaagatagaagccctgggcaatggatcatctgtgtggaaggagacagtgcatttgggttttctggcatggaggtagaaaccatctgcaggtacaacttgccaatcatactgttggtagtgaataacaatggaatttaccaaggttttgatacagatacttggaaagaaatgttaaaatttcaagatgctactgcagtggtccctccaatgtgtttgctgccaaattcacattatgagcaagtcatgactgcatttggaggcaaagggtattttgtacaaacaccagaagaactccaaaaatccctgaggcagagcctagcagacacaactaaaccttctcttatcaacatcatgattgagccacaagccacacggaaggcccaggattttcattggctgacccgctctaatatgtaaataaagacgccagttggtggtcttgagttttctctttcttgcaagatgaaattttattttccacagcaaaattactctactgttaaaattgtgcaaaataaaataaacatttaaaatgacattttacagtaaaggaattgattaaaaacagaaaaagttag

SEQ ID NO: 430904 - DNA, 846 bp, Homo sapiens
gggctgttcacaggtcagccaacttctcagagtggccattttatagccatttggaaaccttgtagcttgtagttgttgcgtatttccaaataagtttgatagcatcttattaacattggttattttcattgtatcccaatttaatttgattatattcccatctacttttcaggaactagcttctaaaaaatccctgcctatgaattattacacagtattctaccatgttcaagaacaactacctagagactgtttcgtggtaagtgaaggagcaaatactatggacattggacggactgtgcttcagaactaccttcctcgtcacaggcttgatgctggtactttcggaacaatgggagttggtttgggatttgctattgcagctgccgtggtggctaaagatagaagccctgggcaatggatcatctgtgtggaaggagacagtgcatttgggttttctggcatggaggtagaaaccatctgcaggtacaacttgccaatcatactgttggtagtgaataacaatggaatttaccaaggttttgatacagatacttggaaagaaatgttaaaatttcaagatgctactgcagtggtccctccaatgtgtttgctgccaaattcacattatgagcaagtcatgactgcatttggaggcaaagggtattttgtacaaacaccagaagaactccaaaaatccctgaggcagagcctagcagacacaactaaaccttctcttatcaacatcatgattgagccacaagccacacggaaggcccaggattttcattggctgacccgctctaatatgtaaataaagacgccagttggtggtcttgagttttc

SEQ ID NO: 430905 - DNA, 1248 bp, Homo sapiens
tgtaagaagcttaatgaatacatataatcttgatggctgggcacggtaatcccagccctttgggatgccaaggtgggcggatcacttgaggctgagagtttgagacctgcctggccaacatggtgaaacctgtctctactaaaaatacaaaaattaactgggcatggtggtgcatgtcagtaatccctgctactcaggaggtggaggcacgagaatcacttgaacccaggaggtggaggttgcagtgagctaagattgtgccactgcactccaatctgggtgacagtgagactgtctctcaaaataataataatcatcatcatcatcttgagacctatgttaatcacagaaaagccctaacaaattctgtcatctctgctagtgagttcatgctattgatttgcttccaatgatctgttctacagtttctctatgaattttgtttggatattgctggatattgctggagaaatatgagttctcgtcttcctcttttacaattctatgaggattatttttatatttcttacatttatcactttgaaattatttattttcattccagtggaatttacatacattatactttccaaactgttgatttttgtctttctgtccgtctgccatttatcattgattctcagtgtaggctggccacttcctgcctcaatatgggaatgcctatatctgtgcctgtgtccaggccatatgtataggatggtgttagttctggaaaagacttccgtgcacagttcttcctactcatgtcctcagacctgggagctcagccctctgtgggcctccttcatctcccttctccttctgagtgtacttctggttcttttagactatagtttttgtgctctgattactgtgaatggaagaggacccagaatgccattttaggttgttttataggacacagcaggaagattcactaataggtttttaggtcctttttgggaaaagcaccagaacaaagacaaacctcattttgccaccattgtgtaggacttttaggttttagaacaagtgaaacaatgaggatataatttgagacaatcatttcttttgactgaatgtttgttgtcttctttttctaggattttcattggctgacccgctctaatatgtaaataaagacgccagttggtggtcttgagttttctctttcttgcaagatgaaattttattttccacagcaaaattactctactgttaaaattgtgcaaaataaaataaacattt

SEQ ID NO: 430906 - DNA, 1168 bp, Homo sapiens
tgtaagaagcttaatgaatacatataatcttgatggctgggcacggtaatcccagccctttgggatgccaaggtgggcggatcacttgaggctgagagtttgagacctgcctggccaacatggtgaaacctgtctctactaaaaatacaaaaattaactgggcatggtggtgcatgtcagtaatccctgctactcaggaggtggaggcacgagaatcacttgaacccaggaggtggaggttgcagtgagctaagattgtgccactgcactccaatctgggtgacagtgagactgtctctcaaaataataataatcatcatcatcatcttgagacctatgttaatcacagaaaagccctaacaaattctgtcatctctgctagtgagttcatgctattgatttgcttccaatgatctgttctacagtttctctatgaattttgtttggatattgctggatattgctggagaaatatgagttctcgtcttcctcttttacaattctatgaggattatttttatatttcttacatttatcactttgaaattatttattttcattccagtggaatttacatacattatactttccaaactgttgatttttgtctttctgtccgtctgccatttatcattgattctcagtgtaggctggccacttcctgcctcaatatgggaatgcctatatctgtgcctgtgtccaggccatatgtataggatggtgttagttctggaaaagacttccgtgcacagttcttcctactcatgtcctcagacctgggagctcagccctctgtgggcctccttcatctcccttctccttctgagtgtacttctggttcttttagactatagtttttgtgctctgattactgtgaatggaagaggacccagaatgccattttaggttgttttataggacacagcaggaagattcactaataggtttttaggtcctttttgggaaaagcaccagaacaaagacaaacctcattttgccaccattgtgtaggacttttaggttttagaacaagtgaaacaatgaggatataatttgagacaatcatttcttttgactgaatgtttgttgtcttctttttctaggattttcattggctgacccgctctaatatgtaaataaagacgccagttggtggtcttgagttttc

SEQ ID NO: 430907 - DNA, 1989 bp, Homo sapiens
tgtttaaggcagttgggttgccctcctgtccgtcagaggtgcagtaccagaggtggcgtgctgccgacttcgcgtttgccttgctggatgattccgcttgtttgccggctgcgtgagtgcttagagcttttcggtggaagatgccggacagtaacttcgcagagcgcagcgaggagcaggtgtctggtgctaaagtcatcgctcaggccctgaaaacgcaagatgtggagtacatatttggcatcgtaggcatcccagtgaccgaaatcgccattgctgcccagcagctaggcatcaagtacatcgggatgaggaatgagcaagcggcttgttatgctgcctccgcgattggatatctgacaagcaggccaggagtctgccttgttgtttctggcccaggtctcatccatgccttgggcggtatggcaaatgcaaacatgaactgctggcccttgcttgtgattggtggttcctctgaaagaaaccaagaaacaatgggagctttccaggagtttcctcaggttgaagcttgtagattatataccaagttctctgcccgcccaagcagcatagaagctattccttttgttattgaaaaggcagtgagaagcagtatctatggtcgtccaggtgcttgctatgttgacataccagcagattttgtgaaccttcaggtgaatgtgaattctataaagtacatggaacgctgcatgtcacctcctattagcatggcagaaacctctgctgtgtgcacggcggcttctgttattaggaatgccaaacaaccccttcttatcatcgggaaaggtgctgcttacgctcatgcagaagagagtatcaagaaattggtggagcaatataaactgccatttttgcccacccctatggggaagggtgttgtccctgacaaccatccatactgtgtaggtgcagccagatccagggctttgcaatttgctgatgtaattgtgttatttggtgccagactaaattggattttacattttggactgcctccaagatatcagccagatgtgaagtttatccaggttgatatctgtgcagaagaattggggaataatgtaaagcccgctgttactttgctaggaaacatacatgctgtcactaagcagcttttagaggaacttgataaaacaccatggcagtatcctccagagagcaagtggtggaaaactctgagagaaaaaatgaagagcaatgaagctgcatccaaggaactagcttctaaaaaatccctgcctatgaattattacacagtattctaccatgttcaagaacaactacctagagactgtttcgtggtaagtgaaggagcaaatactatggacattggacggactgtgcttcagaactaccttcctcgtcacaggcttgatgctggtactttcggaacaatgggagttggtttgggatttgctattgcagctgccgtggtggctaaagatagaagccctgggcaatggatcatctgtgtggaaggagacagtgcatttgggttttctggcatggaggtagaaaccatctgcaggtacaacttgccaatcatactgttggtagtgaataacaatggaatttaccaaggttttgatacagatacttggaaagaaatgttaaaatttcaagatgctactgcagtggtccctccaatgtgtttgctgccaaattcacattatgagcaagtcatgactgcatttggaggcaaagggtattttgtacaaacaccagaagaactccaaaaatccctgaggcagagcctagcagacacaactaaaccttctcttatcaacatcatgattgagccacaagccacacggaaggcccaggattttcattggctgacccgctctaatatgtaaataaagacgccagttggtggtcttgagttttctctttcttgcaagatgaaattttattttccacagcaaaattactctactgttaaaattgtgcaaaataaaataaacattt

SEQ ID NO: 430908 - DNA, 1911 bp, Homo sapiens
tgtttaaggcagttgggttgccctcctgtccgtcagaggtgcagtaccagaggtggcgtgctgccgacttcgcgtttgccttgctggatgattccgcttgtttgccggctgcgtgagtgcttagagcttttcggtggaagatgccggacagtaacttcgcagagcgcagcgaggagcaggtgtctggtgctaaagtcatcgctcaggccctgaaaacgcaagatgtggagtacatatttggcatcgtaggcatcccagtgaccgaaatcgccattgctgcccagcagctaggcatcaagtacatcgggatgaggaatgagcaagcggcttgttatgctgcctccgcgattggatatctgacaagcaggccaggagtctgccttgttgtttctggcccaggtctcatccatgccttgggcggtatggcaaatgcaaacatgaactgctggcccttgcttgtgattggtggttcctctgaaagaaaccaagaaacaatgggagctttccaggagtttcctcaggcagtgagaagcagtatctatggtcgtccaggtgcttgctatgttgacataccagcagattttgtgaaccttcaggtgaatgtgaattctataaagtacatggaacgctgcatgtcacctcctattagcatggcagaaacctctgctgtgtgcacggcggcttctgttattaggaatgccaaacaaccccttcttatcatcgggaaaggtgctgcttacgctcatgcagaagagagtatcaagaaattggtggagcaatataaactgccatttttgcccacccctatggggaagggtgttgtccctgacaaccatccatactgtgtaggtgcagccagatccagggctttgcaatttgctgatgtaattgtgttatttggtgccagactaaattggattttacattttggactgcctccaagatatcagccagatgtgaagtttatccaggttgatatctgtgcagaagaattggggaataatgtaaagcccgctgttactttgctaggaaacatacatgctgtcactaagcagcttttagaggaacttgataaaacaccatggcagtatcctccagagagcaagtggtggaaaactctgagagaaaaaatgaagagcaatgaagctgcatccaaggaactagcttctaaaaaatccctgcctatgaattattacacagtattctaccatgttcaagaacaactacctagagactgtttcgtggtaagtgaaggagcaaatactatggacattggacggactgtgcttcagaactaccttcctcgtcacaggcttgatgctggtactttcggaacaatgggagttggtttgggatttgctattgcagctgccgtggtggctaaagatagaagccctgggcaatggatcatctgtgtggaaggagacagtgcatttgggttttctggcatggaggtagaaaccatctgcaggtacaacttgccaatcatactgttggtagtgaataacaatggaatttaccaaggttttgatacagatacttggaaagaaatgttaaaatttcaagatgctactgcagtggtccctccaatgtgtttgctgccaaattcacattatgagcaagtcatgactgcatttggaggcaaagggtattttgtacaaacaccagaagaactccaaaaatccctgaggcagagcctagcagacacaactaaaccttctcttatcaacatcatgattgagccacaagccacacggaaggcccaggattttcattggctgacccgctctaatatgtaaataaagacgccagttggtggtcttgagttttctctttcttgcaagatgaaattttattttccacagcaaaattactctactgttaaaattgtgcaaaataaaataaacattt

SEQ ID NO: 430909 - DNA, 1941 bp, Homo sapiens
tgtttaaggcagttgggttgccctcctgtccgtcagaggtgcagtaccagaggtggcgtgctgccgacttcgcgtttgccttgctggatgattccgcttgtttgccggctgcgtgagtgcttagagcttttcggtggaagatgccggacagtaacttcgcagagcgcagcgaggagcaggtgtctggtgctaaagtcatcgctcaggccctgaaaacgcaagatgtggagtacatatttggcatcgtaggcatcccagtgaccgaaatcgccattgctgcccagcagctaggcatcaagtacatcgggatgaggaatgagcaagcggcttgttatgctgcctccgcgattggatatctgacaagcaggccaggagtctgccttgttgtttctggcccaggtctcatccatgccttgggcggtatggcaaatgcaaacatgaactgctggcccttgcttgtgattggtggttcctctgaaagaaaccaagaaacaatgggagctttccaggagtttcctcaggttgaagcttgtagattatataccaagttctctgcccgcccaagcagcatagaagctattccttttgttattgaaaagataccagcagattttgtgaaccttcaggtgaatgtgaattctataaagtacatggaacgctgcatgtcacctcctattagcatggcagaaacctctgctgtgtgcacggcggcttctgttattaggaatgccaaacaaccccttcttatcatcgggaaaggtgctgcttacgctcatgcagaagagagtatcaagaaattggtggagcaatataaactgccatttttgcccacccctatggggaagggtgttgtccctgacaaccatccatactgtgtaggtgcagccagatccagggctttgcaatttgctgatgtaattgtgttatttggtgccagactaaattggattttacattttggactgcctccaagatatcagccagatgtgaagtttatccaggttgatatctgtgcagaagaattggggaataatgtaaagcccgctgttactttgctaggaaacatacatgctgtcactaagcagcttttagaggaacttgataaaacaccatggcagtatcctccagagagcaagtggtggaaaactctgagagaaaaaatgaagagcaatgaagctgcatccaaggaactagcttctaaaaaatccctgcctatgaattattacacagtattctaccatgttcaagaacaactacctagagactgtttcgtggtaagtgaaggagcaaatactatggacattggacggactgtgcttcagaactaccttcctcgtcacaggcttgatgctggtactttcggaacaatgggagttggtttgggatttgctattgcagctgccgtggtggctaaagatagaagccctgggcaatggatcatctgtgtggaaggagacagtgcatttgggttttctggcatggaggtagaaaccatctgcaggtacaacttgccaatcatactgttggtagtgaataacaatggaatttaccaaggttttgatacagatacttggaaagaaatgttaaaatttcaagatgctactgcagtggtccctccaatgtgtttgctgccaaattcacattatgagcaagtcatgactgcatttggaggcaaagggtattttgtacaaacaccagaagaactccaaaaatccctgaggcagagcctagcagacacaactaaaccttctcttatcaacatcatgattgagccacaagccacacggaaggcccaggattttcattggctgacccgctctaatatgtaaataaagacgccagttggtggtcttgagttttctctttcttgcaagatgaaattttattttccacagcaaaattactctactgttaaaattgtgcaaaataaaataaacattt

SEQ ID NO: 430910 - DNA, 1894 bp, Homo sapiens
cttggagacgagtagaaatgggcgatgggggtcggggggttttccttttagcgcccgggagggagggaaggatgtggcgatatggtggggccttgggagtttactcccctgttcttcgttcctcaggatgtggagtacatatttggcatcgtaggcatcccagtgaccgaaatcgccattgctgcccagcagctaggcatcaagtacatcgggatgaggaatgagcaagcggcttgttatgctgcctccgcgattggatatctgacaagcaggccaggagtctgccttgttgtttctggcccaggtctcatccatgccttgggcggtatggcaaatgcaaacatgaactgctggcccttgcttgtgattggtggttcctctgaaagaaaccaagaaacaatgggagctttccaggagtttcctcaggttgaagcttgtagattatataccaagttctctgcccgcccaagcagcatagaagctattccttttgttattgaaaaggcagtgagaagcagtatctatggtcgtccaggtgcttgctatgttgacataccagcagattttgtgaaccttcaggtgaatgtgaattctataaagtacatggaacgctgcatgtcacctcctattagcatggcagaaacctctgctgtgtgcacggcggcttctgttattaggaatgccaaacaaccccttcttatcatcgggaaaggtgctgcttacgctcatgcagaagagagtatcaagaaattggtggagcaatataaactgccatttttgcccacccctatggggaagggtgttgtccctgacaaccatccatactgtgtaggtgcagccagatccagggctttgcaatttgctgatgtaattgtgttatttggtgccagactaaattggattttacattttggactgcctccaagatatcagccagatgtgaagtttatccaggttgatatctgtgcagaagaattggggaataatgtaaagcccgctgttactttgctaggaaacatacatgctgtcactaagcagcttttagaggaacttgataaaacaccatggcagtatcctccagagagcaagtggtggaaaactctgagagaaaaaatgaagagcaatgaagctgcatccaaggaactagcttctaaaaaatccctgcctatgaattattacacagtattctaccatgttcaagaacaactacctagagactgtttcgtggtaagtgaaggagcaaatactatggacattggacggactgtgcttcagaactaccttcctcgtcacaggcttgatgctggtactttcggaacaatgggagttggtttgggatttgctattgcagctgccgtggtggctaaagatagaagccctgggcaatggatcatctgtgtggaaggagacagtgcatttgggttttctggcatggaggtagaaaccatctgcaggtacaacttgccaatcatactgttggtagtgaataacaatggaatttaccaaggttttgatacagatacttggaaagaaatgttaaaatttcaagatgctactgcagtggtccctccaatgtgtttgctgccaaattcacattatgagcaagtcatgactgcatttggaggcaaagggtattttgtacaaacaccagaagaactccaaaaatccctgaggcagagcctagcagacacaactaaaccttctcttatcaacatcatgattgagccacaagccacacggaaggcccaggattttcattggctgacccgctctaatatgtaaataaagacgccagttggtggtcttgagttttctctttcttgcaagatgaaattttattttccacagcaaaattactctactgttaaaattgtgcaaaataaaataaacattt

SEQ ID NO: 430911 - DNA, 1894 bp, Homo sapiens
tgtttaaggcagttgggttgccctcctgtccgtcagaggtgcagtaccagaggtggcgtgctgccgacttcgcgtttgccttgctggatgattccgcttgtttgccggctgcgtgagtgcttagagcttttcggtggaagatgccggacagtaacttcgcagagcgcagcgaggagcaggtgtctggtgctaaagtcatcgctcaggccctgaaaacgcaagatgtggagtacatatttggcatcgtaggcatcccagtgaccgaaatcgccattgctgcccagcagctaggcatcaagtacatcgggatgaggaatgagcaagcggcttgttatgctgcctccgcgattggatatctgacaagcaggccaggagtctgccttgttgtttctggcccaggtctcatccatgccttgggcggtatggcaaatgcaaacatgaactgctggcccttgcttgtgattggtggttcctctgaaagaaaccaagaaacaatgggagctttccaggagtttcctcaggttgaagcttgtagattatataccaagttctctgcccgcccaagcagcatagaagctattccttttgttattgaaaaggtacatggaacgctgcatgtcacctcctattagcatggcagaaacctctgctgtgtgcacggcggcttctgttattaggaatgccaaacaaccccttcttatcatcgggaaaggtgctgcttacgctcatgcagaagagagtatcaagaaattggtggagcaatataaactgccatttttgcccacccctatggggaagggtgttgtccctgacaaccatccatactgtgtaggtgcagccagatccagggctttgcaatttgctgatgtaattgtgttatttggtgccagactaaattggattttacattttggactgcctccaagatatcagccagatgtgaagtttatccaggttgatatctgtgcagaagaattggggaataatgtaaagcccgctgttactttgctaggaaacatacatgctgtcactaagcagcttttagaggaacttgataaaacaccatggcagtatcctccagagagcaagtggtggaaaactctgagagaaaaaatgaagagcaatgaagctgcatccaaggaactagcttctaaaaaatccctgcctatgaattattacacagtattctaccatgttcaagaacaactacctagagactgtttcgtggtaagtgaaggagcaaatactatggacattggacggactgtgcttcagaactaccttcctcgtcacaggcttgatgctggtactttcggaacaatgggagttggtttgggatttgctattgcagctgccgtggtggctaaagatagaagccctgggcaatggatcatctgtgtggaaggagacagtgcatttgggttttctggcatggaggtagaaaccatctgcaggtacaacttgccaatcatactgttggtagtgaataacaatggaatttaccaaggttttgatacagatacttggaaagaaatgttaaaatttcaagatgctactgcagtggtccctccaatgtgtttgctgccaaattcacattatgagcaagtcatgactgcatttggaggcaaagggtattttgtacaaacaccagaagaactccaaaaatccctgaggcagagcctagcagacacaactaaaccttctcttatcaacatcatgattgagccacaagccacacggaaggcccaggattttcattggctgacccgctctaatatgtaaataaagacgccagttggtggtcttgagttttctctttcttgcaagatgaaattttattttccacagcaaaattactctactgttaaaattgtgcaaaataaaataaacattt

SEQ ID NO: 430912 - DNA, 1816 bp, Homo sapiens
tgtttaaggcagttgggttgccctcctgtccgtcagaggtgcagtaccagaggtggcgtgctgccgacttcgcgtttgccttgctggatgattccgcttgtttgccggctgcgtgagtgcttagagcttttcggtggaagatgccggacagtaacttcgcagagcgcagcgaggagcaggtgtctggtgctaaagtcatcgctcaggccctgaaaacgcaagatgtggagtacatatttggcatcgtaggcatcccagtgaccgaaatcgccattgctgcccagcagctaggcatcaagtacatcgggatgaggaatgagcaagcggcttgttatgctgcctccgcgattggatatctgacaagcaggccaggagtctgccttgttgtttctggcccaggtctcatccatgccttgggcggtatggcaaatgcaaacatgaactgctggcccttgcttgtgattggtggttcctctgaaagaaaccaagaaacaatgggagctttccaggagtttcctcaggtacatggaacgctgcatgtcacctcctattagcatggcagaaacctctgctgtgtgcacggcggcttctgttattaggaatgccaaacaaccccttcttatcatcgggaaaggtgctgcttacgctcatgcagaagagagtatcaagaaattggtggagcaatataaactgccatttttgcccacccctatggggaagggtgttgtccctgacaaccatccatactgtgtaggtgcagccagatccagggctttgcaatttgctgatgtaattgtgttatttggtgccagactaaattggattttacattttggactgcctccaagatatcagccagatgtgaagtttatccaggttgatatctgtgcagaagaattggggaataatgtaaagcccgctgttactttgctaggaaacatacatgctgtcactaagcagcttttagaggaacttgataaaacaccatggcagtatcctccagagagcaagtggtggaaaactctgagagaaaaaatgaagagcaatgaagctgcatccaaggaactagcttctaaaaaatccctgcctatgaattattacacagtattctaccatgttcaagaacaactacctagagactgtttcgtggtaagtgaaggagcaaatactatggacattggacggactgtgcttcagaactaccttcctcgtcacaggcttgatgctggtactttcggaacaatgggagttggtttgggatttgctattgcagctgccgtggtggctaaagatagaagccctgggcaatggatcatctgtgtggaaggagacagtgcatttgggttttctggcatggaggtagaaaccatctgcaggtacaacttgccaatcatactgttggtagtgaataacaatggaatttaccaaggttttgatacagatacttggaaagaaatgttaaaatttcaagatgctactgcagtggtccctccaatgtgtttgctgccaaattcacattatgagcaagtcatgactgcatttggaggcaaagggtattttgtacaaacaccagaagaactccaaaaatccctgaggcagagcctagcagacacaactaaaccttctcttatcaacatcatgattgagccacaagccacacggaaggcccaggattttcattggctgacccgctctaatatgtaaataaagacgccagttggtggtcttgagttttctctttcttgcaagatgaaattttattttccacagcaaaattactctactgttaaaattgtgcaaaataaaataaacattt

SEQ ID NO: 430913 - DNA, 1743 bp, Homo sapiens
tgtttaaggcagttgggttgccctcctgtccgtcagaggtgcagtaccagaggtggcgtgctgccgacttcgcgtttgccttgctggatgattccgcttgtttgccggctgcgtgagtgcttagagcttttcggtggaagatgccggacagtaacttcgcagagcgcagcgaggagcaggtgtctggtgctaaagtcatcgctcaggccctgaaaacgcaagatgtggagtacatatttggcatcgtaggcatcccagtgaccgaaatcgccattgctgcccagcagctaggcatcaagtacatcgggatgaggaatgagcaagcggcttgttatgctgcctccgcgattggatatctgacaagcaggccaggagtctgccttgttgtttctggcccaggtctcatccatgccttgggcggtatggcaaatgcaaacatgaactgctggtacatggaacgctgcatgtcacctcctattagcatggcagaaacctctgctgtgtgcacggcggcttctgttattaggaatgccaaacaaccccttcttatcatcgggaaaggtgctgcttacgctcatgcagaagagagtatcaagaaattggtggagcaatataaactgccatttttgcccacccctatggggaagggtgttgtccctgacaaccatccatactgtgtaggtgcagccagatccagggctttgcaatttgctgatgtaattgtgttatttggtgccagactaaattggattttacattttggactgcctccaagatatcagccagatgtgaagtttatccaggttgatatctgtgcagaagaattggggaataatgtaaagcccgctgttactttgctaggaaacatacatgctgtcactaagcagcttttagaggaacttgataaaacaccatggcagtatcctccagagagcaagtggtggaaaactctgagagaaaaaatgaagagcaatgaagctgcatccaaggaactagcttctaaaaaatccctgcctatgaattattacacagtattctaccatgttcaagaacaactacctagagactgtttcgtggtaagtgaaggagcaaatactatggacattggacggactgtgcttcagaactaccttcctcgtcacaggcttgatgctggtactttcggaacaatgggagttggtttgggatttgctattgcagctgccgtggtggctaaagatagaagccctgggcaatggatcatctgtgtggaaggagacagtgcatttgggttttctggcatggaggtagaaaccatctgcaggtacaacttgccaatcatactgttggtagtgaataacaatggaatttaccaaggttttgatacagatacttggaaagaaatgttaaaatttcaagatgctactgcagtggtccctccaatgtgtttgctgccaaattcacattatgagcaagtcatgactgcatttggaggcaaagggtattttgtacaaacaccagaagaactccaaaaatccctgaggcagagcctagcagacacaactaaaccttctcttatcaacatcatgattgagccacaagccacacggaaggcccaggattttcattggctgacccgctctaatatgtaaataaagacgccagttggtggtcttgagttttctctttcttgcaagatgaaattttattttccacagcaaaattactctactgttaaaattgtgcaaaataaaataaacattt

SEQ ID NO: 430914 - DNA, 1087 bp, Homo sapiens
tcatcgagctcgccctgatctgtgtggtgcagccagatccaggctttgcaatttgctgatgtaattgtgttatttggtgccagactaaattggattttacattttggactgcctccaagatatcagccagatgtgaagtttatccaggttgatatctgtgcagaagaattggggaataatgtaaagcccgctgttactttgctaggaaacatacatgctgtcactaagcagcttttagaggaacttgataaaacaccatggcagtatcctccagagagcaagtggtggaaaactctgagagaaaaaatgaagagcaatgaagctgcatccaaggaactagcttctaaaaaatccctgcctatgaattattacacagtattctaccatgttcaagaacaactacctagagactgtttcgtggtaagtgaaggagcaaatactatggacattggacggactgtgcttcagaactaccttcctcgtcacaggcttgatgctggtactttcggaacaatgggagttggtttgggatttgctattgcagctgccgtggtggctaaagatagaagccctgggcaatggatcatctgtgtggaaggagacagtgcatttgggttttctggcatggaggtagaaaccatctgcaggtacaacttgccaatcatactgttggtagtgaataacaatggaatttaccaaggttttgatacagatacttggaaagaaatgttaaaatttcaagatgctactgcagtggtccctccaatgtgtttgctgccaaattcacattatgagcaagtcatgactgcatttggaggcaaagggtattttgtacaaacaccagaagaactccaaaaatccctgaggcagagcctagcagacacaactaaaccttctcttatcaacatcatgattgagccacaagccacacggaaggcccaggattttcattggctgacccgctctaatatgtaaataaagacgccagttggtggtcttgagttttctctttcttgcaagatgaaattttattttccacagcaaaattactctactgttaaaattgtgcaaaataaaataaacattt

SEQ ID NO: 430915 - DNA, 2161 bp, Homo sapiens
tgtttaaggcagttgggttgccctcctgtccgtcagaggtgcagtaccagaggtggcgtgctgccgacttcgcgtttgccttgctggatgattccgcttgtttgccggctgcgtgagtgcttagagcttttcggtggaagatgccggacagtaacttcgcagagcgcagcgaggagcaggtgtctggtgctaaagtcatcgctcaggccctgaaaacgcaagatgtggagtacatatttggcatcgtaggcatcccagtgaccgaaatcgccattgctgcccagcagctaggcatcaagtacatcgggatgaggaatgagcaagcggcttgttatgctgcctccgcgattggatatctgacaagcaggccaggagtctgccttgttgtttctggcccaggtctcatccatgccttgggcggtatggcaaatgcaaacatgaactgctggcccttgcttgtgattggtggttcctctgaaagaaaccaagaaacaatgggagctttccaggagtttcctcaggttgaagcttgtagattatataccaagttctctgcccgcccaagcagcatagaagctattccttttgttattgaaaaggcagtgagaagcagtatctatggtcgtccaggtgcttgctatgttgacataccagcagattttgtgaaccttcaggtgaatgtgaattctataaagtacatggaacgctgcatgtcacctcctattagcatggcagaaacctctgctgtgtgcacggcggcttctgttattaggaatgccaaacaaccccttcttatcatcgggaaaggtgctgcttacgctcatgcagaagagagtatcaagaaattggtggagcaatataaactgccatttttgcccacccctatggggaagggtgttgtccctgacaaccatccatactgtgtaggtgcagccagatccagggctttgcaatttgctgatgtaattgtgttatttggtgccagactaaattggattttacattttggactgcctccaagatatcagccagatgtgaagtttatccaggttgatatctgtgcagaagaattggggaataatgtaaagcccgctgttactttgctaggaaacatacatgctgtcactaagcagcttttagaggaacttgataaaacaccatggcagtatcctccagagagcaagtggtggaaaactctgagagaaaaaatgaagagcaatgaagctgcatccaaggaactagcttctaaaaaatccctgcctatgaattattacacagtattctaccatgttcaagaacaactacctagagactgtttcgtggtaagtgaaggagcaaatactatggacattggacggactgtgcttcagaactaccttcctcgtcacaggcttgatgctggtactttcggaacaatgggagttggtttgggatttgctattgcagctgccgtggtggctaaagatagaagccctgggcaatggatcatctgtgtggaaggagacagtgcatttgggttttctggcatggaggtagaaaccatctgcaggtacaacttgccaatcatactgttggtagtgaataacaatggaatttaccaaggttttgatacagatacttggaaagaaatgttaaaatttcaagatgctactgcagtggtccctccaatgtgtttgctgccaaattcacattatgagcaagtcatgactgcatttggaggcaaagggtattttgtacaaacaccagaagaactccaaaaatccctgaggcagagcctagcagacacaactaaaccttctcttatcaacatcatgattgagccacaagccacacggaaggcccagggaaggcttctcggaggtgattcttaaacggagatcagaaggataagcagagactaactcggcaaaggggagagggaagagatgtgcaacaggctctgtagcaagaggaaagaggaagcatggcaagtctgaggaagagggagatgcaactgtaatacaaggatttgtgcaggattttcattggctgacccgctctaatatgtaaataaagacgccagttggtggtcttgagttttctctttcttgcaagatgaaattttattttccacagcaaaattactctactgttaaaattgtgcaaaataaaataaacattt

SEQ ID NO: 430916 - DNA, 2390 bp, Homo sapiens
tgtttaaggcagttgggttgccctcctgtccgtcagaggtgcagtaccagaggtggcgtgctgccgacttcgcgtttgccttgctggatgattccgcttgtttgccggctgcgtgagtgcttagagcttttcggtggaagatgccggacagtaacttcgcagagcgcagcgaggagcaggtgtctggtgctaaagtcatcgctcaggccctgaaaacgcaagatgtggagtacatatttggcatcgtaggcatcccagtgaccgaaatcgccattgctgcccagcagctaggcatcaagtacatcgggatgaggaatgagcaagcggcttgttatgctgcctccgcgattggatatctgacaagcaggccaggagtctgccttgttgtttctggcccaggtctcatccatgccttgggcggtatggcaaatgcaaacatgaactgctggcccttgcttgtgattggtggttcctctgaaagaaaccaagaaacaatgggagctttccaggagtttcctcaggttgaagcttgtagattatataccaagttctctgcccgcccaagcagcatagaagctattccttttgttattgaaaaggcagtgagaagcagtatctatggtcgtccaggtgcttgctatgttgacataccagcagattttgtgaaccttcaggtgaatgtgaattctataaagtacatggaacgctgcatgtcacctcctattagcatggcagaaacctctgctgtgtgcacggcggcttctgttattaggaatgccaaacaaccccttcttatcatcgggaaaggtgctgcttacgctcatgcagaagagagtatcaagaaattggtggagcaatataaactgccatttttgcccacccctatggggaagggtgttgtccctgacaaccatccatactgtgtaggtgcagccagatccagggctttgcaatttgctgatgtaattgtgttatttggtgccagactaaattggattttacattttggactgcctccaagatatcagccagatgtgaagtttatccaggttgatatctgtgcagaagaattggggaataatgtaaagcccgctgttactttgctaggaaacatacatgctgtcactaagcagcttttagaggaacttgataaaacaccatggcagtatcctccagagagcaagtggtggaaaactctgagagaaaaaatgaagagcaatgaagctgcatccaaggaactagcttctaaaaaatccctgcctatgaattattacacagtattctaccatgttcaagaacaactacctagagactgtttcgtggtaagtgaaggagcaaatactatggacattggacggactgtgcttcagaactaccttcctcgtcacaggcttgatgctggtactttcggaacaatgggagttggtttgggatttgctattgcagctgccgtggtggctaaagatagaagccctgggcaatggatcatctgtgtggaaggagacagtgcatttgggttttctggcatggaggtagaaaccatctgcaggtacaacttgccaatcatactgttggtagtgaataacaatggaatttaccaaggttttgatacagatacttggaaagaaatgttaaaatttcaagatgctactgcagtggtccctccaatgtgtttgctgccaaattcacattatgagcaagtcatgactgcatttggaggcaaagggtattttgtacaaacaccagaagaactccaaaaatccctgaggcagagcctagcagacacaactaaaccttctcttatcaacatcatgattgagccacaagccacacggaaggcccaggaattgcctccccattgcacagtcaagttagactcaagaagtcagacctggtttcacctcagccccagctttgcttgtgctgtttctgctgtgatgctctgtacacacccacccatttttgccgtgtggagttggctatatgcttcaaggcccagctcaacagtccactcttccatgaagccttcctttctctgaatgttcctgccgcacctggggtgcacccctgtcacaaactcagtgttcacggtgagctaaattcccatctccctcaccatcttgttttgggaaggaagtaatccaggaagggtttatatcacaaaagctatagcagacaattttaaacaaggatgcagggtgaatggatgaactaccaaggatcagaggtccaccctgatgcctgggtattaagtaagcccagcggttcttagagcaatgctggggatggggggctggtgatcgtgaggccctaaaatgactgaagttttatttccaccctggcaaaatgaaggtcaaaattaaaattagatagaattactgaaaataaat

SEQ ID NO: 430917 - DNA, 2081 bp, Homo sapiens
tgtttaaggcagttgggttgccctcctgtccgtcagaggtgcagtaccagaggtggcgtgctgccgacttcgcgtttgccttgctggatgattccgcttgtttgccggctgcgtgagtgcttagagcttttcggtggaagatgccggacagtaacttcgcagagcgcagcgaggagcaggtgtctggtgctaaagtcatcgctcaggccctgaaaacgcaagatgtggagtacatatttggcatcgtaggcatcccagtgaccgaaatcgccattgctgcccagcagctaggcatcaagtacatcgggatgaggaatgagcaagcggcttgttatgctgcctccgcgattggatatctgacaagcaggccaggagtctgccttgttgtttctggcccaggtctcatccatgccttgggcggtatggcaaatgcaaacatgaactgctggcccttgcttgtgattggtggttcctctgaaagaaaccaagaaacaatgggagctttccaggagtttcctcaggttgaagcttgtagattatataccaagttctctgcccgcccaagcagcatagaagctattccttttgttattgaaaaggcagtgagaagcagtatctatggtcgtccaggtgcttgctatgttgacataccagcagattttgtgaaccttcaggtgaatgtgaattctataaagtacatggaacgctgcatgtcacctcctattagcatggcagaaacctctgctgtgtgcacggcggcttctgttattaggaatgccaaacaaccccttcttatcatcgggaaaggtgctgcttacgctcatgcagaagagagtatcaagaaattggtggagcaatataaactgccatttttgcccacccctatggggaagggtgttgtccctgacaaccatccatactgtgtaggtgcagccagatccagggctttgcaatttgctgatgtaattgtgttatttggtgccagactaaattggattttacattttggactgcctccaagatatcagccagatgtgaagtttatccaggttgatatctgtgcagaagaattggggaataatgtaaagcccgctgttactttgctaggaaacatacatgctgtcactaagcagcttttagaggaacttgataaaacaccatggcagtatcctccagagagcaagtggtggaaaactctgagagaaaaaatgaagagcaatgaagctgcatccaaggaactagcttctaaaaaatccctgcctatgaattattacacagtattctaccatgttcaagaacaactacctagagactgtttcgtggtaagtgaaggagcaaatactatggacattggacggactgtgcttcagaactaccttcctcgtcacaggcttgatgctggtactttcggaacaatgggagttggtttgggatttgctattgcagctgccgtggtggctaaagatagaagccctgggcaatggatcatctgtgtggaaggagacagtgcatttgggttttctggcatggaggtagaaaccatctgcaggtacaacttgccaatcatactgttggtagtgaataacaatggaatttaccaaggttttgatacagatacttggaaagaaatgttaaaatttcaagatgctactgcagtggtccctccaatgtgtttgctgccaaattcacattatgagcaagtcatgactgcatttggaggcaaagggtattttgtacaaacaccagaagaactccaaaaatccctgaggcagagcctagcagacacaactaaaccttctcttatcaacatcatgattgagccacaagccacacggaaggcccagggaaggcttctcggaggtgattcttaaacggagatcagaaggataagcagagactaactcggcaaaggggagagggaagagatgtgcaacaggctctgtagcaagaggaaagaggaagcatggcaagtctgaggaagagggagatgcaactgtaatacaaggatttgtgcaggattttcattggctgacccgctctaatatgtaaataaagacgccagttggtggtcttgagttttc

SEQ ID NO: 430918 - DNA, 805 bp, Homo sapiens
tgagtgtttgcgaaaagcgtagtatttatgcaaaaaaacaggaaaccttcagaactagcttctaaaaaatccctgcctatgaattattacacagtattctaccatgttcaagaacaactacctagagactgtttcgtggtaagtgaaggagcaaatactatggacattggacggactgtgcttcagaactaccttcctcgtcacaggcttgatgctggtactttcggaacaatgggagttggtttgggatttgctattgcagctgccgtggtggctaaagatagaagccctgggcaatggatcatctgtgtggaaggagacagtgcatttgggttttctggcatggaggtagaaaccatctgcaggtacaacttgccaatcatactgttggtagtgaataacaatggaatttaccaaggttttgatacagatacttggaaagaaatgttaaaatttcaagatgctactgcagtggtccctccaatgtgtttgctgccaaattcacattatgagcaagtcatgactgcatttggaggcaaagggtattttgtacaaacaccagaagaactccaaaaatccctgaggcagagcctagcagacacaactaaaccttctcttatcaacatcatgattgagccacaagccacacggaaggcccaggattttcattggctgacccgctctaatatgtaaataaagacgccagttggtggtcttgagttttctctttcttgcaagatgaaattttattttccacagcaaaattactctactgttaaaattgtgcaaaataaaataaacattt

SEQ ID NO: 430919 - DNA, 515 bp, Homo sapiens
  misc_feature (17)..(17): n is a, c, g, or t
  misc_feature (19)..(19): n is a, c, g, or t
cccgcaacccccccccncncaccagcccccccaccccacccctcaccataaaaatctcaggccacttgccaaattgtacaacttgccaatcatactgttggtagtgaataacaatggaatttaccaaggttttgatacagatacttggaaagaaatgttaaaatttcaagatgctactgcagtggtccctccaatgtgtttgctgccaaattcacattatgagcaagtcatgactgcatttggaggcaaagggtattttgtacaaacaccagaagaactccaaaaatccctgaggcagagcctagcagacacaactaaaccttctcttatcaacatcatgattgagccacaagccacacggaaggcccaggattttcattggctgacccgctctaatatgtaaataaagacgccagttggtggtcttgagttttctctttcttgcaagatgaaattttattttccacagcaaaattactctactgttaaaattgtgcaaaataaaataaacattt

SEQ ID NO: 430920 - DNA, 827 bp, Homo sapiens
tgtttaaggcagttgggttgccctcctgtccgtcagaggtgcagtaccagaggtggcgtgctgccgacttcgcgtttgccttgctggatgattccgcttgtttgccggctgcgtgagtgcttagagcttttcggtggaagatgccggacagtaacttcgcagagcgcagcgaggagcaggtgtctggtgctaaagtcatcgctcaggccctgaaaacgcaagatgtggagtacatatttggcatcgtaggcatcccagtgaccgaaatcgccattgctgcccagcagctaggcatcaagtacatcgggatgaggaatgagcaagcggcttgttatgctgcctccgcgattggatatctgacaagcaggtaaactaaaatttgtttcacttcaattactttaatattttggggtagaactattacgtctttcagctgaaggatgagttcatttggaaagattatagaaaaatatattaaataacaaaggataaaaaacatttaaaactctctgaggaccacatcaaaagaataatgataccagaagtgtttcagagtggaacacattgccattttgtagagtgaatcactggtgatcagatagtgagttgatgtatgataccttgtcttggatctcacaactaccccagcacacttaatacaaaaatgcttggttcaaaatgtgactgttgagagctgttccacacgttctgattttttagtgtgtatccatgttacctaactaccaccccctttttattattaaaaattaatacatttttaaaatgtccattttggaaaacttggaaaatatagaaagcacaaagaa

SEQ ID NO: 430921 - DNA, 302 bp, Homo sapiens
catcataattatttttttctccacaaggatgtccagaaaaatgaaaagtgttcattttccagttttaaattatctttgagtagaatatgataagactgagattttacaaatcttttcttctacttgtaatgaacgtaggcagtgagaagcagtatctatggtcgtccaggtgcttgctatgttgacataccagcagattttgtgaaccttcaggtgaatgtgaattctataaagtgagtaatagttatgctggaattctttcttcaatgtacatgtattatcataatgcctacctttttaga

SEQ ID NO: 430922 - DNA, 339 bp, Homo sapiens
cctctatgacatgccccagagggtttcattttaactttgttctccaacaggcttgatgctggtactttcggaacaatgggagttggtttgggatttgctattgcagctgccgtggtggctaaagatagaagccctgggcaatggatcatctgtgtggaaggagacagtgcatttgggttttctggcatggaggtagaaaccatctgcaggtaaaacatcatcctgaatcagagcatttgattctctagaatatgaaaaatgacacacaagacccagtcacctgacaaatacttatgaagcgttcaccaggtgccctgtgcacagcactgtgttctgtcc

SEQ ID NO: 430923 - DNA, 3561 bp, Homo sapiens
cagatgccttctgacagagttcagcctcttggagagtcttggggattgttggcacctaaacagaatcagtgacccgggtgctttgtggccagcagcacagaatcaaacccgcatcccagcattgggccacccatctgagggaggccaaaatcatcacagatgctgctgtgctgcagacagatacatgctagtccagagagccgcccctgagatggctgtgagaaccatgtgtctaaggcgtaagataaggatggaaggctgtccaagttatttggaaggcctcggcagcttgggattagcttgggagcgcagcgctgcaaagtggaaaatatgaaaagaccacacaggcccagcagtccagaaactgggcaaaaatattctgcagtggggatttatttttccaaagcaggtaacagaggctagtgagaaagaaaagctcctctctgctccattccaaaggccatcttgtggtcagtttcatgccctcacctgattttttttttttttttttttttttcaattcctaaccttttttaaagtttcctggtctccactggacacagagctttggagacggaggatcccagagggcagtctcagttgcaatcagtgtgtgcccagcctgggcagacaggaaattcctcggatacattattttttctttctttcatagctgtgtctcagaaaggacccatttgtggctctttttcacctcaaaataagatcgatggtatcttgtaaaatgagggtagtgccacttcttagtatttttgaaagctgttttagattttttttttttttccttttctagccatctaaattgactcttccaatataggtctcagaaatccaatatttggagtacaatttcttttaatccagattacacctgccttacaaagcaccccctccttgttcccctctgtttcctctactcagttgggggagaaactcacagctcctccgggatacatatgtgccctcagcagcagctcccaggtgaagttaccagacccctgggcttctccccagctttttctgagttgagtcagacatgtagagtttgggtcacacaggcaagaggaattttccctcggccttactgacaaggacaccaacctagggtgcaaacagatggactatggttcaaggacactggaattgaggagctgatcaaggctctcttcagccttgctctgtccctgcctcttatcagagcacaggtagacacacgggcatagccagcccactcctactgtcacaggcgccccaccattcaaccttccgggaggtcagggaccttctatatgaggcgagtgggtctcagtctgcttgaatggtgatgagattctgctggatctcagcacgctgcaggtgtcttttgagagcattcagtaggacatggtgatccctatttcagcctctaagatgactggtattctatctgaaatgcagagattaagccaaatacctgatgtattgtgaaagccactgattttaagaatggagagaaagggattttttactgcatccctctgtatgaatatgaaatcagagaccagggcatgatgttgctaggattagagcctctcagtctggcctcttcacccaagtgcaagaactcagtctcttactgttcaaagaaagaatcttaacagttgaattatggagggaaattcccttttgccccaagcgtttctatatttaaagcaatatccccaggagaatatgttagacttaggatgataccttcagccacttgaagaagaaatagaaggcgctcattccaatatagtctttatttcccattcagatacaggttgagcatccctaatctgaacagttaaaacccccaaatgccccaaaatccaaaccttcctgaacgctatgacaccatgagtggaaaattccacacctaacaaacacatttgctttcttatggttcaatgtacacaaactgttttatatagaaaatgatttcaaatatcataaaattaccttcaggctatgtgcataaagtatatatgagccataaatgaattttgtgtttagactttgtgtccatccccaagatctctcattttatatatatatatatatatatatatatatatatatatatacacacacacacacatacacaaatattccaggatacaaaaaaaaacatttaaaaatccgagacccagaacacttctggtcccaagcatttcagataagggatatcaatctgtactaccaataaggatttcgtaattcccctaactgcaaatgtcctcttcatttgttctttatgagaaaacccgggtagtgccagcacctggatacagtatttacaccctgcagaccctaaagatttcagattcagttagcaaaccttgatgaagcacctgctggacactgagggacccaaagctcaatcagccataatccctgctttcagagtttatattgtacctgcctaatccacccggcgtgactcatttcaacactaagtactaggggtgttgtcaggagacaaatctgaagtcaggagaggaaaatgcaaaggagccctgccgtgtgatggatgtgcattctcacttgggtcttgaagttctcattcctacatctcaagctagccaggcagtctcctctctatcagaagaaagcactggtaattggctagactggctatgttgaaggtaacatgaactctaagatcttgacccagggcgacttggttttgcttaaggtggcatcaccaatgttccaaatcctttggggagatgagggcatccccacagaaaaagaggaataatagaccaatggattttctcctttcaccagtatgtttggaaccctctgatccaatgtcttttgatactgatctcttgtccaaatgagaatgtcgctttagctgaaattcaaatggctgtgacaatttaccgaaatgatgaagtaaccaccattcccacctttcaccgcctaggctccaagtctgaatacatttttgaaataggaactcccttttgcaaaaaagaaacctgggtgtcagggaggtgaagtgacttgccctaggagcagacagcatgccaagaatggaattaggctcaggatccagcctgggctcaccctgtgtggctcattcccacccaggaaactgaagataaaagatttgggaaaacacaccaagaaaaaggggcagttttctttgcccaagcatttggtgctagttagaggctgttcactctctcctgctcctcttcggagtagaaataaaggctgtgacacaaggaagccagtggggtgggagggaggcaccataatccctccctaaaacccacagaagactaacctgatactcttttgacccaactgcatcaacactaaacagctgcagaccccctgaatctttcacacatgccaagtgaacattcttgatgatttctctttgtgaccgcaaccacctgcaaaccagaacgactctagaatttccttccccgcccccctttttgtttagtttctaatctcttgtttatgaggtgtggggtttataagggactgaatcaaatgaatgta

SEQ ID NO: 430924 - DNA, 4635 bp, Homo sapiens
cagatgccttctgacagagttcagcctcttggagagtcttggggattgttggcacctaaacagaatcagtgacccgggtgctttgtggccagcagcacagaatcaaacccgcatcccagcattgggccacccatctgagggaggccaaaatcatcacagatgctgctgtgctgcagacagatacatgctagtccagagagccgcccctgagatggctgtgagaaccatgtgtctaaggcgtaagataaggatggaaggctgtccaagttatttggaaggcctcggcagcttgggattagcttgggagcgcagcgctgcaaagtggaaaatatgaaaagaccacacaggcccagcagtccagaaactgggcaaaaatattctgcagtggggatttatttttccaaagcaggtaacagaggctagtgagaaagaaaagctcctctctgctccattccaaaggccatcttgtggtcagtttcatgccctcacctgattttttttttttttttttttttttcaattcctaaccttttttaaagtttcctggtctccactggacacagagctttggagacggaggatcccagagggcagtctcagttgcaatcagtgtgtgcccagcctgggcagacaggaaattcctcggatacattattttttctttctttcatagctgtgtctcagaaaggacccatttgtggctctttttcacctcaaaataagatcgatggtatcttgtaaaatgagggtagtgccacttcttagtatttttgaaagctgttttagattttttttttttttccttttctagccatctaaattgactcttccaatataggtctcagaaatccaatatttggagtacaatttcttttaatccagattacacctgccttacaaagcaccccctccttgttcccctctgtttcctctactcagttgggggagaaactcacagctcctccgggatacatatgtgccctcagcagcagctcccaggtgaagttaccagacccctgggcttctccccagctttttctgagttgagtcagacatgtagagtttgggtcacacaggcaagaggaattttccctcggccttactgacaaggacaccaacctagggtgcaaacagatggactatggttcaaggacactggaattgaggagctgatcaaggctctcttcagccttgctctgtccctgcctcttatcagagcacaggtagacacacgggcatagccagcccactcctactgtcacaggcgccccaccattcaaccttccgggaggtcagggaccttctatatgaggcgagtgggtctcagtctgcttgaatggtgatgagattctgctggatctcagcacgctgcaggtgtcttttgagagcattcagtaggacatggtgatccctatttcagcctctaagatgactggtattctatctgaaatgcagagattaagccaaatacctgatgtattgtgaaagccactgattttaagaatggagagaaagggattttttactgcatccctctgtatgaatatgaaatcagagaccagggcatgatgttgctaggattagagcctctcagtctggcctcttcacccaagtgcaagaactcagtctcttactgttcaaagaaagaatcttaacagttgaattatggagggaaattcccttttgccccaagcgtttctatatttaaagcaatatccccaggagaatatgttagacttaggatgataccttcagccacttgaagaagaaatagaaggcgctcattccaatatagtctttatttcccattcagatacaggttgagcatccctaatctgaacagttaaaacccccaaatgccccaaaatccaaaccttcctgaacgctatgacaccatgagtggaaaattccacacctaacaaacacatttgctttcttatggttcaatgtacacaaactgttttatatagaaaatgatttcaaatatcataaaattaccttcaggctatgtgcataaagtatatatgagccataaatgaattttgtgtttagactttgtgtccatccccaagatctctcattttatatatatatatatatatatatatatatatatatatatacacacacacacacatacacaaatattccaggatacaaaaaaaaacatttaaaaatccgagacccagaacacttctggtcccaagcatttcagataagggatatcaatctgtactaccaataaggatttcgtaattcccctaactgcaaatgtcctcttcatttgttctttatgagaaaacccgggtagtgccagcacctggatacagtatttacaccctgcagaccctaaagatttcagattcagttagcaaaccttgatgaagcacctgctggacactgagggacccaaagctcaatcagccataatccctgctttcagagtttatattgtacctgcctaatccacccggcgtgactcatttcaacactaagtactaggggtgttgtcaggagacaaatctgaagtcaggagaggaaaatgcaaaggagccctgccgtgtgatggatgtgcattctcacttgggtcttgaagttctcattcctacatctcaagctagccaggcagtctcctctctatcagaagaaagcactggtaattggctagactggctatgttgaaggtaacatgaactctaagatcttgacccagggcgacttggttttgcttaaggtggcatcaccaatgttccaaatcctttggggagatgagggcatccccacagaaaaagaggaataatagaccaatggattttctcctttcaccagtatgtttggaaccctctgatccaatgtcttttgatactgatctcttgtccaaatgagaatgtcgctttagctgaaattcaaatggctgtgacaatttaccgaaatgatgaagtaaccaccattcccacctttcaccgcctaggctccaagtctgaatacatttttgaaataggaactcccttttgcaaaaaagaaacctgggtgtcagggaggtgaagtgacttgccctaggagcagacagcatgccaagaatggaattaggctcaggatccagcctgggctcaccctgtgtggctcattcccacccaggaaactgaagataaaagatttgggaaaacacaccaagaaaaaggggcagttttctttgcccaagcatttggtgctagttagaggctgttcactctctcctgctcctcttcggagtagaaataaaggctgtgacacaaggaagccagtggggtgggagggaggcaccataatccctccctaaaacccacagaagactaacctgatactcttttgacccaactgcatcaacactaaacagctgcagaccccctgaatctttcacacatgccaagtgaacattcttgatgatttctctttgtgaccgcaaccacctgcaaaccagaacgactctagaatttccttccccgcccccctttttgtttagtttctaatctcttgtttatgaggtgtggggtttataagggactgaatcaaatgaatgtaacaaaaaagaaaaaaaaaacaaaaaaaaatgccttttctcagggccagtgagttgcaaataatttttaaagaaaagcctataattacatcatctcaataaattttttataaaaaaaaaaaaaaaaaaaaaaaaaaaaaaaaaaaaaaaaagagaagaaaaaacaaaaaaaaataacaacacgaaagaggagaaccaaacagatatatagaagagaaacaacagaagatagttgatgtcaaaccaagggggctccctaaaaatagcagacgtgacatctaattaacaggccgccaacggcggcccgcttatatcaacaaacgcaggagaagaggcgaaacaacgtgcagtacgaggggaacgacgaggatgaaggagaacccccacacacgtggaggcgcggcaacaaccaataggaggaacacaataaagcatgcggagcatacacgaccctccgagggggacacaaagatcgaagcagcacgcacaacaaggaggttaaaaacggggcgaactcaaaccacagcacggaaaaaaagaccagacgccacaaagcatgcagcaacagaggaataagatacaagaaaacaataaacaccagggatactaggacaaaacgaagaaacgagacacagaacaaagcaacaaaaagagcaggaaagaaccagagaaagcggcaaaaacaagaaaagagaaagcaaaagaaaaaaagcaaaacgagcaccaagaaacagactacgacgagcggagagaaaagggggaaagcgaaggagaaaacgaagacacagcaaaggaaagcacaagaagaggagagacagagaaacgagagaaggaagaaaggcagacggaccacaacaagacacccagcaagaagaagaggcaaacacaagagagaggacagaggcagacagacaacacaacaaggagaggggggagaagggccgaaaaacgagggaagacgagcagaaacgaaacgaaacaaagacaaggagtcagaaaaaggaaacgaacaggcgagaggaggaaaacagggaaagaaacgcagaaaagagaaagaagagcgggacaatagtagg

SEQ ID NO: 430925 - DNA, 2039 bp, Homo sapiens
cagatgccttctgacagagttcagcctcttggagagtcttggggattgttggcacctaaacagaatcagtgacccgggtgctttgtggccagcagcacagaatcaaacccgcatcccagcattgggccacccatctgagggaggccaaaatcatcacagatgctgctgtgctgcagacagatacatgctagtccagagagccgcccctgagatggctgtgagaaccatgtgtctaaggcgtaagataaggatggaaggctgtccaagttatttggaaggcctcggcagcttgggattagcttgggagcgcagcgctgcaaagtggaaaatatgaaaagaccacacaggcccagcagtccagaaactgggcaaaaatattctgcagtggggatttatttttccaaagcaggtaacagaggctagtgagaaagaaaagctcctctctgctccattccaaaggccatcttgtggtcagtttcatgccctcacctgattttttttttttttttttttttttcaattcctaaccttttttaaagtttcctggtctccactggacacagagctttggagacggaggatcccagagggcagtctcagttgcaatcagtgtgtgcccagcctgggcagacaggaaattcctcggatacattattttttctttctttcatagctgtgtctcagaaaggacccatttgtggctctttttcacctcaaaataagatcgatggtatcttgtaaaatgagggtagtgccacttcttagtatttttgaaagctgttttagattttttttttttttccttttctagccatctaaattgactcttccaatataggtctcagaaatccaatatttggagtacaatttcttttaatccagattacacctgccttacaaagcaccccctccttgttcccctctgtttcctctactcagttgggggagaaactcacagctcctccgggatacatatgtgccctcagcagcagctcccaggtgaagttaccagacccctgggcttctccccagctttttctgagttgagtcagacatgtagagtttgggtcacacaggcaagaggaattttccctcggccttactgacaaggacaccaacctagggtgcaaacagatggactatggttcaaggacactggaattgaggagctgatcaaggctctcttcagccttgctctgtccctgcctcttatcagagcacaggtagacacacgggcatagccagcccactcctactgtcacaggcgccccaccattcaaccttccgggaggtcagggaccttctatatgaggcgagtgggtctcagtctgcttgaatggtgatgagattctgctggatctcagcacgctgcaggtgtcttttgagagcattcagtaggacatggtgatccctatttcagcctctaagatgactggtattctatctgaaatgcagagattaagccaaatacctgatgtattgtgaaagccactgattttaagaatggagagaaagggattttttactgcatccctctgtatgaatatgaaatcagagaccagggcatgatgttgctaggattagagcctctcagtctggcctcttcacccaagtgcaagaactcagtctcttactgttcaaagaaagaatcttaacagttgaattatggagggaaattcccttttgccccaagcgtttctatatttaaagcaatatccccaggagaatatgttagacttaggatgataccttcagccacttgaagaagaaatagaaggcgctcattccaatatagtctttatttcccattcagatacaggttgagcatccctaatctgaacagttaaaacccccaaatgccccaaaatccaaaccttcctgaacgctatgacaccatgagtggaaaattccacacctaacaaacacatttgctttcttatggttcaatgtacacaaactgttttatatagaaaatgatttcaaatatcataaaattaccttcaggctatgtgcataaagtatatatgagccataaatga

SEQ ID NO: 430926 - DNA, 5394 bp, Homo sapiens
agcggggagctgcacgcgggctgccggggcgacgctgctctgcctgcatcccggaggcggccgccagcggatttgccacccagagcataaccttcggtggcaggacaaatcaggccagcacgcagtctgccaagtcctgctcgctccctgtcaagaaaaacagctggatccatttctaatcaacacttcccaacgcaacacttctgagtctctgaaggagaccagagcttgaaactttccagacttccaacagacatcgagtgcaaaaggatatttaggttgtctttgcacaaatctggttgatttgagagataaagggggggggaaccagtgtgactttcacctaagaagtcacatgaacatatttcacatttgaactacataatgaatgatggttattgaaatagcccaaacctctaccacagagcgagggatatagctcaaggggcaaccaggcagtcgcagaaccaaggaatggatgactacaagtatcaggacaattatgggggctatgctcccagtgatggctattaccgcggcaatgagtccaacccagaagaagatgcacagagtgatgtcaccgaaggccatgatgaggaagacgagatctatgagggcgagtaccagggtatccctcacccagatgatgtcaaggccaagcaggccaagatggcgccctccagaatggacagccttcggggccagacagacctgatggctgagaggctggaagatgaggagcagttggcccaccagtacgagaccatcatggatgagtgtggccatggccgcttccagtggatcctctttttcgtcttgggtttggccctgatggccgatggggtggaagtgttcgtggtgagttttgccctgcccagtgcagagaaggacatgtgtctgtccagttccaaaaaaggaatgctagggatgatagtctacttgggaatgatggcgggcgccttcatcctgggaggcctggctgataagctgggaaggaagcgagtcctcagcatgtctctggccgtcaatgcctccttcgcctccctctcttccttcgtgcagggatatggagccttcctcttctgccgactcatctcaggcatcggtattgggggtgctctaccgattgtttttgcctatttttctgaattcttgtctcgggagaagcgaggagaacacctcagttggctgggcatcttctggatgactgggggcctgtacgcatctgccatggcctggagcatcatcccacactatggctggggcttcagcatggggaccaattaccacttccatagctggagagtgtttgtcatcgtctgtgctctgccctgcaccgtgtccatggtggccctgaagttcatgccagagagcccaaggtttctgctagagatgggcaaacatgatgaagcctggatgattctcaagcaagtccatgacaccaacatgagagctaaggggaccccagagaaagtgttcacggtttccaacatcaaaactcccaagcaaatggatgaattcattgagatccaaagttcaacaggaacctggtaccagcgctggctggtcagattcaagaccattttcaagcaggtctgggataatgccctgtactgtgtgatggggccctacagaatgaatacactgattctggccgtggtttggtttgccatggcattcagttactatggactgacagtttggtttcctgatatgatccgctattttcaagatgaagaatacaagtctaaaatgaaggtgttttttggtgagcatgtgtacggcgccacaatcaacttcacgatggaaaatcagatccaccaacatgggaaacttgtgaatgataagttcacaagaatgtactttaaacatgtactctttgaggacacattctttgacgagtgctattttgaagacgtaacatcaacagatacctacttcaaaaattgtaccattgaatcaaccatcttttacaacacagacctctacgagcacaagttcatcaactgtcggtttatcaactccaccttcctggagcagaaggagggctgccacatggacttggagcaagataatgacttcctgatttacctcgtcagcttcctgggcagcctgtctgtcttacccgggaacatcatttctgccctgctcatggatagaattggaaggctcaagatgattggtggctccatgctaatctctgcagtctgctgcttcttcctgttttttggcaacagtgagtctgcaatgatcggctggcagtgcctgttctgtgggacaagcattgcagcctggaatgctctggatgtgatcacagtggagctgtatcccaccaaccagagagcaacagccttcggcattctcaatggattatgcaaatttggcgccatcctgggaaacaccatctttgcttcttttgttgggataaccaaagtggtccccatccttctggctgctgcttctctggttgggggtggcctgattgcccttcgactgccagagactcgagaacaggtcctgatgtgaacaacctatgggaaaaggaaaggtcgagagaatcttgtccaggacactgaaatgcatccacacttcctgcctatcacggtccggaggacaccttggatagcacgggaggagaagttgactttgtgacccctagtttaggacccacttcagctgtcaatatgtttgtaactcaggtgactgatttgggggtgccctgagccacccttagaatcacagagctgcgtgtttaacttcaagtcttcccagtccaaggcagggagaggattctccagtgagtgcacacactatgcgaggagcaagcatttctctaagtcaagtgcaaggacttaacttgcgtttgaaaaggaattagagggtcagaaacacccaggttcctccagaaagctccttggagcccaacaacttaacaaatcaacttggctggaagttagagtcattatatgaagattgggcttgaagtatatatttttgcatttaaaagtatcacctatcatattttccactcgaaaattgacatagtagcattgaggatactctgatctagaaagccaagtatttgagcaacatctatagagatctacttttctcctatgtctcctaggctttccatgataattaggtaatacatttaagaaggatatttatttctgttttgctctattcaaagaaacggaatgggatagttattctgtaaactaagtttgtatataactttatttgggtttaatttccacaactggtatctgcaaatattgccagcattttagccatattttgggagaacttggtgtttgaggtcccaggaaatgaggtctgatcaaatgaaatgcaagcacaatttcttacagccatttaactttctgttgggaggatgaattaacaaactcacattgtgcagtccgcttaatccaggcacttttctttgtgcaggtgtagtgagtagttacttctctcccttacacagatgacttgtgaaactcaagctcaccatcttcagtgctggcattttactttgccactacccaaaaacaatgtgagatgtgttcagtggcctctggtactctttgcaggcaagaatcaaacaacatggggactgagggaaggatggggaagtgtagccacagttcttccaaatgtaaatactttttgtttgttctagtggtaaaatgcaaatgcaatccatatttgttaggatggtcaggtctcatgagaaatctatgctatgtgtccagagcttttgaaacagagtccattggagtgggagttagggagtgtagtggatgccaaatatgtttttcttcagtgcttaagagaactgtttcctgaagtccagctttgaacataaacaggggtgtgggttgggggaggagcttaggacaaacctctctgatgaaggtcagcaatagactgaagtcttgactgcatggaagaggaaaaacatcagaactgtctgacaatggaggggacagtgagctacgcacaactgccagcggaggtgaacttgcacctgcccaggccggatgaacatcagcctgcaagaactagttgtttgagttgatttgcagtgctctcaatgggcaagtgccacattttccctggcagagatctccaaaaatttaaaacagaataataatggctatatcgagtgttttctcagtattggagaaatgcttaggtcctatgatagcttcgggacatctttctgtaattttcctcaattaacgggttggtaggggtaaatcttatgacacctttccaccgtcgatttgagatcagttttaatggttaaaatgtttactctccttctgtcaaccctcacctttttatttacacccctccctttttttctgtacagggagagaagacatattgactctgactggacaccctgattcctccaaatatatataccactgtgtattaatctttctctcagtgttttataggagtactaacatttattgctctgtcaataatgaaaggctcgatgtaatatagctgtaatttactttccatatgaatacagtggctaggttcataaaagagaattgtgtgagtctgggattaccacatctaaaacattattctttaatgggataatacaattcattgagcagctaccacttaaaaaacttgcaggacagttagagcctgcatttctagttaagatggatcttgtaaatttaaaattggattaacattggagtgctggggtggctgcaataatttgggggctaactccatttggtttccaagatctcacttctgcattatctttatggctctttaaaccagccacctagccaatcaagggcaattcccatctcatccatcactcaggtctttgtaaagggtgcagccaagctctgcagacttttgcaggattgtctagcctgagtaccgggctacttcttaaatgccgtcactcctgctgagataaatgcgtctttaaaaatagtctctgtggcaggtcactgggggacaatgtacagcattctggccatccacttctttttcacttcatgttctaccccaagagactcccgatgtcggctgtggagggttaaagggatgaggctttcctttgtttagcaaatctgttcacagttcttgatgatgtattttatgatgcccagcttggaaatagttgctttccatagtctcaactgtattgtgtcatctcctgatgctgatttttgatcttttgttttattaaaaataattagtgaaagaggtgtgcctatctgtgaagtttgtagtacatcatcctgaggtcatgtaacaagtaaaccccaacccagcgttccctcctacgttgtgttagttcattaaaactaaataataaaaataactgtaagaaaaccttaa

SEQ ID NO: 430927 - DNA, 5567 bp, Homo sapiens
  misc_feature (89)..(89): n is a, c, g, or t
agcgggctgctctgcctgcatccggaggcggccgcagcgatttgccacccaggtcctaagactctcagtccagagagggccctgcccancacccagaaggaaggaatgctgcccagagatgaccagaggaatctagacagggtctcactctgttgcccaggctggagtacagtggtgatctcggtacactgcagcctctgcctcctgagttcaagtgattttcctgcctcagccacctgagtagctgggattacagagcataaccttcggtggcaggacaaatcaggccagcacgcagtctgccaagtcctgctcgctccctgtcaagaaaaacagctggatccatttctaatcaacacttcccaacgcaacacttctgagtctctgaaggagaccagagcttgaaactttccagacttccaacagacatcgagtgcaaaaggatatttaggttgtctttgcacaaatctggttgatttgagagataaagggggggggaaccagtgtgactttcacctaagaagtcacatgaacatatttcacatttgaactacataatgaatgatggttattgaaatagcccaaacctctaccacagagcgagggatatagctcaaggggcaaccaggcagtcgcagaaccaaggaatggatgactacaagtatcaggacaattatgggggctatgctcccagtgatggctattaccgcggcaatgagtccaacccagaagaagatgcacagagtgatgtcaccgaaggccatgatgaggaagacgagatctatgagggcgagtaccagggtatccctcacccagatgatgtcaaggccaagcaggccaagatggcgccctccagaatggacagccttcggggccagacagacctgatggctgagaggctggaagatgaggagcagttggcccaccagtacgagaccatcatggatgagtgtggccatggccgcttccagtggatcctctttttcgtcttgggtttggccctgatggccgatggggtggaagtgttcgtggtgagttttgccctgcccagtgcagagaaggacatgtgtctgtccagttccaaaaaaggaatgctagggatgatagtctacttgggaatgatggcgggcgccttcatcctgggaggcctggctgataagctgggaaggaagcgagtcctcagcatgtctctggccgtcaatgcctccttcgcctccctctcttccttcgtgcagggatatggagccttcctcttctgccgactcatctcaggcatcggtattgggggtgctctaccgattgtttttgcctatttttctgaattcttgtctcgggagaagcgaggagaacacctcagttggctgggcatcttctggatgactgggggcctgtacgcatctgccatggcctggagcatcatcccacactatggctggggcttcagcatggggaccaattaccacttccatagctggagagtgtttgtcatcgtctgtgctctgccctgcaccgtgtccatggtggccctgaagttcatgccagagagcccaaggtttctgctagagatgggcaaacatgatgaagcctggatgattctcaagcaagtccatgacaccaacatgagagctaaggggaccccagagaaagtgttcacggtttccaacatcaaaactcccaagcaaatggatgaattcattgagatccaaagttcaacaggaacctggtaccagcgctggctggtcagattcaagaccattttcaagcaggtctgggataatgccctgtactgtgtgatggggccctacagaatgaatacactgattctggccgtggtttggtttgccatggcattcagttactatggactgacagtttggtttcctgatatgatccgctattttcaagatgaagaatacaagtctaaaatgaaggtgttttttggtgagcatgtgtacggcgccacaatcaacttcacgatggaaaatcagatccaccaacatgggaaacttgtgaatgataagttcacaagaatgtactttaaacatgtactctttgaggacacattctttgacgagtgctattttgaagacgtaacatcaacagatacctacttcaaaaattgtaccattgaatcaaccatcttttacaacacagacctctacgagcacaagttcatcaactgtcggtttatcaactccaccttcctggagcagaaggagggctgccacatggacttggagcaagataatgacttcctgatttacctcgtcagcttcctgggcagcctgtctgtcttacccgggaacatcatttctgccctgctcatggatagaattggaaggctcaagatgattggtggctccatgctaatctctgcagtctgctgcttcttcctgttttttggcaacagtgagtctgcaatgatcggctggcagtgcctgttctgtgggacaagcattgcagcctggaatgctctggatgtgatcacagtggagctgtatcccaccaaccagagagcaacagccttcggcattctcaatggattatgcaaatttggcgccatcctgggaaacaccatctttgcttcttttgttgggataaccaaagtggtccccatccttctggctgctgcttctctggttgggggtggcctgattgcccttcgactgccagagactcgagaacaggtcctgatgtgaacaacctatgggaaaaggaaaggtcgagagaatcttgtccaggacactgaaatgcatccacacttcctgcctatcacggtccggaggacaccttggatagcacgggaggagaagttgactttgtgacccctagtttaggacccacttcagctgtcaatatgtttgtaactcaggtgactgatttgggggtgccctgagccacccttagaatcacagagctgcgtgtttaacttcaagtcttcccagtccaaggcagggagaggattctccagtgagtgcacacactatgcgaggagcaagcatttctctaagtcaagtgcaaggacttaacttgcgtttgaaaaggaattagagggtcagaaacacccaggttcctccagaaagctccttggagcccaacaacttaacaaatcaacttggctggaagttagagtcattatatgaagattgggcttgaagtatatatttttgcatttaaaagtatcacctatcatattttccactcgaaaattgacatagtagcattgaggatactctgatctagaaagccaagtatttgagcaacatctatagagatctacttttctcctatgtctcctaggctttccatgataattaggtaatacatttaagaaggatatttatttctgttttgctctattcaaagaaacggaatgggatagttattctgtaaactaagtttgtatataactttatttgggtttaatttccacaactggtatctgcaaatattgccagcattttagccatattttgggagaacttggtgtttgaggtcccaggaaatgaggtctgatcaaatgaaatgcaagcacaatttcttacagccatttaactttctgttgggaggatgaattaacaaactcacattgtgcagtccgcttaatccaggcacttttctttgtgcaggtgtagtgagtagttacttctctcccttacacagatgacttgtgaaactcaagctcaccatcttcagtgctggcattttactttgccactacccaaaaacaatgtgagatgtgttcagtggcctctggtactctttgcaggcaagaatcaaacaacatggggactgagggaaggatggggaagtgtagccacagttcttccaaatgtaaatactttttgtttgttctagtggtaaaatgcaaatgcaatccatatttgttaggatggtcaggtctcatgagaaatctatgctatgtgtccagagcttttgaaacagagtccattggagtgggagttagggagtgtagtggatgccaaatatgtttttcttcagtgcttaagagaactgtttcctgaagtccagctttgaacataaacaggggtgtgggttgggggaggagcttaggacaaacctctctgatgaaggtcagcaatagactgaagtcttgactgcatggaagaggaaaaacatcagaactgtctgacaatggaggggacagtgagctacgcacaactgccagcggaggtgaacttgcacctgcccaggccggatgaacatcagcctgcaagaactagttgtttgagttgatttgcagtgctctcaatgggcaagtgccacattttccctggcagagatctccaaaaatttaaaacagaataataatggctatatcgagtgttttctcagtattggagaaatgcttaggtcctatgatagcttcgggacatctttctgtaattttcctcaattaacgggttggtaggggtaaatcttatgacacctttccaccgtcgatttgagatcagttttaatggttaaaatgtttactctccttctgtcaaccctcacctttttatttacacccctccctttttttctgtacagggagagaagacatattgactctgactggacaccctgattcctccaaatatatataccactgtgtattaatctttctctcagtgttttataggagtactaacatttattgctctgtcaataatgaaaggctcgatgtaatatagctgtaatttactttccatatgaatacagtggctaggttcataaaagagaattgtgtgagtctgggattaccacatctaaaacattattctttaatgggataatacaattcattgagcagctaccacttaaaaaacttgcaggacagttagagcctgcatttctagttaagatggatcttgtaaatttaaaattggattaacattggagtgctggggtggctgcaataatttgggggctaactccatttggtttccaagatctcacttctgcattatctttatggctctttaaaccagccacctagccaatcaagggcaattcccatctcatccatcactcaggtctttgtaaagggtgcagccaagctctgcagacttttgcaggattgtctagcctgagtaccgggctacttcttaaatgccgtcactcctgctgagataaatgcgtctttaaaaatagtctctgtggcaggtcactgggggacaatgtacagcattctggccatccacttctttttcacttcatgttctaccccaagagactcccgatgtcggctgtggagggttaaagggatgaggctttcctttgtttagcaaatctgttcacagttcttgatgatgtattttatgatgcccagcttggaaatagttgctttccatagtctcaactgtattgtgtcatctcctgatgctgatttttgatcttttgttttattaaaaataattagtgaaagaggtgtgcctatctgtgaagtttgtagtacatcatcctgaggtcatgtaacaagtaaaccccaacccagcgttccctcctacgttgtgttagttcattaaaactaaataataaaaataactgtaagaaaaccttaa

SEQ ID NO: 430928 - DNA, 5450 bp, Homo sapiens
  misc_feature (89)..(89): n is a, c, g, or t
agcgggctgctctgcctgcatccggaggcggccgcagcgatttgccacccaggtcctaagactctcagtccagagagggccctgcccancacccagaaggaaggaatgctgcccagagatgaccagaggaatctagcagagcataaccttcggtggcaggacaaatcaggccagcacgcagtctgccaagtcctgctcgctccctgtcaagaaaaacagctggatccatttctaatcaacacttcccaacgcaacacttctgagtctctgaaggagaccagagcttgaaactttccagacttccaacagacatcgagtgcaaaaggatatttaggttgtctttgcacaaatctggttgatttgagagataaagggggggggaaccagtgtgactttcacctaagaagtcacatgaacatatttcacatttgaactacataatgaatgatggttattgaaatagcccaaacctctaccacagagcgagggatatagctcaaggggcaaccaggcagtcgcagaaccaaggaatggatgactacaagtatcaggacaattatgggggctatgctcccagtgatggctattaccgcggcaatgagtccaacccagaagaagatgcacagagtgatgtcaccgaaggccatgatgaggaagacgagatctatgagggcgagtaccagggtatccctcacccagatgatgtcaaggccaagcaggccaagatggcgccctccagaatggacagccttcggggccagacagacctgatggctgagaggctggaagatgaggagcagttggcccaccagtacgagaccatcatggatgagtgtggccatggccgcttccagtggatcctctttttcgtcttgggtttggccctgatggccgatggggtggaagtgttcgtggtgagttttgccctgcccagtgcagagaaggacatgtgtctgtccagttccaaaaaaggaatgctagggatgatagtctacttgggaatgatggcgggcgccttcatcctgggaggcctggctgataagctgggaaggaagcgagtcctcagcatgtctctggccgtcaatgcctccttcgcctccctctcttccttcgtgcagggatatggagccttcctcttctgccgactcatctcaggcatcggtattgggggtgctctaccgattgtttttgcctatttttctgaattcttgtctcgggagaagcgaggagaacacctcagttggctgggcatcttctggatgactgggggcctgtacgcatctgccatggcctggagcatcatcccacactatggctggggcttcagcatggggaccaattaccacttccatagctggagagtgtttgtcatcgtctgtgctctgccctgcaccgtgtccatggtggccctgaagttcatgccagagagcccaaggtttctgctagagatgggcaaacatgatgaagcctggatgattctcaagcaagtccatgacaccaacatgagagctaaggggaccccagagaaagtgttcacggtttccaacatcaaaactcccaagcaaatggatgaattcattgagatccaaagttcaacaggaacctggtaccagcgctggctggtcagattcaagaccattttcaagcaggtctgggataatgccctgtactgtgtgatggggccctacagaatgaatacactgattctggccgtggtttggtttgccatggcattcagttactatggactgacagtttggtttcctgatatgatccgctattttcaagatgaagaatacaagtctaaaatgaaggtgttttttggtgagcatgtgtacggcgccacaatcaacttcacgatggaaaatcagatccaccaacatgggaaacttgtgaatgataagttcacaagaatgtactttaaacatgtactctttgaggacacattctttgacgagtgctattttgaagacgtaacatcaacagatacctacttcaaaaattgtaccattgaatcaaccatcttttacaacacagacctctacgagcacaagttcatcaactgtcggtttatcaactccaccttcctggagcagaaggagggctgccacatggacttggagcaagataatgacttcctgatttacctcgtcagcttcctgggcagcctgtctgtcttacccgggaacatcatttctgccctgctcatggatagaattggaaggctcaagatgattggtggctccatgctaatctctgcagtctgctgcttcttcctgttttttggcaacagtgagtctgcaatgatcggctggcagtgcctgttctgtgggacaagcattgcagcctggaatgctctggatgtgatcacagtggagctgtatcccaccaaccagagagcaacagccttcggcattctcaatggattatgcaaatttggcgccatcctgggaaacaccatctttgcttcttttgttgggataaccaaagtggtccccatccttctggctgctgcttctctggttgggggtggcctgattgcccttcgactgccagagactcgagaacaggtcctgatgtgaacaacctatgggaaaaggaaaggtcgagagaatcttgtccaggacactgaaatgcatccacacttcctgcctatcacggtccggaggacaccttggatagcacgggaggagaagttgactttgtgacccctagtttaggacccacttcagctgtcaatatgtttgtaactcaggtgactgatttgggggtgccctgagccacccttagaatcacagagctgcgtgtttaacttcaagtcttcccagtccaaggcagggagaggattctccagtgagtgcacacactatgcgaggagcaagcatttctctaagtcaagtgcaaggacttaacttgcgtttgaaaaggaattagagggtcagaaacacccaggttcctccagaaagctccttggagcccaacaacttaacaaatcaacttggctggaagttagagtcattatatgaagattgggcttgaagtatatatttttgcatttaaaagtatcacctatcatattttccactcgaaaattgacatagtagcattgaggatactctgatctagaaagccaagtatttgagcaacatctatagagatctacttttctcctatgtctcctaggctttccatgataattaggtaatacatttaagaaggatatttatttctgttttgctctattcaaagaaacggaatgggatagttattctgtaaactaagtttgtatataactttatttgggtttaatttccacaactggtatctgcaaatattgccagcattttagccatattttgggagaacttggtgtttgaggtcccaggaaatgaggtctgatcaaatgaaatgcaagcacaatttcttacagccatttaactttctgttgggaggatgaattaacaaactcacattgtgcagtccgcttaatccaggcacttttctttgtgcaggtgtagtgagtagttacttctctcccttacacagatgacttgtgaaactcaagctcaccatcttcagtgctggcattttactttgccactacccaaaaacaatgtgagatgtgttcagtggcctctggtactctttgcaggcaagaatcaaacaacatggggactgagggaaggatggggaagtgtagccacagttcttccaaatgtaaatactttttgtttgttctagtggtaaaatgcaaatgcaatccatatttgttaggatggtcaggtctcatgagaaatctatgctatgtgtccagagcttttgaaacagagtccattggagtgggagttagggagtgtagtggatgccaaatatgtttttcttcagtgcttaagagaactgtttcctgaagtccagctttgaacataaacaggggtgtgggttgggggaggagcttaggacaaacctctctgatgaaggtcagcaatagactgaagtcttgactgcatggaagaggaaaaacatcagaactgtctgacaatggaggggacagtgagctacgcacaactgccagcggaggtgaacttgcacctgcccaggccggatgaacatcagcctgcaagaactagttgtttgagttgatttgcagtgctctcaatgggcaagtgccacattttccctggcagagatctccaaaaatttaaaacagaataataatggctatatcgagtgttttctcagtattggagaaatgcttaggtcctatgatagcttcgggacatctttctgtaattttcctcaattaacgggttggtaggggtaaatcttatgacacctttccaccgtcgatttgagatcagttttaatggttaaaatgtttactctccttctgtcaaccctcacctttttatttacacccctccctttttttctgtacagggagagaagacatattgactctgactggacaccctgattcctccaaatatatataccactgtgtattaatctttctctcagtgttttataggagtactaacatttattgctctgtcaataatgaaaggctcgatgtaatatagctgtaatttactttccatatgaatacagtggctaggttcataaaagagaattgtgtgagtctgggattaccacatctaaaacattattctttaatgggataatacaattcattgagcagctaccacttaaaaaacttgcaggacagttagagcctgcatttctagttaagatggatcttgtaaatttaaaattggattaacattggagtgctggggtggctgcaataatttgggggctaactccatttggtttccaagatctcacttctgcattatctttatggctctttaaaccagccacctagccaatcaagggcaattcccatctcatccatcactcaggtctttgtaaagggtgcagccaagctctgcagacttttgcaggattgtctagcctgagtaccgggctacttcttaaatgccgtcactcctgctgagataaatgcgtctttaaaaatagtctctgtggcaggtcactgggggacaatgtacagcattctggccatccacttctttttcacttcatgttctaccccaagagactcccgatgtcggctgtggagggttaaagggatgaggctttcctttgtttagcaaatctgttcacagttcttgatgatgtattttatgatgcccagcttggaaatagttgctttccatagtctcaactgtattgtgtcatctcctgatgctgatttttgatcttttgttttattaaaaataattagtgaaagaggtgtgcctatctgtgaagtttgtagtacatcatcctgaggtcatgtaacaagtaaaccccaacccagcgttccctcctacgttgtgttagttcattaaaactaaataataaaaataactgtaagaaaaccttaa

SEQ ID NO: 430929 - DNA, 4566 bp, Homo sapiens
agcggggagctgcacgcgggctgccggggcgacgctgctctgcctgcatcccggaggcggccgccagcggatttgccacccagagcataaccttcggtggcaggacaaatcaggccagcacgcagtctgccaagtcctgctcgctccctgtcaagaaaaacagctggatccatttctaatcaacacttcccaacgcaacacttctgagtctctgaaggagaccagagcttgaaactttccagacttccaacagacatcgagtgcaaaaggatatttaggttgtctttgcacaaatctggttgatttgagagataaagggggggggaaccagtgtgactttcacctaagaagtcacatgaacatatttcacatttgaactacataatgaatgatggttattgaaatagcccaaacctctaccacagagcgagggatatagctcaaggggcaaccaggcagtcgcagaaccaaggaatggatgactacaagtatcaggacaattatgggggctatgctcccagtgatggctattaccgcggcaatgagtccaacccagaagaagatgcacagagtgatgtcaccgaaggccatgatgaggaagacgagatctatgagggcgagtaccagggtatccctcacccagatgatgtcaaggccaagcaggccaagatggcgccctccagaatggacagccttcggggccagacagacctgatggctgagaggctggaagatgaggagcagttggcccaccagtacgagaccatcatggatgagtgtggccatggccgcttccagtggatcctctttttcgtcttgggtttggccctgatggccgatggggtggaagtgttcgtggtgagttttgccctgcccagtgcagagaaggacatgtgtctgtccagttccaaaaaaggaatgctagggatgatagtctacttgggaatgatggcgggcgccttcatcctgggaggcctggctgataagctgggaaggaagcgagtcctcagcatgtctctggccgtcaatgcctccttcgcctccctctcttccttcgtgcagggatatggagccttcctcttctgccgactcatctcaggcatcggtattgggggtgctctaccgattgtttttgcctatttttctgaattcttgtctcgggagaagcgaggagaacacctcagttggctgggcatcttctggatgactgggggcctgtacgcatctgccatggcctggagcatcatcccacactatggctggggcttcagcatggggaccaattaccacttccatagctggagagtgtttgtcatcgtctgtgctctgccctgcaccgtgtccatggtggccctgaagttcatgccagagagcccaaggtttctgctagagatgggcaaacatgatgaagcctggatgattctcaagcaagtccatgacaccaacatgagagctaaggggaccccagagaaagtgttcacggtttccaacatcaaaactcccaagcaaatggatgaattcattgagatccaaagttcaacaggaacctggtaccagcgctggctggtcagattcaagaccattttcaagcaggtctgggataatgccctgtactgtgtgatggggccctacagaatgaatacactgattctggccgtggtttggtttgccatggcattcagttactatggactgacagtttggtttcctgatatgatccgctattttcaagatgaagaatacaagtctaaaatgaaggtgttttttggtgagcatgtgtacggcgccacaatcaacttcacgatggaaaatcagatccaccaacatgggaaacttgtgaatgataagttcacaagaatgtactttaaacatgtactctttgaggacacattctttgacgagtgctattttgaagacgtaacatcaacagatacctacttcaaaaattgtaccattgaatcaaccatcttttacaacacagacctctacgagcacaagttcatcaactgtcggtttatcaactccaccttcctggagcagaaggagggctgccacatggacttggagcaagataatgacttcctgatttacctcgtcagcttcctgggcagcctgtctgtcttacccgggaacatcatttctgccctgctcatggatagaattggaaggctcaagatgattggtggctccatgctaatctctgcagtctgctgcttcttcctgttttttggcaacagtgagtctgcaatgatcggctggcagtgcctgttctgtgggacaagcattgcagcctggaatgctctggatgtgatcacagtggagctgtatcccaccaaccagagagcaacagccttcggcattctcaatggattatgcaaatttggcgccatcctgggaaacaccatctttgcttcttttgttgggataaccaaagtggtccccatccttctggctgctgcttctctggttgggggtggcctgattgcccttcgactgccagagactcgagaacaggtcctgatgtgaacaacctatgggaaaaggaaaggtcgagagaatcttgtccaggacactgaaatgcatccacacttcctgcctatcacggtccggaggacaccttggatagcacgggaggagaagttgactttgtgacccctagtttaggacccacttcagctgtcaatatgtttgtaactcaggtgactgatttgggggtgccctgagccacccttagaatcacagagctgcgtgtttaacttcaagtcttcccagtccaaggcagggagaggattctccagtgagtgcacacactatgcgaggagcaagcatttctctaagtcaagtgcaaggacttaacttgcgtttgaaaaggaattagagggtcagaaacacccaggttcctccagaaagctccttggagcccaacaacttaacaaatcaacttggctggaagttagagtcattatatgaagattgggcttgaagtatatatttttgcatttaaaagtatcacctatcatattttccactcgaaaattgacatagtagcattgaggatactctgatctagaaagccaagtatttgagcaacatctatagagatctacttttctcctatgtctcctaggctttccatgataattaggtaatacatttaagaaggatatttatttctgttttgctctattcaaagaaacggaatgggatagttattctgtaaactaagtttgtatataactttatttgggtttaatttccacaactggtatctgcaaatattgccagcattttagccatattttgggagaacttggtgtttgaggtcccaggaaatgaggtctgatcaaatgaaatgcaagcacaatttcttacagccatttaactttctgttgggaggatgaattaacaaactcacattgtgcagtccgcttaatccaggcacttttctttgtgcaggtgtagtgagtagttacttctctcccttacacagatgacttgtgaaactcaagctcaccatcttcagtgctggcattttactttgccactacccaaaaacaatgtgagatgtgttcagtggcctctggtactctttgcaggcaagaatcaaacaacatggggactgagggaaggatggggaagtgtagccacagttcttccaaatgtaaatactttttgtttgttctagtggtaaaatgcaaatgcaatccatatttgttaggatggtcaggtctcatgagaaatctatgctatgtgtccagagcttttgaaacagagtccattggagtgggagttagggagtgtagtggatgccaaatatgtttttcttcagtgcttaagagaactgtttcctgaagtccagctttgaacataaacaggggtgtgggttgggggaggagcttaggacaaacctctctgatgaaggtcagcaatagactgaagtcttgactgcatggaagaggaaaaacatcagaactgtctgacaatggaggggacagtgagctacgcacaactgccagcggaggtgaacttgcacctgcccaggccggatgaacatcagcctgcaagaactagttgtttgagttgatttgcagtgctctcaatgggcaagtgccacattttccctggcagagatctccaaaaatttaaaacagaataataatggctatatcgagtgttttctcagtattggagaaatgcttaggtcctatgatagcttcgggacatctttctgtaattttcctcaattaacgggttggtaggggtaaatcttatgacacctttccaccgtcgatttgagatcagttttaatggttaaaatgtttactctccttctgtcaaccctcacctttttatttacacccctccctttttttctgtacagggagagaagacatattgactctgactggacaccctgattcctccaaatatatataccactgtgtattaatctttctctcagtgttttataggagtactaacatttattgctctgtcaataatgaaaggctcgatgtaatatagctgtaatttactttccatatgaatacagtggctaggttcata

SEQ ID NO: 430930 - DNA, 3953 bp, Homo sapiens
agcggggagctgcacgcgggctgccggggcgacgctgctctgcctgcatcccggaggcggccgccagcggatttgccacccagagcataaccttcggtggcaggacaaatcaggccagcacgcagtctgccaagtcctgctcgctccctgtcaagaaaaacagctggatccatttctaatcaacacttcccaacgcaacacttctgagtctctgaaggagaccagagcttgaaactttccagacttccaacagacatcgagtgcaaaaggatatttaggttgtctttgcacaaatctggttgatttgagagataaagggggggggaaccagtgtgactttcacctaagaagtcacatgaacatatttcacatttgaactacataatgaatgatggttattgaaatagcccaaacctctaccacagagcgagggatatagctcaaggggcaaccaggcagtcgcagaaccaaggaatggatgactacaagtatcaggacaattatgggggctatgctcccagtgatggctattaccgcggcaatgagtccaacccagaagaagatgcacagagtgatgtcaccgaaggccatgatgaggaagacgagatctatgagggcgagtaccagggtatccctcacccagatgatgtcaaggccaagcaggccaagatggcgccctccagaatggacagccttcggggccagacagacctgatggctgagaggctggaagatgaggagcagttggcccaccagtacgagaccatcatggatgagtgtggccatggccgcttccagtggatcctctttttcgtcttgggtttggccctgatggccgatggggtggaagtgttcgtggtgagttttgccctgcccagtgcagagaaggacatgtgtctgtccagttccaaaaaaggaatgctagggatgatagtctacttgggaatgatggcgggcgccttcatcctgggaggcctggctgataagctgggaaggaagcgagtcctcagcatgtctctggccgtcaatgcctccttcgcctccctctcttccttcgtgcagggatatggagccttcctcttctgccgactcatctcaggcatcggtattgggggtgctctaccgattgtttttgcctatttttctgaattcttgtctcgggagaagcgaggagaacacctcagttggctgggcatcttctggatgactgggggcctgtacgcatctgccatggcctggagcatcatcccacactatggctggggcttcagcatggggaccaattaccacttccatagctggagagtgtttgtcatcgtctgtgctctgccctgcaccgtgtccatggtggccctgaagttcatgccagagagcccaaggtttctgctagagatgggcaaacatgatgaagcctggatgattctcaagcaagtccatgacaccaacatgagagctaaggggaccccagagaaagtgttcacggtttccaacatcaaaactcccaagcaaatggatgaattcattgagatccaaagttcaacaggaacctggtaccagcgctggctggtcagattcaagaccattttcaagcaggtctgggataatgccctgtactgtgtgatggggccctacagaatgaatacactgattctggccgtggtttggtttgccatggcattcagttactatggactgacagtttggtttcctgatatgatccgctattttcaagatgaagaatacaagtctaaaatgaaggtgttttttggtgagcatgtgtacggcgccacaatcaacttcacgatggaaaatcagatccaccaacatgggaaacttgtgaatgataagttcacaagaatgtactttaaacatgtactctttgaggacacattctttgacgagtgctattttgaagacgtaacatcaacagatacctacttcaaaaattgtaccattgaatcaaccatcttttacaacacagacctctacgagcacaagttcatcaactgtcggtttatcaactccaccttcctggagcagaaggagggctgccacatggacttggagcaagataatgacttcctgatttacctcgtcagcttcctgggcagcctgtctgtcttacccgggaacatcatttctgccctgctcatggatagaattggaaggctcaagatgattggtggctccatgctaatctctgcagtctgctgcttcttcctgttttttggcaacagtgagtctgcaatgatcggctggcagtgcctgttctgtgggacaagcattgcagcctggaatgctctggatgtgatcacagtggagctgtatcccaccaaccagagagcaacagccttcggcattctcaatggattatgcaaatttggcgccatcctgggaaacaccatctttgcttcttttgttgggataaccaaagtggtccccatccttctggctgctgcttctctggttgggggtggcctgattgcccttcgactgccagagactcgagaacaggtcctgatgtgaacaacctatgggaaaaggaaaggtcgagagaatcttgtccaggacactgaaatgcatccacacttcctgcctatcacggtccggaggacaccttggatagcacgggaggagaagttgactttgtgacccctagtttaggacccacttcagctgtcaatatgtttgtaactcaggtgactgatttgggggtgccctgagccacccttagaatcacagagctgcgtgtttaacttcaagtcttcccagtccaaggcagggagaggattctccagtgagtgcacacactatgcgaggagcaagcatttctctaagtcaagtgcaaggacttaacttgcgtttgaaaaggaattagagggtcagaaacacccaggttcctccagaaagctccttggagcccaacaacttaacaaatcaacttggctggaagttagagtcattatatgaagattgggcttgaagtatatatttttgcatttaaaagtatcacctatcatattttccactcgaaaattgacatagtagcattgaggatactctgatctagaaagccaagtatttgagcaacatctatagagatctacttttctcctatgtctcctaggctttccatgataattaggtaatacatttaagaaggatatttatttctgttttgctctattcaaagaaacggaatgggatagttattctgtaaactaagtttgtatataactttatttgggtttaatttccacaactggtatctgcaaatattgccagcattttagccatattttgggagaacttggtgtttgaggtcccaggaaatgaggtctgatcaaatgaaatgcaagcacaatttcttacagccatttaactttctgttgggaggatgaattaacaaactcacattgtgcagtccgcttaatccaggcacttttctttgtgcaggtgtagtgagtagttacttctctcccttacacagatgacttgtgaaactcaagctcaccatcttcagtgctggcattttactttgccactacccaaaaacaatgtgagatgtgttcagtggcctctggtactctttgcaggcaagaatcaaacaacatggggactgagggaaggatggggaagtgtagccacagttcttccaaatgtaaatactttttgtttgttctagtggtaaaatgcaaatgcaatccatatttgttaggatggtcaggtctcatgagaaatctatgctatgtgtccagagcttttgaaacagagtccattggagtgggagttagggagtgtagtggatgccaaatatgtttttcttcagtgcttaagagaactgtttcctgaagtccagctttgaacataaacaggggtgtgggtttgtgttgattatttatacttttttcagtttagtcttgtcactattttatcgttcttttctcttttta

SEQ ID NO: 430931 - DNA, 4066 bp, Homo sapiens
agcggggagctgcacgcgggctgccggggcgacgctgctctgcctgcatcccggaggcggccgccagcggatttgccacccagagcataaccttcggtggcaggacaaatcaggccagcacgcagtctgccaagtcctgctcgctccctgtcaagaaaaacagctggatccatttctaatcaacacttcccaacgcaacacttctgagtctctgaaggagaccagagcttgaaactttccagacttccaacagacatcgagtgcaaaaggatatttaggttgtctttgcacaaatctggttgatttgagagataaagggggggggaaccagtgtgactttcacctaagaagtcacatgaacatatttcacatttgaactacataatgaatgatggttattgaaatagcccaaacctctaccacagagcgagggatatagctcaaggggcaaccaggcagtcgcagaaccaaggaatggatgactacaagtatcaggacaattatgggggctatgctcccagtgatggctattaccgcggcaatgagtccaacccagaagaagatgcacagagtgatgtcaccgaaggccatgatgaggaagacgagatctatgagggcgagtaccagggtatccctcacccagatgatgtcaaggccaagcaggccaagatggcgccctccagaatggacagccttcggggccagacagacctgatggctgagaggctggaagatgaggagcagttggcccaccagtacgagaccatcatggatgagtgtggccatggccgcttccagtggatcctctttttcgtcttgggtttggccctgatggccgatggggtggaagtgttcgtggtgagttttgccctgcccagtgcagagaaggacatgtgtctgtccagttccaaaaaaggaatgctagggatgatagtctacttgggaatgatggcgggcgccttcatcctgggaggcctggctgataagctgggaaggaagcgagtcctcagcatgtctctggccgtcaatgcctccttcgcctccctctcttccttcgtgcagggatatggagccttcctcttctgccgactcatctcaggcatcggtattgggggtgctctaccgattgtttttgcctatttttctgaattcttgtctcgggagaagcgaggagaacacctcagttggctgggcatcttctggatgactgggggcctgtacgcatctgccatggcctggagcatcatcccacactatggctggggcttcagcatggggaccaattaccacttccatagctggagagtgtttgtcatcgtctgtgctctgccctgcaccgtgtccatggtggccctgaagttcatgccagagagcccaaggtttctgctagagatgggcaaacatgatgaagcctggatgattctcaagcaagtccatgacaccaacatgagagctaaggggaccccagagaaagtgttcacggtttccaacatcaaaactcccaagcaaatggatgaattcattgagatccaaagttcaacaggaacctggtaccagcgctggctggtcagattcaagaccattttcaagcaggtctgggataatgccctgtactgtgtgatggggccctacagaatgaatacactgattctggccgtggtttggtttgccatggcattcagttactatggactgacagtttggtttcctgatatgatccgctattttcaagatgaagaatacaagtctaaaatgaaggtgttttttggtgagcatgtgtacggcgccacaatcaacttcacgatggaaaatcagatccaccaacatgggaaacttgtgaatgataagttcacaagaatgtactttaaacatgtactctttgaggacacattctttgacgagtgctattttgaagacgtaacatcaacagatacctacttcaaaaattgtaccattgaatcaaccatcttttacaacacagacctctacgagcacaagttcatcaactgtcggtttatcaactccaccttcctggagcagaaggagggctgccacatggacttggagcaagataatgacttcctgatttacctcgtcagcttcctgggcagcctgtctgtcttacccgggaacatcatttctgccctgctcatggatagaattggaaggctcaagatgattggtggctccatgctaatctctgcagtctgctgcttcttcctgttttttggcaacagtgagtctgcaatgatcggctggcagtgcctgttctgtgggacaagcattgcagcctggaatgctctggatgtgatcacagtggagctgtatcccaccaaccagagagcaacagccttcggcattctcaatggattatgcaaatttggcgccatcctgggaaacaccatctttgcttcttttgttgggataaccaaagtggtccccatccttctggctgctgcttctctggttgggggtggcctgattgcccttcgactgccagagactcgagaacaggtcctgatgtgaacaacctatgggaaaaggaaaggtcgagagaatcttgtccaggacactgaaatgcatccacacttcctgcctatcacggtccggaggacaccttggatagcacgggaggagaagttgactttgtgacccctagtttaggacccacttcagctgtcaatatgtttgtaactcaggtgactgatttgggggtgccctgagccacccttagaatcacagagctgcgtgtttaacttcaagtcttcccagtccaaggcagggagaggattctccagtgagtgcacacactatgcgaggagcaagcatttctctaagtcaagtgcaaggacttaacttgcgtttgaaaaggaattagagggtcagaaacacccaggttcctccagaaagctccttggagcccaacaacttaacaaatcaacttggctggaagttagagtcattatatgaagattgggcttgaagtatatatttttgcatttaaaagtatcacctatcatattttccactcgaaaattgacatagtagcattgaggatactctgatctagaaagccaagtatttgagcaacatctatagagatctacttttctcctatgtctcctaggctttccatgataattaggtaatacatttaagaaggatatttatttctgttttgctctattcaaagaaacggaatgggatagttattctgtaaactaagtttgtatataactttatttgggtttaatttccacaactggtatctgcaaatattgccagcattttagccatattttgggagaacttggtgtttgaggtcccaggaaatgaggtctgatcaaatgaaatgcaagcacaatttcttacagccatttaactttctgttgggaggatgaattaacaaactcacattgtgcagtccgcttaatccaggcacttttctttgtgcaggtgtagtgagtagttacttctctcccttacacagatgacttgtgaaactcaagctcaccatcttcagtgctggcattttactttgccactacccaaaaacaatgtgagatgtgttcagtggcctctggtactctttgcaggcaagaatcaaacaacatggggactgagggaaggatggggaagtgtagccacagttcttccaaatgtaaatactttttgtttgttctagtggtaaaatgcaaatgcaatcttctttttcacttcatgttctaccccaagagactcccgatgtcggctgtggagggttaaagggatgaggctttcctttgtttagcaaatctgttcacagttcttgatgatgtattttatgatgcccagcttggaaatagttgctttccatagtctcaactgtattgtgtcatctcctgatgctgatttttgatcttttgttttattaaaaataattagtgaaagaggtgtgcctatctgtgaagtttgtagtacatcatcctgaggtcatgtaacaagtaaaccccaacccagcgttccctcctacgttgtgttagttcattaaaactaaataataaaaataactgtaagaaaaccttaa

SEQ ID NO: 430932 - DNA, 3850 bp, Homo sapiens
agcggggagctgcacgcgggctgccggggcgacgctgctctgcctgcatcccggaggcggccgccagcggatttgccacccagagcataaccttcggtggcaggacaaatcaggccagcacgcagtctgccaagtcctgctcgctccctgtcaagaaaaacagctggatccatttctaatcaacacttcccaacgcaacacttctgagtctctgaaggagaccagagcttgaaactttccagacttccaacagacatcgagtgcaaaaggatatttaggttgtctttgcacaaatctggttgatttgagagataaagggggggggaaccagtgtgactttcacctaagaagtcacatgaacatatttcacatttgaactacataatgaatgatggttattgaaatagcccaaacctctaccacagagcgagggatatagctcaaggggcaaccaggcagtcgcagaaccaaggaatggatgactacaagtatcaggacaattatgggggctatgctcccagtgatggctattaccgcggcaatgagtccaacccagaagaagatgcacagagtgatgtcaccgaaggccatgatgaggaagacgagatctatgagggcgagtaccagggtatccctcacccagatgatgtcaaggccaagcaggccaagatggcgccctccagaatggacagccttcggggccagacagacctgatggctgagaggctggaagatgaggagcagttggcccaccagtacgagaccatcatggatgagtgtggccatggccgcttccagtggatcctctttttcgtcttgggtttggccctgatggccgatggggtggaagtgttcgtggtgagttttgccctgcccagtgcagagaaggacatgtgtctgtccagttccaaaaaaggaatgctagggatgatagtctacttgggaatgatggcgggcgccttcatcctgggaggcctggctgataagctgggaaggaagcgagtcctcagcatgtctctggccgtcaatgcctccttcgcctccctctcttccttcgtgcagggatatggagccttcctcttctgccgactcatctcaggcatcggtattgggggtgctctaccgattgtttttgcctatttttctgaattcttgtctcgggagaagcgaggagaacacctcagttggctgggcatcttctggatgactgggggcctgtacgcatctgccatggcctggagcatcatcccacactatggctggggcttcagcatggggaccaattaccacttccatagctggagagtgtttgtcatcgtctgtgctctgccctgcaccgtgtccatggtggccctgaagttcatgccagagagcccaaggtttctgctagagatgggcaaacatgatgaagcctggatgattctcaagcaagtccatgacaccaacatgagagctaaggggaccccagagaaagtgttcacggtttccaacatcaaaactcccaagcaaatggatgaattcattgagatccaaagttcaacaggaacctggtaccagcgctggctggtcagattcaagaccattttcaagcaggtctgggataatgccctgtactgtgtgatggggccctacagaatgaatacactgattctggccgtggtttggtttgccatggcattcagttactatggactgacagtttggtttcctgatatgatccgctattttcaagatgaagaatacaagtctaaaatgaaggtgttttttggtgagcatgtgtacggcgccacaatcaacttcacgatggaaaatcagatccaccaacatgggaaacttgtgaatgataagttcacaagaatgtactttaaacatgtactctttgaggacacattctttgacgagtgctattttgaagacgtaacatcaacagatacctacttcaaaaattgtaccattgaatcaaccatcttttacaacacagacctctacgagcacaagttcatcaactgtcggtttatcaactccaccttcctggagcagaaggagggctgccacatggacttggagcaagataatgacttcctgatttacctcgtcagcttcctgggcagcctgtctgtcttacccgggaacatcatttctgccctgctcatggatagaattggaaggctcaagatgattggtggctccatgctaatctctgcagtctgctgcttcttcctgttttttggcaacagtgagtctgcaatgatcggctggcagtgcctgttctgtgggacaagcattgcagcctggaatgctctggatgtgatcacagtggagctgtatcccaccaaccagagagcaacagccttcggcattctcaatggattatgcaaatttggcgccatcctgggaaacaccatctttgcttcttttgttgggataaccaaagtggtccccatccttctggctgctgcttctctggttgggggtggcctgattgcccttcgactgccagagactcgagaacaggtcctgatgtgaacaacctatgggaaaaggaaaggtcgagagaatcttgtccaggacactgaaatgcatccacacttcctgcctatcacggtccggaggacaccttggatagcacgggaggagaagttgactttgtgacccctagtttaggacccacttcagctgtcaatatgtttgtaactcaggtgactgatttgggggtgccctgagccacccttagaatcacagagctgcgtgtttaacttcaagtcttcccagtccaaggcagggagaggattctccagtgagtgcacacactatgcgaggagcaagcatttctctaagtcaagtgcaaggacttaacttgcgtttgaaaaggaattagagggtcagaaacacccaggttcctccagaaagctccttggagcccaacaacttaacaaatcaacttggctggaagttagagtcattatatgaagattgggcttgaagtatatatttttgcatttaaaagtatcacctatcatattttccactcgaaaattgacatagtagcattgaggatactctgatctagaaagccaagtatttgagcaacatctatagagatctacttttctcctatgtctcctaggctttccatgataattaggtaatacatttaagaaggatatttatttctgttttgctctattcaaagaaacggaatgggatagttattctgtaaactaagtttgtatataactttatttgggtttaatttccacaactggtatctgcaaatattgccagcattttagccatattttgggagaacttggtgtttgaggtcccaggaaatgaggtctgatcaaatgaaatgcaagcacaatttcttacagccatttaactttctgttgggaggatgaattaacaaactcacattgtgcagtccgcttaatccaggcacttttctttgtgcaggtgtagtgagtagttacttctctcccttacacagatgacttgtgaaactcaagctcaccatcttcagtgctggcattttactttgccactacccaaaaacaatgtgagatgtgttcagtggcctctggtactctttgcaggcaagaatcaaacaacatggggactgagggaaggatggggaagtgtagccacagttcttccaaatgtaaatactttttgtttgttctagtggtaaaatgcaaatgcaatctccaaatatatataccactgtgtattaatctttctctcagtgttttataggagtactaacatttattgctctgtcaataatgaaaggctcgatgtaatatagctgtaatttactttccatatgaatacagtggctaggttcata

SEQ ID NO: 430933 - DNA, 1732 bp, Homo sapiens
atttaatgaatgaaaaaattcacgtctctctttgatcctagactgcaagttacttaaaagaaatggaccgtattttacttatctctcatggcctgcaaattgagtttgcttactgaattaatgaatgaatgaccaattgtacacatatgtctgtaaaacgtttacatatccacattcccattagactgagattcttgagggcagaaaccatgtcttcagctctcagcatggtgcctgactcatggtaggttgtcaaaagcatttgcagaactgaataaaacttacgtttaagtagtactggagcagtctcacataaccgggcacagtgtcttctaaatagacactaaaattatttcataattaaagacagatctcactaagcattttctgagttagtgccagttgaataatatgacaataagctataggagttcagaggagagtgagttctgtggactgaaatagtcaaagtggattttcagagcagatgagacgcgatgaaggctggggctactttggtgttttaagaacattaattaggcagcaggaaaatctgaggacagggagactagtaaggaaggctggaaagagccctgggtttggagttcagagatctgtgttcagagtcctttgcttcttagtgactatgtgaccttgagaagataacttgagctccctttttcctcttctgtgaggtagaggtaagattgatgtgcatattgatattgtacttaaaagtgtttgtaaaatgctaagtaaaacctaatgctatgctttgaatgtagtgggttccaaatatttgtttaatgacaaagaataaatgatattgactaatgaaaataatggagccactggaatgtcacctcctgcatctgccagtaaacctgttaacacaggggtggcgggggggggggggaagtaaatatgtgaagccaccaaatctcatgatcaggagaaaaactttggaactcccatgagactccaaagttatgtcacaggtgaataagtcatgaacttttcatgctgatatcatttctaaggttgctgccttgtcagaagaagcaaaccacaagataaaccatgcagaaaatctttttttaaaaaagtttcctgaaggatggatggttcatttgttctgcttgtcactttacttactaatgagtcatttttttccttaaccagtaatttgttttaaatttggtcataagatggtatgttgactagtccaatgttacaaaataattggaaaaaagatgacagaccaccaactgaataagggaaatctggttcttgaacttccaatgtatgaattggtgatggtaagcttagtctttatgatgtaagattggatttattggaacttctttatgtccagaagttgcagcacctttctttgtctctggaatgcccaagatctctactgcatcctgtagacatggagggtttccccccttattctgggtctgattatttttaaagaaacaccctttccttacccatcatggagacactactaaccttgtatatacttttattagagtgctgataacaccatattacagtagcatacttacatatctgttttcttaactgtgagctccttgagagcagggactgtgtgtttttgcttttatttcaccagtactcagaactatccacagtatagaaaagcactcaataaatggaataaatgaaaatgaatagataaataaatgatttcacttgtataaga

SEQ ID NO: 430934 - DNA, 5596 bp, Homo sapiens
gagcctggggaggtcgagggtgcagcgagccgtgatcgtgctactgcactccagcctgggcaacacagagagaccctgtctcaaaacaaacaaacaaacaaacaaacaaacaaaacaaagaaaaaaaaatgggagtgggccgggcgcggtgactcacacctgtaatcccagcactttcggaggccaaggcgggtggatcacgaggtcaggaattcaagattagcctggacaacatggtgaaaccccatctctacgaaaaatacaaaaattagccaagtatggtggccggcgcctgtaatcccagctactcgggagactgaggcagagaactgcttgaacctgggaggcagaggttgcagtgatccgagatcgcgtcactgcactccagcgtgggcgacagagcgagactccgtttcagaaaagaaaaaaaaaaaaaaaaaaaaaagggagtcggggtggagctctcattggctcgttgcatgtgagtgtccctacggcctagaaataccagagaagcacatcggaacgggctggaaatccacccagttaactagagggctttgaaccttttattaacttggaggttgactctcctgtcaactcgattcccttttggctgtttggcagggtcagtgagacatcccctgggtcgctcgaccccgtaggacggttcagggagccctccaggtcttcgtttctcctcttccccgcacagtgctgttatccagctgggggatccaacgcacacttaaggctccagcaaagtggctccgctgccggatgggagtgccccagtgtgctggatgaagctggcgcatgcaccatgtcatcatgtgtctctagccagcccagcagcaaccgggccgccccccaggatgagctggggggcaggggcagcagcagcagcgaaagccagaagccctgtgaggccctgcggggcctctcatccttgagcatccacctgggcatggagtccttcattgtggtcaccgagtgtgagccgggctgtgctgtggacctcggcttggcgcgggaccggcccctggaggccgatggccaagaggtcccccttgactcctccgggtcccaggcccggccccacctctccggtcgcaagctgtctctgcaagagcggtcccagggtgggctggcagccggtggcagcctggacatgaacggacgctgcatctgcccgtccctgccctactcacccgtcagctccccgcagtcctcgcctcggctgccccggcggccgacagtggagtctcaccacgtctccatcacgggtatgcaggactgtgtgcagctgaatcagtataccctgaaggatgaaattggaaagggctcctatggtgtcgtcaagttggcctacaatgaaaatgacaatacctactatgcaatgaaggtgctgtccaaaaagaagctgatccggcaggccggctttccacgtcgccctccaccccgaggcacccggccagctcctggaggctgcatccagcccaggggccccattgagcaggtgtaccaggaaattgccatcctcaagaagctggaccaccccaatgtggtgaagctggtggaggtcctggatgaccccaatgaggaccatctgtacatggtgttcgaactggtcaaccaagggcccgtgatggaagtgcccaccctcaaaccactctctgaagaccaggcccgtttctacttccaggatctgatcaaaggcatcgagtacttacactaccagaagatcatccaccgtgacatcaaaccttccaacctcctggtcggagaagatgggcacatcaagatcgctgactttggtgtgagcaatgaattcaagggcagtgacgcgctcctctccaacaccgtgggcacgcccgccttcatggcacccgagtcgctctctgagacccgcaagatcttctctgggaaggccttggatgtttgggccatgggtgtgacactatactgctttgtctttggccagtgcccattcatggacgagcggatcatgtgtttacacagtaagatcaagagtcaggccctggaatttccagaccagcccgacatagctgaggacttgaaggacctgatcacccgtatgctggacaagaaccccgagtcgaggatcgtggtgccggaaatcaagctgcacccctgggtcacgaggcatggggcggagccgttgccgtcggaggatgagaactgcacgctggtcgaagtgactgaagaggaggtcgagaactcagtcaaacacattcccagcttggcaaccgtgatcctggtgaagaccatgatacgtaaacgctcctttgggaacccattcgagggcagccggcgggaggaacgctcactgtcagcgcctggaaacttgctcaccaaaaaaccaaccagggaatgtgagtccctgtctgagctcaaggaagcaaggcagcgaagacaacctccagggcaccgacccgccccccgtgggggaggaggaagtgctcttgtgagaggcagtccctgcgtggaaagttgctgggcccccgcccccggctcccccgcacgcatgcatccactgcggccggaggaggccatggagcccgagtagctgcctggatcgctcgacctcgcatgcgcgccgcgtcgcctctggggggctgctgcaccgcgtttccatagcagcatgtcctacggaaacccagcacgtgtgtagagcctcgatcgtcatctctggttatttgttttttcctttgttgttttaaaggggacaaaaaaaaaaaaaaaaggacttgactccatgacgtcgaccgtggccgctggctggctggacaggcgggtgtgaggagttgcagacccaaacccacgtgcattttgggacaattgctttttaaaacgtttttatgccaaaaatccttcattgtgattttcagaaccacgtcagatataccaagtgactgtgtgtggggtttgacaactgtggaaaggcgagcagaaaactccggcggtctgaggccatggaggtggttgctgcatttgagagggagtagggggctagatgtggctcctagtgcaaaccggaaaccatggcaccttccagagccgtggtctcaaggagtcagagcagggctggccctcagtagctgcagggagctttgatgcaacttatttgtaagaaggatttttaaattttttatgggtagaattgtagtcaggaaaacagaaagggcttgaaatttaataagtgctgctggaaggggattttccaagcctggaagggtattcagcagctgtggtggggaaacatttctcctgaaagactgaacgtgtttcttcatgacagctgctcaaagcaggtttctgagatagctgaccgagctctggtaaatctctttgtcaaattacgaaaacttcagggtgaaatcctatgcttccatgtacattacatggcttaagattaaacaaaaacatttttcaagtctctaactagagtgaactctagagcacagtagttcagaaactatttagagcttccaggatatatttcacagcttcaggcatgtgatcagttagagccgatgaaacctatgcccgcctgtatatatattagcagcttagctagttcataacctgtatattctaaagactgctaaggttttgttttcattttaaatcctagctgattgttgtggtcaatgaaatacccagtttctggagggccaggtgggaaatgctttcactggaccaacacacaaatgatcatcctgaggatctgagcttccctagactccacacaataaccttggggcacccttttagagaagactgttgaaacccacagcactcgttggggtatgaggaaaccagggcttggcacaggaagttcccctttgtagctaaaagtccagaaagaaagggttcatctttttgacttccaactgatattgggaagtttggttgaggttcaagtgtgactccttccagagccacaggtaggggagtgtgaagttgagggggaggaaagctggaaggactctgccttgggagattcccagctctgctttccagcgcttggtggaatctgggctggggaaagacggcaccgggaaactctgcttccccattgtttccatctgatcagctgtggtgtgaggacttctcagacaaaggcaaggcctcgtgcccctgcccagcccattcatggagccctgggccttcttggcttccatagatcctaagctcttgactgtagtttagccagacttgttttgctatcttataagcagttcagaattagggaatgctggttttgaagagcaaaggacaggtagtctagagagggtcgtctggcctgcttgctgggtctttgtaacccagcacttcctcttgccctcctggctttatgtttatggggagaggactcaatagctccaccccttctggcaccagatggggcttggttagtttgcaataagcaccttgcagaggttaaagccagcgggtccctagtcttaggcccagcctgcttgtgtgggctctggcctggcctggtggctggcccagggggcagcagtgcttagagcttctgcagggcttctcttgtttacacagctgcatcagacaatgccatttctccccaccacggaaccttccatctaagatttcttccagggaatgccagcaatcaggcagcacccagctgtgggggcagtggggtgggggagacccacattgatgactttttttttttcttttaatgaagaaacaccaaagaaagctgtggaaaggacctgccccacatgaaaaggataagccaagatggctgtaaacacagagcatttgagctgccactcttggagcacattgatttttcaaaagccagctctgtcaggaaaggaggtgctgttatgagcagctcttccagtgggcaaagaggacgcccataatttcttccattgctagctcatctgtgggaccaatttggtgtaagcaacctgtggcctgcacttgtggcctcgaaggaagcacaaaccctccatccacttcccatttcctctgcccttttccacctcccccttccatcccaccagctgccagtggctcccagaaagccttattgagccccttgttgacacttggggctgcggaggcctctccctactggtctggcctttcctgagaggcaggtcttccgtcctcagagcctttctggaacaaggagaatgcctgtgcaggtggacacacaggcctggcctgtcgctctcacttgtcttccagcggggagcttcacgttgccgagtggaagaaccatgacctccacttgcttccaaggtgctagggaagtttcagggtacgctggttcccctctccagctggaggccgagtttctggggactgcagatttttctactctgtgatcgattcaatgcccgatgcttctgtttcattcccgaccctttctactatgcattttccttttatcaggtgtataaagttaaatactgtgtatttatcactaaaaagtacatgaacttaagagacaactaagcctttcgtgtttttccacaggtgtttaagcttctctgtacagttgaaataaacagacagcaaaatggta

SEQ ID NO: 430935 - DNA, 2967 bp, Homo sapiens
gagcctggggaggtcgagggtgcagcgagccgtgatcgtgctactgcactccagcctgggcaacacagagagaccctgtctcaaaacaaacaaacaaacaaacaaacaaacaaaacaaagaaaaaaaaatgggagtgggccgggcgcggtgactcacacctgtaatcccagcactttcggaggccaaggcgggtggatcacgaggtcaggaattcaagattagcctggacaacatggtgaaaccccatctctacgaaaaatacaaaaattagccaagtatggtggccggcgcctgtaatcccagctactcgggagactgaggcagagaactgcttgaacctgggaggcagaggttgcagtgatccgagatcgcgtcactgcactccagcgtgggcgacagagcgagactccgtttcagaaaagaaaaaaaaaaaaaaaaaaaaaagggagtcggggtggagctctcattggctcgttgcatgtgagtgtccctacggcctagaaataccagagaagcacatcggaacgggctggaaatccacccagttaactagagggctttgaaccttttattaacttggaggttgactctcctgtcaactcgattcccttttggctgtttggcagggtcagtgagacatcccctgggtcgctcgaccccgtaggacggttcagggagccctccaggtcttcgtttctcctcttccccgcacagtgctgttatccagctgggggatccaacgcacacttaaggctccagcaaagtggctccgctgccggatgggagtgccccagtgtgctggatgaagctggcgcatgcaccatgtcatcatgtgtctctagccagcccagcagcaaccgggccgccccccaggatgagctggggggcaggggcagcagcagcagcgaaagccagaagccctgtgaggccctgcggggcctctcatccttgagcatccacctgggcatggagtccttcattgtggtcaccgagtgtgagccgggctgtgctgtggacctcggcttggcgcgggaccggcccctggaggccgatggccaagaggtcccccttgactcctccgggtcccaggcccggccccacctctccggtcgcaagctgtctctgcaagagcggtcccagggtgggctggcagccggtggcagcctggacatgaacggacgctgcatctgcccgtccctgccctactcacccgtcagctccccgcagtcctcgcctcggctgccccggcggccgacagtggagtctcaccacgtctccatcacgggtatgcaggactgtgtgcagctgaatcagtataccctgaaggatgaaattggaaagggctcctatggtgtcgtcaagttggcctacaatgaaaatgacaatacctactatgcaatgaaggtgctgtccaaaaagaagctgatccggcaggccggctttccacgtcgccctccaccccgaggcacccggccagctcctggaggctgcatccagcccaggggccccattgagcaggtgtaccaggaaattgccatcctcaagaagctggaccaccccaatgtggtgaagctggtggaggtcctggatgaccccaatgaggaccatctgtacatggtgttcgaactggtcaaccaagggcccgtgatggaagtgcccaccctcaaaccactctctgaagaccaggcccgtttctacttccaggatctgatcaaaggcatcgagtacttacactaccagaagatcatccaccgtgacatcaaaccttccaacctcctggtcggagaagatgggcacatcaagatcgctgactttggtgtgagcaatgaattcaagggcagtgacgcgctcctctccaacaccgtgggcacgcccgccttcatggcacccgagtcgctctctgagacccgcaagatcttctctgggaaggccttggatgtttgggccatgggtgtgacactatactgctttgtctttggccagtgcccattcatggacgagcggatcatgtgtttacacagtaagatcaagagtcaggccctggaatttccagaccagcccgacatagctgaggacttgaaggacctgatcacccgtatgctggacaagaaccccgagtcgaggatcgtggtgccggaaatcaagctgcacccctgggtcacgaggcatggggcggagccgttgccgtcggaggatgagaactgcacgctggtcgaagtgactgaagaggaggtcgagaactcagtcaaacacattcccagcttggcaaccgtgatcctggtgaagaccatgatacgtaaacgctcctttgggaacccattcgagggcagccggcgggaggaacgctcactgtcagcgcctggaaacttgctcaccaaaaaaccaaccagggaatgtgagtccctgtctgagctcaagacctagaaaataagtccccttcctgcctgttgcaaagtaacgtaagagttccctcacccgagtggatgcagaccttcttgctgtcagccacccttccttcatacacatagccagcccagggtgaccagaacctcccaggacagatgaggctttgtgtccttatgagactgggagaacctgctgggcacccctgctgcaggtgctgtggtgggtggggaccccactgcccttcccactgagcacatcgtggctacctgacttggtgggagctccaggcagtcacttctgtttcttaaacatagctttactgaggtacaattcacataccatgtaattcacccacgggaagtgtatgattcagtggtttctaatacagacttctgcagccattaccaccatcaactttacgacattttcatcagcccaagaagacaccctacactccttagctgtccccatccaactcccccaccccagtaaccactcagaataggtatggatttgcctattctggacgtttcgtataaatggcgtcatacactacgtgg

SEQ ID NO: 430936 - DNA, 308 bp, Homo sapiens
gcggccgctactactactaaattcgcggcgcacgactcagggtacgctggttcccctctccagctggaggccgagtttctggggactgcagatttttctactctgtgatcgattcaatgcccgatgcttctgtttcattcccgaccctttctactatgcattttccttttatcaggtgtataaagttaaatactgtgtatttatcactaaaaagtacatgaacttaagagacaactaagcctttcgtgtttttccacaggtgtttaagcttctctgtacagttgaaataaacagacagcaaaatggta

SEQ ID NO: 430937 - DNA, 551 bp, Homo sapiens
ggcggaggagaggagcgcgcggccgcgcagagcaagctgagccgagccgagccgagctgggggcgcagagcgcgggaggcggcggcggcgcggagcccaggtgagctggcggtagccgggcccggggcaagggacgcagccgccgcggccccgggcgcccgctccgtttccctctcgaggcgggggaccgccgccggcatggcacacaaagcccggaggctggcctggggctcccaacacggagggaccccacgtgcgcctccccacgccccgccacgtggagggacacggtccccgacagcccttcccccgcgtcctctgggcgccctgggcctcgggatggcctcctcggctgggccgcgccctgtccgggtggcaggggcggtcctggagtttggaaccggggtcaccgggggccgggtccgtcagggttcgtggaggcggcctaggcccagcccctcgcgtttgacaggtggggaaatctggagcgttccggggaagagaggaccagcggacttggagcacccccaccccgcagcctgcctgtctcg

SEQ ID NO: 430938 - DNA, 4605 bp, Homo sapiens
ggcggaggagaggagcgcgcggccgcgcagagcaagctgagccgagccgagccgagctgggggcgcagagcgcgggaggcggcggcggcgcggagcccaggtggctccgctgccggatgggagtgccccagtgtgctggatgaagctggcgcatgcaccatgtcatcatgtgtctctagccagcccagcagcaaccgggccgccccccaggatgagctggggggcaggggcagcagcagcagcgaaagccagaagccctgtgaggccctgcggggcctctcatccttgagcatccacctgggcatggagtccttcattgtggtcaccgagtgtgagccgggctgtgctgtggacctcggcttggcgcgggaccggcccctggaggccgatggccaagaggtcccccttgactcctccgggtcccaggcccggccccacctctccggtcgcaagctgtctctgcaagagcggtcccagggtgggctggcagccggtggcagcctggacatgaacggacgctgcatctgcccgtccctgccctactcacccgtcagctccccgcagtcctcgcctcggctgccccggcggccgacagtggagtctcaccacgtctccatcacgggtatgcaggactgtgtgcagctgaatcagtataccctgaaggatgaaattggaaagggctcctatggtgtcgtcaagttggcctacaatgaaaatgacaatacctactatgcaatgaaggtgctgtccaaaaagaagctgatccggcaggccggctttccacgtcgccctccaccccgaggcacccggccagctcctggaggctgcatccagcccaggggccccattgagcaggtgtaccaggaaattgccatcctcaagaagctggaccaccccaatgtggtgaagctggtggaggtcctggatgaccccaatgaggaccatctgtacatggtgttcgaactggtcaaccaagggcccgtgatggaagtgcccaccctcaaaccactctctgaagaccaggcccgtttctacttccaggatctgatcaaaggcatcgagtacttacactaccagaagatcatccaccgtgacatcaaaccttccaacctcctggtcggagaagatgggcacatcaagatcgctgactttggtgtgagcaatgaattcaagggcagtgacgcgctcctctccaacaccgtgggcacgcccgccttcatggcacccgagtcgctctctgagacccgcaagatcttctctgggaaggccttggatgtttgggccatgggtgtgacactatactgctttgtctttggccagtgcccattcatggacgagcggatcatgtgtttacacagtaagatcaagagtcaggccctggaatttccagaccagcccgacatagctgaggacttgaaggacctgatcacccgtatgctggacaagaaccccgagtcgaggatcgtggtgccggaaatcaagctgcacccctgggtcacgaggcatggggcggagccgttgccgtcggaggatgagaactgcacgctggtcgaagtgactgaagaggaggtcgagaactcagtcaaacacattcccagcttggcaaccgtgatcctggtgaagaccatgatacgtaaacgctcctttgggaacccattcgagggcagccggcgggaggaacgctcactgtcagcgcctggaaacttgctcaccaaaaaaccaaccagggaatgtgagtccctgtctgagctcaaggggacaaaaaaaaaaaaaaaaggacttgactccatgacgtcgaccgtggccgctggctggctggacaggcgggtgtgaggagttgcagacccaaacccacgtgcattttgggacaattgctttttaaaacgtttttatgccaaaaatccttcattgtgattttcagaaccacgtcagatataccaagtgactgtgtgtggggtttgacaactgtggaaaggcgagcagaaaactccggcggtctgaggccatggaggtggttgctgcatttgagagggagtagggggctagatgtggctcctagtgcaaaccggaaaccatggcaccttccagagccgtggtctcaaggagtcagagcagggctggccctcagtagctgcagggagctttgatgcaacttatttgtaagaaggatttttaaattttttatgggtagaattgtagtcaggaaaacagaaagggcttgaaatttaataagtgctgctggaaggggattttccaagcctggaagggtattcagcagctgtggtggggaaacatttctcctgaaagactgaacgtgtttcttcatgacagctgctcaaagcaggtttctgagatagctgaccgagctctggtaaatctctttgtcaaattacgaaaacttcagggtgaaatcctatgcttccatgtacattacatggcttaagattaaacaaaaacatttttcaagtctctaactagagtgaactctagagcacagtagttcagaaactatttagagcttccaggatatatttcacagcttcaggcatgtgatcagttagagccgatgaaacctatgcccgcctgtatatatattagcagcttagctagttcataacctgtatattctaaagactgctaaggttttgttttcattttaaatcctagctgattgttgtggtcaatgaaatacccagtttctggagggccaggtgggaaatgctttcactggaccaacacacaaatgatcatcctgaggatctgagcttccctagactccacacaataaccttggggcacccttttagagaagactgttgaaacccacagcactcgttggggtatgaggaaaccagggcttggcacaggaagttcccctttgtagctaaaagtccagaaagaaagggttcatctttttgacttccaactgatattgggaagtttggttgaggttcaagtgtgactccttccagagccacaggtaggggagtgtgaagttgagggggaggaaagctggaaggactctgccttgggagattcccagctctgctttccagcgcttggtggaatctgggctggggaaagacggcaccgggaaactctgcttccccattgtttccatctgatcagctgtggtgtgaggacttctcagacaaaggcaaggcctcgtgcccctgcccagcccattcatggagccctgggccttcttggcttccatagatcctaagctcttgactgtagtttagccagacttgttttgctatcttataagcagttcagaattagggaatgctggttttgaagagcaaaggacaggtagtctagagagggtcgtctggcctgcttgctgggtctttgtaacccagcacttcctcttgccctcctggctttatgtttatggggagaggactcaatagctccaccccttctggcaccagatggggcttggttagtttgcaataagcaccttgcagaggttaaagccagcgggtccctagtcttaggcccagcctgcttgtgtgggctctggcctggcctggtggctggcccagggggcagcagtgcttagagcttctgcagggcttctcttgtttacacagctgcatcagacaatgccatttctccccaccacggaaccttccatctaagatttcttccagggaatgccagcaatcaggcagcacccagctgtgggggcagtggggtgggggagacccacattgatgactttttttttttcttttaatgaagaaacaccaaagaaagctgtggaaaggacctgccccacatgaaaaggataagccaagatggctgtaaacacagagcatttgagctgccactcttggagcacattgatttttcaaaagccagctctgtcaggaaaggaggtgctgttatgagcagctcttccagtgggcaaagaggacgcccataatttcttccattgctagctcatctgtgggaccaatttggtgtaagcaacctgtggcctgcacttgtggcctcgaaggaagcacaaaccctccatccacttcccatttcctctgcccttttccacctcccccttccatcccaccagctgccagtggctcccagaaagccttattgagccccttgttgacacttggggctgcggaggcctctccctactggtctggcctttcctgagaggcaggtcttccgtcctcagagcctttctggaacaaggagaatgcctgtgcaggtggacacacaggcctggcctgtcgctctcacttgtcttccagcggggagcttcacgttgccgagtggaagaaccatgacctccacttgcttccaaggtgctagggaagtttcagggtacgctggttcccctctccagctggaggccgagtttctggggactgcagatttttctactctgtgatcgattcaatgcccgatgcttctgtttcattcccgaccctttctactatgcattttccttttatcaggtgtataaagttaaatactgtgtatttatcactaaaaagtacatgaacttaagagacaactaagcctttcgtgtttttccacaggtgtttaagcttctctgtacagttgaaataaacagacagcaaaatggta

SEQ ID NO: 430939 - DNA, 4889 bp, Homo sapiens
ggcggaggagaggagcgcgcggccgcgcagagcaagctgagccgagccgagccgagctgggggcgcagagcgcgggaggcggcggcggcgcggagcccaggtggctccgctgccggatgggagtgccccagtgtgctggatgaagctggcgcatgcaccatgtcatcatgtgtctctagccagcccagcagcaaccgggccgccccccaggatgagctggggggcaggggcagcagcagcagcgaaagccagaagccctgtgaggccctgcggggcctctcatccttgagcatccacctgggcatggagtccttcattgtggtcaccgagtgtgagccgggctgtgctgtggacctcggcttggcgcgggaccggcccctggaggccgatggccaagaggtcccccttgactcctccgggtcccaggcccggccccacctctccggtcgcaagctgtctctgcaagagcggtcccagggtgggctggcagccggtggcagcctggacatgaacggacgctgcatctgcccgtccctgccctactcacccgtcagctccccgcagtcctcgcctcggctgccccggcggccgacagtggagtctcaccacgtctccatcacgggtatgcaggactgtgtgcagctgaatcagtataccctgaaggatgaaattggaaagggctcctatggtgtcgtcaagttggcctacaatgaaaatgacaatacctactatgcaatgaaggtgctgtccaaaaagaagctgatccggcaggccggctttccacgtcgccctccaccccgaggcacccggccagctcctggaggctgcatccagcccaggggccccattgagcaggtgtaccaggaaattgccatcctcaagaagctggaccaccccaatgtggtgaagctggtggaggtcctggatgaccccaatgaggaccatctgtacatggtgttcgaactggtcaaccaagggcccgtgatggaagtgcccaccctcaaaccactctctgaagaccaggcccgtttctacttccaggatctgatcaaaggcatcgagtacttacactaccagaagatcatccaccgtgacatcaaaccttccaacctcctggtcggagaagatgggcacatcaagatcgctgactttggtgtgagcaatgaattcaagggcagtgacgcgctcctctccaacaccgtgggcacgcccgccttcatggcacccgagtcgctctctgagacccgcaagatcttctctgggaaggccttggatgtttgggccatgggtgtgacactatactgctttgtctttggccagtgcccattcatggacgagcggatcatgtgtttacacagtaagatcaagagtcaggccctggaatttccagaccagcccgacatagctgaggacttgaaggacctgatcacccgtatgctggacaagaaccccgagtcgaggatcgtggtgccggaaatcaagctgcacccctgggtcacgaggcatggggcggagccgttgccgtcggaggatgagaactgcacgctggtcgaagtgactgaagaggaggtcgagaactcagtcaaacacattcccagcttggcaaccgtgatcctggtgaagaccatgatacgtaaacgctcctttgggaacccattcgagggcagccggcgggaggaacgctcactgtcagcgcctggaaacttgctcacgaagcaaggcagcgaagacaacctccagggcaccgacccgccccccgtgggggaggaggaagtgctcttgtgagaggcagtccctgcgtggaaagttgctgggcccccgcccccggctcccccgcacgcatgcatccactgcggccggaggaggccatggagcccgagtagctgcctggatcgctcgacctcgcatgcgcgccgcgtcgcctctggggggctgctgcaccgcgtttccatagcagcatgtcctacggaaacccagcacgtgtgtagagcctcgatcgtcatctctggttatttgttttttcctttgttgttttaaaggggacaaaaaaaaaaaaaaaaggacttgactccatgacgtcgaccgtggccgctggctggctggacaggcgggtgtgaggagttgcagacccaaacccacgtgcattttgggacaattgctttttaaaacgtttttatgccaaaaatccttcattgtgattttcagaaccacgtcagatataccaagtgactgtgtgtggggtttgacaactgtggaaaggcgagcagaaaactccggcggtctgaggccatggaggtggttgctgcatttgagagggagtagggggctagatgtggctcctagtgcaaaccggaaaccatggcaccttccagagccgtggtctcaaggagtcagagcagggctggccctcagtagctgcagggagctttgatgcaacttatttgtaagaaggatttttaaattttttatgggtagaattgtagtcaggaaaacagaaagggcttgaaatttaataagtgctgctggaaggggattttccaagcctggaagggtattcagcagctgtggtggggaaacatttctcctgaaagactgaacgtgtttcttcatgacagctgctcaaagcaggtttctgagatagctgaccgagctctggtaaatctctttgtcaaattacgaaaacttcagggtgaaatcctatgcttccatgtacattacatggcttaagattaaacaaaaacatttttcaagtctctaactagagtgaactctagagcacagtagttcagaaactatttagagcttccaggatatatttcacagcttcaggcatgtgatcagttagagccgatgaaacctatgcccgcctgtatatatattagcagcttagctagttcataacctgtatattctaaagactgctaaggttttgttttcattttaaatcctagctgattgttgtggtcaatgaaatacccagtttctggagggccaggtgggaaatgctttcactggaccaacacacaaatgatcatcctgaggatctgagcttccctagactccacacaataaccttggggcacccttttagagaagactgttgaaacccacagcactcgttggggtatgaggaaaccagggcttggcacaggaagttcccctttgtagctaaaagtccagaaagaaagggttcatctttttgacttccaactgatattgggaagtttggttgaggttcaagtgtgactccttccagagccacaggtaggggagtgtgaagttgagggggaggaaagctggaaggactctgccttgggagattcccagctctgctttccagcgcttggtggaatctgggctggggaaagacggcaccgggaaactctgcttccccattgtttccatctgatcagctgtggtgtgaggacttctcagacaaaggcaaggcctcgtgcccctgcccagcccattcatggagccctgggccttcttggcttccatagatcctaagctcttgactgtagtttagccagacttgttttgctatcttataagcagttcagaattagggaatgctggttttgaagagcaaaggacaggtagtctagagagggtcgtctggcctgcttgctgggtctttgtaacccagcacttcctcttgccctcctggctttatgtttatggggagaggactcaatagctccaccccttctggcaccagatggggcttggttagtttgcaataagcaccttgcagaggttaaagccagcgggtccctagtcttaggcccagcctgcttgtgtgggctctggcctggcctggtggctggcccagggggcagcagtgcttagagcttctgcagggcttctcttgtttacacagctgcatcagacaatgccatttctccccaccacggaaccttccatctaagatttcttccagggaatgccagcaatcaggcagcacccagctgtgggggcagtggggtgggggagacccacattgatgactttttttttttcttttaatgaagaaacaccaaagaaagctgtggaaaggacctgccccacatgaaaaggataagccaagatggctgtaaacacagagcatttgagctgccactcttggagcacattgatttttcaaaagccagctctgtcaggaaaggaggtgctgttatgagcagctcttccagtgggcaaagaggacgcccataatttcttccattgctagctcatctgtgggaccaatttggtgtaagcaacctgtggcctgcacttgtggcctcgaaggaagcacaaaccctccatccacttcccatttcctctgcccttttccacctcccccttccatcccaccagctgccagtggctcccagaaagccttattgagccccttgttgacacttggggctgcggaggcctctccctactggtctggcctttcctgagaggcaggtcttccgtcctcagagcctttctggaacaaggagaatgcctgtgcaggtggacacacaggcctggcctgtcgctctcacttgtcttccagcggggagcttcacgttgccgagtggaagaaccatgacctccacttgcttccaaggtgctagggaagtttcagggtacgctggttcccctctccagctggaggccgagtttctggggactgcagatttttctactctgtgatcgattcaatgcccgatgcttctgtttcattcccgaccctttctactatgcattttccttttatcaggtgtataaagttaaatactgtgtatttatcactaaaaagtacatgaacttaagagacaactaagcctttcgtgtttttccacaggtgtttaagcttctctgtacagttgaaataaacagacagcaaaatggta

SEQ ID NO: 430940 - DNA, 4760 bp, Homo sapiens
ggcggaggagaggagcgcgcggccgcgcagagcaagctgagccgagccgagccgagctgggggcgcagagcgcgggaggcggcggcggcgcggagcccaggtggctccgctgccggatgggagtgccccagtgtgctggatgaagctggcgcatgcaccatgtcatcatgtgtctctagccagcccagcagcaaccgggccgccccccaggatgagctggggggcaggggcagcagcagcagcgaaagccagaagccctgtgaggccctgcggggcctctcatccttgagcatccacctgggcatggagtccttcattgtggtcaccgagtgtgagccgggctgtgctgtggacctcggcttggcgcgggaccggcccctggaggccgatggccaagaggtcccccttgactcctccgggtcccaggcccggccccacctctccggtcgcaagctgtctctgcaagagcggtcccagggtgggctggcagccggtggcagcctggacatgaacggacgctgcatctgcccgtccctgccctactcacccgtcagctccccgcagtcctcgcctcggctgccccggcggccgacagtggagtctcaccacgtctccatcacgggtatgcaggactgtgtgcagctgaatcagtataccctgaaggatgaaattggaaagggctcctatggtgtcgtcaagttggcctacaatgaaaatgacaatacctactatgcaatgaaggtgctgtccaaaaagaagctgatccggcaggccggctttccacgtcgccctccaccccgaggcacccggccagctcctggaggctgcatccagcccaggggccccattgagcaggtgtaccaggaaattgccatcctcaagaagctggaccaccccaatgtggtgaagctggtggaggtcctggatgaccccaatgaggaccatctgtacatggtgttcgaactggtcaaccaagggcccgtgatggaagtgcccaccctcaaaccactctctgaagaccaggcccgtttctacttccaggatctgatcaaaggcatcgagtacttacactaccagaagatcatccaccgtgacatcaaaccttccaacctcctggtcggagaagatgggcacatcaagatcgctgactttggtgtgagcaatgaattcaagggcagtgacgcgctcctctccaacaccgtgggcacgcccgccttcatggcacccgagtcgctctctgagacccgcaagatcttctctgggaaggccttggatgtttgggccatgggtgtgacactatactgctttgtctttggccagtgcccattcatggacgagcggatcatgtgtttacacagtaagatcaagagtcaggccctggaatttccagaccagcccgacatagctgaggacttgaaggacctgatcacccgtatgctggacaagaaccccgagtcgaggatcgtggtgccggaaatcaagatcctggtgaagaccatgatacgtaaacgctcctttgggaacccattcgagggcagccggcgggaggaacgctcactgtcagcgcctggaaacttgctcacgaagcaaggcagcgaagacaacctccagggcaccgacccgccccccgtgggggaggaggaagtgctcttgtgagaggcagtccctgcgtggaaagttgctgggcccccgcccccggctcccccgcacgcatgcatccactgcggccggaggaggccatggagcccgagtagctgcctggatcgctcgacctcgcatgcgcgccgcgtcgcctctggggggctgctgcaccgcgtttccatagcagcatgtcctacggaaacccagcacgtgtgtagagcctcgatcgtcatctctggttatttgttttttcctttgttgttttaaaggggacaaaaaaaaaaaaaaaaggacttgactccatgacgtcgaccgtggccgctggctggctggacaggcgggtgtgaggagttgcagacccaaacccacgtgcattttgggacaattgctttttaaaacgtttttatgccaaaaatccttcattgtgattttcagaaccacgtcagatataccaagtgactgtgtgtggggtttgacaactgtggaaaggcgagcagaaaactccggcggtctgaggccatggaggtggttgctgcatttgagagggagtagggggctagatgtggctcctagtgcaaaccggaaaccatggcaccttccagagccgtggtctcaaggagtcagagcagggctggccctcagtagctgcagggagctttgatgcaacttatttgtaagaaggatttttaaattttttatgggtagaattgtagtcaggaaaacagaaagggcttgaaatttaataagtgctgctggaaggggattttccaagcctggaagggtattcagcagctgtggtggggaaacatttctcctgaaagactgaacgtgtttcttcatgacagctgctcaaagcaggtttctgagatagctgaccgagctctggtaaatctctttgtcaaattacgaaaacttcagggtgaaatcctatgcttccatgtacattacatggcttaagattaaacaaaaacatttttcaagtctctaactagagtgaactctagagcacagtagttcagaaactatttagagcttccaggatatatttcacagcttcaggcatgtgatcagttagagccgatgaaacctatgcccgcctgtatatatattagcagcttagctagttcataacctgtatattctaaagactgctaaggttttgttttcattttaaatcctagctgattgttgtggtcaatgaaatacccagtttctggagggccaggtgggaaatgctttcactggaccaacacacaaatgatcatcctgaggatctgagcttccctagactccacacaataaccttggggcacccttttagagaagactgttgaaacccacagcactcgttggggtatgaggaaaccagggcttggcacaggaagttcccctttgtagctaaaagtccagaaagaaagggttcatctttttgacttccaactgatattgggaagtttggttgaggttcaagtgtgactccttccagagccacaggtaggggagtgtgaagttgagggggaggaaagctggaaggactctgccttgggagattcccagctctgctttccagcgcttggtggaatctgggctggggaaagacggcaccgggaaactctgcttccccattgtttccatctgatcagctgtggtgtgaggacttctcagacaaaggcaaggcctcgtgcccctgcccagcccattcatggagccctgggccttcttggcttccatagatcctaagctcttgactgtagtttagccagacttgttttgctatcttataagcagttcagaattagggaatgctggttttgaagagcaaaggacaggtagtctagagagggtcgtctggcctgcttgctgggtctttgtaacccagcacttcctcttgccctcctggctttatgtttatggggagaggactcaatagctccaccccttctggcaccagatggggcttggttagtttgcaataagcaccttgcagaggttaaagccagcgggtccctagtcttaggcccagcctgcttgtgtgggctctggcctggcctggtggctggcccagggggcagcagtgcttagagcttctgcagggcttctcttgtttacacagctgcatcagacaatgccatttctccccaccacggaaccttccatctaagatttcttccagggaatgccagcaatcaggcagcacccagctgtgggggcagtggggtgggggagacccacattgatgactttttttttttcttttaatgaagaaacaccaaagaaagctgtggaaaggacctgccccacatgaaaaggataagccaagatggctgtaaacacagagcatttgagctgccactcttggagcacattgatttttcaaaagccagctctgtcaggaaaggaggtgctgttatgagcagctcttccagtgggcaaagaggacgcccataatttcttccattgctagctcatctgtgggaccaatttggtgtaagcaacctgtggcctgcacttgtggcctcgaaggaagcacaaaccctccatccacttcccatttcctctgcccttttccacctcccccttccatcccaccagctgccagtggctcccagaaagccttattgagccccttgttgacacttggggctgcggaggcctctccctactggtctggcctttcctgagaggcaggtcttccgtcctcagagcctttctggaacaaggagaatgcctgtgcaggtggacacacaggcctggcctgtcgctctcacttgtcttccagcggggagcttcacgttgccgagtggaagaaccatgacctccacttgcttccaaggtgctagggaagtttcagggtacgctggttcccctctccagctggaggccgagtttctggggactgcagatttttctactctgtgatcgattcaatgcccgatgcttctgtttcattcccgaccctttctactatgcattttccttttatcaggtgtataaagttaaatactgtgtatttatcactaaaaagtacatgaacttaagagacaactaagcctttcgtgtttttccacaggtgtttaagcttctctgtacagttgaaataaacagacagcaaaatggta

SEQ ID NO: 430941 - DNA, 4835 bp, Homo sapiens
ggcggaggagaggagcgcgcggccgcgcagagcaagctgagccgagccgagccgagctgggggcgcagagcgcgggaggcggcggcggcgcggagcccaggtggctccgctgccggatgggagtgccccagtgtgctggatgaagctggcgcatgcaccatgtcatcatgtgtctctagccagcccagcagcaaccgggccgccccccaggatgagctggggggcaggggcagcagcagcagcgaaagccagaagccctgtgaggccctgcggggcctctcatccttgagcatccacctgggcatggagtccttcattgtggtcaccgagtgtgagccgggctgtgctgtggacctcggcttggcgcgggaccggcccctggaggccgatggccaagaggtcccccttgactcctccgggtcccaggcccggccccacctctccggtcgcaagctgtctctgcaagagcggtcccagggtgggctggcagccggtggcagcctggacatgaacggacgctgcatctgcccgtccctgccctactcacccgtcagctccccgcagtcctcgcctcggctgccccggcggccgacagtggagtctcaccacgtctccatcacgggtatgcaggactgtgtgcagctgaatcagtataccctgaaggatgaaattggaaagggctcctatggtgtcgtcaagttggcctacaatgaaaatgacaatacctactatgcaatgaaggtgctgtccaaaaagaagctgatccggcaggccggctttccacgtcgccctccaccccgaggcacccggccagctcctggaggctgcatccagcccaggggccccattgagcaggtgtaccaggaaattgccatcctcaagaagctggaccaccccaatgtggtgaagctggtggaggtcctggatgaccccaatgaggaccatctgtacatggtgttcgaactggtcaaccaagggcccgtgatggaagtgcccaccctcaaaccactctctgaagaccaggcccgtttctacttccaggatctgatcaaaggcatcgagtacttacactaccagaagatcatccaccgtgacatcaaaccttccaacctcctggtcggagaagatgggcacatcaagatcgctgactttggtgtgagcaatgaattcaagggcagtgacgcgctcctctccaacaccgtgggcacgcccgccttcatggcacccgagtcgctctctgagacccgcaagatcttctctgggaaggccttggatgtttgggccatgggtgtgacactatactgctttgtctttggccagtgcccattcatggacgagcggatcatgtgtttacacagtaagatcaagagtcaggccctggaatttccagaccagcccgacatagctgaggacttgaaggacctgatcacccgtatgctggacaagaaccccgagtcgaggatcgtggtgccggaaatcaagctgcacccctgggtcacgaggcatggggcggagccgttgccgtcggaggatgagaactgcacgctggtcgaagtgactgaagaggaggtcgagaactcagtcaaacacattcccagcttggcaaccgtgatcctggtgaagaccatgatacgtaaacgctcctttgggaacccattcgagggcagccggcgggaggaacgctcactgtcagcgcctggaaacttgctcacgaagcaaggcagcgaagacaacctccagggcaccgacccgccccccgtgggggaggaggaagtgctcttgtgagaggcagtccctgcgtggaaagttgctgggcccccgcccccggctcccccgcacgcatgcatccactgcggccggaggaggccatggagcccgagtagctgcctggatcgctcgacctcgcatgcgcgccgcgtcgcctctggggggctgctgcaccgcgtttccatagcagcatgtcctacggaaacccagcacgtgtgtagagcctcgatcgtcatctctggttatttgttttttcctttgttgttttaaaggggacaaaaaaaaaaaaaaaaggacttgactccatgacgtcgaccgtggccgctggctggctggacaggcgggtgtgaggagttgcagacccaaacccacgtgcattttgggacaattgctttttaaaacgtttttatgccaaaaatccttcattgtgattttcagaaccacgtcagatataccaagtgactgtgtgtggggtttgacaactgtggaaaggcgagcagaaaactccggcggtctgaggccatggaggtggttgctgcatttgagagggagtagggggctagatgtggctcctagtgcaaaccggaaaccatggcaccttccagagccgtggtctcaaggagtcagagcagggctggccctcagtagctgcagggagctttgatgcaacttatttgtaagaaggatttttaaattttttatgggtagaattgtagtcaggaaaacagaaagggcttgaaatttaataagtgctgctggaaggggattttccaagcctggaagggtattcagcagctgtggtggggaaacatttctcctgaaagactgaacgtgtttcttcatgacagctgctcaaagcaggtttctgagatagctgaccgagctctggtaaatctctttgtcaaattacgaaaacttcagggtgaaatcctatgcttccatgtacattacatggcttaagattaaacaaaaacatttttcaagtctctaactagagtgaactctagagcacagtagttcagaaactatttagagcttccaggatatatttcacagcttcaggcatgtgatcagttagagccgatgaaacctatgcccgcctgtatatatattagcagcttagctagttcataacctgtatattctaaagactgctaaggttttgttttcattttaaatcctagctgattgttgtggtcaatgaaatacccagtttctggagggccaggtgggaaatgctttcactggaccaacacacaaatgatcatcctgaggatctgagcttccctagactccacacaataaccttggggcacccttttagagaagactgttgaaacccacagcactcgttggggtatgaggaaaccagggcttggcacaggaagttcccctttgtagctaaaagtccagaaagaaagggttcatctttttgacttccaactgatattgggaagtttggttgaggttcaagtgtgactccttccagagccacaggtaggggagtgtgaagttgagggggaggaaagctggaaggactctgccttgggagattcccagctctgctttccagcgcttggtggaatctgggctggggaaagacggcaccgggaaactctgcttccccattgtttccatctgatcagctgtggtgtgaggacttctcagacaaaggcaaggcctcgtgcccctgcccagcccattcatggagccctgggccttcttggcttccatagatcctaagctcttgactgtagtttagccagacttgttttgctatcttataagcagttcagaattagggaatgctggttttgaagagcaaaggacaggtagtctagagagggtcgtctggcctgcttgctgggtctttgtaacccagcacttcctcttgccctcctggctttatgtttatggggagaggactcaatagctccaccccttctggcaccagatggggcttggttagtttgcaataagcaccttgcagaggttaaagccagcgggtccctagtcttaggcccagcctgcttgtgtgggctctggcctggcctggtggctggcccagggggcagcagtgcttagagcttctgcagggcttctcttgtttacacagctgcatcagacaatgccatttctccccaccacggaaccttccatctaagatttcttccagggaatgccagcaatcaggcagcacccagctgtgggggcagtggggtgggggagacccacattgatgactttttttttttcttttaatgaagaaacaccaaagaaagctgtggaaaggacctgccccacatgaaaaggataagccaagatggctgtaaacacagagcatttgagctgccactcttggagcacattgatttttcgcaaagaggacgcccataatttcttccattgctagctcatctgtgggaccaatttggtgtaagcaacctgtggcctgcacttgtggcctcgaaggaagcacaaaccctccatccacttcccatttcctctgcccttttccacctcccccttccatcccaccagctgccagtggctcccagaaagccttattgagccccttgttgacacttggggctgcggaggcctctccctactggtctggcctttcctgagaggcaggtcttccgtcctcagagcctttctggaacaaggagaatgcctgtgcaggtggacacacaggcctggcctgtcgctctcacttgtcttccagcggggagcttcacgttgccgagtggaagaaccatgacctccacttgcttccaaggtgctagggaagtttcagggtacgctggttcccctctccagctggaggccgagtttctggggactgcagatttttctactctgtgatcgattcaatgcccgatgcttctgtttcattcccgaccctttctactatgcattttccttttatcaggtgtataaagttaaatactgtgtatttatcactaaaaagtacatgaacttaagagacaactaagcctttcgtgtttttccacaggtgtttaagcttctctgtacagttgaaataaacagacagcaaaatggta

SEQ ID NO: 430942 - DNA, 4086 bp, Homo sapiens
gtcacgaacttcggctaggtacgaggctgggtgttatgaaaatgacaatacctactatgcaatgaaggtgctgtccaaaaagaagctgatccggcaggccggctttccacgtcgccctccaccccgaggcacccggccagctcctggaggctgcatccagcccaggggccccattgagcaggtgtaccaggaaattgccatcctcaagaagctggaccaccccaatgtggtgaagctggtggaggtcctggatgaccccaatgaggaccatctgtacatggtgttcgaactggtcaaccaagggcccgtgatggaagtgcccaccctcaaaccactctctgaagaccaggcccgtttctacttccaggatctgatcaaaggcatcgagtacttacactaccagaagatcatccaccgtgacatcaaaccttccaacctcctggtcggagaagatgggcacatcaagatcgctgactttggtgtgagcaatgaattcaagggcagtgacgcgctcctctccaacaccgtgggcacgcccgccttcatggcacccgagtcgctctctgagacccgcaagatcttctctgggaaggccttggatgtttgggccatgggtgtgacactatactgctttgtctttggccagtgcccattcatggacgagcggatcatgtgtttacacagtaagatcaagagtcaggccctggaatttccagaccagcccgacatagctgaggacttgaaggacctgatcacccgtatgctggacaagaaccccgagtcgaggatcgtggtgccggaaatcaagatcctggtgaagaccatgatacgtaaacgctcctttgggaacccattcgagggcagccggcgggaggaacgctcactgtcagcgcctggaaacttgctcacgaagcaaggcagcgaagacaacctccagggcaccgacccgccccccgtgggggaggaggaagtgctcttgtgagaggcagtccctgcgtggaaagttgctgggcccccgcccccggctcccccgcacgcatgcatccactgcggccggaggaggccatggagcccgagtagctgcctggatcgctcgacctcgcatgcgcgccgcgtcgcctctggggggctgctgcaccgcgtttccatagcagcatgtcctacggaaacccagcacgtgtgtagagcctcgatcgtcatctctggttatttgttttttcctttgttgttttaaaggggacaaaaaaaaaaaaaaaaggacttgactccatgacgtcgaccgtggccgctggctggctggacaggcgggtgtgaggagttgcagacccaaacccacgtgcattttgggacaattgctttttaaaacgtttttatgccaaaaatccttcattgtgattttcagaaccacgtcagatataccaagtgactgtgtgtggggtttgacaactgtggaaaggcgagcagaaaactccggcggtctgaggccatggaggtggttgctgcatttgagagggagtagggggctagatgtggctcctagtgcaaaccggaaaccatggcaccttccagagccgtggtctcaaggagtcagagcagggctggccctcagtagctgcagggagctttgatgcaacttatttgtaagaaggatttttaaattttttatgggtagaattgtagtcaggaaaacagaaagggcttgaaatttaataagtgctgctggaaggggattttccaagcctggaagggtattcagcagctgtggtggggaaacatttctcctgaaagactgaacgtgtttcttcatgacagctgctcaaagcaggtttctgagatagctgaccgagctctggtaaatctctttgtcaaattacgaaaacttcagggtgaaatcctatgcttccatgtacattacatggcttaagattaaacaaaaacatttttcaagtctctaactagagtgaactctagagcacagtagttcagaaactatttagagcttccaggatatatttcacagcttcaggcatgtgatcagttagagccgatgaaacctatgcccgcctgtatatatattagcagcttagctagttcataacctgtatattctaaagactgctaaggttttgttttcattttaaatcctagctgattgttgtggtcaatgaaatacccagtttctggagggccaggtgggaaatgctttcactggaccaacacacaaatgatcatcctgaggatctgagcttccctagactccacacaataaccttggggcacccttttagagaagactgttgaaacccacagcactcgttggggtatgaggaaaccagggcttggcacaggaagttcccctttgtagctaaaagtccagaaagaaagggttcatctttttgacttccaactgatattgggaagtttggttgaggttcaagtgtgactccttccagagccacaggtaggggagtgtgaagttgagggggaggaaagctggaaggactctgccttgggagattcccagctctgctttccagcgcttggtggaatctgggctggggaaagacggcaccgggaaactctgcttccccattgtttccatctgatcagctgtggtgtgaggacttctcagacaaaggcaaggcctcgtgcccctgcccagcccattcatggagccctgggccttcttggcttccatagatcctaagctcttgactgtagtttagccagacttgttttgctatcttataagcagttcagaattagggaatgctggttttgaagagcaaaggacaggtagtctagagagggtcgtctggcctgcttgctgggtctttgtaacccagcacttcctcttgccctcctggctttatgtttatggggagaggactcaatagctccaccccttctggcaccagatggggcttggttagtttgcaataagcaccttgcagaggttaaagccagcgggtccctagtcttaggcccagcctgcttgtgtgggctctggcctggcctggtggctggcccagggggcagcagtgcttagagcttctgcagggcttctcttgtttacacagctgcatcagacaatgccatttctccccaccacggaaccttccatctaagatttcttccagggaatgccagcaatcaggcagcacccagctgtgggggcagtggggtgggggagacccacattgatgactttttttttttcttttaatgaagaaacaccaaagaaagctgtggaaaggacctgccccacatgaaaaggataagccaagatggctgtaaacacagagcatttgagctgccactcttggagcacattgatttttcaaaagccagctctgtcaggaaaggaggtgctgttatgagcagctcttccagtgggcaaagaggacgcccataatttcttccattgctagctcatctgtgggaccaatttggtgtaagcaacctgtggcctgcacttgtggcctcgaaggaagcacaaaccctccatccacttcccatttcctctgcccttttccacctcccccttccatcccaccagctgccagtggctcccagaaagccttattgagccccttgttgacacttggggctgcggaggcctctccctactggtctggcctttcctgagaggcaggtcttccgtcctcagagcctttctggaacaaggagaatgcctgtgcaggtggacacacaggcctggcctgtcgctctcacttgtcttccagcggggagcttcacgttgccgagtggaagaaccatgacctccacttgcttccaaggtgctagggaagtttcagggtacgctggttcccctctccagctggaggccgagtttctggggactgcagatttttctactctgtgatcgattcaatgcccgatgcttctgtttcattcccgaccctttctactatgcattttccttttatcaggtgtataaagttaaatactgtgtatttatcactaaaaagtacatgaacttaagagacaactaagcctttcgtgtttttccacaggtgtttaagcttctctgtacagttgaaataaacagacagcaaaatggta

SEQ ID NO: 430943 - DNA, 4230 bp, Homo sapiens
ggcggaggagaggagcgcgcggccgcgcagagcaagctgagccgagccgagccgagctgggggcgcagagcgcgggaggcggcggcggcgcggagcccaggactgtgtgcagctgaatcagtataccctgaaggatgaaattggaaagggctcctatggtgtcgtcaagttggcctacaatgaaaatgacaatacctactatgcaatgaaggtgctgtccaaaaagaagctgatccggcaggccggctttccacgtcgccctccaccccgaggcacccggccagctcctggaggctgcatccagcccaggggccccattgagcaggtgtaccaggaaattgccatcctcaagaagctggaccaccccaatgtggtgaagctggtggaggtcctggatgaccccaatgaggaccatctgtacatggtgttcgaactggtcaaccaagggcccgtgatggaagtgcccaccctcaaaccactctctgaagaccaggcccgtttctacttccaggatctgatcaaaggcatcgagtacttacactaccagaagatcatccaccgtgacatcaaaccttccaacctcctggtcggagaagatgggcacatcaagatcgctgactttggtgtgagcaatgaattcaagggcagtgacgcgctcctctccaacaccgtgggcacgcccgccttcatggcacccgagtcgctctctgagacccgcaagatcttctctgggaaggccttggatgtttgggccatgggtgtgacactatactgctttgtctttggccagtgcccattcatggacgagcggatcatgtgtttacacagtaagatcaagagtcaggccctggaatttccagaccagcccgacatagctgaggacttgaaggacctgatcacccgtatgctggacaagaaccccgagtcgaggatcgtggtgccggaaatcaagatcctggtgaagaccatgatacgtaaacgctcctttgggaacccattcgagggcagccggcgggaggaacgctcactgtcagcgcctggaaacttgctcacgaagcaaggcagcgaagacaacctccagggcaccgacccgccccccgtgggggaggaggaagtgctcttgtgagaggcagtccctgcgtggaaagttgctgggcccccgcccccggctcccccgcacgcatgcatccactgcggccggaggaggccatggagcccgagtagctgcctggatcgctcgacctcgcatgcgcgccgcgtcgcctctggggggctgctgcaccgcgtttccatagcagcatgtcctacggaaacccagcacgtgtgtagagcctcgatcgtcatctctggttatttgttttttcctttgttgttttaaaggggacaaaaaaaaaaaaaaaaggacttgactccatgacgtcgaccgtggccgctggctggctggacaggcgggtgtgaggagttgcagacccaaacccacgtgcattttgggacaattgctttttaaaacgtttttatgccaaaaatccttcattgtgattttcagaaccacgtcagatataccaagtgactgtgtgtggggtttgacaactgtggaaaggcgagcagaaaactccggcggtctgaggccatggaggtggttgctgcatttgagagggagtagggggctagatgtggctcctagtgcaaaccggaaaccatggcaccttccagagccgtggtctcaaggagtcagagcagggctggccctcagtagctgcagggagctttgatgcaacttatttgtaagaaggatttttaaattttttatgggtagaattgtagtcaggaaaacagaaagggcttgaaatttaataagtgctgctggaaggggattttccaagcctggaagggtattcagcagctgtggtggggaaacatttctcctgaaagactgaacgtgtttcttcatgacagctgctcaaagcaggtttctgagatagctgaccgagctctggtaaatctctttgtcaaattacgaaaacttcagggtgaaatcctatgcttccatgtacattacatggcttaagattaaacaaaaacatttttcaagtctctaactagagtgaactctagagcacagtagttcagaaactatttagagcttccaggatatatttcacagcttcaggcatgtgatcagttagagccgatgaaacctatgcccgcctgtatatatattagcagcttagctagttcataacctgtatattctaaagactgctaaggttttgttttcattttaaatcctagctgattgttgtggtcaatgaaatacccagtttctggagggccaggtgggaaatgctttcactggaccaacacacaaatgatcatcctgaggatctgagcttccctagactccacacaataaccttggggcacccttttagagaagactgttgaaacccacagcactcgttggggtatgaggaaaccagggcttggcacaggaagttcccctttgtagctaaaagtccagaaagaaagggttcatctttttgacttccaactgatattgggaagtttggttgaggttcaagtgtgactccttccagagccacaggtaggggagtgtgaagttgagggggaggaaagctggaaggactctgccttgggagattcccagctctgctttccagcgcttggtggaatctgggctggggaaagacggcaccgggaaactctgcttccccattgtttccatctgatcagctgtggtgtgaggacttctcagacaaaggcaaggcctcgtgcccctgcccagcccattcatggagccctgggccttcttggcttccatagatcctaagctcttgactgtagtttagccagacttgttttgctatcttataagcagttcagaattagggaatgctggttttgaagagcaaaggacaggtagtctagagagggtcgtctggcctgcttgctgggtctttgtaacccagcacttcctcttgccctcctggctttatgtttatggggagaggactcaatagctccaccccttctggcaccagatggggcttggttagtttgcaataagcaccttgcagaggttaaagccagcgggtccctagtcttaggcccagcctgcttgtgtgggctctggcctggcctggtggctggcccagggggcagcagtgcttagagcttctgcagggcttctcttgtttacacagctgcatcagacaatgccatttctccccaccacggaaccttccatctaagatttcttccagggaatgccagcaatcaggcagcacccagctgtgggggcagtggggtgggggagacccacattgatgactttttttttttcttttaatgaagaaacaccaaagaaagctgtggaaaggacctgccccacatgaaaaggataagccaagatggctgtaaacacagagcatttgagctgccactcttggagcacattgatttttcaaaagccagctctgtcaggaaaggaggtgctgttatgagcagctcttccagtgggcaaagaggacgcccataatttcttccattgctagctcatctgtgggaccaatttggtgtaagcaacctgtggcctgcacttgtggcctcgaaggaagcacaaaccctccatccacttcccatttcctctgcccttttccacctcccccttccatcccaccagctgccagtggctcccagaaagccttattgagccccttgttgacacttggggctgcggaggcctctccctactggtctggcctttcctgagaggcaggtcttccgtcctcagagcctttctggaacaaggagaatgcctgtgcaggtggacacacaggcctggcctgtcgctctcacttgtcttccagcggggagcttcacgttgccgagtggaagaaccatgacctccacttgcttccaaggtgctagggaagtttcagggtacgctggttcccctctccagctggaggccgagtttctggggactgcagatttttctactctgtgatcgattcaatgcccgatgcttctgtttcattcccgaccctttctactatgcattttccttttatcaggtgtataaagttaaatactgtgtatttatcactaaaaagtacatgaacttaagagacaactaagcctttcgtgtttttccacaggtgtttaagcttctctgtacagttgaaataaacagacagcaaaatggta

SEQ ID NO: 430944 - DNA, 4949 bp, Homo sapiens
ggcggaggagaggagcgcgcggccgcgcagagcaagctgagccgagccgagccgagctgggggcgcagagcgcgggaggcggcggcggcgcggagcccaggtggctccgctgccggatgggagtgccccagtgtgctggatgaagctggcgcatgcaccatgtcatcatgtgtctctagccagcccagcagcaaccgggccgccccccaggatgagctggggggcaggggcagcagcagcagcgaaagccagaagccctgtgaggccctgcggggcctctcatccttgagcatccacctgggcatggagtccttcattgtggtcaccgagtgtgagccgggctgtgctgtggacctcggcttggcgcgggaccggcccctggaggccgatggccaagaggtcccccttgactcctccgggtcccaggcccggccccacctctccggtcgcaagctgtctctgcaagagcggtcccagggtgggctggcagccggtggcagcctggacatgaacggacgctgcatctgcccgtccctgccctactcacccgtcagctccccgcagtcctcgcctcggctgccccggcggccgacagtggagtctcaccacgtctccatcacgggtatgcaggactgtgtgcagctgaatcagtataccctgaaggatgaaattggaaagggctcctatggtgtcgtcaagttggcctacaatgaaaatgacaatacctactatgcaatgaaggtgctgtccaaaaagaagctgatccggcaggccggctttccacgtcgccctccaccccgaggcacccggccagctcctggaggctgcatccagcccaggggccccattgagcaggtgtaccaggaaattgccatcctcaagaagctggaccaccccaatgtggtgaagctggtggaggtcctggatgaccccaatgaggaccatctgtacatggtgttcgaactggtcaaccaagggcccgtgatggaagtgcccaccctcaaaccactctctgaagaccaggcccgtttctacttccaggatctgatcaaaggcatcgagtacttacactaccagaagatcatccaccgtgacatcaaaccttccaacctcctggtcggagaagatgggcacatcaagatcgctgactttggtgtgagcaatgaattcaagggcagtgacgcgctcctctccaacaccgtgggcacgcccgccttcatggcacccgagtcgctctctgagacccgcaagatcttctctgggaaggccttggatgtttgggccatgggtgtgacactatactgctttgtctttggccagtgcccattcatggacgagcggatcatgtgtttacacagtaagatcaagagtcaggccctggaatttccagaccagcccgacatagctgaggacttgaaggacctgatcacccgtatgctggacaagaaccccgagtcgaggatcgtggtgccggaaatcaagctgcacccctgggtcacgaggcatggggcggagccgttgccgtcggaggatgagaactgcacgctggtcgaagtgactgaagaggaggtcgagaactcagtcaaacacattcccagcttggcaaccgtgatcctggtgaagaccatgatacgtaaacgctcctttgggaacccattcgagggcagccggcgggaggaacgctcactgtcagcgcctggaaacttgctcaccaaaaaaccaaccagggaatgtgagtccctgtctgagctcaaggaagcaaggcagcgaagacaacctccagggcaccgacccgccccccgtgggggaggaggaagtgctcttgtgagaggcagtccctgcgtggaaagttgctgggcccccgcccccggctcccccgcacgcatgcatccactgcggccggaggaggccatggagcccgagtagctgcctggatcgctcgacctcgcatgcgcgccgcgtcgcctctggggggctgctgcaccgcgtttccatagcagcatgtcctacggaaacccagcacgtgtgtttccatagcagcatgtctgcaacccagacgcggtgtgtagagcctcgatcgtcatctctggttatttgttttttcctttgttgttttaaaggggacaaaaaaaaaaaaaaaaggacttgactccatgacgtcgaccgtggccgctggctggctggacaggcgggtgtgaggagttgcagacccaaacccacgtgcattttgggacaattgctttttaaaacgtttttatgccaaaaatccttcattgtgattttcagaaccacgtcagatataccaagtgactgtgtgtggggtttgacaactgtggaaaggcgagcagaaaactccggcggtctgaggccatggaggtggttgctgcatttgagagggagtagggggctagatgtggctcctagtgcaaaccggaaaccatggcaccttccagagccgtggtctcaaggagtcagagcaggggagctttgatgcaacttatttgtaagaaggatttttaaattttttatgggtagaattgtagtcaggaaaacagaaagggcttgaaatttaataagtgctgctggaaggggattttccaagcctggaagggtattcagcagctgtggtggggaaacatttctcctgaaagactgaacgtgtttcttcatgacagctgctcaaagcaggtttctgagatagctgaccgagctctggtaaatctctttgtcaaattacgaaaacttcagggtgaaatcctatgcttccatgtacattacatggcttaagattaaacaaaaacatttttcaagtctctaactagagtgaactctagagcacagtagttcagaaactatttagagcttccaggatatatttcacagcttcaggcatgtgatcagttagagccgatgaaacctatgcccgcctgtatatatattagcagcttagctagttcataacctgtatattctaaagactgctaaggttttgttttcattttaaatcctagctgattgttgtggtcaatgaaatacccagtttctggagggccaggtgggaaatgctttcactggaccaacacacaaatgatcatcctgaggatctgagcttccctagactccacacaataaccttggggcacccttttagagaagactgttgaaacccacagcactcgttggggtatgaggaaaccagggcttggcacaggaagttcccctttgtagctaaaagtccagaaagaaagggttcatctttttgacttccaactgatattgggaagtttggttgaggttcaagtgtgactccttccagagccacaggtaggggagtgtgaagttgagggggaggaaagctggaaggactctgccttgggagattcccagctctgctttccagcgcttggtggaatctgggctggggaaagacggcaccgggaaactctgcttccccattgtttccatctgatcagctgtggtgtgaggacttctcagacaaaggcaaggcctcgtgcccctgcccagcccattcatggagccctgggccttcttggcttccatagatcctaagctcttgactgtagtttagccagacttgttttgctatcttataagcagttcagaattagggaatgctggttttgaagagcaaaggacaggtagtctagagagggtcgtctggcctgcttgctgggtctttgtaacccagcacttcctcttgccctcctggctttatgtttatggggagaggactcaatagctccaccccttctggcaccagatggggcttggttagtttgcaataagcaccttgcagaggttaaagccagcgggtccctagtcttaggcccagcctgcttgtgtgggctctggcctggcctggtggctggcccagggggcagcagtgcttagagcttctgcagggcttctcttgtttacacagctgcatcagacaatgccatttctccccaccacggaaccttccatctaagatttcttccagggaatgccagcaatcaggcagcacccagctgtgggggcagtggggtgggggagacccacattgatgactttttttttttcttttaatgaagaaacaccaaagaaagctgtggaaaggacctgccccacatgaaaaggataagccaagatggctgtaaacacagagcatttgagctgccactcttggagcacattgatttttcaaaagccagctctgtcaggaaaggaggtgctgttatgagcagctcttccagtgggcaaagaggacgcccataatttcttccattgctagctcatctgtgggaccaatttggtgtaagcaacctgtggcctgcacttgtggcctcgaaggaagcacaaaccctccatccacttcccatttcctctgcccttttccacctcccccttccatcccaccagctgccagtggctcccagaaagccttattgagccccttgttgacacttggggctgcggaggcctctccctactggtctggcctttcctgagaggcaggtcttccgtcctcagagcctttctggaacaaggagaatgcctgtgcaggtggacacacaggcctggcctgtcgctctcacttgtcttccagcggggagcttcacgttgccgagtggaagaaccatgacctccacttgcttccaaggtgctagggaagtttcagggtacgctggttcccctctccagctggaggccgagtttctggggactgcagatttttctactctgtgatcgattcaatgcccgatgcttctgtttcattcccgaccctttctactatgcattttccttttatcaggtgtataaagttaaatactgtgtatttatcactaaaaagtacatgaacttaagagacaactaagcctttcgtgtttttccacaggtgtttaagcttctctgtacagttgaaataaacagacagcaaaatggta

SEQ ID NO: 430945 - DNA, 4814 bp, Homo sapiens
ggcggaggagaggagcgcgcggccgcgcagagcaagctgagccgagccgagccgagctgggggcgcagagcgcgggaggcggcggcggcgcggagcccaggtggctccgctgccggatgggagtgccccagtgtgctggatgaagctggcgcatgcaccatgtcatcatgtgtctctagccagcccagcagcaaccgggccgccccccaggatgagctggggggcaggggcagcagcagcagcgaaagccagaagccctgtgaggccctgcggggcctctcatccttgagcatccacctgggcatggagtccttcattgtggtcaccgagtgtgagccgggctgtgctgtggacctcggcttggcgcgggaccggcccctggaggccgatggccaagaggtcccccttgactcctccgggtcccaggcccggccccacctctccggtcgcaagctgtctctgcaagagcggtcccagggtgggctggcagccggtggcagcctggacatgaacggacgctgcatctgcccgtccctgccctactcacccgtcagctccccgcagtcctcgcctcggctgccccggcggccgacagtggagtctcaccacgtctccatcacgggtatgcaggactgtgtgcagctgaatcagtataccctgaaggatgaaattggaaagggctcctatggtgtcgtcaagttggcctacaatgaaaatgacaatacctactatgcaatgaaggtgctgtccaaaaagaagctgatccggcaggccggctttccacgtcgccctccaccccgaggcacccggccagctcctggaggctgcatccagcccaggggccccattgagcaggtgtaccaggaaattgccatcctcaagaagctggaccaccccaatgtggtgaagctggtggaggtcctggatgaccccaatgaggaccatctgtacatggtgttcgaactggtcaaccaagggcccgtgatggaagtgcccaccctcaaaccactctctgaagaccaggcccgtttctacttccaggatctgatcaaaggcatcgagtacttacactaccagaagatcatccaccgtgacatcaaaccttccaacctcctggtcggagaagatgggcacatcaagatcgctgactttggtgtgagcaatgaattcaagggcagtgacgcgctcctctccaacaccgtgggcacgcccgccttcatggcacccgagtcgctctctgagacccgcaagatcttctctgggaaggccttggatgtttgggccatgggtgtgacactatactgctttgtctttggccagtgcccattcatggacgagcggatcatgtgtttacacagtaagatcaagagtcaggccctggaatttccagaccagcccgacatagctgaggacttgaaggacctgatcacccgtatgctggacaagaaccccgagtcgaggatcgtggtgccggaaatcaagctgcacccctgggtcacgaggcatggggcggagccgttgccgtcggaggatgagaactgcacgctggtcgaagtgactgaagaggaggtcgagaactcagtcaaacacattcccagcttggcaaccgtgatcctggtgaagaccatgatacgtaaacgctcctttgggaacccattcgagggcagccggcgggaggaacgctcactgtcagcgcctggaaacttgctcacgaagcaaggcagcgaagacaacctccagggcaccgacccgccccccgtgggggaggaggaagtgctcttgtgagaggcagtccctgcgtggaaagttgctgggcccccgcccccggctcccccgcacgcatgcatccactgcggccggaggaggccatggagcccgagtagctgcctggatcgctcgacctcgcatgcgcgccgcgtcgcctctggggggctgctgcaccgcgtttccatagcagcatgtcctacggaaacccagcacgtgtgtagagcctcgatcgtcatctctggttatttgttttttcctttgttgttttaaaggggacaaaaaaaaaaaaaaaaggacttgactccatgacgtcgaccgtggccgctggctggctggacaggcgggtgtgaggagttgcagacccaaacccacgtgcattttgggacaattgctttttaaaacgtttttatgccaaaaatccttcattgtgattttcagaaccacgtcagatataccaagtgactgtgtgtggggtttgacaactgtggaaaggcgagcagaaaactccggcggtctgaggccatggaggtggttgctgcatttgagagggagtagggggctagatgtggctcctagtgcaaaccggaaaccatggcaccttccagagccgtggtctcaaggagtcagagcagggctggccctcagtagctgcagggagctttgatgcaacttatttgtaagaaggatttttaaattttttatgggtagaattgtagtcaggaaaacagaaagggcttgaaatttaataagtgctgctggaaggggattttccaagcctggaagggtattcagcagctgtggtggggaaacatttctcctgaaagactgaacgtgtttcttcatgacagctgctcaaagcaggtttctgagatagctgaccgagctctggtaaatctctttgtcaaattacgaaaacttcagggtgaaatcctatgcttccatgtacattacatggcttaagattaaacaaaaacatttttcaagtctctaactagagtgaactctagagcacagtagttcagaaactatttagagcttccaggatatatttcacagcttcaggcatgtgatcagttagagccgatgaaacctatgcccgcctgtatatatattagcagcttagctagttcataacctgtatattctaaagactgctaaggttttgttttcattttaaatcctagctgattgttgtggtcaatgaaatacccagtttctggagggccaggtgggaaatgctttcactggaccaacacacaaatgatcatcctgaggatctgagcttccctagactccacacaataaccttggggcacccttttagagaagactgttgaaacccacagcactcgttggggtatgaggaaaccagggcttggcacaggaagttcccctttgtagctaaaagtccagaaagaaagggttcatctttttgacttccaactgatattgggaagtttggttgaggttcaagtgtgactccttccagagccacaggtaggggagtgtgaagttgagggggaggaaagctggaaggactctgccttgggagattcccagctctgctttccagcgcttggtggaatctgggctggggaaagacggcaccgggaaactctgcttccccattgtttccatctgatcagctgtggtgtgaggacttctcagacaaaggcaaggcctcgtgcccctgcccagcccattcatggagccctgggccttcttggcttccatagatcctaagctcttgactgtagtttagccagacttgttttgctatcttataagcagttcagaattagggaatgctggttttgaagagcaaaggacaggtagtctagagagggtcgtctggcctgcttgctgggtctttgtaacccagcacttcctcttgccctcctggctttatgtttatggggagaggactcaatagctccaccccttctggcaccagatggggcttggttagtttgcaataagcaccttgcagaggttaaagccagcgggtccctagtcttaggcccagcctgcttgtgtgggctctggcctggcctggtggctggcccagggggcagcagtgcttagagcttctgcagggcttctcttgtttacacagctgcatcagacaatgccatttctccccaccacggaaccttccatctaagatttcttccagggaatgccagcaatcaggcagcacccagctgtgggggcagtggggtgggggagacccacattgatgactttttttttttcttttaatgaagaaacaccaaagaaagctgtggaaaggacctgccccacatgaaaaggataagccaagatggctgtaaacacagagcatttgagctgccactcttggagcacattgatttttcaaaagccagctctgtcaggaaaggaggtgctgttatgagcagctcttccagtgggcaaagaggacgcccataatttcttccattgctagctcatctgtgggaccaatttggtgtaagcaacctgtggcctgcacttgtggcctcgaaggaagcacaaaccctccatccacttcccatttcctctgcccttttccacctcccccttccatcccaccagctgccagtggctcccagaaagccttattgagccccttgttgacacttggggctgcggaggcctctccctactggtctggcctttcctgagaggcaggtcttccgtcctcagagcctttctggaacaaggagaatgcctgtgcaggtggacacacaggcctggcctgtcgctctcacttgtcttccagcggggagcttcacgttgccgagtggaagaaccatgacctccacttgcttccaaggtgctagggaagtttcagggtacgctggttcccctctccagctggaggccgagtttctggggactgcagatttttctactctgtgatcgattcaatgcccgatgcttctgtttcattcccgaccctttctactatgcattttccttttatcaggtgtataaagttaaatactgtgtatttatcactaaaaagtacatgaacttaagagaca

SEQ ID NO: 430946 - DNA, 4349 bp, Homo sapiens
ggcggaggagaggagcgcgcggccgcgcagagcaagctgagccgagccgagccgagctgggggcgcagagcgcgggaggcggcggcggcgcggagcccaggtggctccgctgccggatgggagtgccccagtgtgctggatgaagctggcgcatgcaccatgtcatcatgtgtctctagccagcccagcagcaaccgggccgccccccaggatgagctggggggcaggggcagcagcagcagcgaaagccagaagccctgtgaggccctgcggggcctctcatccttgagcatccacctgggcatggagtccttcattgtggtcaccgagtgtgagccgggctgtgctgtggacctcggcttggcgcgggaccggcccctggaggccgatggccaagaggtcccccttgactcctccgggtcccaggcccggccccacctctccggtcgcaagctgtctctgcaagagcggtcccagggtgggctggcagccggtggcagcctggacatgaacggacgctgcatctgcccgtccctgccctactcacccgtcagctccccgcagtcctcgcctcggctgccccggcggccgacagtggagtctcaccacgtctccatcacgggtatgcaggatctgatcaaaggcatcgagtacttacactaccagaagatcatccaccgtgacatcaaaccttccaacctcctggtcggagaagatgggcacatcaagatcgctgactttggtgtgagcaatgaattcaagggcagtgacgcgctcctctccaacaccgtgggcacgcccgccttcatggcacccgagtcgctctctgagacccgcaagatcttctctgggaaggccttggatgtttgggccatgggtgtgacactatactgctttgtctttggccagtgcccattcatggacgagcggatcatgtgtttacacagtaagatcaagagtcaggccctggaatttccagaccagcccgacatagctgaggacttgaaggacctgatcacccgtatgctggacaagaaccccgagtcgaggatcgtggtgccggaaatcaagatcctggtgaagaccatgatacgtaaacgctcctttgggaacccattcgagggcagccggcgggaggaacgctcactgtcagcgcctggaaacttgctcacgaagcaaggcagcgaagacaacctccagggcaccgacccgccccccgtgggggaggaggaagtgctcttgtgagaggcagtccctgcgtggaaagttgctgggcccccgcccccggctcccccgcacgcatgcatccactgcggccggaggaggccatggagcccgagtagctgcctggatcgctcgacctcgcatgcgcgccgcgtcgcctctggggggctgctgcaccgcgtttccatagcagcatgtcctacggaaacccagcacgtgtgtagagcctcgatcgtcatctctggttatttgttttttcctttgttgttttaaaggggacaaaaaaaaaaaaaaaaggacttgactccatgacgtcgaccgtggccgctggctggctggacaggcgggtgtgaggagttgcagacccaaacccacgtgcattttgggacaattgctttttaaaacgtttttatgccaaaaatccttcattgtgattttcagaaccacgtcagatataccaagtgactgtgtgtggggtttgacaactgtggaaaggcgagcagaaaactccggcggtctgaggccatggaggtggttgctgcatttgagagggagtagggggctagatgtggctcctagtgcaaaccggaaaccatggcaccttccagagccgtggtctcaaggagtcagagcagggctggccctcagtagctgcagggagctttgatgcaacttatttgtaagaaggatttttaaattttttatgggtagaattgtagtcaggaaaacagaaagggcttgaaatttaataagtgctgctggaaggggattttccaagcctggaagggtattcagcagctgtggtggggaaacatttctcctgaaagactgaacgtgtttcttcatgacagctgctcaaagcaggtttctgagatagctgaccgagctctggtaaatctctttgtcaaattacgaaaacttcagggtgaaatcctatgcttccatgtacattacatggcttaagattaaacaaaaacatttttcaagtctctaactagagtgaactctagagcacagtagttcagaaactatttagagcttccaggatatatttcacagcttcaggcatgtgatcagttagagccgatgaaacctatgcccgcctgtatatatattagcagcttagctagttcataacctgtatattctaaagactgctaaggttttgttttcattttaaatcctagctgattgttgtggtcaatgaaatacccagtttctggagggccaggtgggaaatgctttcactggaccaacacacaaatgatcatcctgaggatctgagcttccctagactccacacaataaccttggggcacccttttagagaagactgttgaaacccacagcactcgttggggtatgaggaaaccagggcttggcacaggaagttcccctttgtagctaaaagtccagaaagaaagggttcatctttttgacttccaactgatattgggaagtttggttgaggttcaagtgtgactccttccagagccacaggtaggggagtgtgaagttgagggggaggaaagctggaaggactctgccttgggagattcccagctctgctttccagcgcttggtggaatctgggctggggaaagacggcaccgggaaactctgcttccccattgtttccatctgatcagctgtggtgtgaggacttctcagacaaaggcaaggcctcgtgcccctgcccagcccattcatggagccctgggccttcttggcttccatagatcctaagctcttgactgtagtttagccagacttgttttgctatcttataagcagttcagaattagggaatgctggttttgaagagcaaaggacaggtagtctagagagggtcgtctggcctgcttgctgggtctttgtaacccagcacttcctcttgccctcctggctttatgtttatggggagaggactcaatagctccaccccttctggcaccagatggggcttggttagtttgcaataagcaccttgcagaggttaaagccagcgggtccctagtcttaggcccagcctgcttgtgtgggctctggcctggcctggtggctggcccagggggcagcagtgcttagagcttctgcagggcttctcttgtttacacagctgcatcagacaatgccatttctccccaccacggaaccttccatctaagatttcttccagggaatgccagcaatcaggcagcacccagctgtgggggcagtggggtgggggagacccacattgatgactttttttttttcttttaatgaagaaacaccaaagaaagctgtggaaaggacctgccccacatgaaaaggataagccaagatggctgtaaacacagagcatttgagctgccactcttggagcacattgatttttcaaaagccagctctgtcaggaaaggaggtgctgttatgagcagctcttccagtgggcaaagaggacgcccataatttcttccattgctagctcatctgtgggaccaatttggtgtaagcaacctgtggcctgcacttgtggcctcgaaggaagcacaaaccctccatccacttcccatttcctctgcccttttccacctcccccttccatcccaccagctgccagtggctcccagaaagccttattgagccccttgttgacacttggggctgcggaggcctctccctactggtctggcctttcctgagaggcaggtcttccgtcctcagagcctttctggaacaaggagaatgcctgtgcaggtggacacacaggcctggcctgtcgctctcacttgtcttccagcggggagcttcacgttgccgagtggaagaaccatgacctccacttgcttccaaggtgctagggaagtttcagggtacgctggttcccctctccagctggaggccgagtttctggggactgcagatttttctactctgtgatcgattcaatgcccgatgcttctgtttcattcccgaccctttctactatgcattttccttttatcaggtgtataaagttaaatactgtgtatttatcactaaaaagtacatgaacttaagagacaactaagcctttcgtgtttttccacaggtgtttaagcttctctgtacagttgaaataaacagacagcaaaatggta

SEQ ID NO: 430947 - DNA, 4501 bp, Homo sapiens
ggcggaggagaggagcgcgcggccgcgcagagcaagctgagccgagccgagccgagctgggggcgcagagcgcgggaggcggcggcggcgcggagcccaggtggctccgctgccggatgggagtgccccagtgtgctggatgaagctggcgcatgcaccatgtcatcatgtgtctctagccagcccagcagcaaccgggccgccccccaggatgagctggggggcaggggcagcagcagcagcgaaagccagaagccctgtgaggccctgcggggcctctcatccttgagcatccacctgggcatggagtccttcattgtggtcaccgagtgtgagccgggctgtgctgtggacctcggcttggcgcgggaccggcccctggaggccgatggccaagaggtcccccttgactcctccgggtcccaggcccggccccacctctccggtcgcaagctgtctctgcaagagcggtcccagggtgggctggcagccggtggcagcctggacatgaacggacgctgcatctgcccgtccctgccctactcacccgtcagctccccgcagtcctcgcctcggctgccccggcggccgacagtggagtctcaccacgtctccatcacgggtatgcaggactgtgtgcagctgaatcagtataccctgaaggatgaaattggaaagggctcctatggtgtcgtcaagttggcctacaatgaaaatgacaatacctactatgcaatgaaggtgctgtccaaaaagaagctgatccggcaggccggctttccacgtcgccctccaccccgaggcacccggccagctcctggaggctgcatccagcccaggggccccattgagcaggtgtaccaggaaattgccatcctcaagaagctggaccaccccaatgtggtgaagctggtggaggtcctggatgaccccaatgaggaccatctgtacatggtgttcgaactggtcaaccaagggcccgtgatggaagtgcccaccctcaaaccactctctgaagaccaggcccgtttctacttccaggatctgatcaaaggcatcgagtacttacactaccagaagatcatccaccgtgacatcaaaccttccaacctcctggtcggagaagatgggcacatcaagatcgctgactttggtgtgagcaatgaattcaagggcagtgacgcgctcctctccaacaccgtgggcacgcccgccttcatggcacccgagtcgctctctgagacccgcaagatcttctctgggaaggccttggatgtttgggccatgggtgtgacactatactgctttgtctttggccagtgcccattcatggacgagcggatcatgtgtttacacagtaagatcaagagtcaggccctggaatttccagaccagcccgacatagctgaggacttgaaggacctgatcacccgtatgctggacaagaaccccgagtcgaggatcgtggtgccggaaatcaagctgcacccctgggtcacgaggcatggggcggagccgttgccgtcggaggatgagaactgcacgctggtcgaagtgactgaagaggaggtcgagaactcagtcaaacacattcccagcttggcaaccgtgatcctggtgaagaccatgatacgtaaacgctcctttgggaacccattcgagggcagccggcgggaggaacgctcactgtcagcgcctggaaacttgctcacgaagcaaggcagcgaagacaacctccagggcaccgacccgccccccgtgggggaggaggaagtgctcttgtgagaggcagtccctgcgtggaaagttgctgggcccccgcccccggctcccccgcacgcatgcatccactgcggccggaggaggccatggagcccgagtagctgcctggatcgctcgacctcgcatgcgcgccgcgtcgcctctggggggctgctgcaccgcgtttccatagcagcatgtcctacggaaacccagcacgtgtgtagagcctcgatcgtcatctctggttatttgttttttcctttgttgttttaaaggggacaaaaaaaaaaaaaaaaggacttgactccatgacgtcgaccgtggccgctggctggctggacaggcgggtgtgaggagttgcagacccaaacccacgtgcattttgggacaattgctttttaaaacgtttttatgccaaaaatccttcattgtgattttcagaaccacgtcagatataccaagtgactgtgtgtggggtttgacaactgtggaaaggcgagcagaaaactccggcggtctgaggccatggaggtggttgctgcatttgagagggagtagggggctagatgtggctcctagtgcaaaccggaaaccatggcaccttccagagccgtggtctcaaggagtcagagcagggctggccctcagtagctgcagggagctttgatgcaacttatttgtaagaaggatttttaaattttttatgggtagaattgtagtcaggaaaacagaaagggcttgaaatttaataagtgctgctggaaggggattttccaagcctggaagggtattcagcagctgtggtggggaaacatttctcctgaaagactgaacgtgtttcttcatgacagctgctcaaagcaggtttctgagatagctgaccgagctctggtaaatctctttgtcaaattacgaaaacttcagggtgaaatcctatgcttccatgtacattacatggcttaagattaaacaaaaacatttttcaagtctctaactagagtgaactctagagcacagtagttcagaaactatttagagcttccaggatatatttcacagcttcaggcatgtgatcagttagagccgatgaaacctatgcccgcctgtatatatattagcagcttagctagttcataacctgtatattctaaagactgctaaggttttgttttcattttaaatcctagctgattgttgtggtcaatgaaatacccagtttctggagggccaggtgggaaatgctttcactggaccaacacacaaatgatcatcctgaggatctgagcttccctagactccacacaataaccttggggcacccttttagagaagactgttgaaacccacagcactcgttggggtatgaggaaaccagggcttggcacaggaagttcccctttgtagctaaaagtccagaaagaaagggttcatctttttgacttccaactgatattgggaagtttggttgaggttcaagtgtgactccttccagagccacaggtaggggagtgtgaagttgagggggaggaaagctggaaggactctgccttgggagattcccagctctgctttccagcgcttggtggaatctgggctggggaaagacggcaccgggaaactctgcttccccattgtttccatctgatcagctgtggtgtgaggacttctcagacaaaggcaaggcctcgtgcccctgcccagcccattcatggagccctgggccttcttggcttccatagatcctaagctcttgactgtagtttagccagacttgttttgctatcttataagcagttcagaattagggaatgctggttttgaagagcaaaggacaggtagtctagagagggtcgtctggcctgcttgctgggtctttgtaacccagcacttcctcttgccctcctggctttatgtttatggggagaggactcaatagctccaccccttctggcaccagatggggcttggttagtttgcaataagcaccttgcagaggttaaagccagcgggtccctagtcttaggcccagcctgcttgtgtgggctctggcctggcctggtggctggcccagggggcagcagtgcttagagcttctgcagggcttctcttgtttacacagctgcatcagacaatgccatttctccccaccacggaaccttccatctaagatttcctctgcccttttccacctcccccttccatcccaccagctgccagtggctcccagaaagccttattgagccccttgttgacacttggggctgcggaggcctctccctactggtctggcctttcctgagaggcaggtcttccgtcctcagagcctttctggaacaaggagaatgcctgtgcaggtggacacacaggcctggcctgtcgctctcacttgtcttccagcggggagcttcacgttgccgagtggaagaaccatgacctccacttgcttccaaggtgctagggaagtttcagggtacgctggttcccctctccagctggaggccgagtttctggggactgcagatttttctactctgtgatcgattcaatgcccgatgcttctgtttcattcccgaccctttctactatgcattttccttttatcaggtgtataaagttaaatactgtgtatttatcactaaaaagtacatgaacttaagagacaactaagcctttcgtgtttttccacaggtgtttaagcttctctgtacagttgaaataaacagacagcaaaatggta

SEQ ID NO: 430948 - DNA, 4104 bp, Homo sapiens
taacgtctagttacagcgcccccctccccagggaccttacccacattctccatcagaaacatagcaagccagacatcacgcttcctttcccttgtgtaaggacagtctccctcctggacaggagacacggattgttgtgggggaaggacagacagtaacccatgtggcatgcccagtgacctccctaagaacaggggagctgtgtgatggtggtgaggggataggctcggggattcccctcgcacctgtcacgccatccacgctgtcacaccggcggctccagcctgggctcttcagggaaacaagggctctcctcctcccacttccaagagggaaggggcctcctcttctgtctgaggtgctcctccctcagggctggctgcaggagggctgaggcgggaggatccctggagcagttgtcatctgccctttcttgagggccagctgtgtgccaggccaggcaggggaggctctgatcacccccacacacaaggaactcaacatctggtgactgaggacaagcgtcacagtcccttccctgtaagggctcatagcctaagtgggggatcgaagtacctaaaaacctggtatgacaggcgccgtggggtggggggtgccttctacttgggatttgtgcagtgaattttggtgttacatagttttggaactgttgtacgggtccttgctatttttggcaaatgatgctggtctttcatttacagaggggctgcgtgcaaagtctcctttgaaaaatttatgtgagcaaggaaaaggggagaggatctcaaagactgggttacgtagatcacgttccagggggtgcgcgacggcccacttgggcagggggcccagatgtgggagcagctggctcagggcctcgctggcatttctcagagtcttaatgttggttttctgttcggtgagcaggaagcaaggcagcgaagacaacctccagggcaccgacccgccccccgtgggggaggaggaagtgctcttgtgagaggcagtccctgcgtggaaagttgctgggcccccgcccccggctcccccgcacgcatgcatccactgcggccggaggaggccatggagcccgagtagctgcctggatcgctcgacctcgcatgcgcgccgcgtcgcctctggggggctgctgcaccgcgtttccatagcagcatgtcctacggaaacccagcacgtgtgtagagcctcgatcgtcatctctggttatttgttttttcctttgttgttttaaaggggacaaaaaaaaaaaaaaaaggacttgactccatgacgtcgaccgtggccgctggctggctggacaggcgggtgtgaggagttgcagacccaaacccacgtgcattttgggacaattgctttttaaaacgtttttatgccaaaaatccttcattgtgattttcagaaccacgtcagatataccaagtgactgtgtgtggggtttgacaactgtggaaaggcgagcagaaaactccggcggtctgaggccatggaggtggttgctgcatttgagagggagtagggggctagatgtggctcctagtgcaaaccggaaaccatggcaccttccagagccgtggtctcaaggagtcagagcagggctggccctcagtagctgcagggagctttgatgcaacttatttgtaagaaggatttttaaattttttatgggtagaattgtagtcaggaaaacagaaagggcttgaaatttaataagtgctgctggaaggggattttccaagcctggaagggtattcagcagctgtggtggggaaacatttctcctgaaagactgaacgtgtttcttcatgacagctgctcaaagcaggtttctgagatagctgaccgagctctggtaaatctctttgtcaaattacgaaaacttcagggtgaaatcctatgcttccatgtacattacatggcttaagattaaacaaaaacatttttcaagtctctaactagagtgaactctagagcacagtagttcagaaactatttagagcttccaggatatatttcacagcttcaggcatgtgatcagttagagccgatgaaacctatgcccgcctgtatatatattagcagcttagctagttcataacctgtatattctaaagactgctaaggttttgttttcattttaaatcctagctgattgttgtggtcaatgaaatacccagtttctggagggccaggtgggaaatgctttcactggaccaacacacaaatgatcatcctgaggatctgagcttccctagactccacacaataaccttggggcacccttttagagaagactgttgaaacccacagcactcgttggggtatgaggaaaccagggcttggcacaggaagttcccctttgtagctaaaagtccagaaagaaagggttcatctttttgacttccaactgatattgggaagtttggttgaggttcaagtgtgactccttccagagccacaggtaggggagtgtgaagttgagggggaggaaagctggaaggactctgccttgggagattcccagctctgctttccagcgcttggtggaatctgggctggggaaagacggcaccgggaaactctgcttccccattgtttccatctgatcagctgtggtgtgaggacttctcagacaaaggcaaggcctcgtgcccctgcccagcccattcatggagccctgggccttcttggcttccatagatcctaagctcttgactgtagtttagccagacttgttttgctatcttataagcagttcagaattagggaatgctggttttgaagagcaaaggacaggtagtctagagagggtcgtctggcctgcttgctgggtctttgtaacccagcacttcctcttgccctcctggctttatgtttatggggagaggactcaatagctccaccccttctggcaccagatggggcttggttagtttgcaataagcaccttgcagaggttaaagccagcgggtccctagtcttaggcccagcctgcttgtgtgggctctggcctggcctggtggctggcccagggggcagcagtgcttagagcttctgcagggcttctcttgtttacacagctgcatcagacaatgccatttctccccaccacggaaccttccatctaagatttcttccagggaatgccagcaatcaggcagcacccagctgtgggggcagtggggtgggggagacccacattgatgactttttttttttcttttaatgaagaaacaccaaagaaagctgtggaaaggacctgccccacatgaaaaggataagccaagatggctgtaaacacagagcatttgagctgccactcttggagcacattgatttttcaaaagccagctctgtcaggaaaggaggtgctgttatgagcagctcttccagtgggcaaagaggacgcccataatttcttccattgctagctcatctgtgggaccaatttggtgtaagcaacctgtggcctgcacttgtggcctcgaaggaagcacaaaccctccatccacttcccatttcctctgcccttttccacctcccccttccatcccaccagctgccagtggctcccagaaagccttattgagccccttgttgacacttggggctgcggaggcctctccctactggtctggcctttcctgagaggcaggtcttccgtcctcagagcctttctggaacaaggagaatgcctgtgcaggtggacacacaggcctggcctgtcgctctcacttgtcttccagcggggagcttcacgttgccgagtggaagaaccatgacctccacttgcttccaaggtgctagggaagtttcagggtacgctggttcccctctccagctggaggccgagtttctggggactgcagatttttctactctgtgatcgattcaatgcccgatgcttctgtttcattcccgaccctttctactatgcattttccttttatcaggtgtataaagttaaatactgtgtatttatcactaaaaagtacatgaacttaagagacaactaagcctttcgtgtttttccacaggtgtttaagcttctctgtacagttgaaataaacagacagcaaaatggta

SEQ ID NO: 430949 - DNA, 4068 bp, Homo sapiens
ggcggaggagaggagcgcgcggccgcgcagagcaagctgagccgagccgagccgagctgggggcgcagagcgcgggaggcggcggcggcgcggagcccaggtggctccgctgccggatgggagtgccccagtgtgctggatgaagctggcgcatgcaccatgtcatcatgtgtctctagccagcccagcagcaaccgggccgccccccaggatgagctggggggcaggggcagcagcagcagcgaaagccagaagccctgtgaggccctgcggggcctctcatccttgagcatccacctgggcatggagtccttcattgtggtcaccgagtgtgagccgggctgtgctgtggacctcggcttggcgcgggaccggcccctggaggccgatggccaagaggtcccccttgactcctccgggtcccaggcccggccccacctctccggtcgcaagctgtctctgcaagagcggtcccagggtgggctggcagccggtggcagcctggacatgaacggacgctgcatctgcccgtccctgccctactcacccgtcagctccccgcagtcctcgcctcggctgccccggcggccgacagtggagtctcaccacgtctccatcacgggtatgcaggactgtgtgcagctgaatcagtataccctgaaggatgaaattggaaagggctcctatggtgtcgtcaagttggcctacaatgaaaatgacaatacctactatgcaatgaaggtgctgtccaaaaagaagctgatccggcaggccggctttccacgtcgccctccaccccgaggcacccggccagctcctggaggctgcatccagcccaggggccccattgagcaggtgtaccaggaaattgccatcctcaagaagctggaccaccccaatgtggtgaagctggtggaggtcctggatgaccccaatgaggaccatctgtacatggtgttcgaactggtcaaccaagggcccgtgatggaagtgcccaccctcaaaccactctctgaagaccaggcccgtttctacttccaggatctgatcaaaggcatcgagtacttacactaccagaagatcatccaccgtgacatcaaaccttccaacctcctggtcggagaagatgggcacatcaagatcgctgactttggtgtgagcaatgaattcaagggcagtgacgcgctcctctccaacaccgtgggcacgcccgccttcatggcacccgagtcgctctctgagacccgcaagatcttctctgggaaggccttggatgtttgggccatgggtgtgacactatactgctttgtctttggccagtgcccattcatggacgagcggatcatgtgtttacacagtaagatcaagagtcaggccctggaatttccagaccagcccgacatagctgaggacttgaaggacctgatcacccgtatgctggacaagaaccccgagtcgaggatcgtggtgccggaaatcaagctgcacccctgggtcacgaggcatggggcggagccgttgccgtcggaggatgagaactgcacgctggtcgaagtgactgaagaggaggtcgagaactcagtcaaacacattcccagcttggcaaccgtgatcctggtgaagaccatgatacgtaaacgctcctttgggaacccattcgagggcagccggcgggaggaacgctcactgtcagcgcctggaaacttgctcacgaagcaaggcagcgaagacaacctccagggcaccgacccgccccccgtgggggaggaggaagtgctcttgtgagaggcagtccctgcgtggaaagttgctgggcccccgcccccggctcccccgcacgcatgcatccactgcggccggaggaggccatggagcccgagtagctgcctggatcgctcgacctcgcatgcgcgccgcgtcgcctctggggggctgctgcaccgcgtttccatagcagcatgtcctacggaaacccagcacgtgtgtagagcctcgatcgtcatctctggttatttgttttttcctttgttgttttaaaggggacaaaaaaaaaaaaaaaaggacttgactccatgacgtcgaccgtggccgctggctggctggacaggcgggtgtgaggagttgcagacccaaacccacgtgcattttgggacaattgctttttaaaacgtttttatgccaaaaatccttcattgtgattttcagaaccacgtcagatataccaagtgactgtgtgtggggtttgacaactgtggaaaggcgagcagaaaactccggcggtctgaggccatggaggtggttgctgcatttgagagggagtagggggctagatgtggctcctagtgcaaaccggaaaccatggcaccttccagagccgtggtctcaaggagtcagagcagggctggccctcagtagctgcagggagctttgatgcaacttatttgtaagaaggatttttaaattttttatgggtagaattgtagtcaggaaaacagaaagggcttgaaatttaataagtgctgctggaaggggattttccaagcctggaagggtattcagcagctgtggtggggaaacatttctcctgaaagactgaacgtgtttcttcatgacagctgctcaaagcaggtttctgagatagctgaccgagctctggtaaatctctttgtcaaattacgaaaacttcagggtgaaatcctatgcttccatgtacattacatggcttaagattaaacaaaaacatttttcaagtctctaactagagtgaactctagagcacagtagttcagaaactatttagagcttccaggatatatttcacagcttcaggcatgtgatcagttagagccgatgaaacctatgcccgcctgtatatatattagcagcttagctagttcataacctgtatattctaaagactgctaaggttttgttttcattttaaatcctagctgattgttgtggtcaatgaaatacccagtttctggagggccaggtgggaaatgctttcactggaccaacacacaaatgatcatcctgaggatctgagcttccctagactccacacaataaccttggggcacccttttagagaagactgttgaaacccacagcactcgttggggtatgaggaaaccagggcttggcacaggaagttcccctttgtagctaaaagtccagaaagaaagggttcatctttttgacttccaactgatattgggaagtttggttgaggttcaagtgtgactccttccagagccacaggtaggggagtgtgaagttgagggggaggaaagctggaaggactctgccttgggagattcccagctctgctttccagcgcttggtggaatctgggctggggaaagacggcaccgggaaactctgcttccccattgtttccatctgatcagctgtggtgtgaggacttctcagacaaaggcaaggcctcgtgcccctgcccagcccattcatggagccctgggccttcttggcttccatagatcctaagctcttgactgtagtttagccagacttgttttgctatcttataagcagttcagaattagggaatgctggttttgaagagcaaaggacaggtagtctagagagggtcgtctggcttcctgagaggcaggtcttccgtcctcagagcctttctggaacaaggagaatgcctgtgcaggtggacacacaggcctggcctgtcgctctcacttgtcttccagcggggagcttcacgttgccgagtggaagaaccatgacctccacttgcttccaaggtgctagggaagtttcagggtacgctggttcccctctccagctggaggccgagtttctggggactgcagatttttctactctgtgatcgattcaatgcccgatgcttctgtttcattcccgaccctttctactatgcattttccttttatcaggtgtataaagttaaatactgtgtatttatcactaaaaagtacatgaacttaagagacaactaagcctttcgtgtttttccacaggtgtttaagcttctctgtacagttgaaataaacagacagcaaaatggta

SEQ ID NO: 430950 - DNA, 3987 bp, Homo sapiens
ggcggaggagaggagcgcgcggccgcgcagagcaagctgagccgagccgagccgagctgggggcgcagagcgcgggaggcggcggcggcgcggagcccaggtggctccgctgccggatgggagtgccccagtgtgctggatgaagctggcgcatgcaccatgtcatcatgtgtctctagccagcccagcagcaaccgggccgccccccaggatgagctggggggcaggggcagcagcagcagcgaaagccagaagccctgtgaggccctgcggggcctctcatccttgagcatccacctgggcatggagtccttcattgtggtcaccgagtgtgagccgggctgtgctgtggacctcggcttggcgcgggaccggcccctggaggccgatggccaagaggtcccccttgactcctccgggtcccaggcccggccccacctctccggtcgcaagctgtctctgcaagagcggtcccagggtgggctggcagccggtggcagcctggacatgaacggacgctgcatctgcccgtccctgccctactcacccgtcagctccccgcagtcctcgcctcggctgccccggcggccgacagtggagtctcaccacgtctccatcacgggtatgcaggactgtgtgcagctgaatcagtataccctgaaggatgaaattggaaagggctcctatggtgtcgtcaagttggcctacaatgaaaatgacaatacctactatgcaatgaaggtgctgtccaaaaagaagctgatccggcaggccggctttccacgtcgccctccaccccgaggcacccggccagctcctggaggctgcatccagcccaggggccccattgagcaggtgtaccaggaaattgccatcctcaagaagctggaccaccccaatgtggtgaagctggtggaggtcctggatgaccccaatgaggaccatctgtacatggtgttcgaactggtcaaccaagggcccgtgatggaagtgcccaccctcaaaccactctctgaagaccaggcccgtttctacttccaggatctgatcaaaggcatcgagtacttacactaccagaagatcatccaccgtgacatcaaaccttccaacctcctggtcggagaagatgggcacatcaagatcgctgactttggtgtgagcaatgaattcaagggcagtgacgcgctcctctccaacaccgtgggcacgcccgccttcatggcacccgagtcgctctctgagacccgcaagatcttctctgggaaggccttggatgtttgggccatgggtgtgacactatactgctttgtctttggccagtgcccattcatggacgagcggatcatgtgtttacacagtaagatcaagagtcaggccctggaatttccagaccagcccgacatagctgaggacttgaaggacctgatcacccgtatgctggacaagaaccccgagtcgaggatcgtggtgccggaaatcaagctgcacccctgggtcacgaggcatggggcggagccgttgccgtcggaggatgagaactgcacgctggtcgaagtgactgaagaggaggtcgagaactcagtcaaacacattcccagcttggcaaccgtgatcctggtgaagaccatgatacgtaaacgctcctttgggaacccattcgagggcagccggcgggaggaacgctcactgtcagcgcctggaaacttgctcacgaagcaaggcagcgaagacaacctccagggcaccgacccgccccccgtgggggaggaggaagtgctcttgtgagaggcagtccctgcgtggaaagttgctgggcccccgcccccggctcccccgcacgcatgcatccactgcggccggaggaggccatggagcccgagtagctgcctggatcgctcgacctcgcatgcgcgccgcgtcgcctctggggggctgctgcaccgcgtttccatagcagcatgtcctacggaaacccagcacgtgtgtagagcctcgatcgtcatctctggttatttgttttttcctttgttgttttaaaggggacaaaaaaaaaaaaaaaaggacttgactccatgacgtcgaccgtggccgctggctggctggacaggcgggtgtgaggagttgcagacccaaacccacgtgcattttgggacaattgctttttaaaacgtttttatgccaaaaatccttcattgtgattttcagaaccacgtcagatataccaagtgactgtgtgtggggtttgacaactgtggaaaggcgagcagaaaactccggcggtctgaggccatggaggtggttgctgcatttgagagggagtagggggctagatgtggctcctagtgcaaaccggaaaccatggcaccttccagagccgtggtctcaaggagtcagagcagggctggccctcagtagctgcagggagctttgatgcaacttatttgtaagaaggatttttaaattttttatgggtagaattgtagtcaggaaaacagaaagggcttgaaatttaataagtgctgctggaaggggattttccaagcctggaagggtattcagcagctgtggtggggaaacatttctcctgaaagactgaacgtgtttcttcatgacagctgctcaaagcaggtttctgagatagctgaccgagctctggtaaatctctttgtcaaattacgaaaacttcagggtgaaatcctatgcttccatgtacattacatggcttaagattaaacaaaaacatttttcaagtctctaactagagtgaactctagagcacagtagttcagaaactatttagagcttccaggatatatttcacagcttcaggcatgtgatcagttagagccgatgaaacctatgcccgcctgtatatatattagcagcttagctagttcataacctgtatattctaaagactgctaaggttttgttttcattttaaatcctagctgattgttgtggtcaatgaaatacccagtttctggagggccaggtgggaaatgctttcactggaccaacacacaaatgatcatcctgaggatctgagcttccctagactccacacaataaccttggggcacccttttagagaagactgttgaaacccacagcactcgttggggtatgaggaaaccagggcttggcacaggaagttcccctttgtagctaaaagtccagaaagaaagggttcatctttttgacttccaactgatattgggaagtttggttgaggttcaagtgtgactccttccagagccacaggtaggggagtgtgaagttgagggggaggaaagctggaaggactctgccttgggagattcccagctctgctttccagcgcttggtggaatctgggctggggaaagacggcaccgggaaactctgcttccccattgtttccatctgatcagctgtggtgtgaggacttctcagacaaaggcaaggcctcgtgcccctgcccagcccattcatggagccctgggccttcttggcttccatagatcctaagctcttgactgtagtttagccagacttgttttttcctgagaggcaggtcttccgtcctcagagcctttctggaacaaggagaatgcctgtgcaggtggacacacaggcctggcctgtcgctctcacttgtcttccagcggggagcttcacgttgccgagtggaagaaccatgacctccacttgcttccaaggtgctagggaagtttcagggtacgctggttcccctctccagctggaggccgagtttctggggactgcagatttttctactctgtgatcgattcaatgcccgatgcttctgtttcattcccgaccctttctactatgcattttccttttatcaggtgtataaagttaaatactgtgtatttatcactaaaaagtacatgaacttaagagacaactaagcctttcgtgtttttccacaggtgtttaagcttctctgtacagttgaaataaacagacagcaaaatggta

SEQ ID NO: 430951 - DNA, 2791 bp, Homo sapiens
gagtgttggcctgcgtgtctagaggtccccagactcaccacgtgcattttgggacaattgctttttaaaacgtttttatgccaaaaatccttcattgtgattttcagaaccacgtcagatataccaagtgactgtgtgtggggtttgacaactgtggaaaggcgagcagaaaactccggcggtctgaggccatggaggtggttgctgcatttgagagggagtagggggctagatgtggctcctagtgcaaaccggaaaccatggcaccttccagagccgtggtctcaaggagtcagagcagggctggccctcagtagctgcagggagctttgatgcaacttatttgtaagaaggatttttaaattttttatgggtagaattgtagtcaggaaaacagaaagggcttgaaatttaataagtgctgctggaaggggattttccaagcctggaagggtattcagcagctgtggtggggaaacatttctcctgaaagactgaacgtgtttcttcatgacagctgctcaaagcaggtttctgagatagctgaccgagctctggtaaatctctttgtcaaattacgaaaacttcagggtgaaatcctatgcttccatgtacattacatggcttaagattaaacaaaaacatttttcaagtctctaactagagtgaactctagagcacagtagttcagaaactatttagagcttccaggatatatttcacagcttcaggcatgtgatcagttagagccgatgaaacctatgcccgcctgtatatatattagcagcttagctagttcataacctgtatattctaaagactgctaaggttttgttttcattttaaatcctagctgattgttgtggtcaatgaaatacccagtttctggagggccaggtgggaaatgctttcactggaccaacacacaaatgatcatcctgaggatctgagcttccctagactccacacaataaccttggggcacccttttagagaagactgttgaaacccacagcactcgttggggtatgaggaaaccagggcttggcacaggaagttcccctttgtagctaaaagtccagaaagaaagggttcatctttttgacttccaactgatattgggaagtttggttgaggttcaagtgtgactccttccagagccacaggtaggggagtgtgaagttgagggggaggaaagctggaaggactctgccttgggagattcccagctctgctttccagcgcttggtggaatctgggctggggaaagacggcaccgggaaactctgcttccccattgtttccatctgatcagctgtggtgtgaggacttctcagacaaaggcaaggcctcgtgcccctgcccagcccattcatggagccctgggccttcttggcttccatagatcctaagctcttgactgtagtttagccagacttgttttgctatcttataagcagttcagaattagggaatgctggttttgaagagcaaaggacaggtagtctagagagggtcgtctggcctgcttgctgggtctttgtaacccagcacttcctcttgccctcctggctttatgtttatggggagaggactcaatagctccaccccttctggcaccagatggggcttggttagtttgcaataagcaccttgcagaggttaaagccagcgggtccctagtcttaggcccagcctgcttgtgtgggctctggcctggcctggtggctggcccagggggcagcagtgcttagagcttctgcagggcttctcttgtttacacagctgcatcagacaatgccatttctccccaccacggaaccttccatctaagatttcttccagggaatgccagcaatcaggcagcacccagctgtgggggcagtggggtgggggagacccacattgatgactttttttttttcttttaatgaagaaacaccaaagaaagctgtggaaaggacctgccccacatgaaaaggataagccaagatggctgtaaacacagagcatttgagctgccactcttggagcacattgatttttcaaaagccagctctgtcaggaaaggaggtgctgttatgagcagctcttccagtgggcaaagaggacgcccataatttcttccattgctagctcatctgtgggaccaatttggtgtaagcaacctgtggcctgcacttgtggcctcgaaggaagcacaaaccctccatccacttcccatttcctctgcccttttccacctcccccttccatcccaccagctgccagtggctcccagaaagccttattgagccccttgttgacacttggggctgcggaggcctctccctactggtctggcctttcctgagaggcaggtcttccgtcctcagagcctttctggaacaaggagaatgcctgtgcaggtggacacacaggcctggcctgtcgctctcacttgtcttccagcggggagcttcacgttgccgagtggaagaaccatgacctccacttgcttccaaggtgctagggaagtttcagggtacgctggttcccctctccagctggaggccgagtttctggggactgcagatttttctactctgtgatcgattcaatgcccgatgcttctgtttcattcccgaccctttctactatgcattttccttttatcaggtgtataaagttaaatactgtgtatttatcactaaaaagtacatgaacttaagagacaactaagcctttcgtgtttttccacaggtgtttaagcttctctgtacagttgaaataaacagacagcaaaatggta

SEQ ID NO: 430952 - DNA, 4100 bp, Homo sapiens
ggcggaggagaggagcgcgcggccgcgcagagcaagctgagccgagccgagccgagctgggggcgcagagcgcgggaggcggcggcggcgcggagcccaggtggctccgctgccggatgggagtgccccagtgtgctggatgaagctggcgcatgcaccatgtcatcatgtgtctctagccagcccagcagcaaccgggccgccccccaggatgagctggggggcaggggcagcagcagcagcgaaagccagaagccctgtgaggccctgcggggcctctcatccttgagcatccacctgggcatggagtccttcattgtggtcaccgagtgtgagccgggctgtgctgtggacctcggcttggcgcgggaccggcccctggaggccgatggccaagaggtcccccttgactcctccgggtcccaggcccggccccacctctccggtcgcaagctgtctctgcaagagcggtcccagggtgggctggcagccggtggcagcctggacatgaacggacgctgcatctgcccgtccctgccctactcacccgtcagctccccgcagtcctcgcctcggctgccccggcggccgacagtggagtctcaccacgtctccatcacgggtatgcaggactgtgtgcagctgaatcagtataccctgaaggatgaaattggaaagggctcctatggtgtcgtcaagttggcctacaatgaaaatgacaatacctactatgcaatgaaggtgctgtccaaaaagaagctgatccggcaggccggctttccacgtcgccctccaccccgaggcacccggccagctcctggaggctgcatccagcccaggggccccattgagcaggtgtaccaggaaattgccatcctcaagaagctggaccaccccaatgtggtgaagctggtggaggtcctggatgaccccaatgaggaccatctgtacatggtgttcgaactggtcaaccaagggcccgtgatggaagtgcccaccctcaaaccactctctgaagaccaggcccgtttctacttccaggatctgatcaaaggcatcgagtacttacactaccagaagatcatccaccgtgacatcaaaccttccaacctcctggtcggagaagatgggcacatcaagatcgctgactttggtgtgagcaatgaattcaagggcagtgacgcgctcctctccaacaccgtgggcacgcccgccttcatggcacccgagtcgctctctgagacccgcaagatcttctctgggaaggccttggatgtttgggccatgggtgtgacactatactgctttgtctttggccagtgcccattcatggacgagcggatcatgtgtttacacagtaagatcaagagtcaggccctggaatttccagaccagcccgacatagctgaggacttgaaggacctgatcacccgtatgctggacaagaaccccgagtcgaggatcgtggtgccggaaatcaagctgcacccctgggtcacgaggcatggggcggagccgttgccgtcggaggatgagaactgcacgctggtcgaagtgactgaagaggaggtcgagaactcagtcaaacacattcccagcttggcaaccgtgatcctggtgaagaccatgatacgtaaacgctcctttgggaacccattcgagggcagccggcgggaggaacgctcactgtcagcgcctggaaacttgctcacgaagcaaggcagcgaagacaacctccagggcaccgacccgccccccgtgggggaggaggaagtgctcttgtgagaggcagtccctgcgtggaaagttgctgggcccccgcccccggctcccccgcacgcatgcatccactgcggccggaggaggccatggagcccgagtagctgcctggatcgctcgacctcgcatgcgcgccgcgtcgcctctggggggctgctgcaccgcgtttccatagcagcatgtcctacggaaacccagcacgtgtgtagagcctcgatcgtcatctctggttatttgttttttcctttgttgttttaaaggggacaaaaaaaaaaaaaaaaggacttgactccatgacgtcgaccgtggccgctggctggctggacaggcgggtgtgaggagttgcagacccaaacccacgtgcattttgggacaattgctttttaaaacgtttttatgccaaaaatccttcattgtgattttcagaaccacgtcagatataccaagtgactgtgtgtggggtttgacaactgtggaaaggcgagcagaaaactccggcggtctgaggccatggaggtggttgctgcatttgagagggagtagggggctagatgtggctcctagtgcaaaccggaaaccatggcaccttccagagccgtggtctcaaggagtcagagcagggctggccctcagtagctgcagggagctttgatgcaacttatttgtaagaaggatttttaaattttttatgggtagaattgtagtcaggaaaacagaaagggcttgaaatttaataagtgctgctggaaggggattttccaagcctggaagggtattcagcagctgtggtggggaaacatttctcctgaaagactgaacgtgtttcttcatgacagctgctcaaagcaggtttctgagatagctgaccgagctctggtaaatctctttgtcaaattacgaaaacttcagggtgaaatcctatgcttccatgtacattacatggcttaagattaaacaaaaacatttttcaagtctctaactagagtgaactctagagcacagtagttcagaaactatttagagcttccaggatatatttcacagcttcaggcatgtgatcagttagagccgatgaaacctatgcccgcctgtatatatattagcagcttagctagttcataacctgtatattctaaagactgctaaggttttgttttcattttaaatcctagctgattgttgtggtcaatgaaatacccagtttctggagggccaggtgggaaatgctttcactggaccaacacacaaatgatcatcctgaggatctgagcttccctagactccacacaataaccttggggcacccttttagagaagactgttgaaacccacagcactcgttggggtatgaggaaaccagggcttggcacaggaagttcccctttgtagctaaaagtccagaaagaaagggttcatctttttgacttccaactgatattgggaagtttggttgaggttcaagtgtgactccttccagagccacaggtaggggagtgtgaagttgagggggaggaaagctggaaggactctgccttgggagattcccagctctgctttccagcgcttggtggaatctgggctggggaaagacggcaccgggaaactctgcttccccattgtttccatctgatcagctgtggtgtgaggacttctcagacaaaggcaaggcctcgtgcccctgcccagcccattcatggagccctgggccttcttggcttccatagatcctaagctcttgactgtagtttagccagacttgttttttcctgagaggcaggtcttccgtcctcagagcctttctggaacaaggagaatgcctgtgcaggtggacacacaggcctggcctgtcgctctcacttgtcttccagcggggagcttcacgttgccgagtggaagaaccatgacctccacttgcttccaaggtgctagggaagtttcagggtacgctggttcccctctccagctggaggccgagtttctggggactgcagatttttctactctgtgatcgattcaatgcccgatgcttctgtttcattcccgaccctttctactatgcattttccttttatcaggtgtataaagttaaatactgtgtatttatcactaaaaagtacatgaacttaagagacaactaagcctttcgtgtttttccacaggtgtttaagcttctctgtacagttgaaataaacagacagcaaaatggtataaaaaaataaatccttgctctcatcttcttcatctccataccttcgacgtctctgaaaatcgtcccattatgtgctcaccctcttgctggtttccctctcgtctctcttcta

SEQ ID NO: 430953 - DNA, 4060 bp, Homo sapiens
  misc_feature (3997)..(3997): n is a, c, g, or t
  misc_feature (4014)..(4014): n is a, c, g, or t
  misc_feature (4022)..(4022): n is a, c, g, or t
  misc_feature (4050)..(4050): n is a, c, g, or t
ggcggaggagaggagcgcgcggccgcgcagagcaagctgagccgagccgagccgagctgggggcgcagagcgcgggaggcggcggcggcgcggagcccaggtggctccgctgccggatgggagtgccccagtgtgctggatgaagctggcgcatgcaccatgtcatcatgtgtctctagccagcccagcagcaaccgggccgccccccaggatgagctggggggcaggggcagcagcagcagcgaaagccagaagccctgtgaggccctgcggggcctctcatccttgagcatccacctgggcatggagtccttcattgtggtcaccgagtgtgagccgggctgtgctgtggacctcggcttggcgcgggaccggcccctggaggccgatggccaagaggtcccccttgactcctccgggtcccaggcccggccccacctctccggtcgcaagctgtctctgcaagagcggtcccagggtgggctggcagccggtggcagcctggacatgaacggacgctgcatctgcccgtccctgccctactcacccgtcagctccccgcagtcctcgcctcggctgccccggcggccgacagtggagtctcaccacgtctccatcacgggtatgcaggactgtgtgcagctgaatcagtataccctgaaggatgaaattggaaagggctcctatggtgtcgtcaagttggcctacaatgaaaatgacaatacctactatgcaatgaaggtgctgtccaaaaagaagctgatccggcaggccggctttccacgtcgccctccaccccgaggcacccggccagctcctggaggctgcatccagcccaggggccccattgagcaggtgtaccaggaaattgccatcctcaagaagctggaccaccccaatgtggtgaagctggtggaggtcctggatgaccccaatgaggaccatctgtacatggtgttcgaactggtcaaccaagggcccgtgatggaagtgcccaccctcaaaccactctctgaagaccaggcccgtttctacttccaggatctgatcaaaggcatcgagtacttacactaccagaagatcatccaccgtgacatcaaaccttccaacctcctggtcggagaagatgggcacatcaagatcgctgactttggtgtgagcaatgaattcaagggcagtgacgcgctcctctccaacaccgtgggcacgcccgccttcatggcacccgagtcgctctctgagacccgcaagatcttctctgggaaggccttggatgtttgggccatgggtgtgacactatactgctttgtctttggccagtgcccattcatggacgagcggatcatgtgtttacacagtaagatcaagagtcaggccctggaatttccagaccagcccgacatagctgaggacttgaaggacctgatcacccgtatgctggacaagaaccccgagtcgaggatcgtggtgccggaaatcaagctgcacccctgggtcacgaggcatggggcggagccgttgccgtcggaggatgagaactgcacgctggtcgaagtgactgaagaggaggtcgagaactcagtcaaacacattcccagcttggcaaccgtgatcctggtgaagaccatgatacgtaaacgctcctttgggaacccattcgagggcagccggcgggaggaacgctcactgtcagcgcctggaaacttgctcacgaagcaaggcagcgaagacaacctccagggcaccgacccgccccccgtgggggaggaggaagtgctcttgtgagaggcagtccctgcgtggaaagttgctgggcccccgcccccggctcccccgcacgcatgcatccactgcggccggaggaggccatggagcccgagtagctgcctggatcgctcgacctcgcatgcgcgccgcgtcgcctctggggggctgctgcaccgcgtttccatagcagcatgtcctacggaaacccagcacgtgtgtagagcctcgatcgtcatctctggttatttgttttttcctttgttgttttaaaggggacaaaaaaaaaaaaaaaaggacttgactccatgacgtcgaccgtggccgctggctggctggacaggcgggtgtgaggagttgcagacccaaacccacgtgcattttgggacaattgctttttaaaacgtttttatgccaaaaatccttcattgtgattttcagaaccacgtcagatataccaagtgactgtgtgtggggtttgacaactgtggaaaggcgagcagaaaactccggcggtctgaggccatggaggtggttgctgcatttgagagggagtagggggctagatgtggctcctagtgcaaaccggaaaccatggcaccttccagagccgtggtctcaaggagtcagagcagggctggccctcagtagctgcagggagctttgatgcaacttatttgtaagaaggatttttaaattttttatgggtagaattgtagtcaggaaaacagaaagggcttgaaatttaataagtgctgctggaaggggattttccaagcctggaagggtattcagcagctgtggtggggaaacatttctcctgaaagactgaacgtgtttcttcatgacagctgctcaaagcaggtttctgagatagctgaccgagctctggtaaatctctttgtcaaattacgaaaacttcagggtgaaatcctatgcttccatgtacattacatggcttaagattaaacaaaaacatttttcaagtctctaactagagtgaactctagagcacagtagttcagaaactatttagagcttccaggatatatttcacagcttcaggcatgtgatcagttagagccgatgaaacctatgcccgcctgtatatatattagcagcttagctagttcataacctgtatattctaaagactgctaaggttttgttttcattttaaatcctagctgattgttgtggtcaatgaaatacccagtttctggagggccaggtgggaaatgctttcactggaccaacacacaaatgatcatcctgaggatctgagcttccctagactccacacaataaccttggggcacccttttagagaagactgttgaaacccacagcactcgttggggtatgaggaaaccagggcttggcacaggaagttcccctttgtagctaaaagtccagaaagaaagggttcatctttttgacttccaactgatattgggaagtttggttgaggttcaagtgtgactccttccagagccacaggtaggggagtgtgaagttgagggggaggaaagctggaaggactctgccttgggagattcccagctctgctttccagcgcttggtggaatctgggctggggaaagacggcaccgggaaactctgcttccccattgtttccatctgatcagctgtggtgtgaggacttctcagacaaaggcaaggcctcgtgcccctgcccagcccattcatggagccctgggccttcttggcttccatagatcctaagctcttgactgtagtttagccagacttgttttttcctgagaggcaggtcttccgtcctcagagcctttctggaacaaggagaatgcctgtgcaggtggacacacaggcctggcctgtcgctctcacttgtcttccagcggggagcttcacgttgccgagtggaagaaccatgacctccacttgcttccaaggtgctagggaagtttcagggtacgctggttcccctctccagctggaggccgagtttctggggactgcagatttttctactctgtgatcgattcaatgcccgatgcttctgtttcattcccgaccctttctactatgcattttccttttatcaggtgtataaagttaaatactgtgtatttatcactaaaaagtacatgaacttaagagacaactaagcctttcgtgtttttccacaggtgtttaagcttctctgtacagttgaaataaacagacagcaaaatggtaaaaaaaaaanaaaaaaaaaaaaaaaanaaaaaaanaaaaaaaaaaaaaaaaaaaaaaaaaaanaaaaaaaaaa

SEQ ID NO: 430954 - DNA, 638 bp, Homo sapiens
catgtggctcggctctaccttgtctctcggtctaccttgttctcggtctaccttgttctctcggctctagcttgtctctcggctctaccttgtctctcggttctaccttgtctgccagtggctcccagaaagccttattgagccccttgttgacacttggggctgcggaggcctctccctactggtctggcctttcctgagaggcaggtcttccgtcctcagagcctttctggaacaaggagaatgcctgtgcaggtggacacacaggcctggcctgtcgctctcacttgtcttccagcggggagcttcacgttgccgagtggaagaaccatgacctccacttgcttccaaggtgctagggaagtttcagggtacgctggttcccctctccagctggaggccgagtttctggggactgcagatttttctactctgtgatcgattcaatgcccgatgcttctgtttcattcccgaccctttctactatgcattttccttttatcaggtgtataaagttaaatactgtgtatttatcactaaaaagtacatgaacttaagagacaactaagcctttcgtgtttttccacaggtgtttaagcttctctgtacagttgaaataaacagacagcaaaatggta

SEQ ID NO: 430955 - DNA, 1927 bp, Homo sapiens
ggcggaggagaggagcgcgcggccgcgcagagcaagctgagccgagccgagccgagctgggggcgcagagcgcgggaggcggcggcggcgcggagcccaggtggctccgctgccggatgggagtgccccagtgtgctggatgaagctggcgcatgcaccatgtcatcatgtgtctctagccagcccagcagcaaccgggccgccccccaggatgagctggggggcaggggcagcagcagcagcgaaagccagaagccctgtgaggccctgcggggcctctcatccttgagcatccacctgggcatggagtccttcattgtggtcaccgagtgtgagccgggctgtgctgtggacctcggcttggcgcgggaccggcccctggaggccgatggccaagaggtcccccttgactcctccgggtcccaggcccggccccacctctccggtcgcaagctgtctctgcaagagcggtcccagggtgggctggcagccggtggcagcctggacatgaacggacgctgcatctgcccgtccctgccctactcacccgtcagctccccgcagtcctcgcctcggctgccccggcggccgacagtggagtctcaccacgtctccatcacgggtatgcaggactgtgtgcagctgaatcagtataccctgaaggatgaaattggaaagggctcctatggtgtcgtcaagttggcctacaatgaaaatgacaatacctactatgcaatgaaggtgctgtccaaaaagaagctgatccggcaggccggctttccacgtcgccctccaccccgaggcacccggccagctcctggaggctgcatccagcccaggggccccattgagcaggtgtaccaggaaattgccatcctcaagaagctggaccaccccaatgtggtgaagctggtggaggtcctggatgaccccaatgaggaccatctgtacatggtgttcgaactggtcaaccaagggcccgtgatggaagtgcccaccctcaaaccactctctgaagaccaggcccgtttctacttccaggatctgatcaaaggcatcgagtacttacactaccagaagatcatccaccgtgacatcaaaccttccaacctcctggtcggagaagatgggcacatcaagatcgctgactttggtgtgagcaatgaattcaagggcagtgacgcgctcctctccaacaccgtgggcacgcccgccttcatggcacccgagtcgctctctgagacccgcaagatcttctctgggaaggccttggatgtttgggccatgggtgtgacactatactgctttgtctttggccagtgcccattcatggacgagcggatcatgtgtttacacagtaagatcaagagtcaggccctggaatttccagaccagcccgacatagctgaggacttgaaggacctgatcacccgtatgctggacaagaaccccgagtcgaggatcgtggtgccggaaatcaagctgcacccctgggtcacgaggcatggggcggagccgttgccgtcggaggatgagaactgcacgctggtcgaagtgactgaagaggaggtcgagaactcagtcaaacacattcccagcttggcaaccgtgatcctggtgaagaccatgatacgtaaacgctcctttgggaacccattcgagggcagccggcgggaggaacgctcactgtcagcgcctggaaacttgctcaccaaaaaaccaaccagggaatgtgagtccctgtctgagctcaagacttctgcagccattaccaccatcaactttacgacattttcatcagcccaagaagacaccctacactccttagctgtccccatccaactcccccaccccagtaaccactcagaataggtatggatttgcctattctggacgtttcgtataaatggcgtcatacactacgtgg

SEQ ID NO: 430956 - DNA, 412 bp, Homo sapiens
cggagccgttgccgtcggaggatgagaactgcacgctggtcgaagtgactgaagaggaggtcgagaactcagtcaaacacattcccagcttggcaaccgtggtaaggtggatggacccctgacccagagcagggacccaggagcctgaggtggggcctggccaggacaggccggacacaggcgggtgcccgggagtcagatgtccgggggccacccctaatccacagctgctggcctctgggccttggtcatgtatcaggccaggtgacccctgcatcttctgagccaggttccatgttaccataggaaggggaagattatccttctggaattcctgctttcagagctcatcaggggagaggaactaggagaagttccaggcaggggcaagggttgggagccggagcccagg

SEQ ID NO: 430957 - DNA, 222 bp, Homo sapiens
gatcgattcaatgcccgatgcttctgtttcattcccgaccctttctactatgcattttccttttatcaggtgtataaagttaaatactgtgtatttatcactaaaaagtacatgaacttaagagacaactaagcctttcgtgtttttccacaggtgtttaagcttctctgtacagttgaaataaacagacagcaaaatggtaccaagcctgggcctcttggg

SEQ ID NO: 430958 - DNA, 137 bp, Homo sapiens
caaagggtactttataaagaatgtgaaaattgctgtttcttaagtaaatatttctgagattaaatgtttttttaacaaatattttggtgagtctttaaaattctcacattcattaaaatctttatctaaaactgcac

SEQ ID NO: 430959 - DNA, 2595 bp, Homo sapiens
actccggagactgagccatggggggaaagcagcgggacgaggatgacgaggcctacgggaagccagtcaaatacgacccctcctttcgaggccccatcaagaacagaagctgcacagatgtcatctgctgcgtcctcttcctgctcttcattctaggttacatcgtggtggggattgtggcctggttgtatggagacccccggcaagtcctctaccccaggaactctactggggcctactgtggcatgggggagaacaaagataagccgtatctcctgtacttcaacatcttcagctgcatcctgtccagcaacatcatctcagttgctgagaacggcctacagtgccccacaccccaggtgtgtgtgtcctcctgcccggaggacccatggactgtgggaaaaaacgagttctcacagactgttggggaagtcttctatacaaaaaacaggaacttttgtctgccaggggtaccctggaatatgacggtgatcacaagcctgcaacaggaactctgccccagtttcctcctcccctctgctccagctctgggacgctgctttccatggaccaacattactccaccggcgctcccagggatcaccaatgacaccaccatacagcaggggatcagcggtcttattgacagcctcaatgcccgagacatcagtgttaagatctttgaagattttgcccagtcctggtattggattcttgttgccctgggggtggctctggtcttgagcctactgtttatcttgcttctgcgcctggtggctgggcccctggtgctggtgctgatcctgggagtgctgggcgtgctggcatatggcatctactactgctgggaggagtaccgagtgctgcgggacaagggcgcctccatctcccagctgggtttcaccaccaacctcagtgcctaccagagcgtgcaggagacctggctggccgccctgatcgtgttggcggtgcttgaagccatcctgctgctggtgctcatcttcctgcggcagcggattcgtattgccatcgccctcctgaaggaggccagcaaggctgtgggacagatgatgtctaccatgttctacccactggtcacctttgtcctcctcctcatctgcattgcctactgggccatgactgctctgtacctggctacatcggggcaaccccagtatgtgctctgggcatccaacatcagctcccccggctgtgagaaagtgccaataaatacatcatgcaaccccacggcccaccttgtgaactcctcgtgcccagggctgatgtgcgtcttccagggctactcatccaaaggcctaatccaacgttctgtcttcaatctgcaaatctatggggtcctggggctcttctggacccttaactgggtactggccctgggccaatgcgtcctcgctggagcctttgcctccttctactgggccttccacaagccccaggacatccctaccttccccttaatctctgccttcatccgcacactccgttaccacactgggtcattggcatttggagccctcatcctgacccttgtgcagatagcccgggtcatcttggagtatattgaccacaagctcagaggagtgcagaaccctgtagcccgctgcatcatgtgctgtttcaagtgctgcctctggtgtctggaaaaatttatcaagttcctaaaccgcaatgcatacatcatgatcgccatctacgggaagaatttctgtgtctcagccaaaaatgcgttcatgctactcatgcgaaacattgtcagggtggtcgtcctggacaaagtcacagacctgctgctgttctttgggaagctgctggtggtcggaggcgtgggggtcctgtccttcttttttttctccggtcgcatcccggggctgggtaaagactttaagagcccccacctcaactattactggctgcccatcatgacctccatcctgggggcctatgtcatcgccagcggcttcttcagcgttttcggcatgtgtgtggacacgctcttcctctgcttcctggaagacctggagcggaacaacggctccctggaccggccctactacatgtccaagagccttctaaagattctgggcaagaagaacgaggcgcccccggacaacaagaagaggaagaagtgacagctccggccctgatccaggactgcaccccacccccaccgtccagccatccaacctcacttcgccttacaggtctccattttgtggtaaaaaaaggttttaggccaggcgccgtggctcacgcctgtaatccaacactttgagaggctgaggcgggcggatcacctgagtcaggagttcgagaccagcctggccaacatggtgaaacctccgtctctattaaaaatacaaaaattagccgagagtggtggcatgcacctgtcatcccagctactcgggaggctgaggcaggagaatcgcttgaacccgggaggcagaggttgcagtgagccgagatcgcgccactgcactccaacctgggtgacagactctgtctccaaaacaaaacaaacaaacaaaaagattttattaaagatattttgttaactcagtaaaaaaaaaaaac

SEQ ID NO: 430960 - DNA, 504 bp, Homo sapiens
tggagatttggtgcttctagaaacaatgcctttgtgagctaaacgaaccagagggagcttcttgtgacatcctgaggccaggcgtttagggaagaaggaagagagtgagcccccaggccggtagtcttccaaagaaggagcattctgatggagaggtctctgctatcttccctaagaaatctcgggtagaagttagccattagaggccaggcatggtggctcacgcctgtcatgccagcactttgggggaccgaggtgggcagatcaccctgaggtcaggagttcgagaccagcctggcccacatggtgaaacccctctctactaaaaatacaaaaaattagctgggcgcggtggcgggcgcctgtaatcccagccacttgggaggctgaagcaggagaatcgcttgaactcgggaggcggaggttgcagcgagccgagattgcgctactgcacttcagcttgggcgacagcaagactccgtctcaaaacaaagaaaaaagatt

SEQ ID NO: 430961 - DNA, 2515 bp, Homo sapiens
actccggagactgagccatggggggaaagcagcgggacgaggatgacgaggcctacgggaagccagtcaaatacgacccctcctttcgaggccccatcaagaacagaagctgcacagatgtcatctgctgcgtcctcttcctgctcttcattctaggttacatcgtggtggggattgtggcctggttgtatggagacccccggcaagtcctctaccccaggaactctactggggcctactgtggcatgggggagaacaaagataagccgtatctcctgtacttcaacatcttcagctgcatcctgtccagcaacatcatctcagttgctgagaacggcctacagtgccccacaccccaggtgtgtgtgtcctcctgcccggaggacccatggactgtgggaaaaaacgagttctcacagactgttggggaagtcttctatacaaaaaacaggaacttttgtctgccaggggtaccctggaatatgacggtgatcacaagcctgcaacaggaactctgccccagtttcctcctcccctctgctccagctctgggacgctgctttccatggaccaacattactccaccggcgctcccagggatcaccaatgacaccaccatacagcaggggatcagcggtcttattgacagcctcaatgcccgagacatcagtgttaagatctttgaagattttgcccagtcctggtattggattcttgttgccctgggggtggctctggtcttgagcctactgtttatcttgcttctgcgcctggtggctgggcccctggtgctggtgctgatcctgggagtgctgggcgtgctggcatatggcatctactactgctgggaggagtaccgagtgctgcgggacaagggcgcctccatctcccagctgggtttcaccaccaacctcagtgcctaccagagcgtgcaggagacctggctggccgccctgatcgtgttggcggtgcttgaagccatcctgctgctggtgctcatcttcctgcggcagcggattcgtattgccatcgccctcctgaaggaggccagcaaggctgtgggacagatgatgtctaccatgttctacccactggtcacctttgtcctcctcctcatctgcattgcctactgggccatgactgctctgtacctggctacatcggggcaaccccagtatgtgctctgggcatccaacatcagctcccccggctgtgagaaagtgccaataaatacatcatgcaaccccacggcccaccttgtgaactcctcgtgcccagggctgatgtgcgtcttccagggctactcatccaaaggcctaatccaacgttctgtcttcaatctgcaaatctatggggtcctggggctcttctggacccttaactgggtactggccctgggccaatgcgtcctcgctggagcctttgcctccttctactgggccttccacaagccccaggacatccctaccttccccttaatctctgccttcatccgcacactccgttaccacactgggtcattggcatttggagccctcatcctgacccttgtgcagatagcccgggtcatcttggagtatattgaccacaagctcagaggagtgcagaaccctgtagcccgctgcatcatgtgctgtttcaagtgctgcctctggtgtctggaaaaatttatcaagttcctaaaccgcaatgcatacatcatgatcgccatctacgggaagaatttctgtgtctcagccaaaaatgcgttcatgctactcatgcgaaacattgtcagggtggtcgtcctggacaaagtcacagacctgctgctgttctttgggaagctgctggtggtcggaggcgtgggggtcctgtccttcttttttttctccggtcgcatcccggggctgggtaaagactttaagagcccccacctcaactattactggctgcccatcatgacctccatcctgggggcctatgtcatcgccagcggcttcttcagcgttttcggcatgtgtgtggacacgctcttcctctgcttccaagaacgaggcgcccccggacaacaagaagaggaagaagtgacagctccggccctgatccaggactgcaccccacccccaccgtccagccatccaacctcacttcgccttacaggtctccattttgtggtaaaaaaaggttttaggccaggcgccgtggctcacgcctgtaatccaacactttgagaggctgaggcgggcggatcacctgagtcaggagttcgagaccagcctggccaacatggtgaaacctccgtctctattaaaaatacaaaaattagccgagagtggtggcatgcacctgtcatcccagctactcgggaggctgaggcaggagaatcgcttgaacccgggaggcagaggttgcagtgagccgagatcgcgccactgcactccaacctgggtgacagactctgtctccaaaacaaaacaaacaaacaaaaagattttattaaagatattttgttaactcagtaaaaaaaaaaaac

SEQ ID NO: 430962 - DNA, 1897 bp, Homo sapiens
tgtcctcaccctgcctacagtgccctgggggtggctctggtcttgagcctactgtttatcttgcttctgcgcctggtggctgggcccctggtgctggtgctgatcctgggagtgctgggcgtgctggcatatggcatctactactgctgggaggagtaccgagtgctgcgggacaagggcgcctccatctcccagctgggtttcaccaccaacctcagtgcctaccagagcgtgcaggagacctggctggccgccctgatcgtgttggcggtgcttgaagccatcctgctgctggtgctcatcttcctgcggcagcggattcgtattgccatcgccctcctgaaggaggccagcaaggctgtgggacagatgatgtctaccatgttctacccactggtcacctttgtcctcctcctcatctgcattgcctactgggccatgactgctctgtacctggctacatcggggcaaccccagtatgtgctctgggcatccaacatcagctcccccggctgtgagaaagtgccaataaatacatcatgcaaccccacggcccaccttgtgaactcctcgtgcccagggctgatgtgcgtcttccagggctactcatccaaaggcctaatccaacgttctgtcttcaatctgcaaatctatggggtcctggggctcttctggacccttaactgggtactggccctgggccaatgcgtcctcgctggagcctttgcctccttctactgggccttccacaagccccaggacatccctaccttccccttaatctctgccttcatccgcacactccgttaccacactgggtcattggcatttggagccctcatcctgacccttgtgcagatagcccgggtcatcttggagtatattgaccacaagctcagaggagtgcagaaccctgtagcccgctgcatcatgtgctgtttcaagtgctgcctctggtgtctggaaaaatttatcaagttcctaaaccgcaatgcatacatcatgatcgccatctacgggaagaatttctgtgtctcagccaaaaatgcgttcatgctactcatgcgaaacattgtcagggtggtcgtcctggacaaagtcacagacctgctgctgttctttgggaagctgctggtggtcggaggcgtgggggtcctgtccttcttttttttctccggtcgcatcccggggctgggtaaagactttaagagcccccacctcaactattactggctgcccatcatgacctccatcctgggggcctatgtcatcgccagcggcttcttcagcgttttcggcatgtgtgtggacacgctcttcctctgcttcctggaagacctggagcggaacaacggctccctggaccggccctactacatgtccaagagccttctaaagattctgggcaagaagaacgaggcgcccccggacaacaagaagaggaagaagtgacagctccggccctgatccaggactgcaccccacccccaccgtccagccatccaacctcacttcgccttacaggtctccattttgtggtaaaaaaaggttttaggccaggcgccgtggctcacgcctgtaatccaacactttgagaggctgaggcgggcggatcacctgagtcaggagttcgagaccagcctggccaacatggtgaaacctccgtctctattaaaaatacaaaaattagccgagagtggtggcatgcacctgtcatcccagctactcgggaggctgaggcaggagaatcgcttgaacccgggaggcagaggttgcagtgagccgagatcgcgccactgcactccaacctgggtgacagactctgtctccaaaacaaaacaaacaaacaaaaagattttattaaagatattttgttaactcagtaaaaaaaaaaaac

SEQ ID NO: 430963 - DNA, 1940 bp, Homo sapiens
tttctcagccccatttgtgcaacctctgatcaagccatcctggcaacgcagggcaggctcacagtgccaacacatatagcaagccaccccccagggccactctggagtttccctgaaagcagaagactccctggtgctggtgctgatcctgggagtgctgggcgtgctggcatatggcatctactactgctgggaggagtaccgagtgctgcgggacaagggcgcctccatctcccagctgggtttcaccaccaacctcagtgcctaccagagcgtgcaggagacctggctggccgccctgatcgtgttggcggtgcttgaagccatcctgctgctggtgctcatcttcctgcggcagcggattcgtattgccatcgccctcctgaaggaggccagcaaggctgtgggacagatgatgtctaccatgttctacccactggtcacctttgtcctcctcctcatctgcattgcctactgggccatgactgctctgtacctggctacatcggggcaaccccagtatgtgctctgggcatccaacatcagctcccccggctgtgagaaagtgccaataaatacatcatgcaaccccacggcccaccttgtgaactcctcgtgcccagggctgatgtgcgtcttccagggctactcatccaaaggcctaatccaacgttctgtcttcaatctgcaaatctatggggtcctggggctcttctggacccttaactgggtactggccctgggccaatgcgtcctcgctggagcctttgcctccttctactgggccttccacaagccccaggacatccctaccttccccttaatctctgccttcatccgcacactccgttaccacactgggtcattggcatttggagccctcatcctgacccttgtgcagatagcccgggtcatcttggagtatattgaccacaagctcagaggagtgcagaaccctgtagcccgctgcatcatgtgctgtttcaagtgctgcctctggtgtctggaaaaatttatcaagttcctaaaccgcaatgcatacatcatgatcgccatctacgggaagaatttctgtgtctcagccaaaaatgcgttcatgctactcatgcgaaacattgtcagggtggtcgtcctggacaaagtcacagacctgctgctgttctttgggaagctgctggtggtcggaggcgtgggggtcctgtccttcttttttttctccggtcgcatcccggggctgggtaaagactttaagagcccccacctcaactattactggctgcccatcatgacctccatcctgggggcctatgtcatcgccagcggcttcttcagcgttttcggcatgtgtgtggacacgctcttcctctgcttcctggaagacctggagcggaacaacggctccctggaccggccctactacatgtccaagagccttctaaagattctgggcaagaagaacgaggcgcccccggacaacaagaagaggaagaagtgacagctccggccctgatccaggactgcaccccacccccaccgtccagccatccaacctcacttcgccttacaggtctccattttgtggtaaaaaaaggttttaggccaggcgccgtggctcacgcctgtaatccaacactttgagaggctgaggcgggcggatcacctgagtcaggagttcgagaccagcctggccaacatggtgaaacctccgtctctattaaaaatacaaaaattagccgagagtggtggcatgcacctgtcatcccagctactcgggaggctgaggcaggagaatcgcttgaacccgggaggcagaggttgcagtgagccgagatcgcgccactgcactccaacctgggtgacagactctgtctccaaaacaaaacaaacaaacaaaaagattttattaaagatattttgttaactcagtaaaaaaaaaaaac

SEQ ID NO: 430964 - DNA, 2259 bp, Homo sapiens
actccggagactgagccatggggggaaagcagcgggacgaggatgacgaggcctacgggaagccagtcaaatacgacccctcctttcgaggccccatcaagaacagaagctgcacagatgtcatctgctgcgtcctcttcctgctcttcattctaggttacatcgtggtggggattgtggcctggttgtatggagacccccggcaagtcctctaccccaggaactctactggggcctactgtggcatgggggagaacaaagataagccgtatctcctgtacttcaacatcttcagctgcatcctgtccagcaacatcatctcagttgctgagaacggcctacagtgccccacaccccaggtgtgtgtgtcctcctgcccggaggacccatggactgtgggaaaaaacgagttctcacagactgttggggaagtcttctatacaaaaaacaggaacttttgtctgccaggggtaccctggaatatgacggtgatcacaagcctgcaacaggaactctgccccagtttcctcctcccctctgctccagctctgggacgctgctttccatggaccaacattactccaccggcgctcccagggatcaccaatgacaccaccatacagcaggggatcagcggtcttattgacagcctcaatgcccgagacatcagtgttaagatctttgaagattttgcccagtcctggtattggattcttgtggctgtgggacagatgatgtctaccatgttctacccactggtcacctttgtcctcctcctcatctgcattgcctactgggccatgactgctctgtacctggctacatcggggcaaccccagtatgtgctctgggcatccaacatcagctcccccggctgtgagaaagtgccaataaatacatcatgcaaccccacggcccaccttgtgaactcctcgtgcccagggctgatgtgcgtcttccagggctactcatccaaaggcctaatccaacgttctgtcttcaatctgcaaatctatggggtcctggggctcttctggacccttaactgggtactggccctgggccaatgcgtcctcgctggagcctttgcctccttctactgggccttccacaagccccaggacatccctaccttccccttaatctctgccttcatccgcacactccgttaccacactgggtcattggcatttggagccctcatcctgacccttgtgcagatagcccgggtcatcttggagtatattgaccacaagctcagaggagtgcagaaccctgtagcccgctgcatcatgtgctgtttcaagtgctgcctctggtgtctggaaaaatttatcaagttcctaaaccgcaatgcatacatcatgatcgccatctacgggaagaatttctgtgtctcagccaaaaatgcgttcatgctactcatgcgaaacattgtcagggtggtcgtcctggacaaagtcacagacctgctgctgttctttgggaagctgctggtggtcggaggcgtgggggtcctgtccttcttttttttctccggtcgcatcccggggctgggtaaagactttaagagcccccacctcaactattactggctgcccatcatgacctccatcctgggggcctatgtcatcgccagcggcttcttcagcgttttcggcatgtgtgtggacacgctcttcctctgcttcctggaagacctggagcggaacaacggctccctggaccggccctactacatgtccaagagccttctaaagattctgggcaagaagaacgaggcgcccccggacaacaagaagaggaagaagtgacagctccggccctgatccaggactgcaccccacccccaccgtccagccatccaacctcacttcgccttacaggtctccattttgtggtaaaaaaaggttttaggccaggcgccgtggctcacgcctgtaatccaacactttgagaggctgaggcgggcggatcacctgagtcaggagttcgagaccagcctggccaacatggtgaaacctccgtctctattaaaaatacaaaaattagccgagagtggtggcatgcacctgtcatcccagctactcgggaggctgaggcaggagaatcgcttgaacccgggaggcagaggttgcagtgagccgagatcgcgccactgcactccaacctgggtgacagactctgtctccaaaacaaaacaaacaaacaaaaagattttattaaagatattttgttaactcagtaaaaaaaaaaaac

SEQ ID NO: 430965 - DNA, 980 bp, Homo sapiens
ctggccccagggtccgctctaaccggtctctgttgcggctcagtggaagacctggagcggaacaacggctccctggaccggccctactacatgtccaagagccattagagagacttcccagcaggtggctgtagcggcaggggattttcttactctacagcatgcatccattcagggtttgccagtctcctcctaagcgactgacatgcattttttccgctaattcttatcatcgctctatgcaacataatattcccgaccccacttcacaggaggaaactgagattacataacctgcccgggggtaagggtggtggtgcagcttggattccaaatcccgcaggcagcttgcctcccagtccccgatttcctggccccagggtccgctctaaccggtctctgttgcggctcagtggaagacctggagcggaacaacggctccctggaccggccctactacatgtccaagagccttctaaagattctgggcaagaagaacgaggcgcccccggacaacaagaagaggaagaagtgacagctccggccctgatccaggactgcaccccacccccaccgtccagccatccaacctcacttcgccttacaggtctccattttgtggtaaaaaaaggttttaggccaggcgccgtggctcacgcctgtaatccaacactttgagaggctgaggcgggcggatcacctgagtcaggagttcgagaccagcctggccaacatggtgaaacctccgtctctattaaaaatacaaaaattagccgagagtggtggcatgcacctgtcatcccagctactcgggaggctgaggcaggagaatcgcttgaacccgggaggcagaggttgcagtgagccgagatcgcgccactgcactccaacctgggtgacagactctgtctccaaaacaaaacaaacaaacaaaaagattttattaaagatattttgttaactcagtaaaaaaaaaaaac

SEQ ID NO: 430966 - DNA, 710 bp, Homo sapiens
actccggagactgagccatggggggaaagcagcgggacgaggatgacgaggcctacgggaagccagtcaaatacgacccctcctttcgaggccccatcaagaacagaagctgcacagatgtcatctgctgcgtcctcttcctgctcttcattctaggttacatcgtggtggggattgtggcctggttgtatggagacccccggcaagtcctctaccccaggaactctactggggcctactgtggcatgggggagaacaagtgagtacaaaggcgagaagaggagtgcaggagcgaggcgaggtagggtgggcaggagacacccccccaactcaggctccagacctgtccgtgctcttccacagcctttccctgctgtccccaccccacctcagcctccctgaatctgacaactccaggccacgttaagaaccattgctggacagttagcttcttgagtccccccagaaatgggaggcagtggagagtcgtgttaagtgtatgagttttacagttcagagattggtgtttggatccccaactggaccaagttttggttgtgtggccttggacaagttactcaagctctctgagctttgatttccttatttgagattcaaggggaattccagaagcaatgccaacagtcctcacatacagatgtccaataaataataaaacctcaaatatttatatagcatttactatgttc

SEQ ID NO: 430967 - DNA, 663 bp, Homo sapiens
actccggagactgagccatggggggaaagcagcgggacgaggatgacgaggcctacgggaagccagtcaaatacgacccctcctttcgaggccccatcaagaacagaagctgcacagatgtcatctgctgcgtcctcttcctgctcttcattctaggttacatcgtggtggggattgtggcctggttgtatggagacccccggcaagtcctctaccccaggaactctactggggcctactgtggcatgggggagaacaaagataagccgtatctcctgtacttcaacatcttcagctgcatcctgtccagcaacatcatctcagttgctgagaacggcctacagtgccccacaccccaggtgtgtgtgtcctcctgcccggaggacccatggactgtgggaaaaaacgagttctcacagactgttggggaagtcttctatacaaaaaacaggaacttttgtctgccaggggtaccctggaatatgacggtgatcacaagcctgcaacaggaaaatcgcttgaacccgggaggcagaggttgcagtgagccgagatcgcgccactgcactccaacctgggtgacagactctgtctccaaaacaaaacaaacaaacaaaaagattttattaaagatattttgttaactcagtaaaaaaaaaaaac

SEQ ID NO: 430968 - DNA, 264 bp, Homo sapiens
ctccccagttttcccctcctgccagtcctgccctagcccatctccctccaaacacctgaggcctgggtaggatcctggggctaggaggactcagcaggacaagatatgcagagagagactcatcctccacacctcttctcatgtccctcagggaagccagtcaaatacgacccctcctttcgaggccccatcaagaacaggtgagctctgggcactgctccgggggctggcgggggtggtgggtgcagtgtggaatccagtatt

SEQ ID NO: 430969 - DNA, 446 bp, Homo sapiens
tctcaaaacaaagaaaaaagattaaaaaaaaaaaagagccattagagagacttcccagcaggtggctgtagcggcaggggattttcttactctacagcatgcatccattcagggtttgccagtctcctcctaagcgactgacatgcattttttccgctaattcttatcatcgctctatgcaacataatattcccgaccccacttcacaggaggaaactgagattacataacctgcccgggggtaagggtggtggtgcagcttggattccaaatcccgcaggcagcttgcctcccagtccccgatttcctggccccagggtccgctctaaccggtctctgttgcggctcagtggaagacctggagcggaacaacggctccctggaccggccctactacatgtccaagagccttctaaagattctgggcaagaagaacgaggcgcccc

SEQ ID NO: 430970 - DNA, 1735 bp, Homo sapiens
actccggagactgagccatggggggaaagcagcgggacgaggatgacgaggcctacgggaagccagtcaaatacgacccctcctttcgaggccccatcaagaacagaagctgcacagatgtcatctgctgcgtcctcttcctgctcttcattctaggttacatcgtggtggggattgtggcctggttgtatggagacccccggcaagtcctctaccccaggaactctactggggcctactgtggcatgggggagaacaaagataagccgtatctcctgtacttcaacatcttcagctgcatcctgtccagcaacatcatctcagttgctgagaacggcctacagtgccccacaccccaggtgtgtgtgtcctcctgcccggaggacccatggactgtgggaaaaaacgagttctcacagactgttggggaagtcttctatacaaaaaacaggaacttttgtctgccaggggtaccctggaatatgacggtgatcacaagcctgcaacaggaactctgccccagtttcctcctcccctctgctccagctctgggacgctgctttccatggaccaacattactccaccggcgctcccagggatcaccaatgacaccaccatacagcaggggatcagcggtcttattgacagcctcaatgcccgagacatcagtgttaagatctttgaagattttgcccagtcctggtattggattcttgttgccctgggggtggctctggtcttgagcctactgtttatcttgcttctgcgcctggtggctgggcccctggtgctggtgctgatcctgggagtgctgggcgtgctggcatatggcatctactactgctgggaggagtaccgagtgctgcgggacaagggcgcctccatctcccagctgggtttcaccaccaacctcagtgcctaccagagcgtgcaggagacctggctggccgccctgatcgtgttggcggtgcttgaagccatcctgctgctggtgctcatcttcctgcggcagcggattcgtattgccatcgccctcctgaaggaggccagcaaggctgtgggacagatgatgtctaccatgttctacccactggtcacctttgtcctcctcctcatctgcattgcctactgggccatgactgctctgtacctggctacatcggggcaaccccagtatgtgctctgggcatccaacatcagctcccccggctgtgagaaagtgccaataaatacatcatgcaaccccacggcccaccttgtgaactcctcgtgcccagggctgatgtgcgtcttccagggctactcatccaaaggcctaatccaacgttctgtcttcaatctgcaaatctatggggtcctggggctcttctggacccttaactgggtactggccctgggccaatgcgtcctcgctggagcctttgcctccttctactgggccttccacaagccccaggacatccctaccttccccttaatctctgccttcatccgcacactccgttaccacactgggtcattggcatttggagccctcatcctgacccttgtgcagatagcccgggtcatcttggagtatattgaccacaagctcagaggagtgcagaaccctgtagcccgctgcatcatgtgctgtttcaagtgctgcctctggtgtctggaaaaatttatcaagttcctaaaccgcaatgcatacatcatgatcgccgtcacgagggtacacgagctcgatca

SEQ ID NO: 430971 - DNA, 998 bp, Homo sapiens
actccggagactgagccatggggggaaagcagcgggacgaggatgacgaggcctacgggaagccagtcaaatacgacccctcctttcgaggccccatcaagaacagaagctgcacagatgtcatctgctgcgtcctcttcctgctcttcattctaggttacatcgtggtggggattgtggcctggttgtatggagacccccggcaagtcctctaccccaggaactctactggggcctactgtggcatgggggagaacaaagataagccgtatctcctgtacttcaacatcttcagctgcatcctgtccagcaacatcatctcagttgctgagaacggcctacagtgccccacaccccaggtgtgtgtgtcctcctgcccggaggacccatggactgtgggaaaaaacgagttctcacagactgttggggaagtcttctatacaaaaaacaggaacttttgtctgccaggggtaccctggaatatgacggtgatcacaagcctgcaacaggaactctgccccagtttcctcctcccctctgctccagctctgggacgctgctttccatggaccaacattactccaccggcgctcccagggatcaccaatgacaccaccatacagcaggggatcagcggtcttattgacagcctcaatgcccgagacatcagtgttaagatctttgaagattttgcccagtcctggtattggattcttgttgccctgggggtggctctggtcttgagcctactgtttatctcgctggagcctttgcctccttctactgggccttccacaagccccaggacatccctaccttccccttaatctctgccttcatccgcacactccgttaccacactgggtcattggcatttggagccctcatcctgacccttgtgcagatagcccgggtcatcttggagtatattgaccacaagctcagaggagtgcagaaccctgtagccagctgcagcacttgaaacagcacatgatgtc

SEQ ID NO: 430972 - DNA, 130 bp, Homo sapiens
gattacaggcgtgagccaccgcgcccggccggggtcagccccttgagaagatggacagctggggcggtgccggttaacagctttgtctccctgcagggctgtgggacagatgatgtctaccatgttctac

SEQ ID NO: 430973 - DNA, 3805 bp, Homo sapiens
ggccccgtcgcgcgtcacgtggccgccggcgcgggtcacgagaacaaacacgggggcagccggcgcttcccggccggtgtcgctccgcggcgggccatggccaacgtctctaagaaggtgtcctggtccggccgggaccgggacgacgaggaggcggcgccgctgctgcggaggacggcgcggcccggcggggggacgccgctgctgaacggggctgggcctggggctgcgcgccagtcaccacgttctgcgcttttccgagtcggacatatgagcagcgtggagctggatgatgaacttttggacccggatatggaccctccacatcccttccccaaggagatcccacacaacgagaagctcctgtccctcaagtatgagagcttggactatgacaacagtgagaaccagctgttcctggaggaggagcggcggatcaatcacacggccttccggacggtggagatcaagcgctgggtcatctgcgccctcattgggatcctcacgggcctcgtggcctgcttcattgacatcgtggtggaaaacctggctggcctcaagtacagggtcatcaagggcaatatcgacaagttcacagagaagggcggactgtccttctccctgttgctgtgggccacgctgaacgccgccttcgtgctcgtgggctctgtgattgtggctttcatagagccggtggctgctggcagcggaatcccccagatcaagtgcttcctcaacggggtgaagatcccccacgtggtgcggctcaagacgttggtgatcaaagtgtccggtgtgatcctgtccgtggtcgggggcctggccgtgggaaaggaagggccgatgatccactcaggttcagtgattgccgccgggatctctcagggaaggtcaacgtcactgaaacgagatttcaagatcttcgagtacttccgcagagacacagagaagcgggacttcgtctccgcaggggctgcggccggagtgtcagcggcgtttggagcccccgtgggtggggtcctgttcagcttggaggagggtgcgtccttctggaaccagttcctgacctggaggatcttctttgcttccatgatctccacgttcaccctgaattttgttctgagcatttaccacgggaacatgtgggacctgtccagcccaggcctcatcaacttcggaaggtttgactcggagaaaatggcctacacgatccacgagatcccggtcttcatcgccatgggcgtggtgggcggtgtgcttggagcagtgttcaatgccttgaactactggctgaccatgtttcgaatcaggtacatccaccggccctgcctgcaggtgatcgaggccatgctggtggccgccgtcacggccacagttgccttcgtgctgatctactcgtcgcgggattgccagcccctgcaggggggctccatgtcctacccgctgcagctcttttgtgcagatggcgagtacaactccatggctgcggccttcttcaacaccccggagaagagcgtggtgagcctcttccacgacccgccaggctcctacaaccccctgaccctcggcctgttcacgctggtctacttcttcctggcctgctggacctacgggctcacggtgtctgccggggtcttcatcccgtccctgctcatcggggctgcctggggccggctctttgggatctccctgtcctacctcacgggggcagcgatctgggcggaccccggcaaatacgccctgatgggagctgctgcccagctgggcgggattgtgcggatgacactgagcctgaccgtcatcatgatggaggccaccagcaacgtgacctacggcttccccatcatgctggtgctcatgaccgccaagatcgtgggcgacgtcttcattgagggcctgtacgacatgcacattcagctgcagagtgtgcccttcctgcactgggaggccccggtcacctcacactcactcactgccagggaggtgatgagcacaccagtgacctgcctgaggcggcgtgagaaggtcggcgtcattgtggacgtgctgagcgacacggcgtccaatcacaacggcttccccgtggtggagcatgccgatgacacccagcctgcccggctccagggcctgatcctgcgctcccagctcatcgttctcctaaagcacaaggtgtttgtggagcggtccaacctgggcctggtacagcggcgcctgaggctgaaggacttccgagacgcctacccgcgcttcccacccatccagtccatccacgtgtcccaggacgagcgggagtgcaccatggacctctccgagttcatgaacccctccccctacacggtgccccaggaggcgtcgctcccacgggtgttcaagctgttccgggccctgggcctgcggcacctggtggtggtggacaaccgcaatcaggttgtcgggttggtgaccaggaaggacctcgccaggtaccgcctgggaaagagaggcttggaggagctctcgctggcccagacgtgaggcccagccctgcccataatgggcactggcgctggcaccccggcccttctgcatttcctcccggagtcactggtttctcggcccaaaccatgctccccagcagtggcaatggcgagcaccctgcagctgggcgggcaggcggcaggcgcggaactgaccctctcgcgggactgaccctgttgtgggcagtggtctccccccttggcgcctccttgcgcaggcccagcctccactctcctcgtctaggtttctttacctccagggatcagctgtgtgtgtgtgacctccctaccgggctatcggcctcttgggagccagcggcagggccggcacctgcgtgcctgtgcccgtgtgcgtgagacagagcccttgcccctgctgctgccccgagggctgccctgccctggaagggcccctctgcctccacaccagtggagtcttcgagacttgggagctgcttggcctcattttcagccatgagcagacggcctgtggtccctgggcctgaggcacggactcgtagcaccagggtttggaggctgcgaccgccccggagagcagcttcacactggcgccacagaggagccccacgtgcactccccggcctgcatccggcttgggtacacaggcccagaggactggggtgactcacgggccctgtgctgtgatgttgagagctgagaaaaacctccaaggccctgagccccatgcccagccctgccttggtcccccaacccccagagcttggagtctgggccccacacccagccctgccttggtccctgagcctcagagcgtggaattgctgccctgtggacactggctgggaaggcaggtcttcccctagcacatggggaccccggcctcgagggtgacctccctaccttgcccctgccagccaccaagcgcaggtgcagcgggggccagactcctgccggcctcagaggacacctggcccagcacaggcagctagaagggccggtgggcaccggggccgggaagcccccacctcaccacctgagggcccctgggaggctcctctggcctggctgggctgggtctggggccgccacaggcccctcacggggcggcagaggcaacttcagtgtccctgttagagcaacacgggtccctccgtggggggctgggtgcggccccctgccgtgtatttcctccccagggagtggggcctccccgggagctgacgccaccaccctgcttagccctcacagggccccaaggtgtccgagtgtgttgggtctgaacgcgaaataaagaaatcctctcagcc

SEQ ID NO: 430974 - DNA, 1367 bp, Homo sapiens
gagacagtgggagggtcacggtcaccgtaaccaagaaggctgctcttacggccgccagatgcggtgcccagcataacaaccgctggctgtgaagttgttgggaattcacccacctccccgagtcaccctcgggccccgggtgcgcctcagatgttggccagaaactgtcctttgtgggactcagcgcaccgtgcacactgggcccttcataatcccggggcctgcaggcggtctgggcggtcctgctgctgccagagtgactgcgccagggccctgcctgaccctcgccctgaccgcgccctgcaggccttccggacggtggagatcaagcgctgggtcatctgcgccctcattgggatcctcacgggcctcgtggcctgcttcattgacatcgtggtggaaaacctggctggcctcaagtacagggtcatcaagggcaatatcgacaagttcacagagaagggcggactgtccttctccctgttgctgtgggccacgctgaacgccgccttcgtgctcgtgggctctgtgattgtggctttcatagagccggtggctgctggcagcggaatcccccagatcaagtgcttcctcaacggggtgaagatcccccacgtggtgcggctcaagacgttggtgatcaaagtgtccggtgtgatcctgtccgtggtcgggggcctggccgtgggaaaggaagggccgatgatccactcaggttcagtgattgccgccgggatctctcagggaaggtcaacgtcactgaaacgagatttcaagatcttcgagtacttccgcagagacacagagaagcgggacttcgtctccgcaggggctgcggccggagtgtcagcggcgtttggagcccccgtgggtggggtcctgtaacagcttgcgaggacgggtgcggtccttctgggaaccagtacatgacctggaaggatcttactatgcttaccatgaatcatccacggatcaacctagcaagtaaggactagagccatttaccacgaggaacatagtgggaacatggttcaagacccaagcgacctccatccaactttcggaacaggttagacctcgcgaaaaaaatgggctaacaaggagactccaggaggaacagccgggagaacagacggacaagtggaagagtgataacgagcgagggaacacgtagagagacgggtatacgcgagccatgagcaacgaacaggcaacgtccacgaggatagaagcgaggaaaaatacacgggacactaacgagcagagtatagtacggaccacagagagcgacgtcagaaggcacaaaacagagcaccacgacagacaacacacaacagaagagaagcgaaacgaagagagacagaaga

SEQ ID NO: 430975 - DNA, 4212 bp, Homo sapiens
ggccccgtcgcgcgtcacgtggccgccggcgcgggtcacgagaacaaacacgggggcagccggcgcttcccggccggtgtcgctccgcggcgggccatggccaacgtctctaagaaggtgtcctggtccggccgggaccgggacgacgaggaggcggcgccgctgctgcggaggacggcgcggcccggcggggggacgccgctgctgaacggggctgggcctggggctgcgcgccagtcaccacgttctgcgcttttccgagtcggacatatgagcagcgtggagctggatgatgaacttttggacccggatatggaccctccacatcccttccccaaggagatcccacacaacgagaagctcctgtccctcaagtatgagagcttggactatgacaacagtgagaaccagctgttcctggaggaggagcggcggatcaatcacacggccttccggacggtggagatcaagcgctgggtcatctgcgccctcattgggatcctcacgggcctcgtggcctgcttcattgacatcgtggtggaaaacctggctggcctcaagtacagggtcatcaagggcaatatcgacaagttcacagagaagggcggactgtccttctccctgttgctgtgggccacgctgaacgccgccttcgtgctcgtgggctctgtgattgtggctttcatagagccggtggctgctggcagcggaatcccccagatcaagtgcttcctcaacggggtgaagatcccccacgtggtgcggctcaagacgttggtgatcaaagtgtccggtgtgatcctgtccgtggtcgggggcctggccgtgggaaaggaagggccgatgatccactcaggttcagtgattgccgccgggatctctcagggaaggtcaacgtcactgaaacgagatttcaagatcttcgagtacttccgcagagacacagagaagcgggacttcgtctccgcaggggctgcggccggagtgtcagcggcgtttggagcccccgtgggtggggtcctgttcagcttggaggagggtgcgtccttctggaaccagttcctgacctggaggatcttctttgcttccatgatctccacgttcaccctgaattttgttctgagcatttaccacgggaacatgtgggacctgtccagcccaggcctcatcaacttcggaaggtttgactcggagaaaatggcctacacgatccacgagatcccggtcttcatcgccatgggcgtggtgggcggtgtgcttggagcagtgttcaatgccttgaactactggctgaccatgtttcgaatcaggtacatccaccggccctgcctgcaggtgatcgaggccatgctggtggccgccgtcacggccacagttgccttcgtgctgatctactcgtcgcgggattgccagcccctgcaggggggctccatgtcctacccgctgcagctcttttgtgcagatggcgagtacaactccatggctgcggccttcttcaacaccccggagaagagcgtggtgagcctcttccacgacccgccaggctcctacaaccccctgaccctcggcctgttcacgctggtctacttcttcctggcctgctggacctacgggctcacggtgtctgccggggtcttcatcccgtccctgctcatcggggctgcctggggccggctctttgggatctccctgtcctacctcacgggggcagcgatctgggcggaccccggcaaatacgccctgatgggagctgctgcccagctgggcgggattgtgcggatgacactgagcctgaccgtcatcatgatggaggccaccagcaacgtgacctacggcttccccatcatgctggtgctcatgaccgccaagatcgtgggcgacgtcttcattgagggcctgtacgacatgcacattcagctgcagagtgtgcccttcctgcactgggaggccccggtcacctcacactcactcactgccagggaggtgatgagcacaccagtgacctgcctgaggcggcgtgagaaggtcggcgtcattgtggacgtgctgagcgacacggcgtccaatcacaacggcttccccgtggtggagcatgccgatgacacccagcctgcccggctccagggcctgatcctgcgctcccagctcatcgttctcctaaagcacaaggtgtttgtggagcggtccaacctgggcctggtacagcggcgcctgaggctgaaggacttccgagacgcctacccgcgcttcccacccatccagtccatccacgtgtcccaggacgagcgggagtgcaccatggacctctccgagttcatgaacccctccccctacacggtgccccaggaggcgtcgctcccacgggtgttcaagctgttccgggccctgggcctgcggcacctggtggtggtggacaaccgcaatcaggttgtcgggttggtgaccaggaaggacctcgccaggtaccgcctgggaaagagaggcttggaggagctctcgctggcccagacgtgaggcccagccctgcccataatgggcactggcgctggcaccccggcccttctgcatttcctcccggagtcactggtttctcggcccaaaccatgctccccagcagtggcaatggcgagcaccctgcagctgggcgggcaggcggcaggcgcggaactgaccctctcgcgggactgaccctgttgtgggcagtggtctccccccttggcgcctccttgcgcaggcccagcctccactctcctcgtctaggtttctttacctccagggatcagctgtgtgtgtgtgacctccctaccgggctatcggcctcttgggagccagcggcagggccggcacctgcgtgcctgtgcccgtgtgcgtgagacagagcccttgcccctgctgctgccccgagggctgccctgccctggaagggcccctctgcctccacaccagtggagtcttcgagacttgggagctgcttggcctcattttcagccatgagcagacggcctgtggtccctgggcctgaggcacggactcgtagcaccagggtttggaggctgcgaccgccccggagagcagcttcacactggcgccacagaggagccccacgtgcactccccggcctgcatccggcttgggtacacaggcccagaggactggggtgactcacgggccctgtgctgtgatgttgagagctgagaaaaacctccaaggccctgagccccatgcccagccctgccttggtcccccaacccccagagcttggagtctgggccccacacccagccctgccttggtccctgagcctcagagcgtggaattgctgccctgtggacactggctgggaaggcaggtcttcccctagcacatggggaccccggcctcgagggtgacctccctaccttgcccctgccagccaccaagcgcaggtgcagcgggggccagactcctgccggcctcagaggacacctggcccagcacaggcagctagaagggccggtgggcaccggggccgggaagcccccacctcaccacctgagggcccctgggaggctcctctggcctggctgggctgggtctggggccgccacaggcccctcacggggcggcagaggcaacttcagtgtccctgttagagcaacacgggtccctccgtggggggctgggtgcggccccctgccgtgtatttcctccccagggagtggggcctccccgggagctgacgccaccaccctgcttagccctcacagggccccaaggtgtccgagtgtgttgggtctgaacgcgaaataaagaaatcctctcagcccgcctttgccagcgtcgtccctcccaccccacccagaccacgtccaacagcctgggactttcgggaccctggggtcggggcaccgtgtggagtgagacaggcgtgaaagacagcggctgcggccacccagggcaccagccacatcctcttcctcgtccccgcccctcagcctccctcctctggctcctggctggtgggtctgggggcaaggcagaggcgctccaggtggaggggggcgggccggggtgcccacgctggggtgacgcaagaagaaaactcccgggcctcagagtcggcgccggaaacctaggtctgggtttccctcgtggtggttgtgtactgaggacctggaagtgatcatattttggatatattcggttaaataaaatcagcggttaggattcaca

SEQ ID NO: 430976 - DNA, 3989 bp, Homo sapiens
ggccccgtcgcgcgtcacgtggccgccggcgcgggtcacgagaacaaacacgggggcagccggcgcttcccggccggtgtcgctccgcggcgggccatggccaacgtctctaagaaggtgtcctggtccggccgggaccgggacgacgaggaggcggcgccgctgctgcggaggacggcgcggcccggcggggggacgccgctgctgaacggggctgggcctggggctgcgcgccagtcaccacgttctgcgcttttccgagtcggacatatgagcagcgtggagctggatgatgaacttttggacccggatatggaccctccacatcccttccccaaggagatcccacacaacgagaagctcctgtccctcaagtatgagagcttggactatgacaacagtgagaaccagctgttcctggaggaggagcggcggatcaatcacacggccttccggacggtggagatcaagcgctgggtcatctgcgccctcattgggatcctcacgggcctcgtggcctgcttcattgacatcgtggtggaaaacctggctggcctcaagtacagggtcatcaagggcaatatcgacaagttcacagagaagggcggactgtccttctccctgttgctgtgggccacgctgaacgccgccttcgtgctcgtgggctctgtgattgtggctttcatagagccggtggctgctggcagcggaatcccccagatcaagtgcttcctcaacggggtgaagatcccccacgtggtgcggctcaagacgttggtgatcaaagtgtccggtgtgatcctgtccgtggtcgggggcctggccgtgggaaaggaagggccgatgatccactcaggttcagtgattgccgccgggatctctcagggaaggtcaacgtcactgaaacgagatttcaagatcttcgagtacttccgcagagacacagagaagcgggacttcgtctccgcaggggctgcggccggagtgtcagcggcgtttggagcccccgtgggtggggtcctgttcagcttggaggagggtgcgtccttctggaaccagttcctgacctggaggatcttctttgcttccatgatctccacgttcaccctgaattttgttctgagcatttaccacgggaacatgtgggacctgtccagcccaggcctcatcaacttcggaaggtttgactcggagaaaatggcctacacgatccacgagatcccggtcttcatcgccatgggcgtggtgggcggtgtgcttggagcagtgttcaatgccttgaactactggctgaccatgtttcgaatcaggtacatccaccggccctgcctgcaggtgatcgaggccatgctggtggccgccgtcacggccacagttgccttcgtgctgatctactcgtcgcgggattgccagcccctgcaggggggctccatgtcctacccgctgcagctcttttgtgcagatggcgagtacaactccatggctgcggccttcttcaacaccccggagaagagcgtggtgagcctcttccacgacccgccaggctcctacaaccccctgaccctcggcctgttcacgctggtctacttcttcctggcctgctggacctacgggctcacggtgtctgccggggtcttcatcccgtccctgctcatcggggctgcctggggccggctctttgggatctccctgtcctacctcacgggggcagcgatctgggcggaccccggcaaatacgccctgatgggagctgctgcccagctgggcgggattgtgcggatgacactgagcctgaccgtcatcatgatggaggccaccagcaacgtgacctacggcttccccatcatgctggtgctcatgaccgccaagatcgtgggcgacgtcttcattgagggcctgtacgacatgcacattcagctgcagagtgtgcccttcctgcactgggaggccccggtcacctcacactcactcactgccagggaggtgatgagcacaccagtgacctgcctgaggcggcgtgagaaggtcggcgtcattgtggacgtgctgagcgacacggcgtccaatcacaacggcttccccgtggtggagcatgccgatgacacccagcctgcccggctccagggcctgatcctgcgctcccagctcatcgttctcctaaagcacaaggtgtttgtggagcggtccaacctgggcctggtacagcggcgcctgaggctgaaggacttccgagacgcctacccgcgcttcccacccatccagtccatccacgtgtcccaggacgagcgggagtgcaccatggacctctccgagttcatgaacccctccccctacacggtgccccaggaggcgtcgctcccacgggtgttcaagctgttccgggccctgggcctgcggcacctggtggtggtggacaaccgcaatcaggttgtcgggttggtgaccaggaaggacctcgccaggtaccgcctgggaaagagaggcttggaggagctctcgctggcccagacgtgaggcccagccctgcccataatgggcactggcgctggcaccccggcccttctgcatttcctcccggagtcactggtttctcggcccaaaccatgctccccagcagtggcaatggcgagcaccctgcagctgggcgggcaggcggcaggcgcggaactgaccctctcgcgggactgaccctgttgtgggcagtggtctccccccttggcgcctccttgcgcaggcccagcctccactctcctcgtctaggtttctttacctccagggatcagctgtgtgtgtgtgacctccctaccgggctatcggcctcttgggagccagcggcagggccggcacctgcgtgcctgtgcccgtgtgcgtgagacagagcccttgcccctgctgctgccccgagggctgccctgccctggaagggcccctctgcctccacaccagtggagtcttcgagacttgggagctgcttggcctcattttcagccatgagcagacggcctgtggtccctgggcctgaggcacggactcgtagcaccagggtttggaggctgcgaccgccccggagagcagcttcacactggcgccacagaggagccccacgtgcactccccggcctgcatccggcttgggtacacaggcccagaggactggggtgactcacgggccctgtgctgtgatgttgagagctgagaaaaacctccaaggccctgagccccatgcccagccctgccttggtcccccaacccccagagcttggagtctgggccccacacccagccctgccttggtccctgagcctcagagcgtggaattgctgccctgtggacactggctgggaaggcaggtcttcccctagcacatggggaccccggcctcgagggtgacctccctaccttgcccctgccagccaccaagcgcaggtgcagcgggggccagactcctgccggcctcagaggacacctggcccagcacaggcagctagaagggccggtgggcaccggggccgggaagcccccacctcaccacctgagggcccctgggaggctcctctggcctggctgggctgggtctggggccgccacaggcccctcacggggcggcagaggcaacttcagtgtccctgttagagcaacacgggtccctccgtggggggctgggtgcggccccctgccgtgtatttcctccccagggagtggggcctccccgggagctgacgccaccaccctgcttagccctcacagggccccaaggtgtccgagtgtgttgggtctgaacgcgaaataaagaaatcctctcagccaaaaaaaaaacaaaacagacctcggaggcacacaaatacaggactgccgcaaaacgagggtaacgaaagtgccacatggccatagcgcgtgatcctagacccagtttcatgaccacagggtgtagacttgcgggaccccaaagagagcagattaatccaaagccggtacctgtataacatgaag

SEQ ID NO: 430977 - DNA, 4421 bp, Homo sapiens
  misc_feature (4337)..(4337): n is a, c, g, or t
ggccccgtcgcgcgtcacgtggccgccggcgcgggtcacgagaacaaacacgggggcagccggcgcttcccggccggtgtcgctccgcggcgggccatggccaacgtctctaagaaggtgtcctggtccggccgggaccgggacgacgaggaggcggcgccgctgctgcggaggacggcgcggcccggcggggggacgccgctgctgaacggggctgggcctggggctgcgcgccagtcaccacgttctgcgcttttccgagtcggacatatgagcagcgtggagctggatgatgaacttttggacccggatatggaccctccacatcccttccccaaggagatcccacacaacgagaagctcctgtccctcaagtatgagagcttggactatgacaacagtgagaaccagctgttcctggaggaggagcggcggatcaatcacacggccttccggacggtggagatcaagcgctgggtcatctgcgccctcattgggatcctcacgggcctcgtggcctgcttcattgacatcgtggtggaaaacctggctggcctcaagtacagggtcatcaagggcaatatcgacaagttcacagagaagggcggactgtccttctccctgttgctgtgggccacgctgaacgccgccttcgtgctcgtgggctctgtgattgtggctttcatagagccggtggctgctggcagcggaatcccccagatcaagtgcttcctcaacggggtgaagatcccccacgtggtgcggctcaagacgttggtgatcaaagtgtccggtgtgatcctgtccgtggtcgggggcctggccgtgggaaaggaagggccgatgatccactcaggttcagtgattgccgccgggatctctcagggaaggtcaacgtcactgaaacgagatttcaagatcttcgagtacttccgcagagacacagagaagcgggacttcgtctccgcaggggctgcggccggagtgtcagcggcgtttggagcccccgtgggtggggtcctgttcagcttggaggagggtgcgtccttctggaaccagttcctgacctggaggatcttctttgcttccatgatctccacgttcaccctgaattttgttctgagcatttaccacgggaacatgtgggacctgtccagcccaggcctcatcaacttcggaaggtttgactcggagaaaatggcctacacgatccacgagatcccggtcttcatcgccatgggcgtggtgggcggtgtgcttggagcagtgttcaatgccttgaactactggctgaccatgtttcgaatcaggtacatccaccggccctgcctgcaggtgatcgaggccatgctggtggccgccgtcacggccacagttgccttcgtgctgatctactcgtcgcgggattgccagcccctgcaggggggctccatgtcctacccgctgcagctcttttgtgcagatggcgagtacaactccatggctgcggccttcttcaacaccccggagaagagcgtggtgagcctcttccacgacccgccaggctcctacaaccccctgaccctcggcctgttcacgctggtctacttcttcctggcctgctggacctacgggctcacggtgtctgccggggtcttcatcccgtccctgctcatcggggctgcctggggccggctctttgggatctccctgtcctacctcacgggggcagcgatctgggcggaccccggcaaatacgccctgatgggagctgctgcccagctgggcgggattgtgcggatgacactgagcctgaccgtcatcatgatggaggccaccagcaacgtgacctacggcttccccatcatgctggtgctcatgaccgccaagatcgtgggcgacgtcttcattgagggcctgtacgacatgcacattcagctgcagagtgtgcccttcctgcactgggaggccccggtcacctcacactcactcactgccagggaggtgatgagcacaccagtgacctgcctgaggcggcgtgagaaggtcggcgtcattgtggacgtgctgagcgacacggcgtccaatcacaacggcttccccgtggtggagcatgccgatgacacccagcctgcccggctccagggcctgatcctgcgctcccagctcatcgttctcctaaagcacaaggtgtttgtggagcggtccaacctgggcctggtacagcggcgcctgaggctgaaggacttccgagacgcctacccgcgcttcccacccatccagtccatccacgtgtcccaggacgagcgggagtgcaccatggacctctccgagttcatgaacccctccccctacacggtgccccaggaggcgtcgctcccacgggtgttcaagctgttccgggccctgggcctgcggcacctggtggtggtggacaaccgcaatcaggttgtcgggttggtgaccaggaaggacctcgccaggtaccgcctgggaaagagaggcttggaggagctctcgctggcccagacgtgaggcccagccctgcccataatgggcactggcgctggcaccccggcccttctgcatttcctcccggagtcactggtttctcggcccaaaccatgctccccagcagtggcaatggcgagcaccctgcagctgggcgggcaggcggcaggcgcggaactgaccctctcgcgggactgaccctgttgtgggcagtggtctccccccttggcgcctccttgcgcaggcccagcctccactctcctcgtctaggtttctttacctccagggatcagctgtgtgtgtgtgacctccctaccgggctatcggcctcttgggagccagcggcagggccggcacctgcgtgcctgtgcccgtgtgcgtgagacagagcccttgcccctgctgctgccccgagggctgccctgccctggaagggcccctctgcctccacaccagtggagtcttcgagacttgggagctgcttggcctcattttcagccatgagcagacggcctgtggtccctgggcctgaggcacggactcgtagcaccagggtttggaggctgcgaccgccccggagagcagcttcacactggcgccacagaggagccccacgtgcactccccggcctgcatccggcttgggtacacaggcccagaggactggggtgactcacgggccctgtgctgtgatgttgagagctgagaaaaacctccaaggccctgagccccatgcccagccctgccttggtcccccaacccccagagcttggagtctgggccccacacccagccctgccttggtccctgagcctcagagcgtggaattgctgccctgtggacactggctgggaaggcaggtcttcccctagcacatggggaccccggcctcgagggtgacctccctaccttgcccctgccagccaccaagcgcaggtgcagcgggggccagactcctgccggcctcagaggacacctggcccagcacaggcagctagaagggccggtgggcaccggggccgggaagcccccacctcaccacctgagggcccctgggaggctcctctggcctggctgggctgggtctggggccgccacaggcccctcacggggcggcagaggcaacttcagtgtccctgttagagcaacacgggtccctccgtggggggctgggtgcggccccctgccgtgtatttcctccccagggagtggggcctccccgggagctgacgccaccaccctgcttagccctcacagggccccaaggtgtccgagtgtgttgggtctgaacgcgaaataaagaaatcctctcagccaaaaaaaaaaaaaaaaaaaaaaaaaaaaaaaaaaagggggggcgggttctagtggtatcctgtggagggcccatgtgtgatatgggtgcctcttgttgtctgtggccgcggtggtgcccatatatagtgtacgtcgtgataatatcacgtcattgcgcgatgacgtggcgtgtatgaaccactgcggcgtgacgacatgtgtgcaacatggtgtcgtactgtgtgtgcgatagtatttttgatgtgtacacgggacactgctataaattacttgggtgtgtgtgttgcgtaataatttgtggggtgatgtttatatcttgtgtggtgatgtgttttgtgtgtgtgtgtgtgcatgatgtgtgtatgtatgtagtgtttgcgtcgttttgtatgttgctgtagtgtgttgttgtagtgttgttgtgttgtgctgcctgcttcggtgtttggtgatgtcttgttgtgatggcctgtgttgctgtgttcgtggtggttcgctgtgtgtttggcggtagctgtgtgactgtgggtngtgttgtgttggtgatctattgatagatgagtactatagtaaatacatacaacctcgaaataaatcccacttaaaatgatagcc

SEQ ID NO: 430978 - DNA, 3574 bp, Homo sapiens
ggccccgtcgcgcgtcacgtggccgccggcgcgggtcacgagaacaaacacgggggcagccggcgcttcccggccggtgtcgctccgcggcgggccatggccaacgtctctaagaaggtgtcctggtccggccgggaccgggacgacgaggaggcggcgccgctgctgcggaggacggcgcggcccggcggggggacgccgctgctgaacggggctgggcctggggctgcgcgccagtcaccacgttctgcgcttttccgagtcggacatatgagcagcgtggagctggatgatgaacttttggacccggatatggaccctccacatcccttccccaaggagatcccacacaacgagaagctcctgtccctcaagtatgagagcttggactatgacaacagtgagaaccagctgttcctggaggaggagcggcggatcaatcacacggccttccggacggtggagatcaagcgctgggtcatctgcgccctcattgggatcctcacgggcctcgtggcctgcttcattgacatcgtggtggaaaacctggctggcctcaagtacagggtcatcaagggcaatatcgacaagttcacagagaagggcggactgtccttctccctgttgctgtgggccacgctgaacgccgccttcgtgctcgtgggctctgtgattgtggctttcatagagccggtggctgctggcagcggaatcccccagatcaagtgcttcctcaacggggtgaagatcccccacgtggtgcggctcaagacgttggtgatcaaagtgtccggtgtgatcctgtccgtggtcgggggcctggccgtgggaaaggaagggccgatgatccactcaggttcagtgattgccgccgggatctctcagggaaggtcaacgtcactgaaacgagatttcaagatcttcgagtacttccgcagagacacagagaagcgggacttcgtctccgcaggggctgcggccggagtgtcagcggcgtttggagcccccgtgggtggggtcctgttcagcttggaggagggtgcgtccttctggaaccagttcctgacctggaggatcttctttgcttccatgatctccacgttcaccctgaattttgttctgagcatttaccacgggaacatgtgggacctgtccagcccaggcctcatcaacttcggaaggtttgactcggagaaaatggcctacacgatccacgagatcccggtcttcatcgccatgggcgtggtgggcggtgtgcttggagcagtgttcaatgccttgaactactggctgaccatgtttcgaatcaggtacatccaccggccctgcctgcaggtgatcgaggccatgctggtggccgccgtcacggccacagttgccttcgtgctgatctactcgtcgcgggattgccagcccctgcaggggggctccatgtcctacccgctgcagctcttttgtgcagatggcgagtacaactccatggctgcggccttcttcaacaccccggagaagagcgtggtgagcctcttccacgacccgccaggctcctacaaccccctgaccctcggcctgttcacgctggtctacttcttcctggcctgctggacctacgggctcacggtgtctgccggggtcttcatcccgtccctgctcatcggggctgcctggggccggctctttgggatctccctgtcctacctcacgggggcagcgatctgggcggaccccggcaaatacgccctgatgggagctgctgcccagctgggcgggattgtgcggatgacactgagcctgaccgtcatcatgatggaggccaccagcaacgtgacctacggcttccccatcatgctggtgctcatgaccgccaagatcgtgggcgacgtcttcattgagggcctgtacgacatgcacattcagctgcagagtgtgcccttcctgcactgggaggccccggtcacctcacactcactcactgccagggaggtgatgagcacaccagtgacctgcctgaggcggcgtgagaaggtcggcgtcattgtggacgtgctgagcgacacggcgtccaatcacaacggcttccccgtggtggagcatgccgatgacacccagcctgcccggctccagggcctgatcctgcgctcccagctcatcgttctcctaaagcacaaggtgtttgtggagcggtccaacctgggcctggtacagcggcgcctgaggctgaaggacttccgagacgcctacccgcgcttcccacccatccagtccatccacgtgtcccaggacgagcgggagtgcaccatggacctctccgagttcatgaacccctccccctacacggtgccccaggaggcgtcgctcccacgggtgttcaagctgttccgggccctgggcctgcggcacctggtggtggtggacaaccgcaatcaggttgtcgggttggtgaccaggaaggacctcgccaggtaccgcctgggaaagagaggcttggaggagctctcgctggcccagacgtgaggcccagccctgcccataatgggcactggcgctggcaccccggcccttctgcatttcctcccggagtcactggtttctcggcccaaaccatgctccccagcagtggcaatggcgagcaccctgcagctgggcgggcaggcggcaggcgcggaactgaccctctcgcgggactgaccctgttgtgggcagtggtctccccccttggcgcctccttgcgcaggcccagcctccactctcctcgtctaggtttctttacctccagggatcagctgtgtgtgtgtgacctccctaccgggctatcggcctcttgggagccagcggcagggccggcacctgcgtgcctgtgcccgtgtgcgtgagacagagcccttgcccctgctgctgccccgagggctgccctgccctggaagggcccctctgcctccacaccagtggagtcttcgagacttgggagctgcttggcctcattttcagccatgagcagacggcctgtggtccctgggcctgaggcacggactcgtagcaccagggtttggaggctgcgaccgccccggagagcagcttcacactggcgccacagaggagccccacgtgcactccccggcctgcatccggcttgggtacacaggcccagaggactggggtgactcacgggccctgtgctgtgatgttgagagctgagaaaaacctccaaggccctgagccccatgcccagccctgccttggtcccccaacccccagagcttggagtctgggccccacacccagccctgccttggtccctgagcctcagagcgtggaattgctgccctgtggacactggctgggaaggcaggtcttcccctagcacatggggaccccggcctcgagggtgacctccctaccttgcccctgccagccaccaagcgcaggtgcagcgggggccagactcctgccggcctcagaggacacctggcccagcacaggcagctagaagggccggtgggcaccggggccgggaaggccccaaggtgtccgagtgtgttgggtctgaacgcgaaataaagaaatcctctcagcc

SEQ ID NO: 430979 - DNA, 2221 bp, Homo sapiens
gtacgcggccacgaggtttgttcctggctgtggggctgctgggcctgggcagggcctcctccgtctgtgtatcttggtgggtttgggcctgccaccacactgacacctcctccgtgtcacctcccacagatctgggcggaccccggcaaatacgccctgatgggagctgctgcccagctgggcgggattgtgcggatgacactgagcctgaccgtcatcatgatggaggccaccagcaacgtgacctacggcttccccatcatgctggtgctcatgaccgccaagatcgtgggcgacgtcttcattgagggcctgtacgacatgcacattcagctgcagagtgtgcccttcctgcactgggaggccccggtcacctcacactcactcactgccagggaggtgatgagcacaccagtgacctgcctgaggcggcgtgagaaggtcggcgtcattgtggacgtgctgagcgacacggcgtccaatcacaacggcttccccgtggtggagcatgccgatgacacccagcctgcccggctccagggcctgatcctgcgctcccagctcatcgttctcctaaagcacaaggtgtttgtggagcggtccaacctgggcctggtacagcggcgcctgaggctgaaggacttccgagacgcctacccgcgcttcccacccatccagtccatccacgtgtcccaggacgagcgggagtgcaccatggacctctccgagttcatgaacccctccccctacacggtgccccaggaggcgtcgctcccacgggtgttcaagctgttccgggccctgggcctgcggcacctggtggtggtggacaaccgcaatcaggttgtcgggttggtgaccaggaaggacctcgccaggtaccgcctgggaaagagaggcttggaggagctctcgctggcccagacgtgaggcccagccctgcccataatgggcactggcgctggcaccccggcccttctgcatttcctcccggagtcactggtttctcggcccaaaccatgctccccagcagtggcaatggcgagcaccctgcagctgggcgggcaggcggcaggcgcggaactgaccctctcgcgggactgaccctgttgtgggcagtggtctccccccttggcgcctccttgcgcaggcccagcctccactctcctcgtctaggtttctttacctccagggatcagctgtgtgtgtgtgacctccctaccgggctatcggcctcttgggagccagcggcagggccggcacctgcgtgcctgtgcccgtgtgcgtgagacagagcccttgcccctgctgctgccccgagggctgccctgccctggaagggcccctctgcctccacaccagtggagtcttcgagacttgggagctgcttggcctcattttcagccatgagcagacggcctgtggtccctgggcctgaggcacggactcgtagcaccagggtttggaggctgcgaccgccccggagagcagcttcacactggcgccacagaggagccccacgtgcactccccggcctgcatccggcttgggtacacaggcccagaggactggggtgactcacgggccctgtgctgtgatgttgagagctgagaaaaacctccaaggccctgagccccatgcccagccctgccttggtcccccaacccccagagcttggagtctgggccccacacccagccctgccttggtccctgagcctcagagcgtggaattgctgccctgtggacactggctgggaaggcaggtcttcccctagcacatggggaccccggcctcgagggtgacctccctaccttgcccctgccagccaccaagcgcaggtgcagcgggggccagactcctgccggcctcagaggacacctggcccagcacaggcagctagaagggccggtgggcaccggggccgggaagcccccacctcaccacctgagggcccctgggaggctcctctggcctggctgggctgggtctggggccgccacaggcccctcacggggcggcagaggcaacttcagtgtccctgttagagcaacacgggtccctccgtggggggctgggtgcggccccctgccgtgtatttcctccccagggagtggggcctccccgggagctgacgccaccaccctgcttagccctcacagggccccaaggtgtccgagtgtgttgggtctgaacgcgaaataaagaaatcctctcagcc

SEQ ID NO: 430980 - DNA, 2107 bp, Homo sapiens
acgctagaaaagccgggttaacgacaggacggaccaatgcccttaatggaactgctgcccagactgagcgggattgtgcggatgacactgagcctgaccgtcatcatgatggaggccaccagcaacgtgacctacggcttccccatcatgctggtgctcatgaccgccaagatcgtgggcgacgtcttcattgagggcctgtacgacatgcacattcagctgcagagtgtgcccttcctgcactgggaggccccggtcacctcacactcactcactgccagggaggtgatgagcacaccagtgacctgcctgaggcggcgtgagaaggtcggcgtcattgtggacgtgctgagcgacacggcgtccaatcacaacggcttccccgtggtggagcatgccgatgacacccagcctgcccggctccagggcctgatcctgcgctcccagctcatcgttctcctaaagcacaaggtgtttgtggagcggtccaacctgggcctggtacagcggcgcctgaggctgaaggacttccgagacgcctacccgcgcttcccacccatccagtccatccacgtgtcccaggacgagcgggagtgcaccatggacctctccgagttcatgaacccctccccctacacggtgccccaggaggcgtcgctcccacgggtgttcaagctgttccgggccctgggcctgcggcacctggtggtggtggacaaccgcaatcaggttgtcgggttggtgaccaggaaggacctcgccaggtaccgcctgggaaagagaggcttggaggagctctcgctggcccagacgtgaggcccagccctgcccataatgggcactggcgctggcaccccggcccttctgcatttcctcccggagtcactggtttctcggcccaaaccatgctccccagcagtggcaatggcgagcaccctgcagctgggcgggcaggcggcaggcgcggaactgaccctctcgcgggactgaccctgttgtgggcagtggtctccccccttggcgcctccttgcgcaggcccagcctccactctcctcgtctaggtttctttacctccagggatcagctgtgtgtgtgtgacctccctaccgggctatcggcctcttgggagccagcggcagggccggcacctgcgtgcctgtgcccgtgtgcgtgagacagagcccttgcccctgctgctgccccgagggctgccctgccctggaagggcccctctgcctccacaccagtggagtcttcgagacttgggagctgcttggcctcattttcagccatgagcagacggcctgtggtccctgggcctgaggcacggactcgtagcaccagggtttggaggctgcgaccgccccggagagcagcttcacactggcgccacagaggagccccacgtgcactccccggcctgcatccggcttgggtacacaggcccagaggactggggtgactcacgggccctgtgctgtgatgttgagagctgagaaaaacctccaaggccctgagccccatgcccagccctgccttggtcccccaacccccagagcttggagtctgggccccacacccagccctgccttggtccctgagcctcagagcgtggaattgctgccctgtggacactggctgggaaggcaggtcttcccctagcacatggggaccccggcctcgagggtgacctccctaccttgcccctgccagccaccaagcgcaggtgcagcgggggccagactcctgccggcctcagaggacacctggcccagcacaggcagctagaagggccggtgggcaccggggccgggaagcccccacctcaccacctgagggcccctgggaggctcctctggcctggctgggctgggtctggggccgccacaggcccctcacggggcggcagaggcaacttcagtgtccctgttagagcaacacgggtccctccgtggggggctgggtgcggccccctgccgtgtatttcctccccagggagtggggcctccccgggagctgacgccaccaccctgcttagccctcacagggccccaaggtgtccgagtgtgttgggtctgaacgcgaaataaagaaatcctctcagcc

SEQ ID NO: 430981 - DNA, 1313 bp, Homo sapiens
aaggagcctggttgtaccagagtgagagtcataaactgaccatagtgtgtagcggaactgtgaggcccttctgcatttcctcccggagtcactggtttctcggcccaaaccatgctccccagcagtggcaatggcgagcaccctgcagctgggcgggcaggcggcaggcgcggaactgaccctctcgcgggactgaccctgttgtgggcagtggtctccccccttggcgcctccttgcgcaggcccagcctccactctcctcgtctaggtttctttacctccagggatcagctgtgtgtgtgtgacctccctaccgggctatcggcctcttgggagccagcggcagggccggcacctgcgtgcctgtgcccgtgtgcgtgagacagagcccttgcccctgctgctgccccgagggctgccctgccctggaagggcccctctgcctccacaccagtggagtcttcgagacttgggagctgcttggcctcattttcagccatgagcagacggcctgtggtccctgggcctgaggcacggactcgtagcaccagggtttggaggctgcgaccgccccggagagcagcttcacactggcgccacagaggagccccacgtgcactccccggcctgcatccggcttgggtacacaggcccagaggactggggtgactcacgggccctgtgctgtgatgttgagagctgagaaaaacctccaaggccctgagccccatgcccagccctgccttggtcccccaacccccagagcttggagtctgggccccacacccagccctgccttggtccctgagcctcagagcgtggaattgctgccctgtggacactggctgggaaggcaggtcttcccctagcacatggggaccccggcctcgagggtgacctccctaccttgcccctgccagccaccaagcgcaggtgcagcgggggccagactcctgccggcctcagaggacacctggcccagcacaggcagctagaagggccggtgggcaccggggccgggaagcccccacctcaccacctgagggcccctgggaggctcctctggcctggctgggctgggtctggggccgccacaggcccctcacggggcggcagaggcaacttcagtgtccctgttagagcaacacgggtccctccgtggggggctgggtgcggccccctgccgtgtatttcctccccagggagtggggcctccccgggagctgacgccaccaccctgcttagccctcacagggccccaaggtgtccgagtgtgttgggtctgaacgcgaaataaagaaatcctctcagcc

SEQ ID NO: 430982 - DNA, 2173 bp, Homo sapiens
ggccccgtcgcgcgtcacgtggccgccggcgcgggtcacgagaacaaacacgggggcagccggcgcttcccggccggtgtcgctccgcggcgggccatggccaacgtctctaagaaggtgtcctggtccggccgggaccgggacgacgaggaggcggcgccgctgctgcggaggacggcgcggcccggcggggggacgccgctgctgaacggggctgggcctggggctgcgcgccagtcaccacgttctgcgcttttccgagtcggacatatgagcagcgtggagctggatgatgaacttttggacccggatatggaccctccacatcccttccccaaggagatcccacacaacgagaagctcctgtccctcaagtatgagagcttggactatgacaacagtgagaaccagctgttcctggaggaggagcggcggatcaatcacacggccttccggacggtggagatcaagcgctgggtcatctgcgccctcattgggatcctcacgggcctcgtggcctgcttcattgacatcgtggtggaaaacctggctggcctcaagtacagggtcatcaagggcaatatcgacaagttcacagagaagggcggactgtccttctccctgttgctgtgggccacgctgaacgccgccttcgtgctcgtgggctctgtgattgtggctttcatagagccggtggctgctggcagcggaatcccccagatcaagtgcttcctcaacggggtgaagatcccccacgtggtgcggctcaagacgttggtgatcaaagtgtccggtgtgatcctgtccgtggtcgggggcctggccgtgggaaaggaagggccgatgatccactcaggttcagtgattgccgccgggatctctcagggaaggtcaacgtcactgaaacgagatttcaagatcttcgagtacttccgcagagacacagagaagcgggacttcgtctccgcaggggctgcggccggagtgtcagcggcgtttggagcccccgtgggtggggtcctgttcagcttggaggagggtgcgtccttctggaaccagttcctgacctggaggatcttctttgcttccatgatctccacgttcaccctgaattttgttctgagcatttaccacgggaacatgtgggacctgtccagcccaggcctcatcaacttcggaaggtttgactcggagaaaatggcctacacgatccacgagatcccggtcttcatcgccatgggcgtggtgggcggtgtgcttggagcagtgttcaatgccttgaactactggctgaccatgtttcgaatcaggtacatccaccggccctgcctgcaggtgatcgaggccatgctggtggccgccgtcacggccacagttgccttcgtgctgatctactcgtcgcgggattgccagcccctgcaggggggctccatgtcctacccgctgcagctcttttgtgcagatggcgagtacaactccatggctgcggccttcttcaacaccccggagaagagcgtggtgagcctcttccacgacccgccaggctcctacaaccccctgaccctcggcctgttcacgctggtctacttcttcctggcctgctggacctacgggctcacggtgtctgccggggtcttcatcccgtccctgctcatcggggctgcctggggccggctctttgggatctccctgtcctacctcacgggggcagcgatctgggcggaccccggcaaatacgccctgatgggagctgctgcccagctgggcgggattgtgcggatgacactgagcctgaccgtcatcatgatggaggccaccagcaacgtgacctacggcttccccatcatgctggtgctcatgaccgccaagatcgtgggcgacgtcttcattgagctgccggcagcccccgcaagacgggcagcccccgcaagacgtcatctgaggctgtgagtcttgcctggacaggcttttggggacaggaggcccaaggagcagtagagggcaatcgttaagattgtggatagactgtagggtactggtgaaggattcaggatttggccgggcacagtggctcacgcctgtgatccacacacttcgggagaccgaggcaggtagatcacaaggtcaggagatcgagaccatccaggcaaacacggtgaaatactaaaaaata

SEQ ID NO: 430983 - DNA, 1638 bp, Homo sapiens
ggccccgtcgcgcgtcacgtggccgccggcgcgggtcacgagaacaaacacgggggcagccggcgcttcccggccggtgtcgctccgcggcgggccatggccaacgtctctaagaaggtgtcctggtccggccgggaccgggacgacgaggaggcggcgccgctgctgcggaggacggcgcggcccggcggggggacgccgctgctgaacggggctgggcctggggctgcgcgccagtcaccacgttctgcgcttttccgagtcggacatatgagcagcgtggagctggatgatgaacttttggacccggatatggaccctccacatcccttccccaaggagatcccacacaacgagaagctcctgtccctcaagtatgagagcttggactatgacaacagtgagaaccagctgttcctggaggaggagcggcggatcaatcacacggccttccggacggtggagatcaagcgctgggtcatctgcgccctcattgggatcctcacgggcctcgtggcctgcttcattgacatcgtggtggaaaacctggctggcctcaagtacagggtcatcaagggcagtatccttcccagtgcggccgctgcagcttgggagggggtcgtggcctgggccgagtcccgggcagaagtcctgagcccagcgtgttccagtgcaggtggaggcggcccggccaggctggctgtgtccctgtcatggttgggccgtgagacgtctctgggatgtccagtgaacatcatggctccacccagcagggtggcatctgccaggctggtctgtggggcagggctgaggtctgggctgggtggtcctgacggggaagcagccagccctccttgatgagccccagatatcgacaagttcacagagaagggcggactgtccttctccctgttgctgtgggccacgctgaacgccgccttcgtgctcgtgggctctgtgattgtggctttcatagaggtgggtggcaggatgccgcagctatggcggaccccatgaaggattgggggtcttggtgaatgggcgggaacccctgcagctcacccacccccaccatcacattggctgacaacccgggcacttttagaatcacgtggtccagactcacaacctcaggaggagcagacacaccagggcctcttcacccccagagccctggggtgctgctcctgacctaccagcacaggcctgggcaccctcaccccactccgcccctccttccatctcctcactctgccctcccctccttccatctccacctccgcctccaccacgtccttgatctgtgtctgggctgggaagagtgagagcagctaccccaacgacatgagacccttccctggggccccaacgtgtgtgctgctcttcccttccctgaggccccgacatgtgtgctgagctccccttccctgaggccccgacgtgtgtgccgctctccccttccctggggccccgaagtgtgtgctgagctccccttccctggggccccgaagtgtgtgctgagctccccttccctgaggccccgacatgtgtgctgctctccccttccctggggccccgaagtgtgtgctgagctccccttccctgaggccccgacatgtgtgctgctctccccttccc

SEQ ID NO: 430984 - DNA, 159 bp, Homo sapiens
ctccaggcagccccgcgtttcctgtccagcggcttcacacctcaccagcccgcagaggtaactgtgggagttggtggcgtgtgacgggcatgtgtggccgggctcctccggcagggaggtgatgagcacaccagtgacctgcctgaggcggcgtgagaa

SEQ ID NO: 430985 - DNA, 398 bp, Homo sapiens
ttttagcctttctgcttcccagggaggctgagaacagggagccttctggggaccgctgggctcgggagctcaggttgctgggctcctggaaggtgactgtgaggcccgagactgggtagtggggcagggcagtcctgcggaggcgggagtcgtggaggccccgtcagcccctcttctctcctaggctcctacaaccccctgaccctcggcctgttcacgctggtctacttcttcctggcctgctggacctacgggctcacggtgtctgccggggtcttcatcccgtccctgctcatcggggctgcctggggccggctctttgggatctccctgtcctacctcacgggggcagcggtgagtggggccggaggggaggctgtggggccctgcagctgagc

SEQ ID NO: 430986 - DNA, 4093 bp, Homo sapiens
ggccccgtcgcgcgtcacgtggccgccggcgcgggtcacgagaacaaacacgggggcagccggcgcttcccggccggtgtcgctccgcggcgggccatggccaacgtctctaagaaggtgtcctggtccggccgggaccgggacgacgaggaggcggcgccgctgctgcggaggacggcgcggcccggcggggggacgccgctgctgaacggggctgggcctggggctgcgcgccagtcaccacgttctgcgcttttccgagtcggacatatgagcagcgtggagctggatgatgaacttttggacccggatatggaccctccacatcccttccccaaggagatcccacacaacgagaagctcctgtccctcaagtatgagagcttggactatgacaacagtgagaaccagctgttcctggaggaggagcggcggatcaatcacacggccttccggacggtggagatcaagcgctgggtcatctgcgccctcattgggatcctcacgggcctcgtggcctgcttcattgacatcgtggtggaaaacctggctggcctcaagtacagggtcatcaagggcagtatccttcccagtgcggccgctgcagcttgggagggggtcgtggcctgggccgagtcccgggcagaagtcctgagcccagcgtgttccagtgcaggtggaggcggcccggccaggctggctgtgtccctgtcatggttgggccgtgagacgtctctgggatgtccagtgaacatcatggctccacccagcagggtggcatctgccaggctggtctgtggggcagggctgaggtctgggctgggtggtcctgacggggaagcagccagccctccttgatgagccccagatatcgacaagttcacagagaagggcggactgtccttctccctgttgctgtgggccacgctgaacgccgccttcgtgctcgtgggctctgtgattgtggctttcatagagccggtggctgctggcagcggaatcccccagatcaagtgcttcctcaacggggtgaagatcccccacgtggtgcggctcaagacgttggtgatcaaagtgtccggtgtgatcctgtccgtggtcgggggcctggccgtgggaaaggaagggccgatgatccactcaggttcagtgattgccgccgggatctctcagggaaggtcaacgtcactgaaacgagatttcaagatcttcgagtacttccgcagagacacagagaagcgggacttcgtctccgcaggggctgcggccggagtgtcagcggcgtttggagcccccgtgggtggggtcctgttcagcttggaggagggtgcgtccttctggaaccagttcctgacctggaggatcttctttgcttccatgatctccacgttcaccctgaattttgttctgagcatttaccacgggaacatgtgggacctgtccagcccaggcctcatcaacttcggaaggtttgactcggagaaaatggcctacacgatccacgagatcccggtcttcatcgccatgggcgtggtgggcggtgtgcttggagcagtgttcaatgccttgaactactggctgaccatgtttcgaatcaggtacatccaccggccctgcctgcaggtgatcgaggccatgctggtggccgccgtcacggccacagttgccttcgtgctgatctactcgtcgcgggattgccagcccctgcaggggggctccatgtcctacccgctgcagctcttttgtgcagatggcgagtacaactccatggctgcggccttcttcaacaccccggagaagagcgtggtgagcctcttccacgacccgccaggctcctacaaccccctgaccctcggcctgttcacgctggtctacttcttcctggcctgctggacctacgggctcacggtgtctgccggggtcttcatcccgtccctgctcatcggggctgcctggggccggctctttgggatctccctgtcctacctcacgggggcagcgatctgggcggaccccggcaaatacgccctgatgggagctgctgcccagctgggcgggattgtgcggatgacactgagcctgaccgtcatcatgatggaggccaccagcaacgtgacctacggcttccccatcatgctggtgctcatgaccgccaagatcgtgggcgacgtcttcattgagggcctgtacgacatgcacattcagctgcagagtgtgcccttcctgcactgggaggccccggtcacctcacactcactcactgccagggaggtgatgagcacaccagtgacctgcctgaggcggcgtgagaaggtcggcgtcattgtggacgtgctgagcgacacggcgtccaatcacaacggcttccccgtggtggagcatgccgatgacacccagcctgcccggctccagggcctgatcctgcgctcccagctcatcgttctcctaaagcacaaggtgtttgtggagcggtccaacctgggcctggtacagcggcgcctgaggctgaaggacttccgagacgcctacccgcgcttcccacccatccagtccatccacgtgtcccaggacgagcgggagtgcaccatggacctctccgagttcatgaacccctccccctacacggtgccccaggaggcgtcgctcccacgggtgttcaagctgttccgggccctgggcctgcggcacctggtggtggtggacaaccgcaatcaggttgtcgggttggtgaccaggaaggacctcgccaggtaccgcctgggaaagagaggcttggaggagctctcgctggcccagacgtgaggcccagccctgcccataatgggcactggcgctggcaccccggcccttctgcatttcctcccggagtcactggtttctcggcccaaaccatgctccccagcagtggcaatggcgagcaccctgcagctgggcgggcaggcggcaggcgcggaactgaccctctcgcgggactgaccctgttgtgggcagtggtctccccccttggcgcctccttgcgcaggcccagcctccactctcctcgtctaggtttctttacctccagggatcagctgtgtgtgtgtgacctccctaccgggctatcggcctcttgggagccagcggcagggccggcacctgcgtgcctgtgcccgtgtgcgtgagacagagcccttgcccctgctgctgccccgagggctgccctgccctggaagggcccctctgcctccacaccagtggagtcttcgagacttgggagctgcttggcctcattttcagccatgagcagacggcctgtggtccctgggcctgaggcacggactcgtagcaccagggtttggaggctgcgaccgccccggagagcagcttcacactggcgccacagaggagccccacgtgcactccccggcctgcatccggcttgggtacacaggcccagaggactggggtgactcacgggccctgtgctgtgatgttgagagctgagaaaaacctccaaggccctgagccccatgcccagccctgccttggtcccccaacccccagagcttggagtctgggccccacacccagccctgccttggtccctgagcctcagagcgtggaattgctgccctgtggacactggctgggaaggcaggtcttcccctagcacatggggaccccggcctcgagggtgacctccctaccttgcccctgccagccaccaagcgcaggtgcagcgggggccagactcctgccggcctcagaggacacctggcccagcacaggcagctagaagggccggtgggcaccggggccgggaagcccccacctcaccacctgagggcccctgggaggctcctctggcctggctgggctgggtctggggccgccacaggcccctcacggggcggcagaggcaacttcagtgtccctgttagagcaacacgggtccctccgtggggggctgggtgcggccccctgccgtgtatttcctccccagggagtggggcctccccgggagctgacgccaccaccctgcttagccctcacagggccccaaggtgtccgagtgtgttgggtctgaacgcgaaataaagaaatcctctcagcc

SEQ ID NO: 430987 - DNA, 3664 bp, Homo sapiens
gagacagtgggagggtcacggtcaccgtaaccaagaaggctgctcttacggccgccagatgcggtgcccagcataacaaccgctggctgtgaagttgttgggaattcacccacctccccgagtcaccctcgggccccgggtgcgcctcagatgttggccagaaactgtcctttgtgggactcagcgcaccgtgcacactgggcccttcataatcccggggcctgcaggcggtctgggcggtcctgctgctgccagagtgactgcgccagggccctgcctgaccctcgccctgaccgcgccctgcaggccttccggacggtggagatcaagcgctgggtcatctgcgccctcattgggatcctcacgggcctcgtggcctgcttcattgacatcgtggtggaaaacctggctggcctcaagtacagggtcatcaagggcaatatcgacaagttcacagagaagggcggactgtccttctccctgttgctgtgggccacgctgaacgccgccttcgtgctcgtgggctctgtgattgtggctttcatagagccggtggctgctggcagcggaatcccccagatcaagtgcttcctcaacggggtgaagatcccccacgtggtgcggctcaagacgttggtgatcaaagtgtccggtgtgatcctgtccgtggtcgggggcctggccgtgggaaaggaagggccgatgatccactcaggttcagtgattgccgccgggatctctcagggaaggtcaacgtcactgaaacgagatttcaagatcttcgagtacttccgcagagacacagagaagcgggacttcgtctccgcaggggctgcggccggagtgtcagcggcgtttggagcccccgtgggtggggtcctgttcagcttggaggagggtgcgtccttctggaaccagttcctgacctggaggatcttctttgcttccatgatctccacgttcaccctgaattttgttctgagcatttaccacgggaacatgtgggacctgtccagcccaggcctcatcaacttcggaaggtttgactcggagaaaatggcctacacgatccacgagatcccggtcttcatcgccatgggcgtggtgggcggtgtgcttggagcagtgttcaatgccttgaactactggctgaccatgtttcgaatcaggtacatccaccggccctgcctgcaggtgatcgaggccatgctggtggccgccgtcacggccacagttgccttcgtgctgatctactcgtcgcgggattgccagcccctgcaggggggctccatgtcctacccgctgcagctcttttgtgcagatggcgagtacaactccatggctgcggccttcttcaacaccccggagaagagcgtggtgagcctcttccacgacccgccaggctcctacaaccccctgaccctcggcctgttcacgctggtctacttcttcctggcctgctggacctacgggctcacggtgtctgccggggtcttcatcccgtccctgctcatcggggctgcctggggccggctctttgggatctccctgtcctacctcacgggggcagcgatctgggcggaccccggcaaatacgccctgatgggagctgctgcccagctgggcgggattgtgcggatgacactgagcctgaccgtcatcatgatggaggccaccagcaacgtgacctacggcttccccatcatgctggtgctcatgaccgccaagatcgtgggcgacgtcttcattgagggcctgtacgacatgcacattcagctgcagagtgtgcccttcctgcactgggaggccccggtcacctcacactcactcactgccagggaggtgatgagcacaccagtgacctgcctgaggcggcgtgagaaggtcggcgtcattgtggacgtgctgagcgacacggcgtccaatcacaacggcttccccgtggtggagcatgccgatgacacccagcctgcccggctccagggcctgatcctgcgctcccagctcatcgttctcctaaagcacaaggtgtttgtggagcggtccaacctgggcctggtacagcggcgcctgaggctgaaggacttccgagacgcctacccgcgcttcccacccatccagtccatccacgtgtcccaggacgagcgggagtgcaccatggacctctccgagttcatgaacccctccccctacacggtgccccaggaggcgtcgctcccacgggtgttcaagctgttccgggccctgggcctgcggcacctggtggtggtggacaaccgcaatcaggttgtcgggttggtgaccaggaaggacctcgccaggtaccgcctgggaaagagaggcttggaggagctctcgctggcccagacgtgaggcccagccctgcccataatgggcactggcgctggcaccccggcccttctgcatttcctcccggagtcactggtttctcggcccaaaccatgctccccagcagtggcaatggcgagcaccctgcagctgggcgggcaggcggcaggcgcggaactgaccctctcgcgggactgaccctgttgtgggcagtggtctccccccttggcgcctccttgcgcaggcccagcctccactctcctcgtctaggtttctttacctccagggatcagctgtgtgtgtgtgacctccctaccgggctatcggcctcttgggagccagcggcagggccggcacctgcgtgcctgtgcccgtgtgcgtgagacagagcccttgcccctgctgctgccccgagggctgccctgccctggaagggcccctctgcctccacaccagtggagtcttcgagacttgggagctgcttggcctcattttcagccatgagcagacggcctgtggtccctgggcctgaggcacggactcgtagcaccagggtttggaggctgcgaccgccccggagagcagcttcacactggcgccacagaggagccccacgtgcactccccggcctgcatccggcttgggtacacaggcccagaggactggggtgactcacgggccctgtgctgtgatgttgagagctgagaaaaacctccaaggccctgagccccatgcccagccctgccttggtcccccaacccccagagcttggagtctgggccccacacccagccctgccttggtccctgagcctcagagcgtggaattgctgccctgtggacactggctgggaaggcaggtcttcccctagcacatggggaccccggcctcgagggtgacctccctaccttgcccctgccagccaccaagcgcaggtgcagcgggggccagactcctgccggcctcagaggacacctggcccagcacaggcagctagaagggccggtgggcaccggggccgggaagcccccacctcaccacctgagggcccctgggaggctcctctggcctggctgggctgggtctggggccgccacaggcccctcacggggcggcagaggcaacttcagtgtccctgttagagcaacacgggtccctccgtggggggctgggtgcggccccctgccgtgtatttcctccccagggagtggggcctccccgggagctgacgccaccaccctgcttagccctcacagggccccaaggtgtccgagtgtgttgggtctgaacgcgaaataaagaaatcctctcagcc

SEQ ID NO: 430988 - DNA, 2704 bp, Homo sapiens
gtgccgagcgggctctcccagaaggggacacagatccccgaccatttccggccacctttgaggaaaccagggaagtggtgtgccatgcacgtgaaaatggcctacacgatccacgagatcccggtcttcatcgccatgggcgtggtgggcggtgtgcttggagcagtgttcaatgccttgaactactggctgaccatgtttcgaatcaggtacatccaccggccctgcctgcaggtgatcgaggccatgctggtggccgccgtcacggccacagttgccttcgtgctgatctactcgtcgcgggattgccagcccctgcaggggggctccatgtcctacccgctgcagctcttttgtgcagatggcgagtacaactccatggctgcggccttcttcaacaccccggagaagagcgtggtgagcctcttccacgacccgccaggctcctacaaccccctgaccctcggcctgttcacgctggtctacttcttcctggcctgctggacctacgggctcacggtgtctgccggggtcttcatcccgtccctgctcatcggggctgcctggggccggctctttgggatctccctgtcctacctcacgggggcagcgatctgggcggaccccggcaaatacgccctgatgggagctgctgcccagctgggcgggattgtgcggatgacactgagcctgaccgtcatcatgatggaggccaccagcaacgtgacctacggcttccccatcatgctggtgctcatgaccgccaagatcgtgggcgacgtcttcattgagggcctgtacgacatgcacattcagctgcagagtgtgcccttcctgcactgggaggccccggtcacctcacactcactcactgccagggaggtgatgagcacaccagtgacctgcctgaggcggcgtgagaaggtcggcgtcattgtggacgtgctgagcgacacggcgtccaatcacaacggcttccccgtggtggagcatgccgatgacacccagcctgcccggctccagggcctgatcctgcgctcccagctcatcgttctcctaaagcacaaggtgtttgtggagcggtccaacctgggcctggtacagcggcgcctgaggctgaaggacttccgagacgcctacccgcgcttcccacccatccagtccatccacgtgtcccaggacgagcgggagtgcaccatggacctctccgagttcatgaacccctccccctacacggtgccccaggaggcgtcgctcccacgggtgttcaagctgttccgggccctgggcctgcggcacctggtggtggtggacaaccgcaatcaggttgtcgggttggtgaccaggaaggacctcgccaggtaccgcctgggaaagagaggcttggaggagctctcgctggcccagacgtgaggcccagccctgcccataatgggcactggcgctggcaccccggcccttctgcatttcctcccggagtcactggtttctcggcccaaaccatgctccccagcagtggcaatggcgagcaccctgcagctgggcgggcaggcggcaggcgcggaactgaccctctcgcgggactgaccctgttgtgggcagtggtctccccccttggcgcctccttgcgcaggcccagcctccactctcctcgtctaggtttctttacctccagggatcagctgtgtgtgtgtgacctccctaccgggctatcggcctcttgggagccagcggcagggccggcacctgcgtgcctgtgcccgtgtgcgtgagacagagcccttgcccctgctgctgccccgagggctgccctgccctggaagggcccctctgcctccacaccagtggagtcttcgagacttgggagctgcttggcctcattttcagccatgagcagacggcctgtggtccctgggcctgaggcacggactcgtagcaccagggtttggaggctgcgaccgccccggagagcagcttcacactggcgccacagaggagccccacgtgcactccccggcctgcatccggcttgggtacacaggcccagaggactggggtgactcacgggccctgtgctgtgatgttgagagctgagaaaaacctccaaggccctgagccccatgcccagccctgccttggtcccccaacccccagagcttggagtctgggccccacacccagccctgccttggtccctgagcctcagagcgtggaattgctgccctgtggacactggctgggaaggcaggtcttcccctagcacatggggaccccggcctcgagggtgacctccctaccttgcccctgccagccaccaagcgcaggtgcagcgggggccagactcctgccggcctcagaggacacctggcccagcacaggcagctagaagggccggtgggcaccggggccgggaagcccccacctcaccacctgagggcccctgggaggctcctctggcctggctgggctgggtctggggccgccacaggcccctcacggggcggcagaggcaacttcagtgtccctgttagagcaacacgggtccctccgtggggggctgggtgcggccccctgccgtgtatttcctccccagggagtggggcctccccgggagctgacgccaccaccctgcttagccctcacagggccccaaggtgtccgagtgtgttgggtctgaacgcgaaataaagaaatcctctcagcc

SEQ ID NO: 430989 - DNA, 3913 bp, Homo sapiens
ggccccgtcgcgcgtcacgtggccgccggcgcgggtcacgagaacaaacacgggggcagccggcgcttcccggccggtgtcgctccgcggcgggccatggccaacgtctctaagaaggtgtcctggtccggccgggaccgggacgacgaggaggcggcgccgctgctgcggaggacggcgcggcccggcggggggacgccgctgctgaacggggctgggcctggggctgcgcgccagtcaccacgttctgcgcttttccgagtcggacatatgagcagcgtggagctggatgatgaacttttggacccggatatggaccctccacatcccttccccaaggagatcccacacaacgagaagctcctgtccctcaagtatgagagcttggactatgacaacagtgagaaccagctgttcctggaggaggagcggcggatcaatcacacggccttccggacggtggagatcaagcgctgggtcatctgcgccctcattgggatcctcacgggcctcgtggcctgcttcattgacatcgtggtggaaaacctggctggcctcaagtacagggtcatcaagggcaatatcgacaagttcacagagaagggcggactgtccttctccctgttgctgtgggccacgctgaacgccgccttcgtgctcgtgggctctgtgattgtggctttcatagagccggtggctgctggcagcggaatcccccagatcaagtgcttcctcaacggggtgaagatcccccacgtggtgcggctcaagacgttggtgatcaaagtgtccggtgtgatcctgtccgtggtcgggggcctggccgtgggaaaggaagggccgatgatccactcaggttcagtgattgccgccgggatctctcagggaaggtcaacgtcactgaaacgagatttcaagatcttcgagtacttccgcagagacacagagaagcgggacttcgtctccgcaggggctgcggccggagtgtcagcggcgtttggagcccccgtgggtggggtcctgttcagcttggaggagggtgcgtccttctggaaccagttcctgacctggaggatcttctttgcttccatgatctccacgttcaccctgaattttgttctgagcatttaccacgggaacatgtgggacctgtccagcccaggcctcatcaacttcggaaggtttgactcggagaaaatggcctacacgatccacgagatcccggtcttcatcgccatgggcgtggtgggcggtgtgcttggagcagtgttcaatgccttgaactactggctgaccatgtttcgaatcaggtacatccaccggccctgcctgcaggtgatcgaggccatgctggtggccgccgtcacggccacagttgccttcgtgctgatctactcgtcgcgggattgccagcccctgcaggggggctccatgtcctacccgctgcagctcttttgtgcagatggcgagtacaactccatggctgcggccttcttcaacaccccggagaagagcgtggtgagcctcttccacgacccgccaggctcctacaaccccctgaccctcggcctgttcacgctggtctacttcttcctggcctgctggacctacgggctcacggtgtctgccggggtcttcatcccgtccctgctcatcggggctgcctggggccggctctttgggatctccctgtcctacctcacgggggcagcgatctgggcggaccccggcaaatacgccctgatgggagctgctgcccagctgggcgggattgtgcggatgacactgagcctgaccgtcatcatgatggaggccaccagcaacgtgacctacggcttccccatcatgctggtgctcatgaccgccaagatcgtgggcgacgtcttcattgagggcctgtacgacatgcacattcagctgcagagtgtgcccttcctgcactgggaggccccggtcacctcacactcactcactgccagggaggtgatgagcacaccagtgacctgcctgaggcggcgtgagaaggtcggcgtcattgtggacgtgctgagcgacacggcgtccaatcacaacggcttccccgtggtggagcatgccgatgacacccagcctgcccggctccagggcctgatcctgcgctcccagctcatcgttctcctaaagcacaaggtgtttgtggagcggtccaacctgggcctggtacagcggcgcctgaggctgaaggacttccgagacgcctacccgcgcttcccacccatccagtccatccacgtgtcccaggacgagcgggagtgcaccatggacctctccgagttcatgaacccctccccctacacggtgccccaggaggcgtcgctcccacgggtgttcaagctgttccgggccctgggcctgcggcacctggtggtggtggacaaccgcaatcaggttgtcgggttggtgaccaggaaggacctcgccaggtaccgcctgggaaagagaggcttggaggagctctcgctggcccagacgtgaggcccagccctgcccataatgggcactggcgctggcaccccggcccttctgcatttcctcccggagtcactggtttctcggcccaaaccatgctccccagcagtggcaatggcgagcaccctgcagctgggcgggcaggcggcaggcgcggaactgaccctctcgcgggactgaccctgttgtgggcagtggtctccccccttggcgcctccttgcgcaggcccagcctccactctcctcgtctaggtttctttacctccagggatcagctgtgtgtgtgtgacctccctaccgggctatcggcctcttgggagccagcggcagggccggcacctgcgtgcctgtgcccgtgtgcgtgagacagagcccttgcccctgctgctgccccgagggctgccctgccctggaagggcccctctgcctccacaccagtggagtcttcgagacttgggagctgcttggcctcattttcagccatgagcagacggcctgtggtccctgggcctgaggcacggactcgtagcaccagggtttggaggctgcgaccgccccggagagcagcttcacactggcgccacagaggagccccacgtgcactccccggcctgcatccggcttgggtacacaggcccagaggactggggtgactcacgggccctgtgctgtgatgttgagagctgagaaaaacctccaaggccctgagccccatgcccagccctgccttggtcccccaacccccagagcttggagttgggctgggtctggggccgccacaggcccctcacggggcggcagaggcaacttcagtgtccctgttagagcaacacgggtccctccgtggggggctgggtgcggccccctgccgtgtatttcctccccagggagtggggcctccccgggagctgacgccaccaccctgcttagccctcacagggccccaaggtgtccgagtgtgttgggtctgaacgcgaaataaagaaatcctctcagcccgcctttgccagcgtcgtccctcccaccccacccagaccacgtccaacagcctgggactttcgggaccctggggtcggggcaccgtgtggagtgagacaggcgtgaaagacagcggctgcggccacccagggcaccagccacatcctcttcctcgtccccgcccctcagcctccctcctctggctcctggctggtgggtctgggggcaaggcagaggcgctccaggtggaggggggcgggccggggtgcccacgctggggtgacgcaagaagaaaactcccgggcctcagagtcggcgccggaaacctaggtctgggtttccctcgtggtggttgtgtactgaggacctggaagtgatcatattttggatatattcggttaaataaaatcagcggttaggattcaca

SEQ ID NO: 430990 - DNA, 3076 bp, Homo sapiens
ggccccgtcgcgcgtcacgtggccgccggcgcgggtcacgagaacaaacacgggggcagccggcgcttcccggccggtgtcgctccgcggcgggccatggccaacgtctctaagaaggtgtcctggtccggccgggaccgggacgacgaggaggcggcgccgctgctgcggaggacggcgcggcccggcggggggacgccgctgctgaacggggctgggcctggggctgcgcgccagtcaccacgttctgcgcttttccgagtcggacatatgagcagcgtggagctggatgatgaacttttggacccggatatggaccctccacatcccttccccaaggagatcccacacaacgagaagctcctgtccctcaagtatgagagcttggactatgacaacagtgagaaccagctgttcctggaggaggagcggcggatcaatcacacggccttccggacggtggagatcaagcgctgggtcatctgcgccctcattgggatcctcacgggcctcgtggcctgcttcattgacatcgtggtggaaaacctggctggcctcaagtacagggtcatcaagggcaatatcgacaagttcacagagaagggcggactgtccttctccctgttgctgtgggccacgctgaacgccgccttcgtgctcgtgggctctgtgattgtggctttcatagagccggtggctgctggcagcggaatcccccagatcaagtgcttcctcaacggggtgaagatcccccacgtggtgcggctcaagacgttggtgatcaaagtgtccggtgtgatcctgtccgtggtcgggggcctggccgtgggaaaggaagggccgatgatccactcaggttcagtgattgccgccgggatctctcagggaaggtcaacgtcactgaaacgagatttcaagatcttcgagtacttccgcagagacacagagaagcgggacttcgtctccgcaggggctgcggccggagtgtcagcggcgtttggagcccccgtgggtggggtcctgttcagcttggaggagggtgcgtccttctggaaccagttcctgacctggaggatcttctttgcttccatgatctccacgttcaccctgaattttgttctgagcatttaccacgggaacatgtgggacctgtccagcccaggcctcatcaacttcggaaggtttgactcggagaaaatggcctacacgatccacgagatcccggtcttcatcgccatgggcgtggtgggcggtgtgcttggagcagtgttcaatgccttgaactactggctgaccatgtttcgaatcaggtacatccaccggccctgcctgcaggtgatcgaggccatgctggtggccgccgtcacggccacagttgccttcgtgctgatctactcgtcgcgggattgccagcccctgcaggggggctccatgtcctacccgctgcagctcttttgtgcagatggcgagtacaactccatggctgcggccttcttcaacaccccggagaagagcgtggtgagcctcttccacgacccgccaggctcctacaaccccctgaccctcggcctgttcacgctggtctacttcttcctggcctgctggacctacgggctcacggtgtctgccggggtcttcatcccgtccctgctcatcggggctgcctggggccggctctttgggatctccctgtcctacctcacgggggcagcgatctgggcggaccccggcaaatacgccctgatgggagctgctgcccagctgggcgggattgtgcggatgacactgagcctgaccgtcatcatgatggaggccaccagcaacgtgacctacggcttccccatcatgctggtgctcatgaccgccaagatcgtgggcgacgtcttcattgagggcctgtacgacatgcacattcagctgcagagtgtgcccttcctgcactgggaggccccggtcacctcacactcactcactgccagggaggtgatgagcacaccagtgacctgcctgaggcggcgtgagaaggtcggcgtcattgtggacgtgctgagcgacacggcgtccaatcacaacggcttccccgtggtggagcatgccgatgacacccagcctgcccggctccagggcctgatcctgcgctcccagctcatcgttctcctaaagcacaaggtgtttgtggagcggtccaacctgggcctggtacagcggcgcctgaggctgaaggacttccgagacgcctacccgcgcttcccacccatccagtccatccacgtgtcccaggacgagcgggagtgcaccatggacctctccgagttcatgaacccctccccctacacggtgccccaggaggcgtcgctcccacgggtgttcaagctgttccgggccctgggcctgcggcacctggtggtggtggacaaccgcaatcaggttgtcgggttggtgaccaggaaggacctcgccaggtaccgcctgggaaagagaggcttggaggagctctcgctggcccagacgtgaggcccagccctgcccataatgggcactggcgctggcaccccggcccttctgcatttcctcccggagtcactggtttctcggcccaaaccatgctccccagcagtggcaatggcgagcaccctgcagctgggcgggcaggcggcaggcgcggaactgaccctctcgcgggactgaccctgttgtgggcagtggtctccccccttggcgcctccttgcgcaggcccagcctccactctcctcgtctaggtttctttacctccagggatcagctgtgtgtgtgtgacctccctaccgggctatcggcctcttgggagccagcggcagggccggcacctgcgtgcctgtgcccgtgtgcgtgagacagaaggcaacttcagtgtccctgttagagcaacacgggtccctccgtggggggctgggtgcggccccctgccgtgtatttcctccccagggagtggggcctccccgggagctgacgccaccaccctgcttagccctcacagggccccaaggtgtccgagtgtgttgggtctgaacgcgaaataaagaaatcctctcagcc

SEQ ID NO: 430991 - DNA, 545 bp, Homo sapiens
  misc_feature (478)..(478): n is a, c, g, or t
acgccgtatagctctgagcttcaccaacctcaagttttcccctttctgtgggttcttcacaagctcctggggcaaatagcactcaggctgatgaaggcaaaacaaagaaaggcgtcttggaggcacctgacactcaggtgaatcctgtggggtctgtatctgtggattgtggcccttcaagagctgatcgttgttctcctaaggaggaccaggcctgggacggtgcttctcaggactgccccccattgccagcaggagtgagtttccacatagttcagcgtctgacgtcagacgctgaactatgtgccagtaatcttcaaaaggcagaacatatcacctctgccccgtaaactgttctctccgagggaaaaaatggaagttatcctcacggttcactgccgtggtatttcttctgtcccatgctttgcatgactgccatggtacagccttgtttcaaactgttcactgtgatctgtgngtctttgagtttcagtgagtttgctgaaatgtcgaagaagtagttccaaacttcaatgttcaatgaa

SEQ ID NO: 430992 - DNA, 3409 bp, Homo sapiens
tgggtttcggggcgagcgttgggcgccgccgcgccgcgctgggtgctcggtccgactcagcggtggggagtgagccaggcctcccgccaccgctgctgccgccaccactgcgtcgggctggtgcagccccgggccaggccgcggccggggcaggagcgcaggggctttgttatgcacctaaagccatattggaagctccagaagaaagagcaccccccggaagtcagcagggaaacgcagagaactcctatgaaccaccaaaaggctgtaaatgatgaaacatgcaaagctagccacataacatcaagtgtctttccttcagcctctctcggtaaagcatcatctcgaaagccatttgggatcctttctccaaatgttctgtgcagtatgagtgggaagagtcctgtagagagcagcttgaatgttaaaaccaaaaagaatgcaccatctgcaacgatccaccagggcgaagaagaaggaccacttgatatctgggctgttgtgaaacctggaaataccaaggaaaaaattgcattctttgcatcccaccagtgtagtaacaggataggatctatgaaaataaaaagttcctgggatattgatgggagagctactaagagaaggaaaaaatcaggggatcttaaaaaagccaaggtacaggtggacaaggatgagggaggttaacagcaggtgctaccaacctgagccttttgcatgtggcattgagcactgttctgtgcactatgtgagtgacagtggggatggagtctatgctgggaggcctctgtcagttatacagatggttggccttcttggagcaaagagccagtgctctgctagctagctgttcaaaaaactgcacaaactcacctgcaattgtgaggttttctggccaatccagaggtgtgcctgcagtgtctgagtcctattctgccccaggagcttgtgaagaacccacagaaaggggaaatcttgaggttggtgaaccacagagcgaaccagtccgtgtccttgacatggtagccaagttggagtctgagtgcctgaagcggcagggccagcgtgagcctgggagcctctcaaggaataacagcttccgtcgaaatgtgggcagagtattgcttgcaaatagcactcaggctgatgaaggcaaaacaaagaaaggcgtcttggaggcacctgacactcaggtgaatcctgtggggtctgtatctgtggattgtggcccttcaagagctgatcgttgttctcctaaggaggaccaggcctgggacggtgcttctcaggactgccccccattgccagcaggagtgagtttccacatagacagtgcagagttagagccgggttcgcaaactgccgtgaaaaacagcaacagatatgatgtggaaatgacagatgaactcgttgggttacctttttcctctcatacctattcccaagcctctgaattgcccacagatgctgttgattgtatgagcagagagcttgtgtcccttactagccgaaatcctgatcaaagaaaagaatctttgtgcattagtatcactgtgtccaaggtagacaaagaccagccttccaatttaaactcctgtgaagacccagttccagggatgttgttttttttgccacctggtcagcacttgtcagactattcccagttgaatgaaagcacaacaaaagagtcttcagaggccagccagcttgaagatgctgctgggggtgacagtgcatctgaggaaaaaagtgggtctgctgagccatttgtaccgccagcctcttctgtggaaagtacattaccagtgcttgaggcatccagttggaagaagcaggtgtcgcatgacttcctggagaccaggtttaaaatccagcagcttttggagcctcagcagtacatggcttttctgccccaccacattatggtaaaaatcttcaggttacttcccaccaagagtttagtggcccttaaatgtacctgctgctatttcaagtttatcattgagtactacaatatcaggccagcagattctcgctgggttcgagatccacgctatagagaggatccttgcaaacagtgcaagaaaaagtatgtgaaaggggatgtgtccctgtgccgatggcaccccaagccctattgccaggcattgccctatgggccagggtattggatgtgctgccaccggtctcagaaaggattccctggctgtaagctggggcttcatgacaatcactgggttcctgcctgccacagctttaatcgggcaatccataagaaagcaaaagggactgaagctgaagaggaatactaaagtccatgtgagaggcaacaaaaggaccggtttctaaagctgcaaaacacctagatacaccgttcaaatgagcgtagccccctgagtcatcactctagaagaatctgtacatcatcaggactgcattgctcaggcattttctaaactctaaatttacgagctgtacaaaaaaattggtcttgttgtttatagtggcatctcatgtttgaacccgggtggtatcccacagttggattcagttggctgtgaataactgcctgttttcctaaatcaaacccatcctcaaaggatgaagactcaccaccatccaggacattcagaagagttcactgcagatgctgcaggtagtcctcaaaaatgggttccagaaatgttttgagcactggcaacatatttgaaataagtgaatattgtcctgtgaaaagaatagcaggacttttagatgaaaagtattcttaaaaagaaaagtcaggcaccccaccttagacctcgtatgcttgatcctgtgagattgatgtttgtggctggaggtggatttcatgccctgtggtgtttacagtgtatataatggttgtgttttcatggggctatgaaagtgcacgttaaacctgagcgcctttacctttagatgagtgctttggcccctctgtgaatagcacgattaaaatccagttgtatataatggacagctaacggaacaatataatcaccacaatgcagctaggatagtgttgcggctataattttgtgtttttttttttaattgtctagtcttaaatttgtacatcttgtataaaatatgaatgtttcccaaataaactatgaatgtttcctgtataatatatgaatgtttctgagaagaaactctaaatagttgaaaggctaacctgctcaaaggataccaaataatggtttaactggacaacctgaaaattagcatagaaaacaatcctttgttatattttagtgatccacaagattgagaaaatattatatagttagataataacattcttgtctactttatcctgtctggttacaaaattttttaaaacttaaataaaaacatgcatcttaaatggaaaaaaaaatttgcaaag

SEQ ID NO: 430993 - DNA, 2941 bp, Homo sapiens
gatctatgaaaataaaaagttcctgggatattgatgggagagctactaagagaaggaactttttattttcatagatcctatcctgttactacactggtgggatctatgaaaataaaaagttcctgggatattgatgggagagctactaagagaaggaaaaaatcaggggatcttaaaaaagccaaggtacaggtggacaaggatgagggaggttaacagcaggtgctaccaacctgagccttttgcatgtggcattgagcactgttctgtgcactatgtgagtgacagtggggatggagtctatgctgggaggcctctgtcagttatacagatggttggccttcttggagcaaagagccagtgctctgctagctagctgttcaaaaaactgcacaaactcacctgcaattgtgaggttttctggccaatccagaggtgtgcctgcagtgtctgagtcctattctgccccaggagcttgtgaagaacccacagaaaggggaaatcttgaggttggtgaaccacagagcgaaccagtccgtgtccttgacatggtagccaagttggagtctgagtgcctgaagcggcagggccagcgtgagcctgggagcctctcaaggaataacagcttccgtcgaaatgtgggcagagtattgcttgcaaatagcactcaggctgatgaaggcaaaacaaagaaaggcgtcttggaggcacctgacactcaggtgaatcctgtggggtctgtatctgtggattgtggcccttcaagagctgatcgttgttctcctaaggaggaccaggcctgggacggtgcttctcaggactgccccccattgccagcaggagtgagtttccacatagacagtgcagagttagagccgggttcgcaaactgccgtgaaaaacagcaacagatatgatgtggaaatgacagatgaactcgttgggttacctttttcctctcatacctattcccaagcctctgaattgcccacagatgctgttgattgtatgagcagagagcttgtgtcccttactagccgaaatcctgatcaaagaaaagaatctttgtgcattagtatcactgtgtccaaggtagacaaagaccagccttccaatttaaactcctgtgaagacccagttccagggatgttgttttttttgccacctggtcagcacttgtcagactattcccagttgaatgaaagcacaacaaaagagtcttcagaggccagccagcttgaagatgctgctgggggtgacagtgcatctgaggaaaaaagtgggtctgctgagccatttgtaccgccagcctcttctgtggaaagtacattaccagtgcttgaggcatccagttggaagaagcaggtgtcgcatgacttcctggagaccaggtttaaaatccagcagcttttggagcctcagcagtacatggcttttctgccccaccacattatggtaaaaatcttcaggttacttcccaccaagagtttagtggcccttaaatgtacctgctgctatttcaagtttatcattgagtactacaatatcaggccagcagattctcgctgggttcgagatccacgctatagagaggatccttgcaaacagtgcaagaaaaagtatgtgaaaggggatgtgtccctgtgccgatggcaccccaagccctattgccaggcattgccctatgggccagggtattggatgtgctgccaccggtctcagaaaggattccctggctgtaagctggggcttcatgacaatcactgggttcctgcctgccacagctttaatcgggcaatccataagaaagcaaaagggactgaagctgaagaggaatactaaagtccatgtgagaggcaacaaaaggaccggtttctaaagctgcaaaacacctagatacaccgttcaaatgagcgtagccccctgagtcatcactctagaagaatctgtacatcatcaggactgcattgctcaggcattttctaaactctaaatttacgagctgtacaaaaaaattggtcttgttgtttatagtggcatctcatgtttgaacccgggtggtatcccacagttggattcagttggctgtgaataactgcctgttttcctaaatcaaacccatcctcaaaggatgaagactcaccaccatccaggacattcagaagagttcactgcagatgctgcaggtagtcctcaaaaatgggttccagaaatgttttgagcactggcaacatatttgaaataagtgaatattgtcctgtgaaaagaatagcaggacttttagatgaaaagtattcttaaaaagaaaagtcaggcaccccaccttagacctcgtatgcttgatcctgtgagattgatgtttgtggctggaggtggatttcatgccctgtggtgtttacagtgtatataatggttgtgttttcatggggctatgaaagtgcacgttaaacctgagcgcctttacctttagatgagtgctttggcccctctgtgaatagcacgattaaaatccagttgtatataatggacagctaacggaacaatataatcaccacaatgcagctaggatagtgttgcggctataattttgtgtttttttttttaattgtctagtcttaaatttgtacatcttgtataaaatatgaatgtttcccaaataaactatgaatgtttcctgtataatatatgaatgtttctgagaagaaactctaaatagttgaaaggctaacctgctcaaaggataccaaataatggtttaactggacaacctgaaaattagcatagaaaacaatcctttgttatattttagtgatccacaagattgagaaaatattatatagttagataataacattcttgtctactttatcctgtctggttacaaaattttttaaaacttaaataaaaacatgcatcttaaatggaaaaaaaaatttgcaaag

SEQ ID NO: 430994 - DNA, 3143 bp, Homo sapiens
tgggtttcggggcgagcgttgggcgccgccgcgccgcgctgggtgctcggtccgactcagcggtggggagtgagccaggcctcccgccaccgctgctgccgccaccactgcgtcgggctggtgcagccccgggccaggccgcggccggggcaggagcgcaggggctttgttatgcacctaaagccatattggaagctccagaagaaagagcaccccccggaagtcagcagggaaacgcagagaactcctatgaaccaccaaaaggctgtaaatgatgaaacatgcaaagctagccacataacatcaagtgtctttccttcagcctctctcggtaaagcatcatctcgaaagccatttgggatcctttctccaaatgttctgtgcagtatgagtgggaagagtcctgtagagagcagcttgaatgttaaaaccaaaaagaatgcaccatctgcaacgatccaccagggcgaagaagaaggaccacttgatatctgggctgttgtgaaacctggaaataccaaggaaaaaattgcattctttgcatcccaccagtgtagtaacaggataggatctatgaaaataaaaagttcctgggatattgatgggagagctactaagagaaggaaaaaatcaggggatcttaaaaaagccaaggtacaggtggacaaggatgagggaggttaacagcaggtgctaccaacctgagccttttgcatgtggcattgagcactgttctgtgcactatgtgagtgacagtggggatggagtctatgctgggaggcctctgtcagttatacagatggttggccttcttggagcaaagagccagtgctctgctagctagctgttcaaaaaactgcacaaactcacctgcaattgtgaggttttctggccaatccagaggtgtgcctgcagtgtctgagtcctattctgccccaggagcttgtgaagaacccacagaaaggggaaatcttgaggttggtgaaccacagagcgaaccagtccgtgtccttgacatggtagccaagttggagtctgagtgcctgaagcggcagggccagcgtgagcctgggagcctctcaaggaataacagcttccgtcgaaatgtgggcagagtattgcttgcaaatagcactcaggctgatgaaggcaaaacaaagaaaggcgtcttggaggcacctgacactcaggtgaatcctgtggggtctgtatctgtggattgtggcccttcaagagctgatcgttgttctcctaaggaggaccaggcctgggacggtgcttctcaggactgccccccattgccagcaggagtgagtttccacatagacagtgcagagttagagccgggttcgcaaactgccgtgaaaaacagcaacagatatgatgtggaaatgacagatgaactcgttgggttacctttttcctctcatacctattcccaagcctctgaattgcccacagatgctgttgattgtatgagcagagagcttgtgtcccttactagccgaaatcctgatcaaagaaaagaatctttgtgcattagtatcactgtgtccaaggtagacaaagaccagccttccaatttaaactcctgtgaagacccagttccagggatgttgttttttttgccacctggtcagcacttgtcagactattcccagttgaatgaaagcacaacaaaagagtcttcagaggccagccagcttgaagatgtgctatttcaagtttatcattgagtactacaatatcaggccagcagattctcgctgggttcgagatccacgctatagagaggatccttgcaaacagtgcaagaaaaagtatgtgaaaggggatgtgtccctgtgccgatggcaccccaagccctattgccaggcattgccctatgggccagggtattggatgtgctgccaccggtctcagaaaggattccctggctgtaagctggggcttcatgacaatcactgggttcctgcctgccacagctttaatcgggcaatccataagaaagcaaaagggactgaagctgaagaggaatactaaagtccatgtgagaggcaacaaaaggaccggtttctaaagctgcaaaacacctagatacaccgttcaaatgagcgtagccccctgagtcatcactctagaagaatctgtacatcatcaggactgcattgctcaggcattttctaaactctaaatttacgagctgtacaaaaaaattggtcttgttgtttatagtggcatctcatgtttgaacccgggtggtatcccacagttggattcagttggctgtgaataactgcctgttttcctaaatcaaacccatcctcaaaggatgaagactcaccaccatccaggacattcagaagagttcactgcagatgctgcaggtagtcctcaaaaatgggttccagaaatgttttgagcactggcaacatatttgaaataagtgaatattgtcctgtgaaaagaatagcaggacttttagatgaaaagtattcttaaaaagaaaagtcaggcaccccaccttagacctcgtatgcttgatcctgtgagattgatgtttgtggctggaggtggatttcatgccctgtggtgtttacagtgtatataatggttgtgttttcatggggctatgaaagtgcacgttaaacctgagcgcctttacctttagatgagtgctttggcccctctgtgaatagcacgattaaaatccagttgtatataatggacagctaacggaacaatataatcaccacaatgcagctaggatagtgttgcggctataattttgtgtttttttttttaattgtctagtcttaaatttgtacatcttgtataaaatatgaatgtttcccaaataaactatgaatgtttcctgtataatatatgaatgtttctgagaagaaactctaaatagttgaaaggctaacctgctcaaaggataccaaataatggtttaactggacaacctgaaaattagcatagaaaacaatcctttgttatattttagtgatccacaagattgagaaaatattatatagttagataataacattcttgtctactttatcctgtctggttacaaaattttttaaaacttaaataaaaacatgcatcttaaatggaaaaaaaaatttgcaaag

SEQ ID NO: 430995 - DNA, 3084 bp, Homo sapiens
tgggtttcggggcgagcgttgggcgccgccgcgccgcgctgggtgctcggtccgactcagcggtggggagtgagccaggcctcccgccaccgctgctgccgccaccactgcgtcgggctggtgcagccccgggccaggccgcggccggggcaggagcgcaggggctttgttatgcacctaaagccatattggaagctccagaagaaagagcaccccccggaagtcagcagggaaacgcagagaactcctatgaaccaccaaaaggctgtaaatgatgaaacatgcaaagctagccacataacatcaagtgtctttccttcagcctctctcggtaaagcatcatctcgaaagccatttgggatcctttctccaaatgttctgtgcagtatgagtgggaagagtcctgtagagagcagcttgaatgttaaaaccaaaaagaatgcaccatctgcaacgatccaccagggcgaagaagaaggaccacttgatatctgggctgttgtgaaacctggaaataccaaggaaaaaattgcattctttgcatcccaccagtgtagtaacaggataggatctatgaaaataaaaagttcctgggatattgatgggagagctactaagagaaggaaaaaatcaggggatcttaaaaaagccaaggtacaggtggacaaggatgagggaggttaacagcaggtgctaccaacctgagccttttgcatgtggcattgagcactgttctgtgcactatgtgagtgacagtggggatggagtctatgctgggaggcctctgtcagttatacagatggttggccttcttggagcaaagagccagtgctctgctagctagctgttcaaaaaactgcacaaactcacctgcaattgtgaggttttctggccaatccagaggtgtgcctgcagtgtctgagtcctattctgccccaggagcttgtgaagaacccacagaaaggggaaatcttgaggttggtgaaccacagagcgaaccagtccgtgtccttgacatggtagccaagttggagtctgagtgcctgaagcggcagggccagcgtgagcctgggagcctctcaaggaataacagcttccgtcgaaatgtgggcagagtattgcttgcaaatagcactcaggctgatgaaggcaaaacaaagaaaggcgtcttggaggcacctgacactcaggtgaatcctgtggggtctgtatctgtggattgtggcccttcaagagctgatcgttgttctcctaaggaggaccaggcctgggacggtgcttctcaggactgccccccattgccagcaggagtgagtttccacatagacagtgcagagttagagccgggttcgcaaactgccgtgaaaaacagcaacagatatgatgtggaaatgacagatgaactcgttgggttacctttttcctctcatacctattcccaagcctctgaattgcccacagatgctgttgattgtatgagcagagagcttgtgtcccttactagccgaaatcctgatcaaagaaaagaatctttgtgcattagtatcactgtgtccaaggtagacaaagaccagccttccaatttaaactcctgtgaagacccagttccagggatgttgttttttttgccacctggtcagcacttgtcagactattcccagttgaatgaaagcacaacaaaagagtcttcagaggccagccagcttgaagatgctgctgggggtgacagtgcatctgaggaaaaaagtgggtctgctgagccatttgtaccgccagcctcttctgtggaaagtacattaccagtgcttgaggcatccagttggaagaagcaggtgtcgcatgacttcctggagaccaggtttaaaatccagcagcttttggagcctcagcagtacatggcttttctgccccaccacattatggtaaaaatcttcaggttacttcccaccaagagtttagtggcccttaaatgtacctgctgctatttcaagtttatcattgagtactacaatatcaggccagcagattctcgctgggttcgagatccacgctatagagaggatccttgcaaacagtgcaagaaaaagtatgtgaaaggggatgtgtccctgtgccgatggcaccccaagccctattgccaggcattgccctatgggccagggtattggatgtgctgccaccggtctcagaaaggattccctggctgtaagctggggcttcatgacaatcactgggttcctgcctgccacagctttaatcgggcaatccataagaaagcaaaagggactgaagctgaagaggaatactaaagtccatgtgagaggcaacaaaaggaccggtttctaaagctgcaaaacacctagatacaccgttcaaatgagcgtagccccctgagtcatcactctagaagaatctgtacatcatcaggactgcattgctcaggcattttctaaactctaaatttacgagctgtacaaaaaaattggtcttgttgtttatagtggcatctcatgtttgaacccgggtggtatcccacagttggattcagttggctgtgaataactgcctgttttcctaaatcaaacccatcctcaaaggatgaagactcaccaccatccaggacattcagaagagttcactgcagatgctgcagatcagccactcttgatctggttttcatgtgggacacaaagctgtgactgcgtgaggggttaaagtgaccaagagcagagggcacacccttacttgatcatctgaagcaaaaaccagaaccagggaaactagaggaggagtcagggagctgctgctcctattcctggagtggttcacctctcccctgcccagtggatggtccagacccaaggaaggagtgaattgaaagctaaggaggggctcagagacagcttcttacacctcatgagccaacctctgctagcttttgactttccttctgcagcttcctcacttctctcaaccatcagagaattaaagagatagggcgttgttctgggtaaggctttgacttaaggtaatgtggctggtttcatctatctagaccactaaagctttctccgtatcagcaat

SEQ ID NO: 430996 - DNA, 1126 bp, Homo sapiens
tgggtttcggggcgagcgttgggcgccgccgcgccgcgctgggtgctcggtccgactcagcggtggggagtgagccaggcctcccgccaccgctgctgccgccaccactgcgtcgggctggtgcagccccgggccaggccgcggccggggcaggagcgcaggggctttgttatgcacctaaagccatattggaagctccagaagaaagagcaccccccggaagtcagcagggaaacgcagagaactcctatgaaccaccaaaaggctgtaaatgatgaaacatgcaaagctagccacataacatcaagtgtctttccttcagcctctctcggtaaagcatcatctcgaaagccatttgggatcctttctccaaatgttctgtgcagtatgagtgggaagagtcctgtagagagcagcttgaatgttaaaaccaaaaagaatgcaccatctgcaacgatccaccagggcgaagaagaaggaccacttgatatctgggctgttgtgaaacctggaaataccaaggaaaaaattgcattctttgcatcccaccagtgtagtaacaggataggatctatgaaaataaaaagttcctgggatattgatgggagagctactaagagaaggaaaaaatcaggggatcttaaaaaagccaaggtacaggtggacaaggatgagggaggttaacagcaggtgctaccaacctgagccttttgcatgtggcattgagcactgttctgtgcactatgtgagtgacagtggggatggagtctatgctgggaggcctctgtcagttatacagatggttggccttcttggagcaaagagccagtgctctgctagctagctgttcaaaaaactgcacaaactcacctgcaattgtgaggttttctggccaatccagaggtgtgcctgcagtgtctgagtcctattctgccccaggagcttgtgaagaacccacagaaaggggaaatcttgaggttggtgaaccacagagcgaaccagtccgtgtccttgacatggtagccaaggtagagcacgagatggtcactccagctccaagggaggtcaccatattgatgccgaacactagtgcgcacacccgatcggcatagcgcactacagccct

SEQ ID NO: 430997 - DNA, 759 bp, Homo sapiens
cagggtagaaaaaggaagttgtcttccacgaacgcttggaatcgcagtggatttgaatcgaaagttgttcggtctttggggaaggatcaacaaagagctatgtgtttagtctaccatccttaaccagaagtctgggacataattctttataaaaataggggctttgttatgcacctaaagccatattggaagctccagaagaaagagcaccccccggaagtcagcagggaaacgcagagaactcctatgaaccaccaaaaggctgtaaatgatgaaacatgcaaagctagccacataacatcaagtgtctttccttcagcctctctcgatcagccactcttgatctggttttcatgtgggacacaaagctgtgactgcgtgaggggttaaagtgaccaagagcagagggcacacccttacttgatcatctgaagcaaaaaccagaaccagggaaactagaggaggagtcagggagctgctgctcctattcctggagtggttcacctctcccctgcccagtggatggtccagacccaaggaaggagtgaattgaaagctaaggaggggctcagagacagcttcttacacctcatgagccaacctctgctagcttttgactttccttctgcagcttcctcacttctctcaaccatcagagaattaaagagatagggcgttgttctgggtaaggctttgacttaaggtaatgtggctggtttcatctatctagaccactaaagctttctccgtatcagcaat

SEQ ID NO: 430998 - DNA, 1494 bp, Homo sapiens
gggtgggggcaagggtaagggtgagatgcttgggatgagagtgtaaggggtatggagaatctctgggatagcagagaagttaaaaattttgaaaagtctcagtcctgattaagagcaggaaaaataatggaaacagaaataggcgtactttaaatgtgcaaaaactggagactggggagagaaatcgatgcagagggaggctgagaataagggggagatagagtgactaaagtgatgtgagtcccatgtggggagggggatgcaatgtttattgtttaacatttctattaaatgcagccatgagcaattgccaacctgagccaggttgaatcaatgtcttctcacttaatcagctaacaagactgcagactttttttccgtttctgaattggtataaacttggatgcggcgtggtgggtgtcatagataacctctatagggacagaagcctcacaggtcaaaactggctccaaggaaagttttgcagaatgatttcctttccattcttttagaagagctacctttttttttttttttccctgacagggtctggcttgcccaggctggagtgcggtggctagtcacaggtgtaataataggcactgcagtctccaactcctggcctcaagggatcctcacatcttagcctccagaatagctaggagtaggagtagctgggactacaagcatgcacagctgcacttggcttagaagtgctactttatttttatttttgagacagggtcttgtgtcatccagactggagcagtggtgcaattatggctcactgcggcctcgacattccagtctcaagtgatcctctgcctcagcctccggagtagccaggactacaggggtgtgccactagaagtgctactttttaacgaaatggtgactaatgttctggaactttcccattaaccttctgcatttagaaggaattatagatgttgagtgctccagtaaacagtgattctctttatatctgatttttttttttaaacagctaaaatgtaagtatgtatctcagagtcattttgaccattatggaagttgtatctctctgtttcatgtaactaattattaatatatttcatttttagtgtgatgtaatgagagactgtgtgtgtatgttaggtgctcaataaaaactgtatggttagatttaaagaagtggcaaggcaatggaaattctacctgcatttgatctacttccaagtacaccttgaattaagttcttaaacacatcttgaattgctgggaaaagacagaaactaagaagttgacataaagcaagagtcacaaactggcagccacctggccttatcattgttctatttgatttgcaccctggttctctttctttttcccttcctccccaccttcctcccatccattgttgaatctgtggatgcagagcccacggatgtggaggggcaactatatatatgtttttccattatatatataaatgtgtgtgtgtgtatatatgtg

SEQ ID NO: 430999 - DNA, 624 bp, Homo sapiens
tttttttttcagatcatgactggagaattttttcttttagaaaacagttttagagtataaaattctgaagaaatattttgcaaatgttttaaaagaaaataaaatctgggtttggggatattccttctcatttaaattataccaccattaaattaatgctctataggaaataaatcatatccattttgtactactttgagctcagttaaatcttattaaactatcccttgatttacccaacatatgtgctcctaaaaggttccctgcaaatcaaacttgtgtaaatctcatctaaaacgcactagggggagctccctatttgaaagaatcctaaggcatgtgcttttttcacataagtattcttgcaaaagaatgactttctgacttatctgctaaattatttaaattgttttaacacttctttaaaaacatcatcctatgcttattaaatgccactgagacaactttggccaagttatattaattttctttcacacctgcttttctgggatacaatacaaagcccaaagaaaaacatatacttcgtgatactaatagatgtttaaagcatgtaataatcagctttgaagatttttataattttaatttcaaaattaaagctga

SEQ ID NO: 431000 - DNA, 706 bp, Homo sapiens
ttatctctgacactttacacaggcctggcgtatagtaaacatttaatagattttcaaagaagcaataaaaggaataaatgaatgttagcagccaaacctctgttcacctttctctggaacaggagttggcaaactatggtttgagagccaaatccagcccttcatcaaattttgtaaataaagttttattggaactcagtcacacccattcatttatatattgtctatggctactttttcactatagaggcagagtagttgcagggtagttgcaacagagatactatgacccgcaaagtgtttactgtttggcccctttataaacaatttgctaattcttactctagaaccatgtgagctcaaactaaaaaatgggcttctgagcatggaaacagtactaacctatgctgactaacaagctaacctatgcttcttttgttaggtgtttgaaatgatcattaatcctggagataatgtcctcctagatgaacctgcttattcaggaactcttcaaagtgcagaagactgaggtgtaaggattgcttgagcccaggagcatggtgttacagggagccataattgcaccactgcacttcagcccaggcagcaaagtgagaccttgtcacttaaaaaaacaaacaaaaaaggcttaaaatggcaacaattttaccacaataaaactaaaataaaataattactttttctc

SEQ ID NO: 431001 - DNA, 832 bp, Homo sapiens
aaaaaaaaaaaaaaaaaaaaaaaaaaaaagaaaaaaaaaaaagaaaaaaaaaaaaaattcggccttccaggtattagcacaacttataaaagaatctttatgaagaaattaaactaggttgggcatggtggctcacacctataatcccagcactttgggaggcagaggagggaggatcacttgaacccaggaattcaaggctgcagtaagctacgatcacaccactgcactctggcctgcatgcactctggcctgcatggcagaacaagaccctgtctctaaaaaaagagaaagaaatcaaactaatcatgctgctcatggatttttccaataaatttcttgttttggcaggaagaaatgaacactggtattagacttaaagattaaatttcctcaaacatgtcctatctgtagtagttcaactagacaccttttaaagtgcctctaaattcatcagatggccaaactgtatttataatccacttaggcattttgaaaaactttcaacctgtaaaaagttacttttatcttggatttattatgaagaactttgtagttgctttgtaatttcccataaattgtctttgaaactaacattttacactgaattattttgagattttaaagaagtaattaagtgcaaaatggtatataatgtgtactttttctacttttaggaaaatttaatgagagcttattgcaaaaattgttataatttggtcattataagtgacttttagtaaaagtaccataaaccttatgttatgccacagaaattcctttaaaataaaattcttaaactaaacataaaaaaaaaaacagacccattaat

SEQ ID NO: 431002 - DNA, 607 bp, Homo sapiens
gggatttggctcaagtaaagatgaaggtgaacataatttccctaaatagtctgtatattggtacaagttatggattactttagctgtgtaaatatggtacctcctaggacatttagaaataaggaggaatggggtattcgcattcccagaccggtgattcattatttcaatagtattgtcttttatcctgagtgatgagaaccagtatttagacaactaaacacaaagattgatcctgctacttctaggttccatattttacatagaaatggacttctctttatgaatttttattttgtaattattctacaatgaaggaaaaaacacagcagttaaaagtttttcaccagacaagtgaaacaaatatgctccattcttctatcaagcattcaacattttaatcaagatagaaaacaaattcttatagcctggactctggagactgttttgcttctgcaatcaatgtactgagcacatccatttcattgttttctttttctagggttattgatttctatagtaaccagaaggatgcaatactggcagctgcagacaagtggttaactggtgagtggaacgtatattcgtcctcatgataaacagtagc

SEQ ID NO: 431003 - DNA, 2460 bp, Homo sapiens
ctttcaaatattttttattgaaatgacaataaaataaaaaaagaacagtgatcactttaaccaaacttactttacaaatataaaaaatataaccaaaacttgggaattccaggccacggcgcggggcgggagggggcgcggcgaggcccgccggcggggcaaaaccggcctgggccctggcggccgcaggagcgcgtgcggcgtggactttgccgggctcgccacacagccccagacccgtttaggaccgggagaccgaacgcagcgtccagccggggagtttcggcggcgttctccgggcaccgcgcgcgggaagccagacgcagcggggggacacatctcgcggtggcgttgccagagtgaggagttagcaggcaggacttgacgaggctctttggtttttctagtcctcaaccactgaagaagaagcttgatgcttggctgtcagaagacatgaattacgcacggttcatcacggcagcgagcgcagccagaaacccttctcccatccggaccatgactgacatattgagcagaggaccaaaatcgatgatctccttggctggtggcttaccaaatccaaacatgtttccttttaagactgccgtaatcactgtagaaaatggaaagaccatccaatttggagaagagatgatgaagagagcacttcagtattctccgagtgctggaattccagagcttttgtcctggctaaaacagttacaaataaaattgcataatcctcctaccatccattacccacccagtcaaggacaaatggatctatgtgtcacatctggcagccaacaaggtctttgtaaggtgtttgaaatgatcattaatcctggagataatgtcctcctagatgaacctgcttattcaggaactcttcaaagtctgcacccactgggctgcaacattattaatgttgccagtgatgaaagtgggattgttccagattccctaagagacatactttccagatggaaaccagaagatgcaaagaatccccagaaaaacacccccaaatttctttatactgttccaaatggcaacaaccctactggaaactcattaaccagtgaacgcaaaaaggaaatctatgagcttgcaagaaaatatgatttcctcataatagaagatgatccttactattttctccagtttaacaagttcagggtaccaacatttctttccatggatgttgatggacgtgtcatcagagctgactctttttcaaaaatcatttcctctgggttgagaataggatttttaactggtccaaaacccttaatagagagagttattttacacatacaagtttcaacattgcaccccagcacttttaaccagctcatgatatcacagcttctacacgaatggggagaagaaggtttcatggctcatgtagacagggttattgatttctatagtaaccagaaggatgcaatactggcagctgcagacaagtggttaactggtttggcagaatggcatgttcctgctgctggaatgtttttatggattaaagttaaaggcattaatgatgtaaaagaactgattgaagaaaaggccgttaagatgggggtattaatgctccctggaaatgctttctacgtcgatagctcagctcctagcccttacttgagagcatccttctcttcagcttctccagaacagatggatgtggccttccaggtattagcacaacttataaaagaatctttatgaagaaattaaactaggttgggcatggtggctcacacctataatcccagcactttgggaggcagaggagggaggatcacttgaacccaggaattcaaggctgcagtaagctacgatcacaccactgcactctggcctgcatgcactctggcctgcatggcagaacaagaccctgtctctaaaaaaagagaaagaaatcaaactaatcatgctgctcatggatttttccaataaatttcttgttttggcaggaagaaatgaacactggtattagacttaaagattaaatttcctcaaacatgtcctatctgtagtagttcaactagacaccttttaaagtgcctctaaattcatcagatggccaaactgtatttataatccacttaggcattttgaaaaactttcaacctgtaaaaagttacttttatcttggatttattatgaagaactttgtagttgctttgtaatttcccataaattgtctttgaaactaacattttacactgaattattttgagattttaaagaagtaattaagtgcaaaatggtatataatgtgtactttttctacttttaggaaaatttaatgagagcttattgcaaaaattgttataatttggtcattataagtgacttttagtaaaagtaccataaaccttatgttatgccacagaaattcctttaaaataaaattcttaaactaaacataaaaaaaaaaacagacccattaat

SEQ ID NO: 431004 - DNA, 2080 bp, Homo sapiens
ttatctctgacactttacacaggcctggcgtatagtaaacatttaatagattttcaaagaagcaataaaaggaataaatgaatgttagcagccaaacctctgttcacctttctctggaacaggagttggcaaactatggtttgagagccaaatccagcccttcatcaaattttgtaaataaagttttattggaactcagtcacacccattcatttatatattgtctatggctactttttcactatagaggcagagtagttgcagggtagttgcaacagagatactatgacccgcaaagtgtttactgtttggcccctttataaacaatttgctaattcttactctagaaccatgtgagctcaaactaaaaaatgggcttctgagcatggaaacagtactaacctatgctgactaacaagctaacctatgcttcttttgttaggtgtttgaaatgatcattaatcctggagataatgtcctcctagatgaacctgcttattcaggaactcttcaaagtctgcacccactgggctgcaacattattaatgttgccagtgatgaaagtgggattgttccagattccctaagagacatactttccagatggaaaccagaagatgcaaagaatccccagaaaaacacccccaaatttctttatactgttccaaatggcaacaaccctactggaaactcattaaccagtgaacgcaaaaaggaaatctatgagcttgcaagaaaatatgatttcctcataatagaagatgatccttactattttctccagtttaacaagttcagggtaccaacatttctttccatggatgttgatggacgtgtcatcagagctgactctttttcaaaaatcatttcctctgggttgagaataggatttttaactggtccaaaacccttaatagagagagttattttacacatacaagtttcaacattgcaccccagcacttttaaccagctcatgatatcacagcttctacacgaatggggagaagaaggtttcatggctcatgtagacagggttattgatttctatagtaaccagaaggatgcaatactggcagctgcagacaagtggttaactggtttggcagaatggcatgttcctgctgctggaatgtttttatggattaaagttaaaggcattaatgatgtaaaagaactgattgaagaaaaggccgttaagatgggggtattaatgctccctggaaatgctttctacgtcgatagctcagctcctagcccttacttgagagcatccttctcttcagcttctccagaacagatggatgtggccttccaggtattagcacaacttataaaagaatctttatgaagaaattaaactaggttgggcatggtggctcacacctataatcccagcactttgggaggcagaggagggaggatcacttgaacccaggaattcaaggctgcagtaagctacgatcacaccactgcactctggcctgcatgcactctggcctgcatggcagaacaagaccctgtctctaaaaaaagagaaagaaatcaaactaatcatgctgctcatggatttttccaataaatttcttgttttggcaggaagaaatgaacactggtattagacttaaagattaaatttcctcaaacatgtcctatctgtagtagttcaactagacaccttttaaagtgcctctaaattcatcagatggccaaactgtatttataatccacttaggcattttgaaaaactttcaacctgtaaaaagttacttttatcttggatttattatgaagaactttgtagttgctttgtaatttcccataaattgtctttgaaactaacattttacactgaattattttgagattttaaagaagtaattaagtgcaaaatggtatataatgtgtactttttctacttttaggaaaatttaatgagagcttattgcaaaaattgttataatttggtcattataagtgacttttagtaaaagtaccataaaccttatgttatgccacagaaattcctttaaaataaaattcttaaactaaacataaaaaaaaaaacagacccattaat

SEQ ID NO: 431005 - DNA, 1850 bp, Homo sapiens
cacttttgcctcctgcctcccaccatcagcatgccagcaaatttcctttctcatttgtagctacttttaaagtaaatgttgaagtcagtctttcatgttgactaatttctcatcttcattctcatcatttttctttctgtcggtcctaaggatcagcgttctctctctgaacacccttcagtgctgctggccatcctcattatggtcttgttcaaactagtgtttcttgagtccctcctgtaagtctgttaatcctggatttcaacctctggggcaaagagggcctgtttgaagtttccttaagttcataataatggcatctggagcaaataataagcccttgtgtgtgtttttggcagaaaagccatgaagacaagcagatgctaataaaagaatctgcatctttgtttgttattccatgttaaagggttgaaataaaggtaagagaatatttgtactgttgttatccaaatccatctcctgttctactctctattcaaaataatcgtacagtgactaacagagctttcagaccaacagtattttttatttttcattttaagttcagggtaccaacatttctttccatggatgttgatggacgtgtcatcagagctgactctttttcaaaaatcatttcctctgggttgagaataggatttttaactggtccaaaacccttaatagagagagttattttacacatacaagtttcaacattgcaccccagcacttttaaccagctcatgatatcacagcttctacacgaatggggagaagaaggtttcatggctcatgtagacagggttattgatttctatagtaaccagaaggatgcaatactggcagctgcagacaagtggttaactggtttggcagaatggcatgttcctgctgctggaatgtttttatggattaaagttaaaggcattaatgatgtaaaagaactgattgaagaaaaggccgttaagatgggggtattaatgctccctggaaatgctttctacgtcgatagctcagctcctagcccttacttgagagcatccttctcttcagcttctccagaacagatggatgtggccttccaggtattagcacaacttataaaagaatctttatgaagaaattaaactaggttgggcatggtggctcacacctataatcccagcactttgggaggcagaggagggaggatcacttgaacccaggaattcaaggctgcagtaagctacgatcacaccactgcactctggcctgcatgcactctggcctgcatggcagaacaagaccctgtctctaaaaaaagagaaagaaatcaaactaatcatgctgctcatggatttttccaataaatttcttgttttggcaggaagaaatgaacactggtattagacttaaagattaaatttcctcaaacatgtcctatctgtagtagttcaactagacaccttttaaagtgcctctaaattcatcagatggccaaactgtatttataatccacttaggcattttgaaaaactttcaacctgtaaaaagttacttttatcttggatttattatgaagaactttgtagttgctttgtaatttcccataaattgtctttgaaactaacattttacactgaattattttgagattttaaagaagtaattaagtgcaaaatggtatataatgtgtactttttctacttttaggaaaatttaatgagagcttattgcaaaaattgttataatttggtcattataagtgacttttagtaaaagtaccataaaccttatgttatgccacagaaattcctttaaaataaaattcttaaactaaacataaaaaaaaaaacagacccattaat

SEQ ID NO: 431006 - DNA, 1547 bp, Homo sapiens
gggatttggctcaagtaaagatgaaggtgaacataatttccctaaatagtctgtatattggtacaagttatggattactttagctgtgtaaatatggtacctcctaggacatttagaaataaggaggaatggggtattcgcattcccagaccggtgattcattatttcaatagtattgtcttttatcctgagtgatgagaaccagtatttagacaactaaacacaaagattgatcctgctacttctaggttccatattttacatagaaatggacttctctttatgaatttttattttgtaattattctacaatgaaggaaaaaacacagcagttaaaagtttttcaccagacaagtgaaacaaatatgctccattcttctatcaagcattcaacattttaatcaagatagaaaacaaattcttatagcctggactctggagactgttttgcttctgcaatcaatgtactgagcacatccatttcattgttttctttttctagggttattgatttctatagtaaccagaaggatgcaatactggcagctgcagacaagtggttaactggtttggcagaatggcatgttcctgctgctggaatgtttttatggattaaagttaaaggcattaatgatgtaaaagaactgattgaagaaaaggccgttaagatgggggtattaatgctccctggaaatgctttctacgtcgatagctcagctcctagcccttacttgagagcatccttctcttcagcttctccagaacagatggatgtggccttccaggtattagcacaacttataaaagaatctttatgaagaaattaaactaggttgggcatggtggctcacacctataatcccagcactttgggaggcagaggagggaggatcacttgaacccaggaattcaaggctgcagtaagctacgatcacaccactgcactctggcctgcatgcactctggcctgcatggcagaacaagaccctgtctctaaaaaaagagaaagaaatcaaactaatcatgctgctcatggatttttccaataaatttcttgttttggcaggaagaaatgaacactggtattagacttaaagattaaatttcctcaaacatgtcctatctgtagtagttcaactagacaccttttaaagtgcctctaaattcatcagatggccaaactgtatttataatccacttaggcattttgaaaaactttcaacctgtaaaaagttacttttatcttggatttattatgaagaactttgtagttgctttgtaatttcccataaattgtctttgaaactaacattttacactgaattattttgagattttaaagaagtaattaagtgcaaaatggtatataatgtgtactttttctacttttaggaaaatttaatgagagcttattgcaaaaattgttataatttggtcattataagtgacttttagtaaaagtaccataaaccttatgttatgccacagaaattcctttaaaataaaattcttaaactaaacataaaaaaaaaaacagacccattaat

SEQ ID NO: 431007 - DNA, 1283 bp, Homo sapiens
ctttcaaatattttttattgaaatgacaataaaataaaaaaagaacagtgatcactttaaccaaacttactttacaaatataaaaaatataaccaaaacttgggaattccaggccacggcgcggggcgggagggggcgcggcgaggcccgccggcggggcaaaaccggcctgggccctggcggccgcaggagcgcgtgcggcgtggactttgccgggctcgccacacagccccagacccgtttaggaccgggagaccgaacgcagcgtccagccggggagtttcggcggcgttctccgggcaccgcgcgcgggaagccagacgcagcggggggacacatctcgcggtggcgttgccagagtgaggagttagcaggcaggacttgacgaggctctttggtttttctagtcctcaaccactgaagaagaagcttgatgcttggctgtcagaagacatgaattacgcacggttcatcacggcagcgagcgcagccagaaacccttctcccatccggaccatgactgacatattgagcagaggaccaaaatcgatgatctccttggctggtggcttaccaaatccaaacatgtttccttttaagactgccgtaatcactgtagaaaatggaaagaccatccaatttggagaagagatgatgaagagagcacttcagtattctccgagtgctggaattccagagcttttgtcctggctaaaacagttacaaataaaattgcataatcctcctaccatccattacccacccagtcaaggacaaatggatctatgtgtcacatctggcagccaacaaggtctttgtaaggtgtttgaaatgatcattaatcctggagataatgtcctcctagatgaacctgcttattcaggaactcttcaaagtctgcacccactgggctgcaacattattaatgttgccagtgatgaaagtgggattgttccagattccctaagagacatactttccagatggaaaccagaagatgcaaagaatccccagaaaaacacccccaaatttctttatactgttccaaatggcaacaaccctactggaaactcattaaccagtgaacgcaaaaaggaaatctatgagcttgcaagaaaatatgatttcctcataatagaagatgatccttactattttctccagtttaacaaggtaagtgattatgtgaacttacttcactattagaagataagttgttttaagttactgcactgtgttgggtattaggctgactgctgagtcagaactaatccacttttaca

SEQ ID NO: 431008 - DNA, 692 bp, Homo sapiens
ctttcaaatattttttattgaaatgacaataaaataaaaaaagaacagtgatcactttaaccaaacttactttacaaatataaaaaatataaccaaaacttgggaattccaggccacggcgcggggcgggagggggcgcggcgaggcccgccggcggggcaaaaccggcctgggccctggcggccgcaggagcgcgtgcggcgtggactttgccgggctcgccacacagccccagacccgtttaggaccgggagaccgaacgcagcgtccagccggggagtttcggcggcgttctccgggcaccgcgcgcgggaagccagacgcagcggggggacacatctcgcggtggcgttgccagagtgaggagttagcaggcaggacttgacgaggctctttggtttttctagtcctcaaccactgaagaagaagcttgatgcttggctgtcagaagacatgaattacgcacggttcatcacggcagcgagcgcagccagaaacccttctcccatccggaccatgaaacggggtgaccatctctcctttggggtggggcattcctcgcacagcctctaaggagggttccctagcaagccaccgcttggttgcatccatgcgtacccctgtgcacgctcgcggtgagccaggctctgcgtgcagaaatgaaatagacacagcctttgttctcaaagaac

SEQ ID NO: 431009 - DNA, 373 bp, Homo sapiens
ccagcggagcgcgcgggaacgagggtggggccgctcccggctgggcgcagctcgggagccccctgcagtggacccaagtcgccgccagatggttcccgaggattaggatcacgggcacttccggtcccctcggtcagcccctgggctagcctctgggccggcgcctaggccggccaacgcggacgccgggttgcggtgattcccagcggcgaggtcaagagtcattggcctggggctgcaagcgcctcgcgcctgggctaccccgcgccctgcgctctgagggcgatgatccgggacggggaggcgcgcgccgcgggcggccataggccacggcgcggggcgggagggggcgcggcgaggcccgccggcgggg

SEQ ID NO: 431010 - DNA, 805 bp, Homo sapiens
agcccctgggctagcctctgggccggcgcctaggccggccaacgcggacgccgggttgcggtgattcccagcggcgagtcctcaaccactgaagaagaagcttgatgcttggctgtcagaagacatgaattacgcacggttcatcacggcagcgagcgcagccagaaacccttctcccatccggaccatgactgacatattgagcagaggaccaaaatcgatgatctccttggctggtggcttaccaaatccaaacatgtttccttttaagactgccgtaatcactgtagaaaatggaaagaccatccaatttggagaagagatgatgaagagagcacttcagtattctccgagtgctggaattccagagcttttgtcctggctaaaacagttacaaataaaattgcataatcctcctaccatccattacccacccagtcaaggacaaatggatctatgtgtcacatctggcagccaacaaggtctttgtaaggtgtttgaaatgatcattaatcctggagataatgtcctcctagatgaacctgcttattcaggaactcttcaaagtctgcacccactgggctgcaacattattaatgttgccagtgatgaaagtgggattgttccagattccctaagagacatactttccagatggaaaccagaagatgcaaagaatccccagaaaaacacccccaaatttctttatactgttccaaatggcaacaaccctactggaaactcattaaccagtgaacgcaaaaaggaaatctatgaggtattgtagaagaatgggttaaagtag

SEQ ID NO: 431011 - DNA, 2013 bp, Homo sapiens
agaaaggctcttcctgggaagctgagaaggggcatgcacagcgtgcagatgggtgtacagtggagagggccagctgacatattgagcagaggaccaaaatcgatgatctccttggctggtggcttaccaaatccaaacatgtttccttttaagactgccgtaatcactgtagaaaatggaaagaccatccaatttggagaagagatgatgaagagagcacttcagtattctccgagtgctggaattccagagcttttgtcctggctaaaacagttacaaataaaattgcataatcctcctaccatccattacccacccagtcaaggacaaatggatctatgtgtcacatctggcagccaacaaggtctttgtaaggtgtttgaaatgatcattaatcctggagataatgtcctcctagatgaacctgcttattcaggaactcttcaaagtctgcacccactgggctgcaacattattaatgttgccagtgatgaaagtgggattgttccagattccctaagagacatactttccagatggaaaccagaagatgcaaagaatccccagaaaaacacccccaaatttctttatactgttccaaatggcaacaaccctactggaaactcattaaccagtgaacgcaaaaaggaaatctatgagcttgcaagaaaatatgatttcctcataatagaagatgatccttactattttctccagtttaacaagttcagggtaccaacatttctttccatggatgttgatggacgtgtcatcagagctgactctttttcaaaaatcatttcctctgggttgagaataggatttttaactggtccaaaacccttaatagagagagttattttacacatacaagtttcaacattgcaccccagcacttttaaccagctcatgatatcacagcttctacacgaatggggagaagaaggtttcatggctcatgtagacagggttattgatttctatagtaaccagaaggatgcaatactggcagctgcagacaagtggttaactggtttggcagaatggcatgttcctgctgctggaatgtttttatggattaaagttaaaggcattaatgatgtaaaagaactgattgaagaaaaggccgttaagatgggggtattaatgctccctggaaatgctttctacgtcgatagctcagctcctagcccttacttgagagcatccttctcttcagcttctccagaacagatggatgtggccttccaggtattagcacaacttataaaagaatctttatgaagaaattaaactaggttgggcatggtggctcacacctataatcccagcactttgggaggcagaggagggaggatcacttgaacccaggaattcaaggctgcagtaagctacgatcacaccactgcactctggcctgcatgcactctggcctgcatggcagaacaagaccctgtctctaaaaaaagagaaagaaatcaaactaatcatgctgctcatggatttttccaataaatttcttgttttggcaggaagaaatgaacactggtattagacttaaagattaaatttcctcaaacatgtcctatctgtagtagttcaactagacaccttttaaagtgcctctaaattcatcagatggccaaactgtatttataatccacttaggcattttgaaaaactttcaacctgtaaaaagttacttttatcttggatttattatgaagaactttgtagttgctttgtaatttcccataaattgtctttgaaactaacattttacactgaattattttgagattttaaagaagtaattaagtgcaaaatggtatataatgtgtactttttctacttttaggaaaatttaatgagagcttattgcaaaaattgttataatttggtcattataagtgacttttagtaaaagtaccataaaccttatgttatgccacagaaattcctttaaaataaaattcttaaactaaacataaaaaaaaaaacagacccattaat

SEQ ID NO: 431012 - DNA, 2180 bp, Homo sapiens
ctttcaaatattttttattgaaatgacaataaaataaaaaaagaacagtgatcactttaaccaaacttactttacaaatataaaaaatataaccaaaacttgggaattccaggccacggcgcggggcgggagggggcgcggcgaggcccgccggcggggcaaaaccggcctgggccctggcggccgcaggagcgcgtgcggcgtggactttgccgggctcgccacacagccccagacccgtttaggaccgggagaccgaacgcagcgtccagccggggagtttcggcggcgttctccgggcaccgcgcgcgggaagccagacgcagcggggggacacatctcgcggtggcgttgccagagtgaggagttagcaggcaggacttgacgaggctctttggtttttctagtcctcaaccactgaagaagaagcttgatgcttggctgtcagaagacatgaattacgcacggttcatcacggcagcgagcgcagccagaaacccttctcccatccggaccatgactgacatattgagcagaggaccaaaatcgatgatctccttggctggtggcttaccaaatccaaacatgtttccttttaagactgccgtaatcactgtagaaaatggaaagaccatccaatttggagaagagatgatgaagagagcacttcagtattctccgagtgctggaattccagagcttttgtcctggctaaaacagttacaaataaaattgcataatcctcctaccatccattacccacccagtcaaggacaaatggatctatgtgtcacatctggcagccaacaaggtctttgtaaggtgtttgaaatgatcattaatcctggagataatgtcctcctagatgaacctgcttattcaggaactcttcaaagtctgcacccactgggctgcaacattattaatgttgccagtgatgaaagtgggattgttccagattccctaagagacatactttccagatggaaaccagaagatgcaaagaatccccagaaaaacacccccaaatttctttatactgttccaaatggcaacaaccctactggaaactcattaaccagtgaacgcaaaaaggaaatctatgagcttgcaagaaaatatgatttcctcataatagaagatgatccttactattttctccagtttaacaagttcagggtaccaacatttctttccatggatgttgatggacgtgtcatcagagctgactctttttcaaaaatcatttcctctgggttgagaataggatttttaactggtccaaaacccttaatagagagagttattttacacatacaagtttcaacattgcaccccagcacttttaaccagctcatgatatcacagcttctacacgaatggggagaagaaggtttcatggctcatgtagacagggttattgatttctatagtaaccagaaggatgcaatactggcagctgcagacaagtggttaactggtttggcagaatggcatgttcctgctgctggaatgtttttatggattaaagttaaaggcattaatgatgtaaaagaactgattgaagaaaaggccgttaagatgggggtattaatgctccctggaaatgctttctacgtcgatagctcagctcctagcccttacttgagagcatccttctcttcagcttctccagaacagatggatgtggttttggcaggaagaaatgaacactggtattagacttaaagattaaatttcctcaaacatgtcctatctgtagtagttcaactagacaccttttaaagtgcctctaaattcatcagatggccaaactgtatttataatccacttaggcattttgaaaaactttcaacctgtaaaaagttacttttatcttggatttattatgaagaactttgtagttgctttgtaatttcccataaattgtctttgaaactaacattttacactgaattattttgagattttaaagaagtaattaagtgcaaaatggtatataatgtgtactttttctacttttaggaaaatttaatgagagcttattgcaaaaattgttataatttggtcattataagtgacttttagtaaaagtaccataaaccttatgttatgccacagaaattcctttaaaataaaattcttaaactaaacataaaaaaaaaaacagacccattaat

SEQ ID NO: 431013 - DNA, 2682 bp, Homo sapiens
  misc_feature (555)..(555): n is a, c, g, or t
  misc_feature (558)..(558): n is a, c, g, or t
  misc_feature (785)..(785): n is a, c, g, or t
  misc_feature (1013)..(1013): n is a, c, g, or t
tgtcccacaccggaagtcagaaagcggagcctttcttacaccggaagtcaatgaagcgggtctttcctacgctaaaaaccactgagtggagtatttagtacacaggaagtcggccagagaaacatttctcatatttgaaggccggaaagagggacatttctgacaccggaagtcagtgagaggactctttcccacacaggaagtcagctagagagccgtctcccctctctggagccgagagaggccggtttcccccaccgtagcccacctgggaggaattttccagagatcactgtctgatgaccctgtcttggaattggagccatgcaagttacactgaccacgtttgggttgggatattgaggaggttatggttaaaagcatacgatgggagatcatattgtacttgcgagtgagacccggctggaggaatgttttaattcttcggaaataccaagtggtctctgtaagtaacatagggtggttagccaagcataatgagaccattgaggcatcccagcaagaattgatctgtttagagaagagatgttgctnctncttctttttttttaacattttatttttaattttgctgcctatgacaagctgcttctaacagcctcagggcgaggggcccatgagtgcaaggacaggagaggggtctgcgagttctacttgggtagggcttggggcatcataggagtgcagggatctcctctctgggatccagtttaaccctgatgacatcccccatgcagcaaataactccaggtaaccggcagcanctggtccacatcatagtctgtgagagattgctcatgtcttgcctgttttcctacctcttcattctaaggaaaaggacccacaatctgagtgccctgctctgggacataggtggggaacaggcagggatgggaggtggggaccactttcttctgcacccattaaatatatgcctttttttttgagacagggcctccctctgtcacccagactggagggcagtggtgcantcgtggctcactgctgcctcagtctccagatggctcaagccatcctcccccatcagctgtcaaaatacctggatttacaggtgcatgccaccatgcccagctaattttttctatttttttttttttttgtagagatgggttttcactatttttcccaggctagtctccaacttctgggctcaagcgatccacccgccttggcctcctaagtcctgggattataggtatgagccactgcgcctggcctttttgccttttgaaagtatctgttgttaacaatattcaattgggttgaatcttgctagggaccaaggtgaatttgcataaattagtctatgccaatttgcatactatcagcaaatttgtagtgtacagaattttggaaatagaaggaagctaagaggggtgtcaaatgcagcttcttctttttttacctgaaaagataccaaagtccagctcagggaaggtcacacagctaattcttatcatggggagacagacccagggacatcatggtgcctccgagattagtacggcccctcaaacatccccattttctgtccctagcccattggaaccccttaaagttggtccctcgagctcgggtgatagcacacatgatggaaagtaggcaggcttgccattgaagctccaacctagctctgcaccacatcagctgtgtgacctcgagcaaatcacttaaccactctgagcatggcatttgtaaatgtcaaggtagcaacgccctctttactgccctgttgtgacaaataagatatattccataaatatgatccatgtagtattaaactaccatttactgagtctcccctatggaaagcacttagtaggtgctcaaaaactcctagtcctttcttcccctctttcaatgtgtcactgcatctgggtaatttatacccatttcctgttttcctttgagaagtgcatgtcatgctctgcacaaaagtgactcttaatgatataagggctgctgcagtgcacaactgtctcccaagaaggtaccgcaggggtgtaaaacttctccctgcattgtcaacgctggtctccatggatgtctgctggctttttcaaaaattcttgtagaacagtgcttctcatatggtgattttgtcccccttgccccagggggacctttggccatgtcttgagatgtttttggttgccgtgattgaggaggtgctaccagcgtctgctgggcagagaccagggatgctgctccacatcccacaatgcacaggacaatcttctctacagcaatgaattatccagttcacaatctcaatagcaccaatattgagaaaccctgttgaagatggagactatccacggggcattgatcttggggtctcccccttcctgaatacttgaagtccctcggcagactcttggatacctccagcaatggggagctcaccacctgttttgaagccaggcaggtttgggctcttcttgtagctgtgtgactctggattttcccataggtgggagtggatccaccaccttgagcttcagtttcctccagtgccatgggattagcagcagccctgcctcacagattgcgtgaggatgaaatgagatgatgctcctgagttggctggtgcagtgcacggtacacagagagtgctcaataaatgttccctgctgtgaa

SEQ ID NO: 431014 - DNA, 852 bp, Homo sapiens
tgtcccacaccggaagtcagaaagcggagcctttcttacaccggaagtcaatgaagcgggtctttcctacgctaaaaaccactgagtggagtatttagtacacaggaagtcggccagagaaacatttctcatatttgaaggccggaaagagggacatttctgacaccggaagtcagtgagaggactctttcccacacaggaagtcagctagagagccgtctcccctctctggagccgagagaggccggtttcccccaccgtagcccacctgggaggaattttccagagatcactgtctgatgaccctgtcttggaattggagccatgcaagttacactgaccacgtttgggttgggatattgaggaggttatggttaaaagcatacgatgggagatcatattgtacttgcgagtgagacccggctggaggaatgttttaattcttcggaaataccaagtggtctctgtctcacatgagtacttcacaatggggaaactgaactggaactctactgacaacgcagttgggagttcaaacttaataaccttccagagttggtatcaaattcagacgctgacgctccttggagaggttctttgctgcaagaggatggaaaggatcactgtgattttgtttttctcctgctgctctgtctggaagccatgtgaggaggacatctgagcagccctgtggagaggcccccagccaacagccagcatgaacttgctgggcatgtgagtgcaccaccttgaaagtagagcctcaacccctggtcaagccatcaggtaagattgcagccctggcttatatctgaccacaacctcatgagcaacccagatccaggccaccca

SEQ ID NO: 431015 - DNA, 1081 bp, Homo sapiens
tgtcccacaccggaagtcagaaagcggagcctttcttacaccggaagtcaatgaagcgggtctttcctacgctaaaaaccactgagtggagtatttagtacacaggaagtcggccagagaaacatttctcatatttgaaggccggaaagagggacatttctgacaccggaagtcagtgagaggactctttcccacacaggaagtcagctagagagccgtctcccctctctggagccgagagaggccggtttcccccaccgtagcccacctgggaggaattttccagagatcactgtctgatgaccctgtcttggaattggagccatgcaagttacactgaccacgtttgggttgggatattgaggaggttatggttaaaagcatacgatgggagatcatattgtacttgcgagtgagacccggctggaggaatgttttaattcttcggaaataccaagtggtctctagatgggttttcactatttttcccaggctagtctccaacttctgggctcaagcgatccacccgccttggcctcctaagtcctgggattatagggggacctttggccatgtcttgagatgtttttggttgccgtgattgaggaggtgctaccagcgtctgctgggcagagaccagggatgctgctccacatcccacaatgcacaggacaatcttctctacagcaatgaattatccagttcacaatctcaatagcaccaatattgagaaaccctgttgaagatggagactatccacggggcattgatcttggggtctcccccttcctgaatacttgaagtccctcggcagactcttggatacctccagcaatggggagctcaccacctgttttgaagccaggcaggtttgggctcttcttgtagctgtgtgactctggattttcccataggtgggagtggatccaccaccttgagcttcagtttcctccagtgccatgggattagcagcagccctgcctcacagattgcgtgaggatgaaatgagatgatgctcctgagttggctggtgcagtgcacggtacacagagagtgctcaataaatgttccctgctgtgaa

SEQ ID NO: 431016 - DNA, 974 bp, Homo sapiens
caggtctgacctgcagattcttccattttaaatcaaggctaaaatatattgaggcttactgaggtctagtggcagctcggagttatcagtgggttgggtagtgcttgctgctctggaactaatggcacaattttattgcatttaggtcaaattgtgcctcaattccaatgtcgtatttttgggtcatgggtctcctctctctttcttttctaaatgtgcccgagtattcctcctggtcctttgggatgctgacagaggagcagatatgcagcatctctgccatgatataagggctgctgcagtgcacaactgtctcccaagaaggtaccgcaggggtgtaaaacttctccctgcattgtcaacgctggtctccatggatgtctgctggctttttcaaaaattcttgtagaacagtgcttctcatatggtgattttgtcccccttgccccagggggacctttggccatgtcttgagatgtttttggttgccgtgattgaggaggtgctaccagcgtctgctgggcagagaccagggatgctgctccacatcccacaatgcacaggacaatcttctctacagcaatgaattatccagttcacaatctcaatagcaccaatattgagaaaccctgttgaagatggagactatccacggggcattgatcttggggtctcccccttcctgaatacttgaagtccctcggcagactcttggatacctccagcaatggggagctcaccacctgttttgaagccaggcaggtttgggctcttcttgtagctgtgtgactctggattttcccataggtgggagtggatccaccaccttgagcttcagtttcctccagtgccatgggattagcagcagccctgcctcacagattgcgtgaggatgaaatgagatgatgctcctgagttggctggtgcagtgcacggtacacagagagtgctcaataaatgttccctgctgtgaa

SEQ ID NO: 431017 - DNA, 2834 bp, Homo sapiens
  misc_feature (555)..(555): n is a, c, g, or t
  misc_feature (558)..(558): n is a, c, g, or t
  misc_feature (785)..(785): n is a, c, g, or t
  misc_feature (1013)..(1013): n is a, c, g, or t
tgtcccacaccggaagtcagaaagcggagcctttcttacaccggaagtcaatgaagcgggtctttcctacgctaaaaaccactgagtggagtatttagtacacaggaagtcggccagagaaacatttctcatatttgaaggccggaaagagggacatttctgacaccggaagtcagtgagaggactctttcccacacaggaagtcagctagagagccgtctcccctctctggagccgagagaggccggtttcccccaccgtagcccacctgggaggaattttccagagatcactgtctgatgaccctgtcttggaattggagccatgcaagttacactgaccacgtttgggttgggatattgaggaggttatggttaaaagcatacgatgggagatcatattgtacttgcgagtgagacccggctggaggaatgttttaattcttcggaaataccaagtggtctctgtaagtaacatagggtggttagccaagcataatgagaccattgaggcatcccagcaagaattgatctgtttagagaagagatgttgctnctncttctttttttttaacattttatttttaattttgctgcctatgacaagctgcttctaacagcctcagggcgaggggcccatgagtgcaaggacaggagaggggtctgcgagttctacttgggtagggcttggggcatcataggagtgcagggatctcctctctgggatccagtttaaccctgatgacatcccccatgcagcaaataactccaggtaaccggcagcanctggtccacatcatagtctgtgagagattgctcatgtcttgcctgttttcctacctcttcattctaaggaaaaggacccacaatctgagtgccctgctctgggacataggtggggaacaggcagggatgggaggtggggaccactttcttctgcacccattaaatatatgcctttttttttgagacagggcctccctctgtcacccagactggagggcagtggtgcantcgtggctcactgctgcctcagtctccagatggctcaagccatcctcccccatcagctgtcaaaatacctggatttacaggtgcatgccaccatgcccagctaattttttctatttttttttttttttgtagagatgggttttcactatttttcccaggctagtctccaacttctgggctcaagcgatccacccgccttggcctcctaagtcctgggattataggtatgagccactgcgcctggcctttttgccttttgaaagtatctgttgttaacaatattcaattgggttgaatcttgctagggaccaaggtgaatttgcataaattagtctatgccaatttgcatactatcagcaaatttgtagtgtacagaattttggaaatagaaggaagctaagaggggtgtcaaatgcagcttcttctttttttacctgaaaagataccaaagtccagctcagggaaggtcacacagctaattcttatcatggggagacagacccagggacatcatggtgcctccgagattagtacggcccctcaaacatccccattttctgtccctagcccattggaaccccttaaagttggtccctcgagctcgggtgatagcacacatgatggaaagtaggcaggcttgccattgaagctccaacctagctctgcaccacatcagctgtgtgacctcgagcaaatcacttaaccactctgagcatggcatttgtaaatgtcaaggtagcaacgccctctttactgccctgttgtgacaaataagatatattccataaatatgatccatgtagtattaaactaccatttactgagtctcccctatggaaagcacttagtaggtgctcaaaaactcctagtcctttcttcccctctttcaatgtgtcactgcatctgggtaatttatacccatttcctgttttcctttgagaagtgcatgtcatgctctgcacaaaagtgactcttaatggtggcatttcaagcatcatggcagagtgctgagacgctgatgaagatattttaggctggggtgcatggggagcactctcagggcctctcatgcgcatcctgagcccttcctgtgaaccagactgaccctggcttctgtgccattttcattccagccaagaatgttctgaaatgaagccaatatctgaaggatctaggatgcctgttcccctctcttatgctgtctcgggggatgatttagccaccaagaattttccttatggttgcaagatgattaaaaaaaaccacacactcagatgcttttcggaggttgacatttttcacagcccctcttcctcctccatagatttcctggaggttccatccagctctggctctagctggctccttgactctggacaagtcacttcatctctccaagccttgtctataaagtagggataatactccttcccacttcagagagtcattcggggattaaactgtgacatgtatgtagccaagggtccagcacacactgacaactcaccaaatattagccatcactccaaactaagaaggcaggattccggctgggcacggtggctcacgcctgtaatcccagcactttggaaggctgacgcaggtggatcatgaggtcaagagattgagaccatcctggccaacatggtgaaaccccgtctctactaaaaatacaaaaattagctgggcgtggtggtgcgtgcctgtagtcccagttacaggctgggaggctgaggcaggagaatcacttgaacctgggaggcggaggtttcagtgagccaagattgtgccattgcactccagcctggcgacagagtgaga

SEQ ID NO: 431018 - DNA, 433 bp, Homo sapiens
aaagcagtgggattgcaagtgcaagccaccatgcccagcctccatcttcattatatcagtaccacctgtgtgatcagtgttgtacagaggaggtgatgtatgacttctgaggttatgccgtgaaagacttgcagcttttatctcatcctcttggatcccttttcctcagggaagccatgtgaggaggacatctgagcagccctgtggagaggcccccagccaacagccagcatgaacttgctgggcatgtgagtgcaccaccttgaaagtagagcctcaacccctggtcaagccatcaggtaagattgcagccctggcttatatctgaccacaacctcatgagcaacccagatccaggccacccatgtaagctgcttgtgaattcctcacccacaaaaatcatgtgacataattaatgttcattgtcacttta

SEQ ID NO: 431019 - DNA, 5233 bp, Homo sapiens
  misc_feature (2240)..(2240): n is a, c, g, or t
  misc_feature (2320)..(2320): n is a, c, g, or t
ggaaggagctagacggcggtcgggtaggtgacggcttggttggggtcgctgcgaggggactactaggagcgccgaggcgtgagtcgtagcctgtggcttggggtcgggagtgcaggaggcgaaaatgtttgccattcttttgaaagtctggcctgggtgtgggagttcggtcatcgaacacttactgagagccagatacctgccaggcactgccctgggctccagggacacatcagtcaacgaacggaagggccctgctctcaagcagtgcgaaaagcagattataaacaagtcaacaaacgggattatctaaggtggtagttctctactcacatcttttaatcttgaagactagaaaatataactggatctgccacttgtttggaaaatatctctaccaagcaataaattacccgctgtgcttttgttgtagtgtagaagtttttgagttctccaaatctaaacaagattttgtcccattttcccatgaagctacattgttgcttattcactttagtggcaagtattattgtgccagctgcttttgttttggaagatgtggacttcgaccaaatggtttcactggaagcaaatcgtagttcttacaatgcatcctttccctcaagctttgaactctcagcaagttcccactcggatgatgacgtcatcatagccaaagagggaactagcgtttcaattgagtgtcttctcacagccagtcactatgaagatgtccattggcacaattcaaaaggacagcaactggatggcagaagcagaggtggaaagtggttggtttctgataacttcctaaacatcaccaatgtagcttttgatgaccgtgggctctatacctgtttcgtcacctctccaattcgtgcctcctactctgtcaccctacgtgttatcttcacctcgggagacatgagtgtctattacatgattgtttgcctgattgcctttacaatcacactcatcttgaatgtcacacggctgtgcatgatgagcagccatcttcgcaagactgagaaggccatcaatgagttctttagaactgaaggggctgagaaacttcagaaggcctttgagattgcaaaacgtatccccatcattacctcagccaaaactctggagctcgccaaagtcacacaatttaagaccatggagtttgctcgttatattgaagaactggcaagaagtgtccctcttccacctcttattctaaactgtcgagcctttgttgaggagatgtttgaggctgtgcgagtggatgaccctgatgacctgggtgaaagaattaaagagagacctgccttgaatgctcaaggtggcatctatgtcattaacccagagatgggacggagtaattcaccaggaggagattcagatgatggctctctgaatgaacaaggccaggaaatagcagttcaggtttctgtccaccttcagtcagaaaccaaaagtattgatacagagtctcaaggcagcagtcatttcagtccacctgatgatataggatctgcagaatctaactgtaactacaaagatggggcatatgaaaactgtcagctgtaacctacaatgctgtaacccagtacctacaaaatcagctcgctctcagaaaaggaacctgtttcttagaagaagtaacatttttgccaaaagatgactggggttttccgtttgttaatattaagcacatcagaacgtgaattgccaaagtcttcattagaaggcagcatttttcctctctgatacttttcagtcattttccttagagctttattaaattatgcatgctaagatttaaaggagccccagataaacatgatggggaaaagcactgaactaagagtcccatggtttctcttctggtcacagttcttccattggttggatctgatacttatcttgggacttcagtttttccgtcaataagatgagggattaggtgagatctgaagttgtttctagctctatagcttcttaacccatcacctttaaattaccagaatcttcactcatctctaagtaaacctttcccgggacttttactcgcttcttttggaaaggattaagctgagatctaaatttccacaccaatgtcataatgcacagaggtttttgaaaaacatctgagtgtttttcagatgttttgccatgtggagcatataatgatatgtgcaagattgaatcttttcaatgtagcacatgtctgtagggttatacagatgtcaganagctaactgctctgtaaactactttccatgagtaaattggtccttggtgggggtgtatcatatttttaacttactgaganatcattttagttcattgaggttggcagggattgcctaactgatcttccaaagtgagcagtttatttctaaggtataacgtctttgatgcttttagaataagaacagtgtcaaatcatctgtcttctggaaaatcatggattttcatatttctgttaacagaatttctcaggctttccctttttaaaagtattggactctacaaataggttctatatttgggatctcatcctaggagaaaacccaaaactggattcctcttaagacctctgtcaaccctcctgccctttgtggtcttaggtatggtgctataggttgcatgcgtctttatcttgtttgtttggttaatattttgttgttgaggtttttatttttgtttacttcagatacgtaattctgagctatggctgcttttgtagcctttccgagaagcactaacctgaaataagattagataattgtgagggtgtgttactatattaaaatacacacacaactgatctagacatcaagaggaagaaaaatgatggatgatgccacctgcttcaactgtatataataaacacttatgatgacatttcttgcctggctgagatctgatataatggaattgtaaatactcttcagaacaatttcttcagctacaggaagcgtggtgccatataattttaagaacttggcagtggagctccatttggggcttcacgtttcttcatatgacttctgattattgaagcattacttcagctagaggctcctgagggaaatgttcagaggaggttttatcaggattttaatttaaggtttcaaacaggggaagacaggaaattcaaagcgtgacgggataaaactcatgcctccctttgtccaggcttatcagaagtaatacatctgctctgaatagcatgaatgaatcaatgtgcagttttatcagatggcatcatggataaagatgataatgctgccttttctgtctctcaggctgtttccatggaaacctctagagccaaataaaagctaaccaatcatttagccaaagcttgccttggctcatagactggtatttctttaaggaaaattgtttttatatatttgactataagagcaaaggctcttgaacatatcctagattatggaacactttttcccttcccttttctctggaaaaattaaattttttttctgtccactgagactggagtgcagtggcaagatcatagctcactgcagcctccaactcctggggtcaagcgatcgtcctgcttcagcctcccaagcagctaggactacaggtgtgcaccacctttcctggctaatttttttttattttttgtagagatgggggtctcactttgttgcccaggctgaccttgtacttgtggcttcaaatgatcctcctgccttacctcccaaagtgttgagattacaggcatgagccactgtgcctggccaaaaaacattttaaatcccttgtctgggggtcagtcctctaaacatccctcagatttcagatagtactttcaaccctgtcctaacatagcaggtttgcagtaatcttttagaatatagcttgtcaaattagagaatggttttaccccacatgttctcataggagacattattatttagaaccctaaggtagacatgtttaaaatcaaagtcctaagaaacagaactttggaaaaatggaggaaatgtttttaaagtctgtaagtttgcacaatactgtatagtaactaaatgcatgctactccgttgtatcctagttattttagaaacagaggtggcctaatttggtggccaaagtaactggtttactttgagtgtaccagcttatggtgccattgatgaggaattaaagtaggtcaaaatttaattggagttggtattacttcgtaaagctagttttcaagaggaagaaaaccacacttactaatgttttctgtatctaatcaaatactcttcatatataattaagcctcatgttatcttttttttaaatcaaccttttgaacttcaactacagtctaaaagtcttgatggtaactatagtgtaattatctttttgtctcactggattttatagttagtggaaaatgcctttacaaaatgtatttaaaatagctgtcatctcatttgtaaattttgtcgtgtattgtgatatagtgaaccttattgtccttatgaaatggtagctttgtgaaatacattcaccaaaaatcaaaatttgaacatctttatgattccttaccagctgaagccagatagacaggtattaattgagctgatgccccacttgagtttatagactgtttgataactgcctgtcctccaaattgtgtatgtatatgttacgatggtttaattcttgagtcagggccagcacgcatttatattttctaccaattaccttgatagaaatatcttagaaattgctgacctggaacggttgtgagaagactcctggcttctttcttgcctcacttaacaaatattttaaggtcaaagcaatatctgtgcacggctttccttttgctcctccagacaagtgaggctgttggtatagtcctcttcaccctctgcatgtagcttcaccctagatcagacttttgtctcttgggtcccagatggcacaggagcactgcatgcttgttttctagagcccagccagtcatgggtgctagcctagtctccacacaccagcaagtagaacccaagtgtattgtataaatatttcctgagtaccagtaagagaatgcattcttttctcatctaggccaggaatgttgaaaatgctcagccttacatagaaactcctagattttcactaacgcatttcacaaaagtaaataagtatttcatataattcagaggatgtttaaattgtcagcattttaataaatacttgcattata

SEQ ID NO: 431020 - DNA, 2894 bp, Homo sapiens
  misc_feature (2240)..(2240): n is a, c, g, or t
  misc_feature (2320)..(2320): n is a, c, g, or t
ggaaggagctagacggcggtcgggtaggtgacggcttggttggggtcgctgcgaggggactactaggagcgccgaggcgtgagtcgtagcctgtggcttggggtcgggagtgcaggaggcgaaaatgtttgccattcttttgaaagtctggcctgggtgtgggagttcggtcatcgaacacttactgagagccagatacctgccaggcactgccctgggctccagggacacatcagtcaacgaacggaagggccctgctctcaagcagtgcgaaaagcagattataaacaagtcaacaaacgggattatctaaggtggtagttctctactcacatcttttaatcttgaagactagaaaatataactggatctgccacttgtttggaaaatatctctaccaagcaataaattacccgctgtgcttttgttgtagtgtagaagtttttgagttctccaaatctaaacaagattttgtcccattttcccatgaagctacattgttgcttattcactttagtggcaagtattattgtgccagctgcttttgttttggaagatgtggacttcgaccaaatggtttcactggaagcaaatcgtagttcttacaatgcatcctttccctcaagctttgaactctcagcaagttcccactcggatgatgacgtcatcatagccaaagagggaactagcgtttcaattgagtgtcttctcacagccagtcactatgaagatgtccattggcacaattcaaaaggacagcaactggatggcagaagcagaggtggaaagtggttggtttctgataacttcctaaacatcaccaatgtagcttttgatgaccgtgggctctatacctgtttcgtcacctctccaattcgtgcctcctactctgtcaccctacgtgttatcttcacctcgggagacatgagtgtctattacatgattgtttgcctgattgcctttacaatcacactcatcttgaatgtcacacggctgtgcatgatgagcagccatcttcgcaagactgagaaggccatcaatgagttctttagaactgaaggggctgagaaacttcagaaggcctttgagattgcaaaacgtatccccatcattacctcagccaaaactctggagctcgccaaagtcacacaatttaagaccatggagtttgctcgttatattgaagaactggcaagaagtgtccctcttccacctcttattctaaactgtcgagcctttgttgaggagatgtttgaggctgtgcgagtggatgaccctgatgacctgggtgaaagaattaaagagagacctgccttgaatgctcaaggtggcatctatgtcattaacccagagatgggacggagtaattcaccaggaggagattcagatgatggctctctgaatgaacaaggccaggaaatagcagttcaggtttctgtccaccttcagtcagaaaccaaaagtattgatacagagtctcaaggcagcagtcatttcagtccacctgatgatataggatctgcagaatctaactgtaactacaaagatggggcatatgaaaactgtcagctgtaacctacaatgctgtaacccagtacctacaaaatcagctcgctctcagaaaaggaacctgtttcttagaagaagtaacatttttgccaaaagatgactggggttttccgtttgttaatattaagcacatcagaacgtgaattgccaaagtcttcattagaaggcagcatttttcctctctgatacttttcagtcattttccttagagctttattaaattatgcatgctaagatttaaaggagccccagataaacatgatggggaaaagcactgaactaagagtcccatggtttctcttctggtcacagttcttccattggttggatctgatacttatcttgggacttcagtttttccgtcaataagatgagggattaggtgagatctgaagttgtttctagctctatagcttcttaacccatcacctttaaattaccagaatcttcactcatctctaagtaaacctttcccgggacttttactcgcttcttttggaaaggattaagctgagatctaaatttccacaccaatgtcataatgcacagaggtttttgaaaaacatctgagtgtttttcagatgttttgccatgtggagcatataatgatatgtgcaagattgaatcttttcaatgtagcacatgtctgtagggttatacagatgtcaganagctaactgctctgtaaactactttccatgagtaaattggtccttggtgggggtgtatcatatttttaacttactgaganatcattttagttcattgaggttggcagggattgcctaactgatcttccaaagtgagcagtttatttctaaggtataacgtctttgatgcttttagaataagaacagtgtcaaatcatctgtcttctggaaaatcatggattttcatatttctgttaacagaatttctcaggctttccctttttaaaagtattggactctacaaataggttctatatttgggatctcatcctaggagaaaacccaaaactggattcctcttaagacctctgtcaaccctcctgccctttgtggtcttaggtatggtgctataggttgcatgcgtctttatcttgtttgtttggttaatattttgttgttgaggtttttatttttgtttacttcagatacgtaattctgagctatggctgcttttgtagcctttccgagaagcactaacctgaaataagattagataattgtgagggtgtgttactatattaaaatacacacacaactgatctagacatcaagaggaagaaaaatgatggatgatgccacctgcttcaactgtatataataaacacttatgatgac

SEQ ID NO: 431021 - DNA, 3354 bp, Homo sapiens
  misc_feature (2240)..(2240): n is a, c, g, or t
  misc_feature (2320)..(2320): n is a, c, g, or t
ggaaggagctagacggcggtcgggtaggtgacggcttggttggggtcgctgcgaggggactactaggagcgccgaggcgtgagtcgtagcctgtggcttggggtcgggagtgcaggaggcgaaaatgtttgccattcttttgaaagtctggcctgggtgtgggagttcggtcatcgaacacttactgagagccagatacctgccaggcactgccctgggctccagggacacatcagtcaacgaacggaagggccctgctctcaagcagtgcgaaaagcagattataaacaagtcaacaaacgggattatctaaggtggtagttctctactcacatcttttaatcttgaagactagaaaatataactggatctgccacttgtttggaaaatatctctaccaagcaataaattacccgctgtgcttttgttgtagtgtagaagtttttgagttctccaaatctaaacaagattttgtcccattttcccatgaagctacattgttgcttattcactttagtggcaagtattattgtgccagctgcttttgttttggaagatgtggacttcgaccaaatggtttcactggaagcaaatcgtagttcttacaatgcatcctttccctcaagctttgaactctcagcaagttcccactcggatgatgacgtcatcatagccaaagagggaactagcgtttcaattgagtgtcttctcacagccagtcactatgaagatgtccattggcacaattcaaaaggacagcaactggatggcagaagcagaggtggaaagtggttggtttctgataacttcctaaacatcaccaatgtagcttttgatgaccgtgggctctatacctgtttcgtcacctctccaattcgtgcctcctactctgtcaccctacgtgttatcttcacctcgggagacatgagtgtctattacatgattgtttgcctgattgcctttacaatcacactcatcttgaatgtcacacggctgtgcatgatgagcagccatcttcgcaagactgagaaggccatcaatgagttctttagaactgaaggggctgagaaacttcagaaggcctttgagattgcaaaacgtatccccatcattacctcagccaaaactctggagctcgccaaagtcacacaatttaagaccatggagtttgctcgttatattgaagaactggcaagaagtgtccctcttccacctcttattctaaactgtcgagcctttgttgaggagatgtttgaggctgtgcgagtggatgaccctgatgacctgggtgaaagaattaaagagagacctgccttgaatgctcaaggtggcatctatgtcattaacccagagatgggacggagtaattcaccaggaggagattcagatgatggctctctgaatgaacaaggccaggaaatagcagttcaggtttctgtccaccttcagtcagaaaccaaaagtattgatacagagtctcaaggcagcagtcatttcagtccacctgatgatataggatctgcagaatctaactgtaactacaaagatggggcatatgaaaactgtcagctgtaacctacaatgctgtaacccagtacctacaaaatcagctcgctctcagaaaaggaacctgtttcttagaagaagtaacatttttgccaaaagatgactggggttttccgtttgttaatattaagcacatcagaacgtgaattgccaaagtcttcattagaaggcagcatttttcctctctgatacttttcagtcattttccttagagctttattaaattatgcatgctaagatttaaaggagccccagataaacatgatggggaaaagcactgaactaagagtcccatggtttctcttctggtcacagttcttccattggttggatctgatacttatcttgggacttcagtttttccgtcaataagatgagggattaggtgagatctgaagttgtttctagctctatagcttcttaacccatcacctttaaattaccagaatcttcactcatctctaagtaaacctttcccgggacttttactcgcttcttttggaaaggattaagctgagatctaaatttccacaccaatgtcataatgcacagaggtttttgaaaaacatctgagtgtttttcagatgttttgccatgtggagcatataatgatatgtgcaagattgaatcttttcaatgtagcacatgtctgtagggttatacagatgtcaganagctaactgctctgtaaactactttccatgagtaaattggtccttggtgggggtgtatcatatttttaacttactgaganatcattttagttcattgaggttggcagggattgcctaactgatcttccaaagtgagcagtttatttctaaggtataacgtctttgatgcttttagaataagaacagtgtcaaatcatctgtcttctggaaaatcatggattttcatatttctgttaacagaatttctcaggctttccctttttaaaagtattggactctacaaataggttctatatttgggatctcatcctaggagaaaacccaaaactggattcctcttaagacctctgtcaaccctcctgccctttgtggtcttaggtatggtgctataggttgcatgcgtctttatcttgtttgtttggttaatattttgttgttgaggtttttatttttgtttacttcagatacgtaattctgagctatggctgcttttgtagcctttccgagaagcactaacctgaaataagattagataattgtgagggtgtgttactatattaaaatacacacacaactgatctagacatcaagaggaagaaaaatgatggatgatgccacctgcttcaactgtatataataaacacttatgatgacatttcttgcctggctgagatctgatataatggaattgtaaatactcttcagaacaatttcttcagctacaggaagcgtggtgccatataattttaagaacttggcagtggagctccatttggggcttcacgtttcttcatatgacttctgattattgaagcattacttcagctagaggctcctgagggaaatgttcagaggaggttttatcaggattttaatttaaggtttcaaacaggggaagacaggaaattcaaagcgtgacgggataaaactcatgcctccctttgtccaggcttatcagaagtaatacatctgctctgaatagcatgaatgaatcaatgtgcagttttatcagatggcatcatggataaagatgataatgctgccttttctgtctctcaggctgtttccatggaaacctctagagccaaataaaagctaaccaatcatttagcca

SEQ ID NO: 431022 - DNA, 5310 bp, Homo sapiens
  misc_feature (2240)..(2240): n is a, c, g, or t
  misc_feature (2320)..(2320): n is a, c, g, or t
ggaaggagctagacggcggtcgggtaggtgacggcttggttggggtcgctgcgaggggactactaggagcgccgaggcgtgagtcgtagcctgtggcttggggtcgggagtgcaggaggcgaaaatgtttgccattcttttgaaagtctggcctgggtgtgggagttcggtcatcgaacacttactgagagccagatacctgccaggcactgccctgggctccagggacacatcagtcaacgaacggaagggccctgctctcaagcagtgcgaaaagcagattataaacaagtcaacaaacgggattatctaaggtggtagttctctactcacatcttttaatcttgaagactagaaaatataactggatctgccacttgtttggaaaatatctctaccaagcaataaattacccgctgtgcttttgttgtagtgtagaagtttttgagttctccaaatctaaacaagattttgtcccattttcccatgaagctacattgttgcttattcactttagtggcaagtattattgtgccagctgcttttgttttggaagatgtggacttcgaccaaatggtttcactggaagcaaatcgtagttcttacaatgcatcctttccctcaagctttgaactctcagcaagttcccactcggatgatgacgtcatcatagccaaagagggaactagcgtttcaattgagtgtcttctcacagccagtcactatgaagatgtccattggcacaattcaaaaggacagcaactggatggcagaagcagaggtggaaagtggttggtttctgataacttcctaaacatcaccaatgtagcttttgatgaccgtgggctctatacctgtttcgtcacctctccaattcgtgcctcctactctgtcaccctacgtgttatcttcacctcgggagacatgagtgtctattacatgattgtttgcctgattgcctttacaatcacactcatcttgaatgtcacacggctgtgcatgatgagcagccatcttcgcaagactgagaaggccatcaatgagttctttagaactgaaggggctgagaaacttcagaaggcctttgagattgcaaaacgtatccccatcattacctcagccaaaactctggagctcgccaaagtcacacaatttaagaccatggagtttgctcgttatattgaagaactggcaagaagtgtccctcttccacctcttattctaaactgtcgagcctttgttgaggagatgtttgaggctgtgcgagtggatgaccctgatgacctgggtgaaagaattaaagagagacctgccttgaatgctcaaggtggcatctatgtcattaacccagagatgggacggagtaattcaccaggaggagattcagatgatggctctctgaatgaacaaggccaggaaatagcagttcaggtttctgtccaccttcagtcagaaaccaaaagtattgatacagagtctcaaggcagcagtcatttcagtccacctgatgatataggatctgcagaatctaactgtaactacaaagatggggcatatgaaaactgtcagctgtaacctacaatgctgtaacccagtacctacaaaatcagctcgctctcagaaaaggaacctgtttcttagaagaagtaacatttttgccaaaagatgactggggttttccgtttgttaatattaagcacatcagaacgtgaattgccaaagtcttcattagaaggcagcatttttcctctctgatacttttcagtcattttccttagagctttattaaattatgcatgctaagatttaaaggagccccagataaacatgatggggaaaagcactgaactaagagtcccatggtttctcttctggtcacagttcttccattggttggatctgatacttatcttgggacttcagtttttccgtcaataagatgagggattaggtgagatctgaagttgtttctagctctatagcttcttaacccatcacctttaaattaccagaatcttcactcatctctaagtaaacctttcccgggacttttactcgcttcttttggaaaggattaagctgagatctaaatttccacaccaatgtcataatgcacagaggtttttgaaaaacatctgagtgtttttcagatgttttgccatgtggagcatataatgatatgtgcaagattgaatcttttcaatgtagcacatgtctgtagggttatacagatgtcaganagctaactgctctgtaaactactttccatgagtaaattggtccttggtgggggtgtatcatatttttaacttactgaganatcattttagttcattgaggttggcagggattgcctaactgatcttccaaagtgagcagtttatttctaaggtataacgtctttgatgcttttagaataagaacagtgtcaaatcatctgtcttctggaaaatcatggattttcatatttctgttaacagaatttctcaggctttccctttttaaaagtattggactctacaaataggttctatatttgggatctcatcctaggagaaaacccaaaactggattcctcttaagacctctgtcaaccctcctgccctttgtggtcttaggtatggtgctataggttgcatgcgtctttatcttgtttgtttggttaatattttgttgttgaggtttttatttttgtttacttcagatacgtaattctgagctatggctgcttttgtagcctttccgagaagcactaacctgaaataagattagataattgtgagggtgtgttactatattaaaatacacacacaactgatctagacatcaagaggaagaaaaatgatggatgatgccacctgcttcaactgtatataataaacacttatgatgacatttcttgcctggctgagatctgatataatggaattgtaaatactcttcagaacaatttcttcagctacaggaagcgtggtgccatataattttaagaacttggcagtggagctccatttggggcttcacgtttcttcatatgacttctgattattgaagcattacttcagctagaggctcctgagggaaatgttcagaggaggttttatcaggattttaatttaaggtttcaaacaggggaagacaggaaattcaaagcgtgacgggataaaactcatgcctccctttgtccaggcttatcagaagtaatacatctgctctgaatagcatgaatgaatcaatgtgcagttttatcagatggcatcatggataaagatgataatgctgccttttctgtctctcaggctgtttccatggaaacctctagagccaaataaaagctaaccaatcatttagccaaagcttgccttggctcatagactggtatttctttaaggaaaattgtttttatatatttgactataagagcaaaggctcttgaacatatcctagattatggaacactttttcccttcccttttctctggaaaaattaaattttttttctgtccactgagactggagtgcagtggcaagatcatagctcactgcagcctccaactcctggggtcaagcgatcgtcctgcttcagcctcccaagcagctaggactacaggtgtgcaccacctttcctggctaatttttttttattttttgtagagatgggggtctcactttgttgcccaggctgaccttgtacttgtggcttcaaatgatcctcctgccttacctcccaaagtgttgagattacaggcatgagccactgtgcctggccaaaaaacattttaaatcccttgtctgggggtcagtcctctaaacatccctcagatttcagatagtactttcaaccctgtcctaacatagcaggtttgcagtaatcttttagaatatagcttgtcaaattagagaatggttttaccccacatgttctcataggagacattattatttagaaccctaaggtagacatgtttaaaatcaaagtcctaagaaacagaactttggaaaaatggaggaaatgtttttaaagtctgtaagtttgcacaatactgtatagtaactaaatgcatgctactccgttgtatcctagttattttagaaacagaggtggcctaatttggtggccaaagtaactggtttactttgagtgtaccagcttatggtgccattgatgaggaattaaagtaggtcaaaatttaattggagttggtattacttcgtaaagctagttttcaagaggaagaaaaccacacttactaatgttttctgtatctaatcaaatactcttcatatataattaagcctcatgttatcttttttttaaatcaaccttttgaacttcaactacagtctaaaagtcttgatggtaactatagtgtaattatctttttgtctcactggattttatagttagtggaaaatgcctttacaaaatgtatttaaaatagctgtcatctcatttgtaaattttgtcgtgtattgtgatatagtgaaccttattgtccttatgaaatggtagctttgtgaaatacattcaccaaaaatcaaaatttgaacatctttatgattccttaccagctgaagccagatagacaggtattaattgagctgatgccccacttgagtttatagactgtttgataactgcctgtcctccaaattgtgtatgtatatgttacgatggtttaattcttgagtcagggccagcacgcatttatattttctaccaattaccttgatagaaatatcttagaaattgctgacctggaacggttgtgagaagactcctggcttctttcttgcctcacttaacaaatattttaaggtcaaagcaatatctgtgcacggctttccttttgctcctccagacaagtgaggctgttggtatagtcctcttcaccctctgcatgtagcttcaccctagatcagacttttgtctcttgggtcccagatggcacaggagcactgcatgcttgttttctagagcccagccagtcatgggtgctagcctagtctccacacaccagcaagtagaacccaagtgtattgtataaatatttcctgagtaccagtaagagaatgcattcttttctcatctaggccaggaatgttgaaaatgctcagccttacatagaaactcctagattttcactaacgcatttcacaaaagtaaataagtatttcatataattcagaggatgtttaaattgtcagcattttaataaatacttgcattataattttgtctcttttttaaagaaagtcatacttgaatataatttattaaacgttcaatggagtatatagtctatttga

SEQ ID NO: 431023 - DNA, 4337 bp, Homo sapiens
  misc_feature (2240)..(2240): n is a, c, g, or t
  misc_feature (2320)..(2320): n is a, c, g, or t
ggaaggagctagacggcggtcgggtaggtgacggcttggttggggtcgctgcgaggggactactaggagcgccgaggcgtgagtcgtagcctgtggcttggggtcgggagtgcaggaggcgaaaatgtttgccattcttttgaaagtctggcctgggtgtgggagttcggtcatcgaacacttactgagagccagatacctgccaggcactgccctgggctccagggacacatcagtcaacgaacggaagggccctgctctcaagcagtgcgaaaagcagattataaacaagtcaacaaacgggattatctaaggtggtagttctctactcacatcttttaatcttgaagactagaaaatataactggatctgccacttgtttggaaaatatctctaccaagcaataaattacccgctgtgcttttgttgtagtgtagaagtttttgagttctccaaatctaaacaagattttgtcccattttcccatgaagctacattgttgcttattcactttagtggcaagtattattgtgccagctgcttttgttttggaagatgtggacttcgaccaaatggtttcactggaagcaaatcgtagttcttacaatgcatcctttccctcaagctttgaactctcagcaagttcccactcggatgatgacgtcatcatagccaaagagggaactagcgtttcaattgagtgtcttctcacagccagtcactatgaagatgtccattggcacaattcaaaaggacagcaactggatggcagaagcagaggtggaaagtggttggtttctgataacttcctaaacatcaccaatgtagcttttgatgaccgtgggctctatacctgtttcgtcacctctccaattcgtgcctcctactctgtcaccctacgtgttatcttcacctcgggagacatgagtgtctattacatgattgtttgcctgattgcctttacaatcacactcatcttgaatgtcacacggctgtgcatgatgagcagccatcttcgcaagactgagaaggccatcaatgagttctttagaactgaaggggctgagaaacttcagaaggcctttgagattgcaaaacgtatccccatcattacctcagccaaaactctggagctcgccaaagtcacacaatttaagaccatggagtttgctcgttatattgaagaactggcaagaagtgtccctcttccacctcttattctaaactgtcgagcctttgttgaggagatgtttgaggctgtgcgagtggatgaccctgatgacctgggtgaaagaattaaagagagacctgccttgaatgctcaaggtggcatctatgtcattaacccagagatgggacggagtaattcaccaggaggagattcagatgatggctctctgaatgaacaaggccaggaaatagcagttcaggtttctgtccaccttcagtcagaaaccaaaagtattgatacagagtctcaaggcagcagtcatttcagtccacctgatgatataggatctgcagaatctaactgtaactacaaagatggggcatatgaaaactgtcagctgtaacctacaatgctgtaacccagtacctacaaaatcagctcgctctcagaaaaggaacctgtttcttagaagaagtaacatttttgccaaaagatgactggggttttccgtttgttaatattaagcacatcagaacgtgaattgccaaagtcttcattagaaggcagcatttttcctctctgatacttttcagtcattttccttagagctttattaaattatgcatgctaagatttaaaggagccccagataaacatgatggggaaaagcactgaactaagagtcccatggtttctcttctggtcacagttcttccattggttggatctgatacttatcttgggacttcagtttttccgtcaataagatgagggattaggtgagatctgaagttgtttctagctctatagcttcttaacccatcacctttaaattaccagaatcttcactcatctctaagtaaacctttcccgggacttttactcgcttcttttggaaaggattaagctgagatctaaatttccacaccaatgtcataatgcacagaggtttttgaaaaacatctgagtgtttttcagatgttttgccatgtggagcatataatgatatgtgcaagattgaatcttttcaatgtagcacatgtctgtagggttatacagatgtcaganagctaactgctctgtaaactactttccatgagtaaattggtccttggtgggggtgtatcatatttttaacttactgaganatcattttagttcattgaggttggcagggattgcctaactgatcttccaaagtgagcagtttatttctaaggtataacgtctttgatgcttttagaataagaacagtgtcaaatcatctgtcttctggaaaatcatggattttcatatttctgttaacagaatttctcaggctttccctttttaaaagtattggactctacaaataggttctatatttgggatctcatcctaggagaaaacccaaaactggattcctcttaagacctctgtcaaccctcctgccctttgtggtcttaggtatggtgctataggttgcatgcgtctttatcttgtttgtttggttaatattttgttgttgaggtttttatttttgtttacttcagatacgtaattctgagctatggctgcttttgtagcctttccgagaagcactaacctgaaataagattagataattgtgagggtgtgttactatattaaaatacacacacaactgatctagacatcaagaggaagaaaaatgatggatgatgccacctgcttcaactgtatataataaacacttatgatgacatttcttgcctggctgagatctgatataatggaattgtaaatactcttcagaacaatttcttcagctacaggaagcgtggtgccatataattttaagaacttggcagtggagctccatttggggcttcacgtttcttcatatgacttctgattattgaagcattacttcagctagaggctcctgagggaaatgttcagaggaggttttatcaggattttaatttaaggtttcaaacaggggaagacaggaaattcaaagcgtgacgggataaaactcatgcctccctttgtccaggcttatcagaagtaatacatctgctctgaatagcatgaatgaatcaatgtgcagttttatcagatggcatcatggataaagatgataatgctgccttttctgtctctcaggctgtttccatggaaacctctagagccaaataaaagctaaccaatcatttagccaaagcttgccttggctcatagactggtatttctttaaggaaaattgtttttatatatttgactataagagcaaaggctcttgaacatatcctagattatggaacactttttcccttcccttttctctggaaaaattaaattttttttctgtccactgagactggagtgcagtggcaagatcatagctcactgcagcctccaactcctggggtcaagcgatcgtcctgcttcagcctcccaagcagctaggactacaggtgtgcaccacctttcctggctaatttttttttattttttgtagagatgggggtctcactttgttgcccaggctgaccttgtacttgtggcttcaaatgatcctcctgccttacctcccaaagtgttgagattacaggcatgagccactgtgcctggccaaaaaacattttaaatcccttgtctgggggtcagtcctctaaacatccctcagatttcagatagtactttcaaccctgtcctaacatagcaggtttgcagtaatcttttagaatatagcttgtcaaattagagaatggttttaccccacatgttctcataggagacattattatttagaaccctaaggtagacatgtttaaaatcaaagtcctaagaaacagaactttggaaaaatggaggaaatgtttttaaagtctgtaagtttgcacaatactgtatagtaactaaatgcatgctactccgttgtatcctagttattttagaaacagaggtggcctaatttggtggccaaagtaactggtttactttgagtgtaccagcttatggtgccattgatgaggaattaaagtaggtcaaaatttaattggagttggtattacttcgtaaagctagttttcaagaggaagaaaaccacacttactaatgttttctgtatctaatcaaatactcttcatatataattaagcctcatgttatcttttttttaaatcaaccttttgaacttca
